United States Patent Application Publication US 2019/0348154 A1 - sequence listing, part 78

SEQ ID NO: 294928 - DNA, 7077 bp, Proteus mirabilis
atgacgacgttaaataatgtaccttccccacgccccagttctattacgagaaaagtcgcttggcttaatatttttatacaattagcatttcctattgtgacaaccatgcctacgcagacttttgccaatgagaataattttaaaaaacataatattagcgatataaatcaacaaaatacttatcaagtcaaagcgggtgataccccagaatctatcgcaaaaaaatttaatataaaattatttaaattgattgaagctaatccacaacatgtatcgttaacgggtgagctaaaaataaatgatggaactattcttaatattcctaatgaatatttattaaaaaaaaagtggctcaataatcaagatgaggcaatcccctcaacagagggcgaagagctcgctaaaattattgttgataattcatttttactcaataaagatatcgatgtaacacaatatgcaattagccaaatctccagtaaatccaatcagaaaatagaacaatggcttaatcaatttgggcatgcgcgagtttcactttcagcagataaaaatctcaccttaaaaaatagctcagcggaattgttaattccattatatgaacaaaaagaaaagctgatctttgctcaaactaactatcatcgcaaagatcttcgtagccaatttaattatggtattggttatcgctattttactgaaaaatttatggtcggcattaatggcttttatgatcatgatttaacgcatcatcataatcgtttgggaattggcgccgaaatttggcgagactatttcaaattaagttctaaccattatcaccgtctatcaagttggcgagcctctaataatatcttagattatagtgaacgccctgcgaatggttgggacattcgaacagaaggctattttccagcttatccacaattaggcactaaattaatctttgaacaatactacggtaaagaagttggtctatttggcaaagataaacgggacaaaaatccacatacctacacattagggattaattatactccgataccattagtcacattaaatgccgagcgtcgtattggcttacatgatcgtgctgataataacttgaatatcaacttgtcctaccgcataggagaatcactcgcttcacaacttaatcctgataatgtcaaagcaatacgtacattagcaggaagtcgttatgactttgttaatcgtaataacgatatgattttagaatataaaaaggaaactttagttttcctttctatggttgattcaataaatggttatgctaaagaggagcgcgatttacaagttcaagtaaaaacaaaatatccgttagccaatattgaatggtccgcaagtaagttaaatgcccaaggcgggcaaataaaacatcatggtggaactcactacaccgtgattttgcctcaatatcaaattggtgcaattgagaaaaatagctatatcattagtgctgttgccattgatacccatggcaatcgttcagcgcctgttcaaacaacggttattgtagataaatcgttaatcaatacgcgtaatagcctattttcacctaaacagagccaactattcgctaacggtgaagcaacccaaaagttaatattatccatcgttgataatgataatttacccgttgatattgatagtaaagaaattactttacagcaacagtctgatacagaaaaaggcaatagccgtatttctactttctctcgtttagctgctgggaaatatcaattaacggttacagcaggaagcataccggaaaaattaaccctaacccccgtattccgtgataataccttcaactcagcaaccgtgacacttattgccgataatcaaactgcccatattgcaaaaggcaacctaacggttacaaaagataacgcgccagccgacggtaaaagtcaaaataaaatcaaagtacgagtcactgatagcaaccacaatccattggctcattatccagtcaactttactgccagtaatggtgctaatgtcattagctcaagaaaaacggatgaacaaggtgagattattgcttcagtgactaatactcaagtagggagttcgcagattggtgtacaagtaaaagggataacctattcgactgaagtccattttagtgtggataatgatagcgcctatattccacaacaaaacttcacgatcacaccaccactttctctagccgatggtaaaacagaaaaaaccatttcattacaagttgttgataagcaaaataatccgatacccgctactcatgtgacattatcggcagataaccaagcacaattaaaacaaaccatattaaccacagacgagcaaggtaaggcgaccaccactatgataagtaaagtcgccggtacggtcaccgtgagggccaaaataaacgacaagatgactcacgcgacaacccaatttatcgccaaccaagctaagggggttattgtctccataaccgcatcctctacaactcatgtcgcagatggtcaaacccctgtcttccttactgcattagtacaagatcagtttggtaagccgctccctcatgcacaaattagctgggaaactgagcacgataaaagtattgttaacattgaacataccacaatgactaatgagcaagggatcaccaccaacaagttaaccagtacacaagcactcagtgtgcgggtaactgcgcgtataaataacaatgcctttactgctgagccaattacttttattgctaatgggcaacaagctttgattagtgaattattggttaataaaaatcagattgttgcagataagcaagatcccgcagaacttactgcaatagtaacagataaactgggtaatcaacttcctgatactattgttaattggcaagggagtgctggtactcaatttgctcagcaacaaactaagaccgatgctcaaggtatcgccaaaaatacgctaacaacatcacaatcaggtatcacaaccatcaccgcgcgattaaataatggtcaacatgcacaaactaacttagttgccgttgcagatctcaaaagtgccactctcacattaacgacattaaataataagcaatctgccatagcagataaccaagatagcattaccgtagtagcaaacttaactgatgcttatcataacccattgaaaaatatccctgtctattggcaatcaagtattaatcatattgatgaaactactactcaaacagatgaaaaaggcagaacgcaagttgtcatttcaggaaccaaagcacagccaacaacaattaccgcctatttatcaaataaagagaaaaaaagcattcaggtaacctttgttgcgggagcgccagtgcaacaaaatagttatttgacgattgaaccacaatctatcattgccgatggtaatgcctttgctgtgggtaaaatagacctgcgtgataaatttgataatccggtaataggtcgtagtaacgatattgcgttaattggggataacagcaccatccaattcagtaaaatcacagaaacggctaacggcaattatcaagctcatattagaggtacaaaagcgggactcagtcaaattaccgccactattgatagtattacggtaacgcaatctttaggatttttaacagataataaaacagtcaagatccactccgttaaggttatggcaccttataccgtaacagcgaatggtaaagacaaagtcattattcaagcacaaatcaccgataaacataacaatccagtatcaaaaggcgttactgtcggttggataagtgatctcggtaagcttgcagcaccattaagcatgaccaataagcaaggaatagctgaaattaccctctcaagtactcaggcaggaaaagcgaaagtaacggcagtgctcaataaccaacaatctgtcaatgctgatcacattgtcacctttacggaaggtgatatttcggcctctctttctactgttgccatattccctgacactattgtagcaggggcaaataaagcgaccgtaacaataaccttaaaggataaagaaggtaatttattgcccaacttagccaataaaatcaccttaacgccgcagactaatttacaaacaacgattacgccctttaaagagaaacaaaaaggcatttatcaagcccaagtgagcgcattaaaaaccggaaaaacctcgttatcggctcacgttgctccattagcaataaaacaatccgtttctttaacggtgctccctaataacacaacagcaaaggtgaaaaactttactattagcaatatgcaaccacatgctggggagtctattacttataaagcctatttagttgataaccatgataatcctgtcggtatgggtgtacctgtcgcttggtcaacgaatgaaggtagtcaactcgaaacaccattaacttttacagatgataatggtgtagcaatagttggattatctcgacgctctgtcggtgttgccaaagccagcgcaatattagcaacaggtacttatatagcagatgatgttcactttttaacgggtcacattgatgaaacgatgtcagaactgtcgttgaacccgagtcaaatcattgctaatggcaaagataaggcattattgacatttgttattaaagataaaaatggaaatatcatccccaaccaacaagtaagcggattttctaaaaatccaaccatcaaatttagtcaagcacaacaaatatcaccgggacgctatgagattgaaataacaggaactcaatcgggcacagcacagattggtgttatggtaaatggcacccatttcaaaaaacaaaaaatattacaacttaatgccgatgtgacgacatggaaaatacgcgctgttgaggttgatagaacaaccataaccgcaggagataaaggtgttaactaccaagcaactgtcgttgatgccaataataatgtattacctaatgttattgtgtcatggaaattactcggatcagcagatgattatcattacagcacttatactaatgataaggggatagcaacgaatcgagtgactagtcatgtctcgggacgcttgaagatgagcgcttatcttgattctaataattataaatcaacacaagatattactgtaataccggctgaaatagatattcataaatcaacctttaatagtcatcgtcgttctataaatgctgataataaagatagtacgttattaagcgtaaaattaatggataaatacggtaataccattgatggtaagaatgttgagattaaaactatcagtggtaagcctaattttagtgacaatccattaaagtcagtgggcaatggtgaatatcaaacaaatgttacagcaaatacgatgtccgatattatcttaaccgctcaagctgaaacaataactatcgcagagccattgacgattaaagtggctatccctaagtctgaaattacctttgagaaacctatccaacaggaaatctacaaatcaactgtgattgatgcgttaagttataaaggtgtaccacaaaatatgcaggtaatatggtcaagctctgatcctactgttgcttccattgatacaacaagtgggcaaatctccatgaaaaaggctggtactacaattattaccttacaaaccttaggtaatgagcaatatccatcagctaaaaatagctatcctttagtgatagaaaaagcgccacccaaactgaaagtaacctctcctcacaccatacaatcgatctggaatgatggcattacccatcaaataacagcggaatttgataatccagaggttaaaaatacccccattcatttctctagtagcgataccttggtagccaccattgatagtaaaggtaacttaaccgccattaaaccaggaaaaacaaaaatagtaatacaaagtgatgctacagataaattcctagctgatagacaaactgtagactatcagcaagaaaaagctgcactaagttattattttaaaaagaattatattgtattaacacctgattctgctgcagataaattattgatggctcaaagccctacgccagatgtccccgttgaagcgaatgcaacttggtatagtagtcaacctaacatagttgaaatcaccccagatgggattatcaaaaaccttaatattgggcaaacaacattaacacttgaggtgaaaaataataattattttcaagatcatgagcaaagctataacgtcattatacaagcatcgcctcgcatcaaaattaactcatttgagtttctatctgcgggagagagcaaatcaaatacacatttggatgatttaacttggcaacctttatacacttcagacgatcagtttattgttaaatggtcttcatcagacacacctaaagcgattaacttcgagttatttgatgaaaacggcacttctatcgccttagaagaaagacaaaactatgcacctaaatataatatacatgacccagtaaaaattcaggtaccgaaacaatatctaaccagtccaaaacaattaacactagaagtcacaacctttgatagtaataatcagccttatgtcgatcctaaaaagtataaaattaatattgactattttcctgccaataacgcatataaaataatctctcttgattataattctaaatttatctatacagatacaggtacccttgcttcatcttgtcaaaatggttggtcaaccactacaacacatcttattttaacgccaagattagtatttaaaggtgagccgaaaaagttactttatcccatttatattactacggaattatatgatgtaacattaaatccatcggataaactcatcggacatattaatgagaaattaacttatccagataagattatatttagcgagcattctaaaaaaatagctgaaatatcgccgacatcagcacactacgcattagacgaagaatgtagaattaatgattctggtcatggtacgttaaaagcaaatataaccataggtaacagatccagttatcttaaaaaagaatttcattgggatggccaaatagggggatatttttaa

SEQ ID NO: 294929 - DNA, 831 bp, Proteus mirabilis
atgagtaatcctaaattgatccaactatctgatggcaacactatcccacaacttggacttggggtttggcaagcagataatgatcaagttattaaagcggtacatcatgctttcgacacaggttatcgtctgattgataccgccgctatttatcataacgaagaaggtgttggtaaggcattaaagcaaagcactattcctcgagacgaattatttattaccaccaaattatggaacaacgatcaatcccatgctcgtggtgcattacttgaaagccttgagcgattacaacttgattatgttgatctctatttaatgcattggccagtgccatctcgcgagctataccttgacgcttggaagcagatgattgtgttacaaaaagagggactggttaaaagtattggggtatgtaattttaaagaagagcaccttgagcgcattattacagaaacgggcgtttcccctgtcattaatcagattgaaattcacccattgatgcaacaagcttcattaagagcttggaataccacccataatattgtgacagaatcatggagtcctttagcacaaggtggcgaaggcgtgtttgatcaaccaattattcagaaactggcagaaaaataccaaaaaacaccggcacaaattgtgttacgttggcatttagatagtggcttggttgttattcctaaatcagttaccccttctcgtattgaagaaaacttccatatctttgatttcaaattagaaaaagaagaagttgctgaaataaaacaactagataaaggaaagcggttggggcctgatcctgatacttttgttgatatctag

SEQ ID NO: 294930 - DNA, 1158 bp, Proteus mirabilis
atgcaaaatttcacttattactcccccactcgaattcattttggtcaaggacaaattgcaaaattacgttctgaaattgggaaaaatgaaagaattttattaacttatggcggtggaagtattaagcgcaatgggatacttgatcaagtgcatgcggccttaccagggtatcaaattcatgagtttggcggtattgaacccaatccttcgtatgaaacgctaatgaaagctgttgcttacgctcgttatcacggtattactcatttactggctgtaggaggaggctctgttgttgatggaaccaaatttattgcggctgcaataccttatcaaggagagccttgggagattgtcactagccgaggtcaggcaattgaaaaagcactgccattaagctgtgtactaacccttccagcaactggatctgaaaccaattgtttttccgtgatcagtaaaaaacaaacgatggataaacaaagttttgctagcccacatgtttatcctcattgcgctattttagatccaactgcaacgttttctttaccaccaagacaaaccgctaatggcgttgttgacgcatttattcatattttagagcaatatctcacttatccggtaaatgcgcttgtacaagatgagtatgcagaaggcctattaaggatcttaatcgaagaaggaccgaaagccctcacctcaccacaagactacgatatccgtgctaatataatgtggacagcatcccaagcacttaatggtattcttggtgtcggtgtaccgcaagattgggcaacccatgcattaggtcatgaaattactgcattacacgggcttgatcacgcacaaaccctcgcgattgtcttacccgcgctattaaacgaaaaacgtcaggagaaatacgctaagttgatccaatatgcacaaaaagtgtgggggatccatcaaggctctgatgcatttaaaatcgatagcgccatcaatgagactcgtaaattctttgaacgcatgggactaaaaacacggctgtctgactttaatatcagtgaagcggatattccagccttagtgcaaaaactgcaacaacatggacaaaccgcactcggtgaacatcaggatatcaccttggaagtcagccagcgtatctatatggcagcactctaa

SEQ ID NO: 294931 - DNA, 783 bp, Proteus mirabilis
atgaaaagtcattatttaacattaaaccaagctcattgggataaacaagccgcaatgcaaaatcaatggtctaaacccgtggacgataaagaaattatcgaggcaaaaaaaggaaactggaaagtacatttaacgccgaatcccgttaaaaaggagtggttagcagatattaaaggtaaaaatatactctgcttagcttcagctggtgggcaacaagcacctattttagctgctgctggtggtattgtgaccgtttttgatttatctgaagggcaactgagtaaagatagtcaattggcacaaaaacatcagttagctttaactactcaacaaggggatatggctgatttatcggtattttctgatgaaagttttgatattgtttttcatccaatttcaaatctttatgtacctgatgttaatcctgtttggcaagaatgttatcgtgtattgagaaaaaacggagttcttatggcgagtttttataaccctgtagtttttgttgatgacagaaatcaggcattgcgtgcacaaggattaatgagaccgacttatcgtttgccttatagtgatcaaaattcattaccttcagatattttgcaagaaaaaattgcaaagggagacggacttgtatttggtcattcgttgacagatttgattggtgggcaattaagagcaggttttttattacaagattttgttgaagattttgctcctcaggctcgttttttaattgatagttatattccaacatttcttgcttcgaaagccattaaaatataa

SEQ ID NO: 294932 - DNA, 672 bp, Proteus mirabilis
atggatacattaaaagagataattcacgcgctactgcaacatgattatatggtgctagctgatccaaatattttgtggattatttatattgttctttttgttattattatgctggaaaatggggttctacctgccgcatttctacccggcgatacattattaattctctgtggtgcattaattgccaaagatgttttacatttcttgccaaccattattgtgttaggtactgccgcgagtattggtagctggcttggatttctgcaaggccgctggctaagtgatactaaagtggtcaaacgttggatggctcaattacccgaacaatatcaccataaagccaatgatcttttccatcgtcgaggcctgtacgcactattaattggccgttttatcggttttgtacgtacattactaccaactttggccggtttatctgaattacaacaacgtcgcttccaactatttaactggattagtggcttcttatgggtcggtcttattgtctcattaggttatatactgaacctgatcccttttattcaaaaacatgaaacattggtgatgaatattcttatgacattaccagtattactattaactgccggtttaattggctctattgtgatgtatattcgtcatcgtaaaagtagcaataacagcgccaaataa

SEQ ID NO: 294933 - DNA, 1194 bp, Proteus mirabilis
atgacgcaaaaaaaaccagaaacctcactgctattaagtggtcgatcaaaaaaatattcacaaggcgcagtaaaccctattatacagcgaacttcatcggttatttttgatacggttgcccaaaaacgtgaagccacccaaaaacgagctgaaggcgctctattttatgggcgaagaggtactaccacgcattttgcactacaagaggcactaaccgaactagaacaagggaccggttgcgcattatttccatcaggtgcagcggctattactcaatctattcttgcgtttattgaacaaggttgtcatatccttgtgactggttccgcttacgatcccacgcaaaatttttgtgatcagatattaagtaaattttctgtcaccacaacctattttgatcccttaatcggcactgaaattagtcagttattacgccctgaaacaaaaattgtttttctggaatcacccggctctattacgatggaagtacaagatttacaaggtattatcactgcggtaagacactataacccaaatattattataatgattgataatacgtgggcagcaggtttattacttaaacctcttactttaggtgctgatatttctatccaatcagcgaccaaatatattattggtcactcagatggtatgttaggttttgctgttgctaatcaacgttgttggccacaattacgtgaaaacacgtatttattaggccagtgcgcagatccggatacagcttatatggcagctcgtggtttaagaaccttagcagttagaatgaaacaacatgagcaaagtggattagaaattgcgcgttggttaaaacagcacccgctagtggataatgtctaccatccagcactctcttcttgtccggggcacacctattttcaacgtgattttactggaagtaatgggttgttctcttttagtctaaaaaagatcctcaccactgaggaattttcacgttttcttgataacttatccctgtttaaaatggccttttcatggggtggatttgaatctcttattttaggctatcatcccaatgatattaaagcgatgcgacaatatgacactcagcccactctcgcaggaaccttatttagagtacatatcggcttagaaaatattgatgatttaattgaagatctagagcaagcatttttacgtatttctaactaa

SEQ ID NO: 294934 - DNA, 1011 bp, Proteus mirabilis
atgcgtaatttgacagcttctattatattggcaatcggtctgacaggctctgcttttgcggatacgacaccggctaagcaaactgagcaacctgcgactacggccacttcttcaaccgcttctacacagggaacggcgactacaacgattgcaccaacagcagaaaatacggcaacgccaacgggggaagcagccaaaacggcaacttttgaaacaccagtggcagaagagaatacatcgacgagtacaggagatgctgcacagacagctctagagccagaaaatgccacgcaaggtgcgacacctgaaatcgtcactggagggggatttgctgaagatctctctgttatgggaatgtatcgcaatgcagatctcgtggtaaaaagtgtcatgatcggtttgctactcgcctctattgtcacttgggcgctgttctttgctaaaggtagctacttattagcattacgtcgtcgtttaagaaatgaaagtgcgcaattagtagaagcgaaatccctcaaagaggcattagcgattagccaaaaatttggcaataaaagtgcgacagccgtcttttttaatgatgctgaattagagcgtacttactctcaagatagtcacgttgcatctggtattaaagagcgtgttgagatgcgcatggagcgtcgtgtcgccgctattattcgtgaattaggacgtggtaatggttatttagcgaccattggggcaatttctccttttatcggtttgtttggtacggtttgggggatcatgaatagctttattggtattgcgcattctcaaactaccaacttagcggtggttgcccccggtatcgcagaagcattattagcaaccgccatcggcttgattgcagctatccctgcggtcattatttacaatatttttgcacgtatgatttccggttatcgtggtgaaattggcgatattgcaacaggtgtagtgaccttagtcagtcgtgacttagatattgaaaacagcaaatcaaggtaa

SEQ ID NO: 294935 - DNA, 429 bp, Proteus mirabilis
atggcaatgaatcttggtaatgattcaggtgaagataatgaattgcatgatattaacgtcacaccttttattgatgtgatgttagtattgctgattatcttcatggtagcagcccccttagcgacggttgatattaaagtcaatttacctgcttcgagtgccaagcctcaacctcggccagaaaaacctgtttatttgacgattaaatcagataaacagatttttatcggtgaagagatggtaactcatgagacgatggccagtgtcttggattctatgacgcagtcgaataaagaaacgactatctttttccaagccgataaaacggtcgattatgaaactttaatgggggcaatggactcattaaggaaggcgggatacctcaaagtagggctagtggggatggaaaccgtatcatcgggtaactaa

SEQ ID NO: 294936 - DNA, 1125 bp, Proteus mirabilis
atggccttggggaataatgttttttcccaacatggtattaaccgacgcgattttatgaaattgtgcgcagcgttatcagctaccatgggattaagcggcaaagcagccgcgcaaatgtcacaagcaatgacatcacctgaacgtccacctgttatttggattggtgctcaagagtgtacaggttgtacggaatctttattacgtgcgactcacccaacacttgaaaaccttgttctggatgttatcgcacttgaatatcacgaagtgctctcttccgcttttggttatcaagcagaagaaaacaaacataatgcgatggagaaatacaaaggtaaatacgtccttgttgtcgacggttctatccctgacaaagatggcggtatttactgtatggtggcaggcaaacctattcttgagcatatcaaagaagccgctgaaggtgcggcggcaattattgctatcggttcttgttctgcatggggtggtgtgccagcttctggaggtaaccctactggcgctaaatcactggaagctattttaccgggtaaaacagttatcaatattccagggtgtccaccaaacccacataacttcttagctacagttgcacatattattacctttaattcattacctaagttagatagcaaaaacagaccgctatttgcatatgagcgtctaatacatgaaaactgtgaacgccgtcctcattttgatgcgggtcgttttgctaaagaatttggtgatgaaggacaccgccaaggctggtgtttataccatttaggttgtaaaggacctgaaacttacggtaactgcccaacattagaattttgcgatattggtggaggaatttggcctgttggtattggtcacccttgctatggctgtaatgaagagggtgtcggatttacgaaaggtattttccaacttgcgaatgtttatcagccaacaccaaaagcacaagtacccgatgttaacgccaaagaaggtggtggtgtttcttatggtgcagcaggcttattaggtgcagttgttggtgctgttgctggggtaagtgtgatggctgtgcgtcaattaggccgtgacaaaaataccacaggagcctcacaggaggataaacggtga

SEQ ID NO: 294937 - DNA, 1014 bp, Proteus mirabilis
gtgaataggcgtcatttctttaagctggcatcaggtggggttctccttgcgggaatggcacccactgcgagtcatgctgcggcgcagaaccgtcctccaattcctggggctctcggtatgctctatgactctacactctgtgtaggctgtcaagcatgtgtgacaaaatgtcaggaaattaatcatccggaacccatggagcgtggtgatacttatgctaatggtgatccgatctggtcaaacaatgacaaactaagtccttacacaaataacattattcaaatttggcgtgatggaacaggtgaaaataaagatcaactggaaaacggttatgcctttattaagaaacaatgtatgcattgcgttgatgctaactgtgtttctgtgtgtcctgtttcagcgttaaccaaagatccgaaaaccggtattgtgcattatcatgcagatatctgtacaggttgtcgttactgtatggtgggttgtccttataacattcctaaatacgattatgatgatcccttcggtaagctttataaatgtgaactatgtaaccaaaaaggggtagagcgcttagataaaggcttattacccggctgtgttgaggtttgtccaacaggtgctgtgatttttggtactcgtgaagagttgcttgaagaagcaaaacgccggttagcgaaaaaagcgggtgaagaatatcactatccacgccaaaccattaatggtggcgatacttatctacataagatcccagaatatcaagatcatatctatggtgagtttgaaggtggtggtacgcaggtgatggtactttccgcggtgccttttgaaaacctaggtatgccagaagtggctccattatcaacgggtgcgcgttctgaacatattcaacatacgctgtataaaggtatggttttaccaatagcagcgcttgcgggcattacttatttggttaaccgtaatagtaaaaaacaagagcaggaacaccataaggaggataacgatgtcgagtcatga

SEQ ID NO: 294938 - DNA, 1182 bp, Proteus mirabilis
atgtcgagtcatgatcctcgtccacttggcggtaagttatttactttagctgttagagtgtttttaccgcttgctgtgcttggttttattcttattggtaagcgtttggtattgggtcttggggatgtttccgatctaaatggcggttatccttggggtatttggatagcctttgacttacttatcggaacaggctttgcgtgtggtggttgggcactggcatgggctgtttatgtttgtaataaaggtgaatttcatcccttagtacgtcctgcattattagcgagcttgttcggctattcgttaggtggattatccatagcaatcgatattggtcgttactggaacatgcctcacttctttatgcctcaatactttaacgttaactccgtattgtttgaaacagcaacttgtatgaccatctacattatggtgatggcattagagtttttacctgcactactggaacgtttaggttggaaagtttcgttaagacgccttaataaagcgatgttctttattattggtctaggcgccttattgccaaccatgcaccaatcctccatgggatcattaatgatttcggcaggttggaaggtgcatcctctgtggcaatcttatgaaatgctaccgctgttctctttattaaccgcctttatcctcggtttcactattgttatttttgaaggttctttattaaaagcgagccgtactattaatgacgatgaaacaccgctatttaccaagttaactaaaatcatagaagtacttctgatcaccttcttggtattacgttggggtgaagtgatctggaacggtaagctgagttatatcgctaaaggggatatgttctcttggttattccttgcagaaagtgccttgttgtttattcctctggtattgatgcacctgaaaaataatcgtcgtagcccaagaatgttatttgtctgcgcattatttatgttagtgggtgcggcaatgtggcgtatgaactattcattagtcgcttataacccaggcaacggctatcactatttcccaacagcaagtgagttgttgatttctattggcttcgttgcattcgaagttactgcttacattcttattatccgtttactgccggtactaccagcacaaacagagtcaaatatacaattaaaaaaggctgaggttaaatcatga

SEQ ID NO: 294939 - DNA, 1704 bp, Proteus mirabilis
atgagccaacgcattactattgatcctattacccgtattgaagggcatttacgcgtcgactgtgaaatcgataacggaaaagtcgttaaagcttggtcttccggtactatgtggcgtggaatggaggagatcctaaaaggaagcgatcctcgtgatgcatggattattgtgcaacgcatttgtggtgtttgtacaacggttcacgcaatagcctcagtacgtgctgtagaagatgccttagggatggatattccggttaatgctcagtatatccgtaacttaattctggcttctcacattattcatgaccatatcgtccatttctatcagttgtctgcgatggattgggttgatattacggcagcattacaggcagatcctgaaaaagcctcagcgatgcttaaaggggtttctcaatggcaattgaactctgctgaagagttcagaaaagtgcagaagaaaattcaagatttggttgatagcggtcagttaggtattttcgctaatggttactggggtcactcagccatgaaattacctcctgaagttaacttgattgcggtagcccactatctacaagcattggaatgccagcgcgatgcaaaccgcattgttgccgtgttagggggtaaaacaccgcatattcaaaacttagcggtgggcggtgttgctaacccaattaaccttgatgcaccgaatgttctcaatttagaacgtttaatgtatgtaaaacactttattgataacttgggtgattttattgaacaagtttataaagtggatactgctatttttgctgcttattatccagagtggttaaaaatcggtaaaggggctaattactacttatctgtgcctgaattgcctattaatggcaataatactgagtttttactctcaggtggctatatgaaaggcgttgatttttctacttatcgtccaattaaagattggaaagatcaaaacctgaaagacggcatcgaagagagtggtaaacacgcatggtatgaagatgatgaaccattaaaaccatgggaaggtttaactcgtcctaaatacaccggttgggatgaaaataataaatactcatgggttaagtcacccacattttacggtaaacctgtagaagtaggtactttagcatggttagtgtgtggtttagcgggtaaacatgaaggcacagtaaaacactataacgaagttaatcagatctacaccaaattaaccggtcaaaccttggtgacagagcagttagagtcaacttggggacgcattattggtcgtaccgttcatgcttgtgtattacaagattcgcttaacttcttatggcaatcactggttgataatattggccgtggagatactgcttcctttattaaacctgagtttgagccgggtaaagagtatcgtggcgtcggttttgaagaggcttcgcgcggtatgctatctcactggatagtctttaaagatggcaaaatcacaaactatcaggcggttgttccttcaacatggaatgcgggtcctcgtaactttaatgatgaaccgggtccttatgagttatcactagtgggaacgccggtggctgatcctaacaaacctctggaagtggtaagaaccattcactctttcgacccatgtatggcttgtgctgtgcatatggttgatttaacaggtaaagaattaagtaaggtgaaggtattgtaa

SEQ ID NO: 294940 - DNA, 489 bp, Proteus mirabilis
atgcgtacacttgtcttaggtattggtaatttattactaagcgatgaaggcattggtgttcgtatcgtagaagcgctcgaagagcgcttctctttaccggagaacgtcgatgttattgatggtggcacatcaggcatggaaattttgcaagatattgccgcaagagatttattgattgttgctgatgcagtaagaagccagcacgagccgggcagtatctttgtattacatgatgatgatgtacctgcattatttacccagaaaatttcaccgcatcaactcgggctatcggatgtattaatggccttacgtatgaccgatgaatttcctcgcaaactgattttagtgggtattgaacctgcttcattagcgccaagtatgtcattgtcagatattggtcagcaatcgatggaaatagcacttgaacaagtggttaatattttgcgtgaacatgggatcaccgtaacccctaaagaggtaacagcatga

SEQ ID NO: 294941 - DNA, 495 bp, Proteus mirabilis
atgagtgaattaaattgggatatcacgggatacgatgaaccacctattgaattacttgaaagcagttttcgagagattgccaaaaaagagatgcaagcattgcctttttatagagaaaatattcccgtaaaagcagggggatttactttatttgaaaagcaatggattggaacaattttaacgccttggatgctagagcttattgtgttgcccgggccatcacaagagtggccaagacgtaaaattggtgagcgtatcgccttagcgcttccttgtggtcaggttaaatttgtcgttggtgaacttgctaatggtgctcaatatctggcttgttcattaatgtcgccacttgatcgccatttacaaggtgagcaagcggttgagttagcagaaaacagtgcaaaaatggctctttctcttcctgttcagacacaatccgtcacagaagttgatttaagtcggcgttccctttttcgtggtcagttaagatcataa

SEQ ID NO: 294942 - DNA, 1167 bp, Proteus mirabilis
atgtgtagcacttgcggttgtggtgaaggtaatgtcagcattgaaggcgtagcgcctcattcacacgatcaccaccatcactctcacgaccatgatcatcacgaccatggccatcaccatcacggtcatcaccatcatcatgggcatgatcatcatcatgaacacaatgctactccagcgaatactgttcataaatatattgataagtctgagcaaaagcataagcacaattacgaaactcatggtcagcctatcattattcatcatcaccattaccataatagtggcgatgttcatctccatttttatcatgatgcacagcaaaatgaagcccaagtgttccatgagcatcatcatgggaatgacgatcatcatgcacattctcatgaacatactcatagccatgaacatgaacatagccatgaacacgaagaacaatttagtccagttattgataatgacaacatgcattatgggcaaggggaagctggtactcatgctcccggaattagccaaaaacgaatgttaaaaattgagatggatgtactggataaaaataatcgaattgccgttcataatcgtgaacattttgcccagcaaaatgtattggcgctgaatttagtttcaagtcccggctccggtaaaacaacgttgctaactcaaacgttaaaacagctaacgcaacgtgtaccttgtgcggtgattgaaggtgatcagcaaacgacgaatgatgctgatcgaattcgtgaaaccggggttgctgctattcaagtcaatacgggtaaaggttgtcaccttgatgcacaaatggtgcatgatgctacccatcaattaggtttaaaagacaacagtattctctttattgaaaatgttggcaatctggtttgccctgctagttttgatctgggtgaaaaacataaagtggctatcctttcggtaacggaaggggaagataaaccattaaaatatccacatatgtttgccgctgcagatctgatgattatcaataaaattgatttagtgccacatcttaatatcgatgtgcaagcgtgtattgaatcagcgcgtcgcgtcaatcctaatattgagatcatcgcattatctgcgacaactggcgaaggtatggaagagtggttagcttggttggagagccgtttatgtgcttag

SEQ ID NO: 294943 - DNA, 267 bp, Proteus mirabilis
atgtgcttaggtgttcctgccaagatagttgaggtgggcgatgatgtccaccaactcgcttatgctgaagtcagtggcgtaaaacgtgccgtcaatatctctatggtttgtgagggtgacccgtcagagttattagataagtgggtgcttattcatgttggatttgccatgagtattcttgatgaacaagaagctcaagatactctggatgcattacaacatgtatatggtgttacccttgaagaggctgatgatgcaatacgttga

SEQ ID NO: 294944 - DNA, 1137 bp, Proteus mirabilis
atgcaatacgttgatgaatttcgtgatcccgaattggccaaagcattattagctcaaatacgtgaaactatttcacaatggcctcatcccatcactcgcccattacagattatggaagtgtgtggcggacatacgcatgccatttttaaatttggtctcgaccgcttattaccacaagagattgagtttgttcatggtcccggttgcccggtatgtgtgttacctatggggcgcattgatgcttgcttagaaattgcagcccgtccagaagtcattttctgtactttcggtgatgcgatgcgggtgcccggtcgtcatggttcaatgcttgatgctcgtcgtcgcggtagtgatatccgtattgtttactcaccgcttgattcattaaaaattgcgcaagataatcctgataaacaagtggtattttttggcttaggttttgaaactaccatgccaagtacggcgatgacgctgcaacaagcgaaattacgtggactgaaaaatttttcgctattttgtcagcacattactatcgtaccgactttacgttgcttattagagcaagaagatgtacgtattgatggttttattgcccccggtcatgtcagtatggtgattggctgcacgccttatcaacctttatgtgatgaatttgaaaaaccctttgtggtgacaggttttgaaccgttggatttattacaagctatactgatggtagtaaaacagcttaaagcaaaagctgagaatgcagattatgttttaagtattgaaaatcaatatagtcgtattgtccctaatgaaggcaataaacttgcgcaaaaagcattgaaagatgtttttatgctaaaagagagcagtgaatggcgtggacttggggagatccctatgtctggtattcaactaacacccgcttacgccgagtttgacgctgaacgacgttttacaccagcaccacaacaagtggctgataatccgcaatcacgctgtggcgatgtattaaccggacgatgcaaaccttctgattgcccattatttggtaaaagttgtacaccagaaacggcattaggtgccttaatggtgtcatcagaaggtgcatgtgcggcttattatcagtatcgccgtgaaggtaatatatga

SEQ ID NO: 294945 - DNA, 1020 bp, Proteus mirabilis
atgaaacaacctgatgaaatcaccttagctcaaggaaatggtgggcaaggtatgcaacaacttatcgaagggctatttttgaaagcattcgataatccattattgaatgaaaaagaagatcaggctcgtattgcattagccgatctcacagcacagggcgatcgcctggcatttagtaccgacagttatgtgattgatccgatcattttcccaggtggaaatattggtaaattatctgtttgcggaaccgcgaacgatctttctgtaggtggggctgtacctcgctatctctcttgtggttttattttagaagagggacttgcttttgaaacgctagaaacattggtgatggcaatggcaaaagccgcacaacaagcaggtattcagattgtaacgggggataccaaagtggttcctcgtggtgctgcggataagatcttcattaatactgcgggtattggggtgatcccaagtaaaattgattgggcagcgagtcacattaaagccggtgataagatcatcgtcagcggtacaataggcgatcatggtgccactatcttaaatttacgtgaaaatttaggattggaagctgatctgcaaagtgactgtgccgtgcttgaaccaatgatcgcgcctttacgtcaaattgacggtattcgtgcattacgtgatgcaactcgtggtggcgtgaccgctattttacatgagttttctcaagcctgtggctgtggcatgaatgtatatgaaaacaaactgccaatgaaacagtctgtacgtggtgtgtgtgaattattagggctggaagcactcaattttgctaacgaaggtaaaattgtattagtcgtgtcaccgcaagcagaaaaacaagttcttgaggctttacatcaacatactttaggccaagatgcttgtaccattggtgaagtaactgaagagcgttatattcgtttaacgggaatttttggcacaagtcgtattttagatctcccttataacgagccattaccccgtatttgttaa

SEQ ID NO: 294946 - DNA, 1227 bp, Proteus mirabilis
atgtcttggtcagaatttaaatctcaatacctgatccgtttctggaagcctcttccggcggttattgcagcaggtatcttatctacttactactttggtttaaccggcactttttgggcagttactggtgagtttactcgctggggcggtcatgtgatgcaatggtttggtgcgcatccagaagaatggggttactttaaaatcattggtcttgaagggacaccactcactcgtattgatggggtaatgattattgggatgtttggtggttgtattatggcagcactttgggccaataatgtcaaacttcgtcatcctcaacataaagtgcgtattcttcaggccgttttgggcggtattattgccggatttggtgcacgtttagccatggggtgtaacctcgcggcattctttaccggtattcctcaattttcattgcatgcttggttctttgctgttgctactgctattggctcttattttggtgccaaactttcattaatgccactatttcgtataccggtaaaactgcaaaaagtcagtaaagcatcacctattacgcaagataaacaacgtgcaaaacgtcgctttcgattggggatggttatcttttttgccatgatcgcatggtcattaatcattctatttgattcacccaaactcggctttgctatgctggggggaattggctttgggatcttaattgaacgtgcacaaatctgttttacttccgcatttcgtgacttatggataaccggtagaacgcatatggcgaaagcgattattatcggtatggcggtaagtgcggtgggtatttttagctatgtacaattaggtgctgcaccgaaaattatgtgggccggtcctaatgcagttattggtggtttgttgtttggttttggtatcgtgcttgctggtggttgtgaaacaggctggatgtatcgtgcagttgaagggcagatccacttttggtgggtaggtttaggtaacgtgattggttcaacaatactggcgtactattgggatgatttttctgcggtactggctaccgactacgataaaatcaacctattagatacctttggcccagttggtggattagccatcacctacctgctacttggtctctcttttatattactactttggtgggaaaaacatttcttccgcaaaagagcgcaacaagcgcaagcgctttcaacacaaattaataaggaaatcgcatga

SEQ ID NO: 294947 - DNA, 243 bp, Proteus mirabilis
atgaacgagaaaaaaaccatagtgccagattatcgtcttgatatggtcggtgagccttgtccttatcctgcggtggcaacattagaagcgatgccgtcactgaaaaaaggtgagatccttgaagtggtaagcgattgtcctcagtctattaataatattcccttagatgcgaaaaactacggttataccgtattagatattcagcaagatgggccgacaatccgctatttaattcaaaaatag

SEQ ID NO: 294948 - DNA, 909 bp, Proteus mirabilis
atgctgtggtttaaaaatattttggtctatcgcttaaataaagagatagcgctgtcaatggatgagttagaacaacagctggcttcattagcattcaccccttgtagtagccaagatatgaccaaaacgggttgggtttcacctatgggtgatcgtggcgaagcacttatccatgttgcaggtaaacaagtcatgatgtgcgcacggaaagaagataagatcctccccgccaccgtcattaagcaagcgctacaagataaagttgaaaagttagagggtgaacaaggtcgtaaattaaagaaaaccgaaaaagcgacattaaaagatgaagttgtccacacgttacttcctcgcgcatttagcaaattctcacaaacctttatttggttagatttagataaacaattagtgattgttgattcaggtagtgcaaaacgtgccgaagataatttagccttattgcgtaaaacattaggttcgctacccgtggttccactcaattttaatgagtctgtcgaatcaaaaatgacacaatgggttcgttccggtgaactccctgctggttttacattaatggatgaagccgagcttaaagcggtattagaagaaggtggcgtgatacgttgtaagaaacaagagcttgtctctgatgaaattgccactcatattgaagccggtaagtttgtcaccaagctttctcttgattgggaagatcgcctgcaattcatgctttgtgatgatggctctatcaagcgcattaaatttagtgataccttgcgtgagcaaaacgatgatattgataaagccgattttgcccagcgttttgatgccgattttgtcttaatgacaggtgaactaagcgcgctaattgaaagagttaccgaagtacttggtggtgaagccgagtaa

SEQ ID NO: 294949 - DNA, 525 bp, Proteus mirabilis
atgaaactgatacctttgttactctctggactactctttacatcggttgccagtgcggcgagcttagatgttacgttaaaagaagccttacctacaggggcgggtgatgatattggtgttgtcactattaccgaaaccgattatgggctgttatttacgccaaaacttactgggttaacaccgggtgttcatggttttcatatccatgctaatggctcttgtgagccagatatgaaagatggaaaacctgttccagcattaaaagcgggtggtcatcttgatcctgaaaataaaggtgttcacttagggccttataacaaagaagggcatttaggtgatctacctggtttggttgccaatagtaaaggtgacgctgattatgccgttcttgctcctagactgactaagcttgatcaaattaaagataaagccttaatggttcacgttgggggagataactactcagataacccagaagcgcttggcggtggtggtgctagaatggcatgtggtgtgattaaataa

SEQ ID NO: 294950 - DNA, 2598 bp, Proteus mirabilis
atgggtaaagctcttgttatcgtggagtccccggctaaagccaaaacaatcaataaatatcttggcaatgactacgtagtaaaatctagcgtgggtcacattcgtgatttgccaaaaagtggttctggcagccagaagagcgaaaactcatccgccacgaaaggcgtgaaaaaggttaaaaaggatgagaaatcagccttagtcagccgtatgggtgtcgatccttataatggttggcatgcaaactaccaaattctgccgggtaaagagaaggtagtcgctgaactaaaagcattggctgaaaaagcagatcatatctatctcgcaacggaccttgaccgcgaaggagaagctatcgcgtggcatttacgcgaagtgatcggcggtgaagatgatagatttagtcgtgtcgtatttaatgaaattacgaaaaatgccattacacaagcattccaaacaccgggtgagctgaatattgaccgtgttaacgcgcaacaagcacgtcgttttatggatcgtgtggttggctatatggtttctccgctgttatggaaaaaagtggcgcgtggtttatctgcggggcgtgtacagtcagttgcggtacgcctactcgtcgagcgtgaacgtgaaattaaagcatttgtgccagaagagtattggcaattacacgcttcattgctgacacccgatgaacaacccttgcgtatggaagtgacgcactatcaagataacgcctttaaacctgtctcctctgaggaaactcaggtggcggttaaggcgttacagaatgccactttcatcgttaaaaaccgtgaagatagaccaacatccagtaaaccaagtgcacctttgatcacctctacattgcaacaagcggcaagtactcgcttaagctttggggtgaaaaagaccatgatgttggctcaacgtctttatgaagcaggttatatcacctatatgcgtactgactctaccaacctgagtcaggatgcaatccaaatggcacgtgattatattcacgataaatttggtgcaaaatatctgcctaaagagccgaatgtttattcaagtaaagagaactcacaagaagcgcacgaagctattcgtccttctgatatcaatgtgacggctgaatctttaaaagatatggatagcgacgcgaagcgtttatatcaactgatttgggatcaatttgtcgcctgtcaaatgacaccggcaaaatatgactcaaccacacttacggttgcatcaggggattataaactacgcgctaaaggtcgcacattacgttttgcgggttggacaaaagtcatgccagcaatgcgcagtaaagatgaagataaaacattaccagcggttgatgtcggggcgcaattagcgttagctgagttatcgccaacgcaacactttactaagccaccagcgcgttttagtgaagcgacattagttaaagagctagaaaaacgaggtattggtcgaccttcaacttatgcttcaattatctctaccattcaagatagaggttatgtcaaagttgaaaaccgtcgtttctatgcagaaaaaatgggtgagattgttaccgatcgcttagaagaaaactttagtgatttgatgaactacgatttcacggctcaaatggaagatcatctcgaccatgttgccaacaaccaagaaaactggaaagcggtattagatgcattcttcacagattttagtcagcaactagaagtcgctgaaaaagatccagaagaaggaggaatgcgacctaaccctatggttattacttctattgaatgtcctacttgttctcgtcatatgggaattagaacagcgacgacaggggtattcttagggtgctcgggctatgctttaccaccaaaagagcgttgtaaacaaacgataaatcttattcctgaagatgaattacttaatatcttggaaggagatgatgcggaaactaatgcattacgtgcccgtcgtcgttgtccgaaatgcggtacggcaatggacagttatcttattgatactcatcgtaaattacatgtttgtggtaataatcctgcatgtgatggttatgaagttgaagaaggtgaattccgcttaaaaggttatgaaggcccagtgattgagtgtgataaatgtggcgctgaaatgcatctaaaaatggggcgttttggcaagtacatgggttgcaccaatgaagagtgtaaaaatacacgtaagatcttaaagagtggtgaaattgcacccccaaaagaagatccggttccactacctgaattgccttgtgaaaaatcggatgcttactttgtgttacgtgatggcgcggcgggtattttccttgcggccaatacgttccctaaatcaagggaaacccgtgcaccgaaagtggctgagttagtacgttttaaagatagattatcggaaaaaatgcgctacttagcacaagcacctgtaaccgatcctgaagggaatccaaccatagtacgttttagtcgtaaaactaaacagcaatatgtctcttctgaaaaagaggggaaagcaacaggttggtcagccttttatattgatggcaaatgggttgaaaaaagtaaatag

SEQ ID NO: 294951 - DNA, 252 bp, Proteus mirabilis
atgatgtcgacacaaactacacctattcccgcagagatgctacttgaaaaagcgaataaaatcatacgtgaacatgaagactatttacaaggtatgtacgcagattctgttgaacaaaaaggcaatgtactggtatttaaaggcgaattttttttagatgagcagggcttacccacggctaaaagtaccgctgcattcaatatgtttaaacatttagcacatgtgttatctgaaaaataccatctagcgtga

SEQ ID NO: 294952 - DNA, 1047 bp, Proteus mirabilis
gtggagtatattttacaatatggactgtttttagctgagattgcgacagttgttgtcgctattattgctattgtttcgttttttgtggttatcggtagtaaaaagcaacatcgaaaaggcacattaaaggtgactgatcttgctgagtcttaccacgataaacaacgtgttatgcaacaagccaaaatggatgaggctgaattaaaagtgtggcataaagcgtttaaaaaacaacaaaagaaagagcaaaaactgagtaaaaacaatgctaaagaagggcgcaaaggcgttgttaaaccttgtttgtatgttattgattttaaaggtagcatggatgcccatgaagttggtgcattacgtgaagagataagcgctatcctctctgtggcacaagcgggtgatgaagtactgcttcgtcttgaaagtcctggcggtatggttcacggttatggcctagcagcagcccagttaactcgtttaaaagataaagggatcaaattaactgcagtggtcgataaagtcgccgccagtgggggttatatgatggcctgtgtcgctgataaaattgttgcggcaccttttgcgattatcggctctatcggtgtggtcgctcaaatacccaatattcatcgtttattaaagaaaaatgacattgatgttgagttacatactgccggtgaatataaacgcacgctaaccctattaggggaaaatacggatgaaggtcgtgagaaatttaaacaagatctcaatgaaactcatctgctatttaagtctttcgtacataaatatcgccctgaattagatatcgatagtgttgcaaccggcgagtattggtatggaacggatgctgtagataaagggctgattgatgaagtgggtgtcagcgatgattggctcatcagtcgtattaatgattttgaagtattatccgttcaatatatcctgaagaaaaaaatggtagaacgagttactggtggcgcaatggaaagcgtggataaattaatgatgcgttggctacaaaggggtaaaaacccactgttataa

SEQ ID NO: 294953 - DNA, 765 bp, Proteus mirabilis
atgttgcaatatcaacccgatcatactgtattaagagataaaataattctagtaacgggggctggtgatggcataggtaaagaagctgctctcacatatgctcgctatggtgcgacattaatcttgttaggacgtaccttatctaagcttgaagatgtacaaaatgagattatcacttcaggcgggcaacaaccgatgctttaccctttagatctactcaccgcgagcgagaacgattatcaggaatttgctgatactatcgtaaaacgttttcctcatttggacggtgtattacaaaatgccggcctactcggtgtcgttgagccgataattaaccaaccaagtacactttggcatgatgtgatgcaagtcaacgttaatgcaacctttatgttgactaaagccttaatccccctaatgcttaaggcacctcatgcaagccttattttgacaacctccagtgtaggtcgccaaggccgttatggttggggggcttattctgtctctaaatttgccacagaaggcttaatgcaagtgttacatgaagaatataaagacagtagcttgcgtattaactgcatcaatccgggtggaacacgcaccagtatgcgagcaagtgctttccccgatgaaaatgcacaaaaacttaaaacgccaaaagatctaatgccgttatatctctatctaatgagtgatgacagcattgaagtgagtggtcaatctttagatgcacaacccgatcgtaaagccggacctgctgaataa

SEQ ID NO: 294954 - DNA, 591 bp, Proteus mirabilis
atgagtgatgcacaacaccaacagcgccaacaacgtttgaaagaaaaagttgatgcccgaattgcgcaggcgcaacgtgaacaaggcattttgatgatttttactggtaatggtaaagggaaaaccactgctgccatgggaaccgctacacgtgcggttggtcatcataaaaaagtcggtgttgtgcaatttattaaagggacatgggaaaatggagaacgtaatcttttagaacaagccggcgttcccttctatgttatggaaaccggttttacatgggaaactcaagataaagctgccgatacacaagcctgtttaaatacttggcaatatgcactgcaattactcaattcacctgactatgatttagttgtcttagatgaacttacttatatgatcagttttcattatctaccacttgaagatgtggttgcggctattacttctcgtcctgatcatcaaagtgttattattacaggacgaggctgtcatagacaattaatagaattagcagacaccgttacggaaatgcgtcctattaagcatgcgtttgacagtggtatcaaagcacaaaaaggaattgattggtaa

SEQ ID NO: 294955 - DNA, 948 bp, Proteus mirabilis
atgcatcgttatatttatttaacaacagtgttgtgtatgaactttcttagtttaggctgtgatgaggcaacaacatcgacaacacaaacaggcattttttatatcagtaacaataacaatgtgccgttacaatttaaaattgataccaatcatttttcgattaataaaggtgaggtaaaaaaaataacattaaccaatggagagcatatattagaatcaaactcaggtgaaaagaaagtatttatggtttaccctggaaataatggggggattattaatccctctcaggaaatatactatagctttacttccgtgtttacttcagaagaaaataaagaacacttctatttagatacgcgctctgtttggatcaatggacaattaatacatggtgctattaatagcacagatgctgtgtttatcgacaacaatatctttcgttgtgacattccattaaatgagcctattcctccttatttaccagattggaagaattctggggtaggcaatgtattgactaaatgcttctctcaagaggagtttcaaacatttttagccaaatatccttatggtattcatttcgataataatcacgatttattaaccaaacaagctgagaaagaacagtttagttggataaatgaaaaagatacacgtactgaggattttaatcctacactgagtgaaataaattttaataataaagaattagtccaagaagccaatactatttatgaaatagtttactcgtatttagcgtctcgtgatcctgataagaaacaagagctttataatatttatcatctgcatatcatgtctatggcatggatttatagccaacaaatacaaaatgatatactggatgataaagaagcctactttcaattaataaaagagaccggaagaatatttggtgcaggtatattaggtgaacctgtattgatataa

SEQ ID NO: 294956 - DNA, 927 bp, Proteus mirabilis
atgagcgataaatcgcaacgtactgaaaaattacaaaaaattcttgctcgttctggtcatggttctcgacgtgagattgaaggctatcttcaagaaggccgtatcagtattgatggcgtgaaggcaaaattaggcgatcgtattgatgccaattctacagccaaaatccgtttagatggtcgtatattaagtattcgcgaagcacaaaaagatgtttgtcgagtgttagcttattacaagccagaaggtgagctatgtacacgtagtgatccacagggcagaccgaccgtattccaacgtcttccgcgtttaaatagtgcgcgttggatagccgttggtcgtcttgatgttaacaccagtggtttattactctttaccactgatggtgagttagccaatcgcttaatgcacccaagtcgtgaagttgagcgtgaatatgcggtacgtgtttttggtgaaattgatgatgcaaaaattcgtcaattgactcgtggggtacaattagaagatgggccggcatcattccgttcggtttcttatcgcggtggtgaaggcattaaccaatggtacaatgtatcgctaacggaaggacgcaatcgagaagtccgtcgtatgtgggaagcggtaggtgtgcaggttagtcgccttattcgtgttcgttatggtgatattgatttgcctaaaggacttccacgtggcggatgggttgagctaggcttaaatcaaattaactatttacgccagctggtggaactaaacgatgagacagtaaccaaagtggctgtcgaaaaagatcagcgtcgaattaaagcaaatcaaattcgtcgggcggtgaaacgtcataccaaaatttctgcgcgtacttcaacttcaccggctaagcgtgcctcaagccgccgccaatcagcgggaagtaaaagcaaataa

SEQ ID NO: 294957 - DNA, 621 bp, Proteus mirabilis
atgagccaacttttttacattcaccctgataatccgcaggctcgtttaattgaacaaagtgcggatgttttacgcaaaggcggagtggtaatttatccaacagattcaggctatgcgataggttgttgtttggataataaagatgcgatgacgcgtatttgtcgaattcgccaactcgataaacatcataatttcactctaatgtgtcgagatttatcagaaattgccacttatgcctatgttgataatgttgttttccgtttaattaaaaataatacgcctggtaactacacctttattttaaaagccaccaaagatgtacctaagcgtttaatgaatgataaacgtaaaacaattggtttacgtgtaccttctaatcctattgcgctggcattattagaaaatatcggtgagccattaatgtctaccagcttaatattaccgggtaatgattttgcagagtcagatccggaagagattaatgacttattgggtaaacaggttgatttagtgatccacggtggttacttggggcaaaagccaaccacggtgattgatttaacagaagatagccccgttattgtccgtgaaggaatgggcgatattacaccttttcaataa

SEQ ID NO: 294958 - DNA, 861 bp, Proteus mirabilis
atgactgaattgctatctgatttacgcgtgatttatgatctgcatagccatactactgcatcagatggcgagctctcacctgatgaattaatcgatagagccattgaaaaacaaattacggtattagcgataaccgatcacgatactactgctgctatccaacctgccaaaaattatattgcagaaaaaagtttacctttaactttgatatcaggtgtcgagatatcgactttgtgggagaatatagaaatccatattgttggattacagattgatatcgaacaccaagctatgacgacatgcctagcaaaacagagtcaatgccgtgaaactcgcgctaaaatgatcggcgaacgtttagctaaagcgggtattgctggggcatgggaaggggcaagtgccctagcgaaaggcgggcaagtgacacgaggacactttgcgcgttttttggttaatgaagggcatgtggcatcggtcaataaagtatttaaacgctatctagggaaaggaaaaacaggttatgtaccgccacaatggtgctcaattggtgacgctgtcacggctattcatcaagcgggtggagttgcggtattggcacatcctggtcgctatggtctatcctctaaatggttaaagcgattagtgctttattttaaacaacaaggtggtgatgctatagaagtggcacaatgccaacaaccaccacaagagcgagaacaacacgcagctttagcacaagcttatgatcttaaagcttcgttaggttctgattttcatcgcccttgctcgtggatagagctaggacgtaatttatggttacccgctaatgttgaacctgtatggacattatggcagggataa

SEQ ID NO: 294959 - DNA, 1578 bp, Proteus mirabilis
atgaacacttcacttgcattcccattaacaactaaggtaacggcattgccttatcacagcgagccggcgttacttttcaatacgttgtgtgaacatcgtcatcacaccttattgttagaatccgcacaaattgataccaaagccaatttaaaaagtttgttaatcgttgatagtgcattacgtattagtgcaaacaaaaatcaagtgactgtcgatgcgttaagtctcaacggccaacatatcttagcgttattaaaaaacgcactaaaagaaaaaagcacactctccgtagagcgagcggaacaatgtgtatttacttttgcatcatcatctttccctcaagatgaagagagcaagttaaaagcggctagcgtatttgatgttttacgttttttcctagcaaatagcgctgcaaaagaagccaatgctatttttgtgggagggttatttgcctatgatttagtgaacggatttgaatccttacctgatttagaagcggttttttcttgccctgactactgtttttatttagctgaacagttaattgtgatcgaccatcaacatcatcatagccaattaatttccgttgcctttacggataatccacaagagtgtcagcgtcttgatacccgtcaggcacaattagttgcactcgcacagcaacctttaaaacaaccacaacgtcaaccattaacacctcagcaagcggttgtaagtagcaatatgaatgacaaagagtatggtgctattgttgaagcgatgaaaacctatattcgtcgtggcgatattttccaagttgttccatcgcgccgctttcaaattaactgcccttcaccactggctgcctatcaagttttgaaacaaaaaaaccccagtccctatttgttttatatgcaagatgcgttatttaccgtttttggtgcgtcacctgaaagtgcgttgaaatatcaagcaagtgatcgccaaattgaaatttatcctatcgcaggtacacgcccaagaggtcgcaatgccgacggctcaatcaatgctgatttagatagccgcattgagcttgaaatgcgcacagataccaaagagttatcagaacaccttatgttggttgatttagcacgcaacgatttagcgcgaatctgccaagctggaagccgttatgtcgccgaattaaccaaagtagatcgctacgcttttgttatgcacttagtatcaagagtggtaggaacattacgtcatgacttagatatttttcatgcctatcaagcctgtatgaatatggggacactctcaggagcaccgaaagtcagtgctatgcaactgattgcacaatatgaaaaaaccaaacgaggcagttatggcggtgcaattggctactttactggtaacggtgattttgatacttgcatagttattcgttctgcttatgtagaaaaagatattgcaactattcaagtgggcgctggtattgtgctcgattctgatcccaaaatggaggcagaagaaactcgcaataaatcacaagcggttatcaatgccattttacaggcgcatgctgaaactcacatgcaggaggcttgctaa

SEQ ID NO: 294960 - DNA, 594 bp, Proteus mirabilis
atggcgacgctcttactactcgataatatcgactcttttacttataacttagtcgaccttttacgcagtcaacatcatcaagtgatcatctatcgcaatgatgtcagtgcttcttttatcgaaaaacaattaaacctgttagataaccctattcttatgttgtctcccggccctggtacaccatcacaagcgggttgtatgcctgagctacttaatcgcatgttaggtaaattgcctattattggtatctgtttagggcatcaagccattattgaagcttatggcggtaaagtctcttcttgtggggaaattttacacggtaaagctacgctcgccacccatgatgggcaggcgatgtttgaacatctgccaaatcctctgcccgtcgctcgttatcattcactctctggcgaaattgtacctgagcaacttatcgtcaatgcgtggtgtgataacaccgtgatggccgtgcgccatcgccaacatcgaacttgtggttttcagtttcatccagaatcaattttaaccactaaaggcgcacaacttttacaacaaaccattgcatgggcacaagcaccaagaggagacgcataa

SEQ ID NO: 294961 - DNA, 999 bp, Proteus mirabilis
atggatactatcttcaataaattatttgcaggacaacaattaagcttagaagagagccaaacactgtttagtgcgattattcgtggtgaattaacagaatcacagttagcagcggtattgattagtatgaaaatgcgtggtgagcaccctcaagagattgccggagcggctcgtgccctattggataatgcctctccttttccacgcccagattatctgttttgcgatattgtgggtactggcggcgatggagccaatagcatcaatatttcaacagccagtgcgtttgtcgcggcagaaattggtctaaaagtggctaaacatggtaatcgtagcgtgtctagtcgctcaggatcatcagatttattagcggcatttggtattccgctagataaaagtgccaacgatgcccgccaattgttagatgaaattggactatgctttttatttgcgccgctttatcacagtggttttcgctttgccgcccctgtgcgccaacagctaagaacacgcacgctctttaatgtgttaggcccattaattaatccagcgcgtccgcctttagcattaattggtgtttatagtcctgaattattaatgcctattgcagataccttaaatgtcttgggctacaaacgtgcggcagtggtccatagtggtggaatggatgaagtgtcattacatgctcccacacaagtggctgagttacacaatggggaaatcactcgttatcaattaaccccaagtgattttggtctgcgtccttgtgcgataagtgatcttgaaggcggtacacctgaggttaatcgccaattattggctaatttactgcaaggacaaggtaaacgcgcgcacactgaatccgtcgctgccaatgtcgccttattaatgcgtttacacggacaagaagatttgaaagccaataccgaagttgctatgcacgcaatctatagcggtaaaaccattaatcgagttaatgcgctagccgcaagaggataa

SEQ ID NO: 294962 - DNA, 1374 bp, Proteus mirabilis
atgactgtattaaatgccattgttaaagataaagccgaatatttagttgcacgtaaagcacagcaacctttatcaacctttatagataagattgcgccatcgacacgctcattttatcaagcattaacacaatcacacccagtgtttattttagagtgtaaaaaagcatcgccttcaaaagggattattcgctctgattttgatcccgttgccattgcgaaaatttatcaaccctatgcagccgctatttcggtactgactgatgaaaaatattttcaaggcagttttgattatttacgtcaagtcagtgatgccgttcatcaacctgttttatgtaaagattttattatcgatgaataccaaatttatttagctcgtttttaccaagctgatgccattttattaatgctttctgttcttaatgatgaacagtatcgtgcgcttagtgccgttgctcaccaattaaacatgggagtattaacagaagtgagcaccgaagaagagcgtcagcgagccattgagcttaaagcaaaagtgatcgggattaataatcgtaatttacgtgatctctctattgatttatcccgtaccgaacaacttagccaaggtttaccgcaagaggctattgttatcagcgaatctggaattcatacccatcaacaagttaaaacactaagtcaatatgctaatggctttttagtgggtagtgccttgatgtcacaagagaatattgcccaagcggtaagagcacttattttgggaaagcataaagtgtgcggcttaacccgcacacaagatgttaaagcagcctatcaagcgggtgcctattatggaggattaatttttgctgagaaatcaccacgaagagtgacactgtcacaagcgcaattattgataacacaagcgccattagcttttgtgggcgtttttcaaaaccaatctattgagcttatttgtgactatgctaaacaacttaatttatctgcggttcagttacatggcgctgaagatgcacaatttattgcccaactaagggaaaaaatcgctccacaatgcgaaatttggcaagcgcttaatatggcttatcaccatgatattcagcacattgcgcaagttaacaaatatgtattagataatggtacgggtggtacaggcaacacctttgattggcaaactattccgcctactttacgccataaagcattacttgcaggtggcctaaacagtgataactgtttagacgctctaaacaccggttgcttaggacttgattttaattcaggggtggaatcttcagcaggtatcaaagatccacaacgtctatcgcaagtctttacacaattacaacaaagcaaattttcacaaaatttctga

SEQ ID NO: 294963 - DNA, 1191 bp, Proteus mirabilis
atgagaaaacttaatccctactttggtgagtttggtggtcaatatgtaccagaaatattgatccccgcattagatcaacttgaacaagcctttattgacgcacaaaacgatccgtcatttcagcaagagtttcaagatctactcaaaaattatgcaggtagaccaacggcactgacactctgtcgcaatttgacccaaggtactcgtacccgtttatatctaaaacgtgaagatttattgcatggcggtgctcataaaacaaaccaagtattaggccaagcactgctagcaaaacggatgggaaaaacagaaattattgcagaaacgggcgctgggcaacatggtgttgccactgcgttagcttgtgccctgttaaatatgaagtgccgtatttatatgggggcaaaagatgttgaacgtcaatcacccaatgtatttcgtatgcgtttaatgggtgccgaagttattccggtgcatagtggttcatcaacattaaaagatgcgtgtaatgaagcgttacgtgactggtctggttgctacgagcgtgctcactacttattaggcactgcggcaggcccgcatccttatcccactattgttcgcgaattccagcgcatgattggggatgaagctaaagcgcaaattttagcccgtgaaggtcgtctccctgatgccgttatcgcctgtattggcggtggctctaacgccattggcttattcgcctcatttataccagaaacctcagtacaattaattggtgttgagccggcaggaaaagggatcgaaacaggagagcacggagcaccattaaaacatggcaagttaggcatttatttcggtatgaaatcaccgattatgcaaaccgaagaaggccaaattgaagagtcctattctatttctgcaggattagatttcccatccgtaggccctcaacatgcgcatttaaacagcattggccgtgcagattatgtttctgtaacagatgatgaagccattgaggcttttaaaacgctatcacgccgtgaagggatcatccccgcattagaatcgtcacatgctctggcctatgcgttgaaactgattgcccaaaatccagataaagaacaactcttaattgtcaatttatccggacgaggtgacaaagatatttttactgttaacgatattttagctgcacgaggagaaatttaa

SEQ ID NO: 294964 - DNA, 810 bp, Proteus mirabilis
atgagccgttatcaattatgctttgaagcattagcacaaaaacaacaaggcgcgtttgttccctttgtcactttaggtgatcccgatgctgaactgtcgttaaaaattattgacgcattaattgaagggggtgcagatgcgttagagataggcattccattttctgatccactggctgatggccctactattcaaggggcaaacttacgggcattaaatgctaatgtcaccccaaccctatgttttgagttattaagccagatccgccaaaaacaccccactattccgattggactattggtgtatgcaaatcttgtttttagcaatggcgttgataatttttaccataaatgccaacaagcgggtgttgattcagtactgattggtgatgttcccttgcgtgaagcaaaacaatttcgagaagcggcattaagcgcgaatattgccccgatttttatttgcccgcccaatgcagatgatgagttattacaagagttagccaccagcgcagagggatatacttatctattatcaagagccggtgttacggggacagataaacgagcagaacagtcactcactcatttaaccagtaaacttaaagcttataatgcaccacctgcattacaaggttttggtatttctgagccacaacaagtttcacaggccattagtaatgctgcatttggcgctatctcaggctcagccgttgtacaaattattgaaaataatctacatcaacctgatgtaatgttaaaaatgttgacgcagtttgtgcaacaaatgaaagccgcaacaataagcgtttaa

SEQ ID NO: 294965 - DNA, 315 bp, Proteus mirabilis
atgaaactatgggtaaaaatttctaccgtattagcggcattacttatggccatgactttatctgcatgctctccaacggcaacatcagaaggcacagggggatattttgatgactcggtgatcaccactaaagtaaaaacagctttaattggtgagaaaaacctaaactcaacacaaattagcgttgagacatttaaaggtaaagttcagttaagtggttttgtctcttcacaggctgatgcaaatcgcgccatagaaaccgcacgtaaagtcactggcgttaaaggtgtcattaactcaatggttatccgttaa

SEQ ID NO: 294966 - DNA, 642 bp, Proteus mirabilis
atgaaaaaactttctgcgcttattctagcggctgcaacacttgcaccgtctatttcttttgctcatcaagcgggtgattttttattccgtgcgggtactgcaacagttcgtcctaatacaggttcagatactatattaggtgggcattttgatgctaataacaacactcaattaggtttaacctttggttatatggtaactgataatattggggttgagttattagcagcaacaccttttgagcataaagtttctttaactggtgtgggcgaaattgctaaagttaaacatttaccaccaacattaatggcacagtattactttggtggtgctgaagataaattacgcccttatttaggtgctggtctaaactttacgaccttctttgatgaaaaattcaataataatccagcggtaggcaaacttggattaaatgatcttgatcttaaaaactcttggggcttcgcagcacaagcaggtttagactataacctagataaaaactggatgctgaacgcttctgtttggtggatgaatatcgaaaccgatgtcaaatttaaagatggcgatggaaaccactataaagtggatactcgcttagacccatttgtgtttatgttcggtgttggttatcgtttctaa

SEQ ID NO: 294967 - DNA, 762 bp, Proteus mirabilis
atgcctaccccggcacgcacaatctaccgtgatagtcttaacttttataaaaatgaacaacgtagcattatcacgctatctgcagttttggccctcattttagctgtcatatatctattggttggccctaatgcacaagaatcacaaataattaatgactttattattaattttcaaaaaaccagattcgctgatgtctcacccgctgaattagaagcgatgaataacagtgttattggggtatttcaaaaggtcttactggtctatgtttttgagctttttcagcaaagtattctggttttagtgattttaatgttggcaatggcactttctgccggtcataacgtgacattgaaccaaacgtttaatgccagcttaccccgtttaccgaagatgtttctgctaattttgctctgctctattttaattagtgcaggctttatgttgattatccctggtatcattttattagtgggatttgcactagcgccagtcgtactggtacgccaacaatctattggtagcgcaatacgtctaggctggaaaatgggctttggtgaatcaggggcgctgatccctgccttaggaatttggattttattacaatttgggattggcttcttaagcaatattacgggtgaattgcctaacatgatccacaaatttttatattattttttaaagaatattacgtctgcatggatgattatttatctattccgtctgtttatgctgactgaaaataaatatatcaccaagtaa

SEQ ID NO: 294968 - DNA, 1785 bp, Proteus mirabilis
atgaacggaaaaagaataataaaatggatgcctggattaggcttattgtttaattatcagcgtgaatatcttggatatgatattaaagcagggctttctgttgctgcggttgcattgcctgttgctatcgcttataccgaattactcggtatcaatgccattgtgggattatacgcttgtatcttacccatgatcatgtatgctttatttggcacttcacgccaattaattactggccctgatgctgcaacttgtgccgtgatagccgcagttgtcatccctctttctgcgggggatgaaaatacccgttggcaactggccattataatgactgcaatgaccggtttttggtgcattcttgcgagtcattttcgctttggcgcatttacggactttctctctagacctatattacaaggtctattaaatggcgttgccatcactatcatggtggggcaattgagtaaagtatttggttttaccacctccccagaatatttaattgaaaaattacttgaagtaccttttcgattaaaagaagcacattggccaacactgttgatgtcggcgctaaccttagcattactattaggtattcgtcattttagacaacgttggcccgctccgttaattgctatggtggtgatgacctatttaagttggcaatttgatttagtcaattatgggattgctattgttgataaagaagcagacaacggtgatctctttttacccatcgtttcaatgagtggctttcatcttggatcacttcgtgaattaattgttccttccattaaccttgcggtgattagttttgttagctttatgatgacggcaagaagttttgctagcaaaaatggttatgatgttgatgccgaccaagaattaaaggcattaggcattgctaatatcgcatcggcactttcgcaaggatttgcagtaagtgccgccagtagccgtactgcggtgaatgattctgttggcggtaaaacacaattggtctctattgtggcagcgttagtgattttagttgtgttgctttttatgaccgactttattgcctacattccgttatcttctttaggcgttgtgctgattgtttcctcttggtcattgctaagtattcgtcatatttggtcttatcgtaaacgaaatcgacaagcttttaccttagcaacgtttactttattagcggtgttgttagcgggattgattaacggcattggttttgctgtgttacttgggttattgcaatttttacgtattgtattccgcccaagtgatcagttattaggtgttgatgaacaaggaatgatccactcaatcaaccaaggtaacggcattgaatcgatatcaggattgatgatgtatcgttttaattcccccttaacctatttcaatgttggctattttaaaaagcgggtactacagctagtggacagcgcgccacaacgtcctgcatggttagcggttgatgctaccgtaagttttacttatgacgatgtgagtgtttttgctgttattgatgagctaattagagagcttaggatcaaaggcgttaaattggtattggctgggcgcagaacagaattaaatcgttggattgcacgtaacaagatcactatcaatgatgatgatttaattattgcacccgatctctattttgttattcgtttatatcaaagtcgacaacaaataaaagaaaaacacaaacagcaacaacaagagccgtttgctgaagataaccaagccactttcatcagagatacggaaacgaggggatag

SEQ ID NO: 294969 - DNA, 654 bp, Proteus mirabilis
atgaaaaacggctggcttaagcaattacttgatttcgctccactattagtgttttttatcttttataaatggcaagatattttctatgcttctggcgcattaattgtagcaacatggatctcagtcggtttaacatggcttattttccataaagtcgaaaaagcaccactgatcaccgcaatcgttgtaacgatatttggtacattgactatcgctttccattcagatgtctttattaaatggaaagtcaccgcaatctacgccatttttgcgctagtgcttattgcgatgcaactctttacgccgaaaacattaatggaaagaatgctaggtaaagaattagcgatgccagcgactaattggaaaaaactcaatatcgcttgggtactgttctttttagcttgtgcgctgggtaatctttatgtcgcattttctttatctcaagaaacttgggtaaactttaaagtctttgggttaacaatattaaccttaatctttactgtgattagtgttgtgtatatctggaacaaccggttacccgaagaagagacgaaagaggaatcaacagaaagtcatacatctgaaacatcagataacggaacaacatcaacatctaaagtattacataaagatgtgacatctaaatctgaataa

SEQ ID NO: 294970 - DNA, 432 bp, Proteus mirabilis
atgactgaacaacaatctttgcctaatggtgagctagtattacgtacgcttgccatgccagctgatactaacgccaatggtgatattttcggtggctggataatgtctcaaatggacattggtggtgccattttagcgaaagaaattgccttaggtcgcgttgttactgtaagtgtaacaggcattacctttctaaaacctgttgccgttggcgacgtcgtttgctgttatgctcgttgtttaaaaaccggtaactcttcaattactgttaatattgaagtgtgggttaaaaaagtagcaaccgagccggtaggtcaacggtatcgtgccactgaagccgtgtttacttatgtggcagtcgatgagaataatagtgctcgtcgcctacctgaaggtaaaaccaattttaccttagcaagtaccatggaataa

SEQ ID NO: 294971 - DNA, 726 bp, Proteus mirabilis
atgcgctttaagctttgggtatttatatcactgtgtttgcatgcctcgcttgttgcggctgccatactgtatgttgtagaagataagccaattgcaccagaacctatctctatacagatgctagcctttgctgcagatgagccagtaggagagcctgagcctgtagttgaagaggtgacgccaccggagcctgagcctgttgtcgagccagaacctgagccagaaccagaaccgatcccagatgtaaaaccggtgattgaaaaaccgatagagaagaagcccgaaccgaaacccaaacctaagccaaaaccggtggaaaaaccaaagccacccgtcgaacgaccacagcaacaaccattggcgctgaacaagggaaatgagatgaagaatcttaaccccaatgctacaccgagtaataaaggtgaggaaaagcctgttgcgacaactagccaaggggaaggaaaagtacctaatgtgcttcgccaagggttacctatctatcctcctcgtgccaaggcagtgggtattgagggttcaataaaagtacgctttgatatcgatgccgatggacgggtagataatgtagaaattctctctgctaaccccaaaaatgtctttgaacgcgaagtgagaaaagcaatgcgtcaatggcgttatgagaaaatcccttataaaggtaaagtggttatcattgattttaatatagatggtgtttctgcaagttaa

SEQ ID NO: 294972 - DNA, 180 bp, Proteus mirabilis
atgagacatagcaggaatgaagtggcacgttggcgaatgatgagacaagcgttacgtcgccgtcgccgttggttagagggtcaatcacgccgtaacttacgtatttaccaaatgcgtaagcttgatacttctagaaaacatagagcgctgttgttcgtgcaatacaccgaactaaattga

SEQ ID NO: 294973 - DNA, 1461 bp, Proteus mirabilis
atgacaacattttatactgtattaagttggctaacttttttcttctattggctattgatcgcaggggtcacattccgtgtcctaatgcatcgacgacctgtcacctcaacgatgacatggctactgattatttatatcctccctttagtcggtgttattgcctattttgcctttggtgaacttcatcttggtaaacgccgtgtcgaacatgctaggcagatgtggccttccgtagttgcatggcttgaagaattaaaaaagtgtaaacatattttcgctaaacactatagtgatgttgcggagcccatttttcagttaaccgctaaacgccaaggtattaatggtgtaaaaggtaataagatccagctactaacaacttgcgaagactcattaaatgccatcacgcgtgatattaataatgcgcgcgataatattgaaatggtgttttatatctggcaatccggaggattggtagaggaagtcactgaagcccttattcaagcggctaaacgtggtgtaaaatgtcgcattatggtggattctgcaggaagccgtagtttctttcgcaccaatggccctgcaagaatgcgagccgccggcattgaatttgtcgagtcattacaagtcaatctgttccgtttcttcttgcgtcgtatggacttacgtcagcatcgtaaaatagtattaattgataactacatttcctataccggcagtatgaatatggtcgatccacgctattttaaacaagatgcgggtgtcggtcagtggattgatattatggtcagaatggaaggccctgtttctacgacactgggtattatttatgctttcgactgggaaatggaaaccggtgaacgccacttaccaccgccaccagataacaatattatgccatttgaacaagcaaatgggcatactacacaggtgattgcctcaggccccggctttcctgaagaactcattcaacaatcattaattacggccatctattcagccagaaaagaattagtcatgacaaccccctacttcgtgccaagtgacgatctggctcatgccatttcaaccgccgctatgcgtggtgttgatgtcagtattattgtgccacgaagtaatgactctttcctggtacgttgggcaagccgagccttttttactgaaatacttgaggcgggtgtaaaagtttttcaatttgaagatggcctattacatacaaaaagtgtgatggttgatggtcaactgagtatggttggctcggttaaccttgatatgcgtagtttatggcttaattttgaaataactgttgtgattgatgatgaatgttttgctagtgatcttagcatcgtacaatatgattatattgcacgttcaacacaacttactcttgatgaatgggaaaaacgtccatttatgaatcgggtgttagaacgcctttgttatttctttagcccacttctctag

SEQ ID NO: 294974 - DNA, 324 bp, Proteus mirabilis
atgaaccaaccaaccttaatcagtgaagaagaagctttagaacaagcctatgatctctttttagcgcaagccgctgataatcttgatgtagccgatcagctgctttttaatttacaatttgaagaacgaggtgcagctgaagttgttacattagggaatgattggcaatttattgtcggtttacctgtttcatcagcccgatttagtgaagtgattatcggtcttgcaccggatgaaaacgccgatattgatgatatttttggtcgtgtattaattagtcgtgatcccctgcaacccatgtaccatattatttggaaatcttaa

SEQ ID NO: 294975 - DNA, 537 bp, Proteus mirabilis
atgcaatttaattttttgctttcaacttcaatactcgttgtttctactctttcttttaatgcttatgcaacattagaaaatacagtgtcgatagggtatgctaaatctaaattgaaagtcgatgaagatttaataaatgataaccttaaaggtattaacttaaaatataatcatgaagtagctaatgattggggcgttatcagctcgttttcatatgcaaaaaataaaaatgatggttatgatcattggggatatgcaggtacttcaaagattagctactattcgttaacggcaggtccaagttaccgccttaacaattatgtcagtgcatatggactaataggttttggctattttcatgaagactttcactactatgatgaaagagaaaaagaaaataagatatcaatggcttatggattaggtgtacaagtaaacccaatcactaacttagctattgatgtttcttatgaatactccaaactatatgatattgattttactacttgggtagtgggtatcggttatcgtttttaa

SEQ ID NO: 294976 - DNA, 2223 bp, Proteus mirabilis
atgaatgatatcactggaggaagaaccccagcctcttttgaaccttctattgattatgtagtgactaaaatccctcgctttaactttgaaaaatttgccggtaccaatgaccgtttaaccacgcaaatgaaatctgttggtgaggtgatggctattgggcgtactcaacaagagtcaatgcaaaaagcattacgcggactagaggttggtgcaactgggtttgatcctaaagtaaacctcgacgatcccgaagcgctcaccaaaattcgtcgtgaattaaaagaagccggatcggatcgcatttggtatatcgcggatgctttccgcgctggaatgtcggttgatggggtgtttaatctcaccaatatcgatcgttggttcttagtgcaaatagaagagattgttcgcctagaagagcaagtggcacaacttggtttagctggtctaaatgctgatttcttgcgtcaattaaagcgtaaaggttttgctgatgcgcgcctagctaatatcttgaatgtgaaagagcaaaccattcgccaattaagagaacaatatcaattacacccagtttataaacgggttgatacttgtgcggcagaatttgctacggataccgcttatatgtactccacttatgaagaagagtgtgagtcggatccaaatcaagacaaacctaaagtgatggtcttaggtggtggtccaaatcgtatcggtcaggggatagaatttgattattgttgtgttcatgccgctctagcattacgggaagatgggtatgaaaccattatggtcaattgtaatccagaaacggtttcaacggattatgatacttccgatagactttattttgagccagtcacccttgaagatgtattagaaatagtacggatcgaaaaaccacaaggcgtgattgtgcaatatggtggtcaaacgccattaaaattagcaagagctttagaagctgaaggggtgcctgttatcggcaccagtcctgatgcaatcgataaggcagaagacagagaacgtttccaaaaagccgtggataagttagggttaaaacaaccagaaaatgccacagtgacgacattagaagaagcggtagataaggcaaaatctattggttacccgctggtggtacgtccatcttatgtccttggtggacgagcaatggaaattgtttacgatgaaattgatttacgtcgttatttccaaacggcggtcagtgtttctaatgatgctcccgtactgttagaccgattcctagatgatgccattgaagtggatgttgatgcgatttgtgacggtcagcaagtggtgataggcggtattatggagcatatcgaacaagcgggtgttcactctggagactctgcttgctctctacctgcttatactttaagccaagatattcaagatataatgcgcaagcaagtacgtgaacttgcttttgaattaggcgttaaagggttgatgaacgtacagtttgcggtgaaaggtaatgatgtttatcttatcgaagtgaatcctcgcgccgcacgtacagtgccttttgtctctaaagcaaccggtgtgccattagcaaaagttgctgctcgagtaatgataggacaaagtcttgaacagcaaggcgttaccaaagaggtgatccctccttactactcggttaaagaggtggtactcccctttaataaattctcaggtgtcgaccctattttagggcctgaaatgcgatctaccggtgaagtgatgggggttggtgctacttttgcacaagcttttgctaaagcgatgttaggtagcaattccaccatgaagaaaaaaggaagagcgctactttcggttcgtgaaggtgataaaaaacgtgtcgttgatttagcaactaagctattgaaaaatggttttgagttagatgcaacacatggtactgccattgtcttgggggaagccggtatcaatcctcgcctagtgaataaagtgcatgaagggcgacctcatattcaagatagaattaaaaatggtgagtatgactatattgtcaatacgactgccggtcgccaagctattgaggattcaaaactgatccgccgtagtgcattacaatataaagttcactatgacaccacattaaatggcggatttgcgacaacactgtcattgagtgctgatcctactattgatgttatttcagtccaagagatgcatgcaaagataaaaaaatcttaa

SEQ ID NO: 294977 - DNA, 1023 bp, Proteus mirabilis
  misc_feature (991)..(1000): n is a, c, g, or t
atggctaaaagaacagatattaaaacaatcctgattttaggtgcaggcccgattgtgattggtcaagcgtgtgaatttgattattcaggcgcacaagcgtgtaaggcactgcgcgaagagggatatcgtgttgttttggtaaattcaaatcctgctaccattatgacagatcctgaaatggcagatgccacttatattgagcctattcattggcaagtggtcagaaagattattgagaaagagcgccctgatgccatattaccgacaatgggcggacaaacggcattaaactgtgccttagaattagagcgtcaaggggtgttaactgaatttggcgtaacaatgataggtgcaacggctgatgctattgataaagcggaagatagacaacgctttgataaagcgatgaaaaaaattggtctggatacggctcgttcaggcatcgctcatactatggacgaagcatttgcagtggctgagcaagtgggtttcccttgtattattcgcccttcatttactatggggggaacgggaggcgggatcgcctataatcgtgaagaatttgaagaaatttgtactcgaggtttagatttatcaccgacaaatgaactattaattgatgaatcattaattggctggaaagagtatgaaatggaagtggtgcgcgataaaaatgataactgcattatcgtttgctccattgaaaactttgatgcgatggggatccataccggtgactctatcacggttgctccagcgcaaacgctaacagacaaagaatatcaaattatgcgtaatgcctcgatggcagtattacgcgagattggggttgaaaccggtggctccaatgtgcaatttgccgttgatcctaaaacagggcgtttaattgttattgaaatgaaccctcgtgtttctcgctcatcagcattagcgtcaaaagcaacaggtttcccaattgcaaaagtcgcggcaaaacttgcagtaggttatnnnnnnnnnnaggttataccctcgatgagttga

SEQ ID NO: 294978 - DNA, 1164 bp, Proteus mirabilis
ttgattaaatcagctatactggttctagaagatgggaccgaattccacggcaggtcgataggcgcagaaggcgctgctatcggtgaagtcgtttttaatacttccatgaccggttaccaagaaatattaaccgacccttcttactcccaacaaattgttactctcacctatcctcatattggcaataccggcgttaattcctcagatgaagaatcagcaactatccatgctcaagggttaattattcgcgatttacccctagtgatgagtaattatcgtgccgaagagagcttagccgattaccttaaacgtcatcagattgtggcgatagctgatattgatacacgtaaattgacgcgattattgagagaaaaaggcgcacaaaacggttgtattatcgcaggcactcatcttgatgctaaacaagcgcttgaaaaagcgaaagcgtttccaggattaaaaggaatggatttggcgaaaacggtgacagtgaaacaaccttatcaatggacacaaggcagttggacattaacaggggagttgcccgccactcaatcaccacaagatctccctttacatgtggtggcctatgattttggtgtgaaacgtaatattttacgtatgttggtggatagaggctgtcgagtgacagtggttccagcacaaacctcagcccaagaagtgttagcgctctcacctgatggcatttttctctctaatggtccgggggatccagagccctgtgattatgcaattgacgccatccaaactttcttaactaccgatattccagtatttggtatctgcttagggcatcaattattagccttggcgagtggtgcaaaaaccgtaaaaatgaaatttggtcatcatggtggcaatcatcccgttaaagatttagataataacagtgtgatgatcaccgcccaaaaccacggctttgctgttgatgaagtatcattacctgattgtttaagggtgacacataaatcactatttgatggttcgctacaaggtattcatcgcacagataaagctgcatttagtttccaaggtcacccagaagcgagcccagggcctcatgatgcggcgccgctttttgatcactttattgaacttattgagcaatatcgtcaaaacctgcaatcagtgacaaacaaataa

SEQ ID NO: 294979 - DNA, 822 bp, Proteus mirabilis
atgtctgcaacagaacttcgtcttgccgtagtgggggctggagggcgtatggggcgccagctgatccaagcgattaatcagcaacaaggtgtggtattaggtgctgcttttgaacgtactaattcttcattgataggggctgatgcaggagagttagcgggaattggtcatatcggtatcactgttactgataatttattagctcaagtcgggcaatttgatattttaatcgattttacgcgtccagagggtacgttgtcccatctggcattttgtgttgagcatcataaaggcatgattattggaactaccggttttgatgaagaaggtaaaaaagccattaattgtgctgcacaaactattcctattgtctttgctgctaactttagtgttggcgttaatttagtgcttaaattattagaaaaggcagctaaagtgatgggatcttatagtgatattgaaattgtagaagctcaccatcgtcataaggttgatgcaccatctggtacggccttagcgatgggcgagtcgattgcagagactttaggtcgtgatctgaaagattgtgcggtttatcaacgagttggacatacaggagaacgtgatcctagcagtattggctttgcgactattcgtgcaggggatattgtgggtgaacacactgctatttttgcagatattggtgagcgagtagagattagccataaggcctcgagtcgaatgacctttgcaaatggtgcagttaagtcagctatttggttaagtgaaagaaaatcgggtctttataatatgaaagatgtgctttctttagaaggattgtga

SEQ ID NO: 294980 - DNA, 954 bp, Proteus mirabilis
atgcaaatattgctggctaacccacgaggcttttgtgcgggtgttgaccgagctatcagcattgttgaacgtgcattagaaatctatggcgcgccaatttatgtacgccacgaagtggttcataatcgctatgtagtcaatgatttacgcgaacgtggtgctatttttattgaagaaatctccgaagtgccggataacgctattttgatcttctcagcacacggtgtttctcaagctattcgccaagaggcacgctctcgtaatttaacgatgctttttgatgccacttgtcctttagtgaccaaagtacatatggaagtcgcaagggcgagccgtaaaggtaaagaggccattttaattggccatgccggacacccagaagttgaagggacgatggggcaatacagtaacccagaagggggaatgtatttggttgaatctccagatgatgtatggaaactaaaagtgaaagatgaagataatctttgctttatgacacaaactacattatccgtcgatgatacttccgaagtgattgatgccttaaataaacgattccctaaaatcatcgggccccgtaaagatgatatctgctatgcgacaaccaatcgtcaagaagctgctcgagagcttgcagagcgtgccgatgtcgtgtttgttgttggctctaaaaactcatctaactcaaatcgattagcagagcttgcacaacgtgcaggcaaaccctcttatttaatcgatagtgctgaagatattgatgaaatatgggtaagccatgccaatattgttggggtgacagcaggagcatcagcaccagatattttagttcaacaagtcttagcacgattaaaggcctttggtgcagaagaagtgattgagctatctggcagagaagaaaacattgtttttgaagtgccaaaagagttacgtcttgactataaagtagtcgaataa

SEQ ID NO: 294981 - DNA, 471 bp, Proteus mirabilis
atgagtatgcagatcctcaataatagtgcggtattgctgaatttcaccttaaaattggcagacggctctgttgctgaatctacacaagcacatggaaaaccggcgttatttcgtcttggtgatgaaagcttatcgcctgctttagaagcagagttggtaggacttaaagaaggggaaaagaaaaccttcacgcttgcgggggagcatatttttggtaaatataatcctgatcttattcaatactttatgccttctgattttgcgcaatccggtattcctgaaacaggtaccattatgctgtttacggcaatgaatggtaatgaaatgccaggaattgtgcaggaagtgacggaagattctgttactgtcgattttaatcatccattagcgttacaagatgtcacatttgatattgaagtcgtcagtattgatccacaggaggaaacaacaaatgcaaatattgctggctaa

SEQ ID NO: 294982 - DNA, 516 bp, Proteus mirabilis
atgaagaaaacactttgctctacaggtttacgctggctctggttggctattgctgtagtggtgttggacttaggtacaaaacagtatttcatgcagacattccgtctgtatgaatctgtggctgtcatgccttttttcaacttcacttatgctcataactatggcgcagcttttagctttttagccgataaaggcggatggcaacgttggttttttgcattaatcgcactggcaatctgcattgtcttagtggtgatgatgtataaaaataaagcgagtgccaagctaagtaatattgcttatgcgcttattataggcggagcattgggtaatctttctgatcgtctgatccatggatttgtcatcgattttctggacttttatgtcggtgattggcattggcctacttttaatattgctgatgtgtctatttgtcttggtgcaggtttaattatcattgagagctttttccctgataagaatgccagcccacaagaagccaacaagcagaagtaa

SEQ ID NO: 294983 - DNA, 2811 bp, Proteus mirabilis
atgagtgactataaaaataccctgaacttaccagaaacagggttccctatgcgcggggatttagcaaagcgcgaaccagaaatgttatcacgttggtacaaagaaggtttgtatcaagctattcgtcaagctaaaagtggtaagaaaacatttattttgcatgatggccctccttatgccaacggcaatattcatattggtcactcagtaaacaaaattctcaaagatattattattaaatccaaagggctgtcaggctttgattctccgtacattccaggatgggattgtcacggattacctattgaattaaaagttgaacaaattgtaggtaaaccaggagaaaaagtctctgcagctcaattccgcgaggagtgccgtaaatatgcttatgagcaaatagaggcgcagaaaaaagattttattcgtttaggtgtgctaggagattgggacaaaccttatctcactatggactacaaaacggaagccaatactattcgtgcattagcgcgtattatcgctaatggtcacctattaaaaggggcaaaacctgttcactggtgtacggcttgtggttcatcgctagctgaagcggaagtggaatattacgataaaacctctccttctatcgatgtgcgtttccgtgcggttgattcaaacgctgtagcggctaaatttggtgtcgtcactgataaacctatttctttagttatttggactaccacaccatggacattacctgctaaccgtgcaattgcattaaatggcgaatttaattacgcattagtttcatttaatgatgagtgcgtcattttagcggcagacttagttgaacacgttatgaaacgtatcggtgtcacagactgggctgttttaggtgaatgtaaaggtagtgatttagaattattgcgcttcaatcacccatttatgggctttgatgtgccagccattttaggcgatcacgttacattagatgccggtacaggggctgttcataccgcgccgggtcatggtcctgatgactttgttattggtcaaaaatatggtttagaagtggctaatccggttggacctaatggttgttatcttcctaatacgtatccgaccttagatggtgtgtttgtttttaaagctaatgatgtgattgttgagttactaaaagaaaaaggtgctctattacatcatgaagcaatgcaacatagttatccttgctgttggcgacataaaacaccagttatcttccgtgccactccacaatggtttatcggtatggataaaaatggattacgtcaacaatccttaaaagagatcaaaggtgttaaatggatccctgattggggccaagctcgtattgagtcaatggtggaaaaccgtcctgactggtgtatttctcgtcagcgtacttggggaacaccaatgtcgctgtttgtgcataaagaaacacaagagcctcatcctcgtactctagagttaatggaagaagtcgctaagcgtgtagaagtgagtggtattcaagcttggtgggacttagatatccgcgaactgctgggtgatgaagctgatgactacatgaaaacacctgacacacttgatgtttggtttgattcaggatcaacgcactcaaccgtagttgatgctcgtcctgaattccatggcaattctgctgatctctatttagaaggttcagaccaacatcgtggttggtttatgtcttctcttatgatttcaacggcaattaaaggcaaagcgccttatcgtgaagtattaacacacggtttcaccgtagatggacaaggccgtaaaatgtcgaaatccattggtaatactgttagccctcaagatgtaatgaacaaactgggtgcggatattttacgtttatgggttgcctccaccgattatacgggggaaattgcggtttccgatgagatcttaaaacgttctgctgatacttatcgtcgtattcgtaatacagcgcgtttcttcttagcgaacttaaatggctttgatccagctaaacatcaagttaaacctgaagagatggtaatacttgatcgttgggcggtcggtcgtgcgaaagcggcacaggaagatatcctcaaacactatgaaaactacgatttccataatgttattcagcgtcttatgcagttctgctcagtagaaatgggatctttctatctagatatcattaaagacagacaatacactgcgaaaagcgacagtgttgctcgccgtagttgtcaaactgcgctataccatattatcgaagcattagtacgttggatggcaccaattatgtcgttcactgcggatgagatttgggcacagttaccgggtgagcgtgcgaaatttgttttcactcaagaatggtacacagatttatttggtttagaggcatctgaaaccttaaatgatgagtactgggcggaattattagccgttcgtagtgaagtcaataaggtgttagagcaagctcgtaccgataagcaactacgtggctctttagaagcggcagtaacactgtatgcggataaagccttagcggaaaaactgaatgcattaggaaacgaattgcgttttgttttacttacctctcaagcgaccgttgctgatattcatgatgcgccagaaaacgcgttagcatctgatatggcggggctgaaaattgtcttgagtaaagcgcaaggtgaaaaatgtccacgttgctggcactatgcaactgacattggtcaagtggcggaacacgctgatttatgtggtcgctgtgttactaacgtagccggtaacggtgaagaacgtaagtttgcttaa

SEQ ID NO: 294984 - DNA, 942 bp, Proteus mirabilis
atggagctaattcgcggtatacagaatattcgagcacaacatcatggttgtgttctaacaattggcaattttgatggtgtccatcgcggtcatcaggcattattaaaacacttgaagcaagaagcatcacgtcgtggcctacctactgttgtgatgacatttgaacctcaacctctggagttttttttgccagagaaagcacctgctcgtctaacgcgcctacgcgataagataaaatatttggcagagtgtggtattgattacctgttatgtgtcaaatttgataagcaatttgcagcacaaacaccggaagagtttgtttcatcactcttagttgataaattaggtgtgaagtttttagccattggcgatgattttcgttttggtaaaaatagagcaggtgattttcattttttacaacaagccggtgctcgatacggatttgaggtggcaaataccgaaagttattgtgacaaaggattacgtattagcagtacggcggtacgagaagccttattcaatgacgatttagcattagctgaatcattgcttggacacccttatagcgtttgtggacgcgtggtacatggtaatcaattaggcagaactattggttttccaaccgccaatattcccatgaaacgcttagtggcacctgttgctggtgtttatgcggttgatgtttatttagccgaccatcaatcgcctttagcgggggtggctaatattggcagtcgtcctaccgtaaaaggtaagggtgtacaattagaagttcatttaatcgacgttaatatggatttatatggacgtcgtattgatgttgtgttacgaaagaaattacgtaatgaacagcgatttgcatcattggatgcgttgaaacagcaaatcgcaaatgatgtggctgctgctagggattttttattgcagcggtcggagtcataa

SEQ ID NO: 294985 - DNA, 261 bp, Proteus mirabilis
ttggctaatatcaaatcagctaagaaacgtgcggttcagtctgaaaagcgtcgtcagcacaacgcaagccgtcgttcaatgatgcgtacttacatcaaaaaagtatacgcagcagttgcttctggtgataaagaagcagcacaaaaagcatttaatgacatgcaaccaattgttgaccgtcaggcaactaaaggcttaattcataagaataaagcagcacgtcataaagctaatctgcaagcacaaatcaaagcaatgtaa

SEQ ID NO: 294986 - DNA, 918 bp, Proteus mirabilis
atgcgtgtgtcacatctcaattttaatcatctttattatttttggcatgtgtgtaaagaaggctctgttgtaggggctgcggaagcgctgtatctgacacctcagacaattacagggcaaattaaagcattagaagaaagattaggggggaaattattcaagcgtcaagggcgcggattagttccctctgaattaggtcagcttatttttcgctatgccgataaaatgtttatgctgagccaagagatgctagatattgtcaactatagtcgagaatctaacctgttatttgatgttggggttgccgatgcgctatccaaacaacttgttagtcgtgtattagaaacggcggttattgatcatgaacaaatacatttacgctgttttgaatcgactcacgaattgttgttagagcaattaagtcagcataagttagatatgattttatctgattgtcccgtagattcctcacaacaagaggggctgttctctgttaaattgggtgagtgtagtgtcagttttttctgtagtcagccaataccagaaaagccattcccagaatgtttagaagatagaaaattgcttatccctggtcgacgctctatgttaggtcgtcatttgttaacttggatacgcaataaaaatcttcaagtagaaattttaggtgaatttgatgatgctgcattaatgaaagcatttggtttaaatcataatgctatctttgttgcaccttctatttataccaatgagacatttgtccaaagtaatattgaggaaataggcacattagactcggtaaaagaagagtattacgttatttttgctgaacgtatgatccagcatccggcagtacaacgtgtgtgtaataccgatttttcagctttgtttagtggtgaaaagaaagccaataacgaatga

SEQ ID NO: 294987 - DNA, 1179 bp, Proteus mirabilis
atgacagcaattattagacaatttttaagattagaggcatcaggcggtattcttctgattgttgctgctattatcgcattaataatggcgaatacacctcttagtgctttgtataatgagtttttatctatcccaataatgattaaatttggggcattagagctagataaaccgttgatcttatgggttaacgatgcactcatggccatctttttcttagtggtaggattagaagtcaaacgggagctaaaagaaggttccttagcgcaacgtgatcgcgctatttttcctgcaattgctgcagtaggaggaatgttagcacctgctttgatttatctattttttaatcatggcgatgcgattggtcagcaaggatgggctattccggcagcaacagatattgcttttgctctaggtgtaatggcgttactagggcgtcgcgttcctgtggaattgaaagtctttttattagcgctagccattattgatgatcttggtgtcattgtgattattgctctcttttactctaagagtgtggcattagtcccgttattattggcagcgctaattaccatcatgttgtttattcttaattggcgtaaagtgagtaatacagcagtttacttagtcctaggctttattttgtgggtgtgtattttgaaatcaggtatacatgccacaatagcgggagtgattgttggattcttgatcccattaagagataaagagggggcttcaccgtcggaagagttagagcatgttttacacccgtgggttgcctatttaatattaccgctatttgcatttagtaatgcgggggtttctttaaatggcgttacccttgatggcatgttatcgaccttacccgttggtattgcattagggcttttcttaggtaagccgattgggatttttctctttagttgggtttcggtaaaactagggattgcaaaattgccagatgcgattaatcttaagcaaatatttgccgtttctgttttatgtggtatcggttttactatgtctatctttatcgcaggtcttgcgtttgaaggtgctatagaagcctataatacatactctaaactgggtattttagttggctcaaccatggctgctgttgtgggatatttattgcttaactctgttttaccgaagttgaagcagaagcaaaaatag

SEQ ID NO: 294988 - DNA, 1137 bp, Proteus mirabilis
atggcgaaaagagatttttacgaagtactcgggttaagtaaaacagccgatgaaaaagagatcaaacgtgcttataagcgtttagcgatgaaatatcacccagatcgtaatcaaggtgataaagattcggaatctaaatttaaagaaattaaagaagcttacgaagttcttagcgatccacaaaaacgtgcggcttatgatcaatatggtcatgctgcctttgaacaaggtggttttggtggtcaaggcggtggcggctttggtggcgctgactttagcgatatctttggtgatgtgtttggcgatatttttggtggtggtcgtcgtcaacaacgtgctgcacgcggctcagatttgcaatacaacatggacttaacgctagaagaagctgttcgtggtattaccaaagagatccgcattccaaccttagaaacctgtgataaatgccacggcagtggggcaaaagaaggcacatcagcggaaacttgctcaacatgtcatggggcaggtcaggttcatttacgtcaaggtttcttcaccgttcaacaaccatgccctacttgtcatggtcgcggtaaagtaattaaagagccttgctctaaatgtcatggtgatggccgtgttgaacgttataaaaccttatcagttaaaatcccggcgggagtggataccggtgatcgtattcgtttaagtggtgaaggtgaagcgggtgagcaaggagcaccggcaggcgatctgtatgtacaggttcatgttcgtcagcaccatatatttgaacgagatggtaataacctctattgcgaagtacctattaactttgcggttgcagcattagggggagaaattgaggtgccaactctcgatggtcgtgtgaaactaaaaattccagcagaaacacaaactggcaaaatgttccgcatgaaaggcaaaggtgttaaatctgtacgtagccatggtgtcggtgatttaatgtgccgtgttgttgttgaaacgccagtgaaactgaatgaaaaacaaaagcagcttatggaacagctaggtgaatcatttggtggtaaaggtggtgaaaaaaatacaccgcgctctaagagtttcttagatggagtaaaaaaattctttgatgatttaaccaaataa

SEQ ID NO: 294989 - DNA, 1926 bp, Proteus mirabilis
atgggtaaaattattggtattgacctgggtacaactaactcttgtgttgctgtaatggacggtaagaatgcccgggttattgaaaacggtgaaggcgatcgtaccactccttcgattgttgcatatgcacaagatggtgaaattctagttggtcaaccagcaaaacgtcaggctgtgactaacccacaaaatacattatttgccatcaaacgtttaatcggtcgtcgtttcgaagacgcggaagtacaacgtgatgtttctatcatgccttacaaaattattaaagctgataatggtgatgcatgggttgaagcacgtaacgaaaaaatggctccaccacaagtttctgctgaagtattgaaaaaaatgaaaaaaacagcggaagattacttaggtgaaccagttacagaagctgttattacagttcctgcttactttaatgatgcgcaacgtcaagcaactaaagatgcgggtcgtatcgcgggtttagatgttaaacgtattattaacgaaccaacagctgcggcattggcttatggtttagatcgtgaagtgggtaaccgcactatcgctgtttatgacttaggtggtggtacattcgatatctctatcatcgaaattgatgaagttgatggcgaaaaaacctatgaagttctgtcaaccaatggtgatactcacttaggtggtgaagatttcgatagccgtttaattaactacttagttgatgagtttaagaaagaacaaggcattgacctgcgtaatgatccattggcaatgcaacgtctgaaagaagctgcagaaaaagcaaaaattgaattatcttcagctcaacaaacagatgtgaacttaccttatgttactgctgatgcgacagggcctaaacacttaaatatcaaagtgactcgtgcaaaactggaatctttagttgaagacttagtaaaacgttcaatggagccagtaaaagttgcattagaagatgcgggcttgaaagtcagtgaagtaaacgacgttattctggttggtggtcaaactcgtatgcctatggtacaaaaaactgtggctgagttcttcggtaaagaaccacgtaaagacgttaacccagatgaagctgttgctatgggtgctgctgttcaaggtggtgtattagctggtgatgttaaagacgttctgttacttgacgtgactccactgtctttaggtattgaaactatgggtggcgtgatgacttcgctgattgcgaagaataccactatcccaactaaacatagtcaagtattctctaccgctgaagataatcaatcagctgtaactattcacgtattacaaggtgagcgtaaacgtgcgagtgataacaaatcactgggtcaatttaacttagatggtattcaacctgcaccacgtggtatgccacaaattgaagtgacttttgatatcgatgctgatggtatcttgcatgtatctgcaaaagataaaaacagtggtcgtgaacaaaacatcaccattaaagcttcttcaggtttaaatgaagaagaaatccaaaaaatggtacgtgatgcagaagctaatgcagaagcagaccgtaaatttgaagagttagtgcaaacacgtaaccaagcagatcaattagttcacggtacacgtaaacaaattgaagaagcgggtgacaaattagcggctaacgataaagaagctatcgaaaaagcgttaagcgaattagaaattgcttctaaaggtgaagataaagctgctattgaagcaaaactgcaagcgttagttgaagcttcaaaacctctgttagaaattgcacaacaacaagctcaagcgggtgcaggtaatactgccgatgcaactgatgcaggtgcgaagaaagatgacgatgttgtcgatgcagagtttgaagaagtagacggcaaagataaaaaataa

SEQ ID NO: 294990 - DNA, 588 bp, Proteus mirabilis
atgaatgaattacgtataggactggtttctgtttctgatcgtgcatccagtggtgtttatgaagataaaggcctgcccgctttagaagcttggctaaaaaaagcaatcacaaccccttttcatatcgaatcacgtttgatccccgatgagcaactgatgattgaacaaacattatgtgaactggttgatgaagcaggatgtcacttggttttaacaacgggaggcacagggcctgctcgtcgtgatgttacgcctgatgcaacattggcgattgctgatagagagatgccaggcttcggtgagcaaatgcgccaaatcagtttgaaatttgttcctacggcgattttatctcgtcaagtgggagttattcgtaatcaagccttaattttaaatttaccgggacagcctaaagcgatcgcagagacattagagggattaaaagacagtgagggacaggtgattgtcagtggtatttttgccagtgttccttattgtattcaattattggatggcccttatatcgaaactaacgaagaaattgtggttgcctttagacctaaatcagcacgccgttctacatctgcttaa

SEQ ID NO: 294991 - DNA, 984 bp, Proteus mirabilis
atgaaaaagatggttttggcaacagtactggcatcgctcttttttagtagtgttgctatgtcagaagataaaacagccttctctttacctgcgattgaaaaaagtgcggaagaagggaatgccgcttctcagtatcaacttggtgttaaatatgaaggtggcgaaggtgtagaacaaaatacacaaaaagcattggagtggtacacaaaagcggctgaacaaggtcatgcagaagcgcaattaaatttagcgttaatgtatgatatgaatgatgatattgagcgtgatgctgaaaaagcggtttattggtataacaaagcggctgttcagggactctctttagcacaatacaatttggccgtctcttttgatgaaggggatggtgtagagcaagatcatgaaaaagcagtgtattggtatacaaaagccggtgagcaaggtgatagcgatgcgcagtataatttagcgatttcatatgatgaaggtattggtatcgaacaagatcatgaaaaagcggtgacttggtacactaaagccgcagagcaaggtcatgctgatgcacaatacaacttagctgtctcttacgatgaaggcgaaggggtcgagcgtgatggtagcaaagcggtattctggtataccaaagcggcaaatcaaggtaatcgagatgcgcaaaataaccttggtgtgatgtatgacgaaggtgatggtgtagcaaaagatcaacgtaaagcgaatgaatggtataaaaaagctgcgctacaaggtaatggcttggcacaaaataaccttgcaataaactattattatggcaaaggggttaaacgtaacttgaaagaagcctatgcatggtttgctgttgctgtagaaaatggtgaaggtgatgaggctatgctaaaacgaaccgcccgtgccctcaatgctgctcaattagcagaagctaaacttttagctgcttcttatattgctaaatatcttgatgactaa

SEQ ID NO: 294992 - DNA, 954 bp, Proteus mirabilis
atgaccaacaaattaacttctttgcgtaaactgactacagttgtagctgatacaggtgacattgcagcaatgaaactgtatcaacctcaagacgcaactaccaacccttctttaattttaaatgcagcccaaattcctgaatatcgtaaattaatcgatgaagcgattgaatgggcgcgttcacaaagcgattctcgcgagcaacaaatcgttgatgcgtgtgataaacttgctgtcaatatcggtttagaaatcttaaaactgatcccaggtcgtatttcaacagaagttgacgcacgtctttcttatgataccgaagcctgtatcgtcaaagcgcgtcgtttaattaaactgtataacgaagcgggtattagtaacgatcgtatcctgattaaacttgcttctacatggcaggggattcgtgcagctgagcaattagaaaaagaaggtatcaactgtaacctaactttactgttctcttttgctcaagctcgtgcatgtgcagaagctggtgtatacctgatctctccattcgttggccgtattatggattggtataaagccaatacagataaaaaagagtttgcaccagcagaagatccaggtgttatttctgtaactgaaatttataactactataaagagcatggttataacaccgtcgttatgggagctagcttccgtaatattggtgaaattttagaattagcaggttgtgatcgcctaactatttctcctgcgttattaaaagagttatcagaagcacaaggtgaagtagagcataaactatcctttaatggtgaagttaaatcacgtcctgcgccaatcactgaagctgaattttattggcaacataatgctgatccaatggccgttgataaattatctgatggtattcgtaaatttgcggttgatcaggaaaaattagagaaaatgattgcagatttattataa

SEQ ID NO: 294993 - DNA, 786 bp, Proteus mirabilis
atgctaattactatttcaccagctaaaacactggatttcgaatcgcctttagcaacaacgcagttcacccagcctgaattgctaaaatattcccaacaacttattacagaatgtcgaaaactgtcgtccagtgatatcgcaagcttaatgaaaattagtgataaattggcaggactaaatgcggctcgctttggtgaatggcaacctgactttacacccgataatgcgcgacaagccattttagcgttcaaaggtgatgtttataccggaatgcaagccgctgaacttttcacagatgacgactttcaatttgcacaacagcatttacgtatcctttccggtttatatggcgtattgcgcccactcgatttaatgcaaccttaccgcttagagatgggcataaaactgaacaataaaaaaggcagtgatctataccagttttggggtaacataattactgaaatgttaaataacgcccttgaagctcaaggggataatatcttggttaatttagcctctgatgaatattttaaatcagtcaacccaaaaaaactcaatgcggaaattattaaacctgtttttcttgatgagaaaaatggcaaatataaagtgattagtttttatgctaaaaaagcaagaggtttaatgagccgttttattattcaagaaagattaagtgataaggcacaacttaaagaatttaatctagagggttatcaatttaatgccgccgagtctgaaggcaatacccttgtctttaaacgtgcagaacatctagcaaaataa

SEQ ID NO: 294994 - DNA, 2193 bp, Proteus mirabilis
atgccagccgttattcagacagaaaaaagatatatagggtatgaagttaacctatctaaaaattatattaaatttatcgggggagaaaataaatccaatagccagagttttcatgccagactttttatctttcaagagcaaggacaaatctatacccataaattagcggatacaatgcctaatataacactacaaaaacaacccgttattgcctatttagagagtattgaaaatgtagtaggcagtgaaataggtaatgatattatttatggtgaccaaaaaaataactatttaaatggcatgggaggggtagattcattatatggattagctggagatgatacgctggtattacgggaaggttatgcacaaggaggggcggggaatgatagttatacgattctaagagcatcaaatacggataataatgttaaacaacttgaaactattattgatgaagagacgcatacagaagctagtcttatccagttaaattatacttttgatgaaattaccgctatttctcgtcgtgaaacagatattgtttttacgcttaaagttagtaatgataaagatcctgatcaatttatcgagcatttaattgcattaagtcatgtataccaagataaaaatagtcaattattagcccatcgatataccattgtgactatggatggttttatacttactattaatgaaaataataatcaaccaagagaggtatcatataactttagttatttagaaaagtataatcagcaagagaagcttcaacagctttctattaatgacgataaacacacattgtctattcaatctgaaaataaaactaaacttattcaattattacctgagctacaatacagtggtttctcttctggagaacatttaaagcttaatctacagggtaatagcgagaataatcattatgctggaattgcggctcattcatcaattaaactgagtcgcggttatgacaattatcaaataagctcattgctagctaaaaatagaaatgaaaagatcattatttctctgagtgataatgataaacaattaacatctgattgtactagtcatttctttttatccgatgtgagtggatttgatttgatgtttagtgatggcgttttatctcatcgctataatcctgatgctcatattaaacttgttttcgatacggaaagtgttagtgctatttttaactcaggaatgacacttcaatttattgataaagataatcgagtttttcatttgcctaagccagacagcggtcagcgtttactgatccccactatcactttggatgttaggttgagtcatcaaagtgatgttctgatgatcccaccctccctacgtttaaataaagaggcattatcattgtatcctcagtattttcatagagaagaaccatcatcacgttcaacgcaattacagcgtattatatccactcaaacactagagccttatccattaaaggtaacagaattactgagagatgatattgctgttaatgataatcaacctgttaattctattttgtctctcaataaactattttcaaacagatcacaagatatattctctcaagctatagatttattaccaatgatagaattaatggatggtgatgatattgttgttaatcataatcaaagtagctcagtgattgatgggggtaaaggtgatgatcatattgttgtcaatgaagggcaccatattttaattgctggagaaggtaatgataatcttaatggcggaagtggacatgatctgtttatttcaacctcaggaaatgattatctaggtggaggaagtggtaataatgtttatgtggtacaaaaacgtcatggtgaagtgacggtgtatgatgaaggtgaaatgagccatatttttgtatcaggattatctgagcatgaaaaattaatatcctctcaagcaggtaaagataaacagtatcgagcggctgataatcaatttgtcttgactgttaaaacaaaccgagtagagaaaatagaaactgatcctgtgaaggttatcgaaaaagaacagacattatcaatgggatcccttgcgacaattattcaacaaatggctcaatttaatcagcaacaactatcgacgatgcaaggcagtgacgttattccctcatcaaactggtcgcctttagctgtggtcgttaagcatttataa

SEQ ID NO: 294995 - DNA, 687 bp, Proteus mirabilis
atgcaactaagcgaacaacgctcagcatcccaaaaaaatctttcttatattgttgctgaaaaactaggtaaacaaatactttctggatactacgaacctgaatctttattacctggtgaaatagaactcgctgaactactttcagttagtcgaactgttattcgtgaagcaataaaaatgcttgctggaaaaggtatgttactacctcggccaagaataggtactcgagttacgccaatgcaaaattggaatctattagataatgatttacttaattggtggatagatagcggtgaatttaataaggtgagtcattatttccatcatgttcgtttagcaatagaacctcaagcctgttatttagctgcattacatgcttcagagacacaaaaagagtcgctattatttctagctacagaaatgcagctactcaaagataactttaaccgtcagcattggttagatattgatactcaatttcactatctaatctatcaagccagtggcaatccattttttgcttcttttggttctctttttctatctgcctacaaaaaatattttgatttaattgttggcaatgaaacagtacagcctgaaactcataatcaaattgtacaagcgattatagaaggagatggaaatagagcgcgtgatctttgtttaatactattaataaatgactga

SEQ ID NO: 294996 - DNA, 1350 bp, Proteus mirabilis
atggctttttttatgcagtcattagatgcgactatattaaatacggcactccctgatatagctaaaagtcttaatcactcccctctcgccatgcaatcagccgtaattagctatactttaacggtagctttattaattcctgtaagtggatggttagctgatagatttgggactcgcaagattttcattatcgccgtttcactcttttctggcggttcattattatgcgcactttctcctaaccttgcttttttggtaatttcgcgggttatacaaggaataggtggtgcaatgatgatgccggttgctcgtcttgctttattaagagcttatcctcgtagcgaactccttcccattcttaactttgtcaccatgccgggacttgtggggccaattgcgggtccattattgggagggatccttgtcacctatgcttcttggcattggatatttattattaatattcctattggcttacttggtattttttacgccataaaacatatgcctaattttacgatgccaaaacgtaaatttgacttactcggctttattttctttggttttggtttagtcatgttatccgtcagcctcgatctttttggcgataaaaacatctctcgatatatccctcttgcggtgattttaggtggcttctttttactcggtctctatatcaatcacgctaaacgccaccagcaacccttaataccattaaatatattcaaaacacggactttctctgtcggtattgcgggtaatatcgcaacgcgcttaggaacaggatgcattcctttcttaatgccactgatgttacaagtaggttttggctatcctgctattatctcaggtatgatgatggcaccaatggctttgggctctatactcgccaaatcctttgtgacaaaagtcttagtgacatttagctatcgccggacactatttggaataaccattattataggtctgatgattgcacagttttccttacaatcacctgatatgtctatttattacctagtattaccactctttttattaggtgttgtcatgtcaattcagtttacttcgatgaatactatttcactcgctgacttaactgacaataatgccagttcaggcaatagtgttttagccgtcactcaacaactagcgattagttttggtattgcagtaagtgcttctatcttaaattattttgatgcagaaaatgccggctctacggtagataacttccattatacttttattactgtcggcgctatcacactactctcttcatttgtcttcttattacttaataagcatgatggtgataatcttactaataagaagaaaaatgaaaactaa

SEQ ID NO: 294997 - DNA, 927 bp, Proteus mirabilis
atggaagcgaagaaattagtgattttaggtagtgttaatgtcgatcatattcttaatgttgctcattttccgcatcctggtgaaactatttccggtaatcagtatcagatggtttttgggggtaaaggtgcaaatcaagccgtcgctgcagggcgttgtggtgctaatattacctttttagcttgtcttggaaatgacgatattggtcaaagtgctaaagctcagctgatcacagataaaatagatacagattgtattgaattaattgatgatgaagccacgggtgttgcgttgatttttgttaatcagcaaggtgaaaacgttattggtatacacgctggagccaatggaaggttaaacagagaatatgttgaacgttataactcggtgattaaaaaagcagatgctttacttatgcaattagaatcacctctagattctgtattaaaagcggctcaagtcgctaaacaagaaagtgtgcaagttatattaaaccctgcaccagcacaggctttaccagatgaattattatctctcgttgatatcattacacctaatgaaacagaaactgaatacctcacgggggtaaaagttattgatgatgaaagtgctcaacgtgcatctaatatattacatgataaagggatagaaaccgttttaattactttgggtagccgtggtgtttgggttagtcaaaacaatcaaggaacgatggttccggcatttaaagtgaccgcaatagatactattgctgcaggagatacatttaatggcgcttttataacggctttattagaaggtttaccaatgatgaaggcgattaaatttgcgcatgcagccgccgctatcgctgttactcgtgcaggagcacaaccgtcagtaccttggcgccatgaaattgaagcttttttgtcgcagcatgactag

SEQ ID NO: 294998 - DNA, 1500 bp, Proteus mirabilis
atgcaacttgcagaacggatctcacaacttagccaataccttgaaactgggctttatgaacgtcaatcagcgatacggctttgcttactcgcggctttaagtggagagagcgtttttttgctaggtcctccaggtattgctaaaagcttaattgcgagaagaatgaaagaggcatttaaacacgctaaagcgtttgaatatttaatgacccgtttttcaacacctgaagaaatttttggtccactatccattcaagcattaaaagatgaaggaaaataccaacgtttaaccgaaggttatttacctgacgccgaaattgtttttcttgatgaaatatggaaagccggtcccgctattttgaataccttattaacggcaattaatgaacgtaaatttcgcaatggcgaaaacgaagtaagtattcccatgcgtttgttagtttcggcttctaatgaactacctgattcagacagcagtcttgaagcgctttatgatcgaatgctgattagaatttggttatcaaaagtacaagataaaaaaaacttccgggcgttattagttaataaagaggtcagcgcttttcgtattcctgaacaactacaaattacaacagaagaatttttactttggcaaacagagttagaaaaaattactttgaatgaccacttattcgaattaatttatcaacttcgcgactcactcgataaaagtgatgcagcaccttatgtttcagacaggcgttggaaaaaagcggttcgtctattacaggccagtgctttttttaatggtcgtagtgctatatcacctttagatcttattctgttaaaagattgcctttggcatgatcaagcttcttttgcgctgctaaatgacttattaaaaacactattaacagaacaagcataccaccagctaacacttttacagaaaatagaaaatctgtgggcagaatggatgcaatcgacaagaagcaaacaagatcaacaagcatttcgctttgaaaaacaaagtagtatgtttggtagaaatatacatttcaaattatcagaaaaaatgcagtctgataaatttacgctgtttttacatattccactgcatatacatagtattcaagttaactttataactgttgaaaaaaaagcattagaaactttcttagataaaggtgatgaactctctgccagattaaatggtattggtttcccacaatctattaatgcacaaattcgtcaagatggtgtcttagaggtgttggatgttagtcgccgaacaacgtcgttataccaacagtcagaaagcatcaaaacagagcctattgaagataatcaacaatggttagataaattaaaagatctcacccaagagatttattctgaacaagaaaattttaatcatcatcaacccaatatctttattgataatgattggctcatttctatagaacaaagctttttgcaattgaatgaaaaattatctcaattaagaagtcaaataaagtga

SEQ ID NO: 294999 - DNA, 1458 bp, Proteus mirabilis
atgctaacactttctaccatcgatatgcttttagcgataaacgaaggacagcttatagaagaagtgattatcactttattagcttctcctcaattagctgttttttttgaaaaacatccaagattaaaaaaagcattactaaaagacatttatcaatggaaaaaaagcttacaagaaaaagtgaaagaaacactggtgccgaccatcatcgcagatgaatttgcactttatcagcaaacgcaatcattatgtaatgctgtttttaatcagcaagtggacaatattcttacagaactaaatcagcttgattcttcatttgttatagaagcaacacaactaataaaaacaaataaacctttttccccagctcaacaagctctatttattcaacgctggcgcattagtttaatatttcaagtcacgacattacataaagcactgtttgaacaagagcaagagcagttacttgcagaactacaagaacgcttagcattaagtggcagtttaagtaatacattttctgaaaatgaacgggctgcaggccgtttatgggatatgagcaaaggcgttattaccaaaaccccctatgatgagaaaattattcaacgttatagtgattttctaaatcaacaacctgaattacataaattggccagcttactggggcgaagtaaaacggcgaaatcgcttcctgaagagagtgtgatttttgaatcaataacaatcgttgaaaaagcaccggataccacgccagaacaagtaaatggtataggcttaagtgatgatattttacgtttattacctgctgaactagctttattaggcataaatgaagttgagtatgagttttatcgtaaactcattgaaaaacagctcaatacttatcgtttacagggtgatagttggcaggaacgcacagtattacgcccagtcactcatcaccttgatgaagaacgaccaagaggcccttttatcatttgtatcgacacttctggctctatggggggatttaatgagcaatgtgctaaagcctttggtttagcgctaatgaaaatagcactagcggataaccgtgcctgtcatgtcatgcttttttcaacagaaatgatccattaccaattatcttcttctgatggattacaagaacttgttaaatttttgaatcaaacatttagaggtggaactgatttagcatcttgtttaaatgaggtagcagataagcttaatacccccacatggaaagacgctgatgctgttgttatttctgactttgttgcccaaaggttacccgaaaacctaatcaataaaatcaaaaaagtccaacagcaacagcataatcgcttccatgcggttaccctatccaattatggtaaacccagtattatgaaaattttcgaccacatatggcgttttgacactgggttaaaaagtcgattactacgacgttggcgtcaataa

SEQ ID NO: 295000 - DNA, 993 bp, Proteus mirabilis
atggaaaaatcattcattcagactcaacaacaaattagctttgttaaatcatatttttcacgtttattagaaaaagaattaggcctgattgaagttcaaggaccgatcttaagtcgccttggtgatggaactcaagataacttatctggtcatgagaaggccgtacaggttaaagtgaaatctttacctgattctacctttgaagttgtccattcattagcaaaatggaaacgtaaaacattaggtcgttttggatttagttctggtcaaggtctttatacacatatgaaagccttgagaccagatgaagatcgcttaacgccaatccattctgtctatgttgatcagtgggattgggaaaaagtgatggaaggtgaggagcgtacactaccttaccttaagcagacagtgggtaaaatctatcaggctataaaagaaactgaaaaagccgtcagcgatgaatttggtctgacaccgttcctgccagatcaaattcaatttattcacactgaagaactgttacgccgctaccctgatcttgatgctaaaggtcgtgaaaaagcgatagctaaagaatatggtgctgttttcttaatcggtattggtggaaaactatcaagtggcgaagctcatgatgtaagagcgccagattatgatgactggacaacacctaacgaagatggctttgcagggttgaacggcgatattttagtttggaacccagtattgcaagatgcttttgaagtgtcgtcaatgggtatccgcgttgatccagagacattaatgcgtcagctaactttaactgatgatactcaacgtcttgagttagattggcacaaagcattaatgcatggcgatatgccacaaacaattggtggcggtataggtcaatcacgtttagtcatgctacttttgcaaaaagagcatattggacaagtacaatgtggcgtttggcaacaagacacccgtttagcttttgcggatatgctgtaa

SEQ ID NO: 295001 - DNA, 462 bp, Proteus mirabilis
atggacaatatttatcagatcgataatctcgatcgtgacatacttcacgctttaatggcgaatgctcgaacaccttatgctgaattagctaaaaaatttgcagtaagtccgggcacaattcatgttcgtgttgaaaaaatgaagcaagcaggaattattacggggacacgcgtagatataagtgaaaaacaactagggtttgatgtttgctgctttattggcatcattttaaaaagtgccaaagactaccataccgcattagataagctagataagttagatgaagtggttgaggtttattatacaacaggtcaatacagtatctttattaaggtaatgtgtaaaagtatcgaagcgcttcaagacgtacttatcaacaaaattcagactattgatgaaatccaatcgacagaaaccttgatctctttgcaaaacccgataacaaggacaatcaagccataa

SEQ ID NO: 295002 - DNA, 441 bp, Proteus mirabilis
atgaaaaaagtcacgctaattagtggcagcaccatgggtagtgctgaatatgtcgccgaacacctcgaagagatcttatctaaagagggatttgagacagatctacaccatgggccttctcttaatgatcttccgcaagaagggatctggttggtgatcacttccacacacggtgcaggtgagatcccagataacctccagccatttgctgacgaaatctcagcagacggcattgatctaagtaaagtttctttcggtgctgtaggtataggaagtagtgaatatgacactttctgtggtgcgatcagaacattagatcaaaaactaatagaaaaaggggctgttcgattaggtgatcgcctagaaatagatatacaagaacacgacattccggaagatccagcagaggaatggcttacaacttggaaaaatttactttaa

SEQ ID NO: 295003 - DNA, 1899 bp, Proteus mirabilis
atgttttatccagaacattttgacgtcattgtcatcggtggtggtcacgccggtacagaagccgctatggctgcagctcgtatggggcgtcaaaccctattactgacccacaatattgatactttgggccaaatgtcttgtaacccagctattggtgggattggtaaagggcatctggtaaaagagatcgatgctatgggtggattaatggccacagccatcgaccatgctggtattcaatttagaacccttaatgcaagtaaagggccagcagtaagagcaacaagagcacaagccgatcgcgtactgtatcgccaagctattcgtacaacacttgaaaatcagcctaatttaatgatcttccaacaacccgttgaagatctcattgttgaaaatgaccaagtaacgggtgcagtcactcgtatgggattaaaattccgtgctaaagcggtagttttaaccgtaggaactttccttgatggaaaaatccacattggtttagaaaattacagtggtggccgagcaggtgatccaccatcagtctctttatcacatcgattaagagaattacctttacgtgtaggtcgcttaaaaacaggtacaccacctcgtattgatgcaagaactatcgattttagtcaattagcgccacagttaggcgataatccaatgcctgttttctcatttttaggtaatgtggatcaacatcctgaacagatgccttgccatattactcatactaatgagcaaacacatgaaataattcgtaacaacctcgatcgcagccctatgtatgcaggggttattgaaggtatcggccctcgttattgtccatcaattgaagataaagtgatgcgatttgctgatcgcaattcacaccaaatctttttagagcctgaaggcttaacaagcaatgaaatttaccctaatggtatttcaacaagcttaccttttgatgttcaaatgcaaatagtaaattccatgaaaggtatggaaaatgccaagatcatccgacctggttatgcgatagagtatgacttttttgatccccgtgatcttaaacaaacactcgaaagtaagtttatcaacggattattctttgctggccaaattaatggcactaccggttatgaagaagcagcagcgcaaggtctattagcaggtcttaatgcggcacgttatgcttttgatcaagaaggttggttccctcgtcgtgatcaagcctacattggtgtattagttgatgatctttgtaccttaggtacgaaagagccataccgaatgtttacttcacgcgctgaatatcgcttgatgttacgtgaagacaatgctgatttacgtttaactgaaattggtcgtgaacttggtatggttgatgacaaccgttgggcgcaatttagtgaaaaagtcgaattagttgaaaaagagcgtcaacgtttaagagatatttgggttcatccaaaagcggataacctagaagaaatcaatcaattacttaaaacgccactgtctaaagaggcgaatggggaagacttattacgtcgtcctgaaatgacctatgagattttgaaaaagatccctcgttttgctcctggtattgatgattcgagaccacaagcggcagagcaagttgagatccaagtaaaatacgaaggttatatcaatcgtcaacaagaagagattgaaaaacaactgcgtaatgaaagtgctgcattgcctattgatatcgactacaaacaggtgagtggattatcaaatgaagtcattgccaaactaaacgatcacaagccaacttcaataggtcaggcatcgcggatctccggtgtgacacctgcagctatctcaattttacttgtttggttaaaaaaacaaggtttattacgccggagtgcatcatga

SEQ ID NO: 295004 - DNA, 627 bp, Proteus mirabilis
atgagtgacttacttaatcggttaaaaaagctggcaaagcaagccaatattgagttaactgatgttcaagctcaaaaattaaccgcttatgttgctatgctcgataaatggaataaagcatataatttgacctctgtcagagatcctcaacagatgcttattcgtcatatcttagacagcatagttgtgagtcaataccttgaaggaaacaacttcatagatgttggtacagggcctggattgcccggtattcctttagcaataatgcgtcccgatcaccactttgtgttacttgatagcttaggtaaacgcgttcgttttatgaagcaagttcagcatgaattagctctgcataatatcgaacctgtgcaatatcgagttgaagagtatcaagtagaaaaaccatttgatggtgtgattagtcgtgcttttgcgtcaatgaaagatatgctttcttggtgttcacatttagtcactgaagaacacgggcgtttttatgcattaaaagggcagattcatcaagaagaacttgatgagctttctgaaaatggtttaaagatgcctgaaaaggtgattaatttagcgatccccgaattgaatgaacagcgtcatctggttattttttaa

SEQ ID NO: 295005 - DNA, 378 bp, Proteus mirabilis
atgtctgtctccctctacagcgggaaagttgcactgaaactgttatttttgcagtttatgacttttgttattctcagtgcgggtttctactttaagagtacagactggagcttttctgcttttttaggtggaattgcatgttggttacccaatattgcatttttattattactacgcttacaaaaagtagatgaaaatgaagcttcagttcgcataaactggctttttgctttcagtgaagggttgaaggttatattatcaatagccttgctgatagttgctttaggagtgtttaaagcggcatttgcaccactggtcatgacctacttagcggtgcttgttatgcaggtcgttgcaccagccgtcataaacggttag

SEQ ID NO: 295006 - DNA, 825 bp, Proteus mirabilis
atgtctgcatcaggagaagcattaaccactagagactacataggtggacatctgaataaccttcagttggacctacgtactttcgagttggtcaatccccatgctgaaaatacgccatcattctgggtgttaaatattgactcacttttcttctctgtactcatggggcttttgttcctatggatatttagaaaagtagcagtaaaagcaaccagtggcgtaccgggaaaattccagactgcagtagaaatggtcattggtttcgttgatagcagcgttcgtgatatgtatcacgggaagagcaaagtcattgcacctttggcattgactgtgttcgtttgggtgctgttaatgaatgccctggatttattaccaattgattttatcccatatatcggtgaacacatcttagggttaccagcgttacgcatcgttccgactgctgacgtgagtatcactctttcgatggcaattggtgtatttatcctgattctcttctacagcattaagatgaagggcgtaaaagggtttactaaagagctgacgttacagccttttaatcaccctgtatttattccaatcaacttaattctggaaggggtaagcctgctatcaaaacctgtttcactcggtcttcgactgtttggtaacatgtatgcgggtgaactgatctttattcttattgctggtctgttaccgtggtggtcacagtggttattaagcctaccttgggcgatattccacatactgattattacgttacaagcctttattttcatggttctaacgattgtttatctgtcgatggcatctgaagaacattaa

SEQ ID NO: 295007 - DNA, 240 bp, Proteus mirabilis
atggaaaacctgagtatggatctgctgtacatggctgccgctattatgatgggtttagctgcaatcggtgctgcaatcggtatcggaatcctcggaggcaaatttttagaaggtgctgctcgtcagcctgatctgatccctcttctgcgtacacagttctttatcgttatgggtctggttgacgccatcccaatgattgctgtgggtctgggcctttacgtgatgtttgctgtcgcctaa

SEQ ID NO: 295008 - DNA, 471 bp, Proteus mirabilis
gtgaatttaaatgcaacaatcctcggccaggccatcgcatttgtcctgtttgttttgttctgcatgaaatatgtatggccaccaattatggcggccattgaaaaacgtcaaaaagaaattgctgacggtttatcttctgcagaacgtgcgaaaaaggacttagatttagcgaaagccgatgcaggcgaacagttagcgaaagcaaaagctgaagcacaagcaatcattgagtctgcgaataaacaacgcactcaaatgattgaagaagctaaagctgaagcagagcaagaacgtagtaagatcgttgcacaagctcaatccgaattggaagcagagcgtaaacgtgctcgtgaagaacttcgtaaacaagtcgctatgctggctatcgctggtgccgagaaaattattgaacgttccgtggatgaagctgctaatagcgacatcgttgataaactggtcgctgaactgtaa

SEQ ID NO: 295009 - DNA, 534 bp, Proteus mirabilis
atgtctgaaatagcaacggtagctcgcccctacgccaaagcagcttttgactttgctgtggaaaaccaggctgtcgataaatggcaggttatgctggcattcaccgctgaagttgcacgcaatgagcaggtaaccgaattactttctggttctttagcatcagaaaaactggctgacatctttatcgacctttgtggcgatcaaattgatgaacatgctcagaacttaattcgtgttatggctgagaatgaccgtttatcaacattgccggaagtattgagccaatttattcaattgcgcgcagtactcgagtcaacggttgatgttgaagtcacttctgccattgagctaactaaacagcagctagctaacatttctgcagcgatggaaaaacgtctatcacgcaaagtgaagctgaattgcaaaattgataagtccgttatcgcaggcatgattatacgcgccggtgaccttgtcatcgacggtagtgttcgtggccgtttagagcgattaactgacgtcttgcagtcttaa

SEQ ID NO: 295010 - DNA, 1542 bp, Proteus mirabilis
atgcaactgaattccactgaaatcagcgaactgatcaagcagcgcattgctcagttcaatgtagtgagtgaagctcacaatgaaggtacgattgtttccgttagtgacggtatcattcgtatccacggtttagccgaagttatgcagggtgaaatgatcgcactgccgggtaaccgtttcgctatcgcattaaacttagagcgcgactctgttggtgcggttgtgatgggtccttatgctgacttagcagaaggcatgaaagttaaatgtacaggtcgtattctggaagttccagttggccgtggtctacttggtcgtgtagttaacacactgggtgaacctattgatggtaaaggtgctgtagagcatgatggcttctcacctgttgagatgattgctccaggtgttatcgaccgtcaatcagtcgaccaacctgtacagacgggttataaatccgttgacgccatgatcccaattggtcgtggtcagcgtgaattgatcatcggtgaccgccaaacaggtaaaactgctctggctgtcgatgcgattattaatcagcgtgactctggcattaaatgtatttatgtcgctatcggtcagaaagcatcgactatttcgaacgttgttcgtaaattagaagagcatggcgcgttagaaaacaccattgttgttgttgcttctgcatcagaatcagcagcgttgcaataccttgctccttatgcgggttgtgcaatgggtgaatacttccgtgaccgtggtgaagatgctctgattatttatgatgacctgtctaaacaggctgtcgcataccgtcaaatttcactgttacttcgtcgtccacctggacgtgaagcttaccctggtgacgttttctatctgcactcccgtttattggagcgcgcagcgcgcgttagcgctgagtatgtagaaaactttactaacggtgaagttaaaggtaaaaccggctcactgactgcgttacctattatcgaaacgcaagcaggggacgtttctgcattcgttcctacgaacgtaatctctattaccgatggtcagatcttcttagaatctaacctgtttaacgcaggtatccgtccagctgttaacccagggatctccgtatctcgtgtaggtggtgcagctcagactaagattatgaagaaactttctggtggtatccgtactgcacttgcgcagtatcgtgagctggcagcattctctcagttcgcttcagatctggatgatgctacccgtaaacaattgaaccacggtcagaaagtgactgaattgctgaaacagaaacagtacgaaccaatgtctgtcgcacaacagtctttatctctgtttgctgcagaacgtggttatctggaagatgttgaaatttcaaaagttgtgccatttgaagcggctttattagcttatgcttctcgtgaacatgctgatttactgaaagaaatcaaccagaccggtacttataacgaagaaatcgaagcgaagctgaaaggcgtgctagacaacttcaaagcgactcagtcctggtaa

SEQ ID NO: 295011 - DNA, 864 bp, Proteus mirabilis
atggccggcgcaaaagagatacgttcgaagatcgccagtgtgcaaaacacacagaagatcactaaagcgatggagatggtcgccgcgtcgaaaatgcgtaaaacgcaggaacgcatggcagccagccgtccttatgcagaaaccatgcgcagtgtgattggtcaccttgcgttagggaatctggaatataaacatccatacctcgaagagcgtgaagttaaacgtgtcgggtacctggttgtttcgaccgaccgtggtttgtgtggtggtttgaacattaacttgttcaaaaaactgctggcagacatgaaagagtggtctgataaaggtgtagaagtagatttagcccttgttggttctaaagccgtttcattctttgcctctgtaggtgggaatgttgtcggtcaagtaaccggtatgggtgatgatccgcaactatctgaccttatcggcccagtcaatatcatgttgcaggcttatgacgaaggtcgtttagataaactgtatgtggtggcaaataagttcatcaataccatggcccaagagcctaaaattctgcaagttttaccattaccaccaggtgatgatgaagaactgaaagaaaaatcttgggattatctgtacgaacctgatcctaagacgttactggatactttactgcgtcgttatattgaatcgcaggtttatcagagcgtcgtagagaacttagcgagtgagcaggcagcacgaatggtcgcgatgaaagccgctacagataacggtggtaatctgattaaagaactgcaattggtgtacaacaaagcacgccaagcaagcattactcaggaactgacagaaattgtatctggtgcagccgcggtataa

SEQ ID NO: 295012 - DNA, 1383 bp, Proteus mirabilis
atggctactggaaagattgtccaggtaatcggcgccgtagtggacgccgagttccctcaggatagcgtccctaaagtatacgacgctcttgaggttatgaatggtaaagaaaaactggtgctggaagttcagcaacagttaggcggtggtatcgttcgttgtatcgcaatgggtacatcagacggtttaagccgtggcttaaaggttgaagatttaggccacccaattgaagtaccagtaggtaaagcgactttaggacgtatcatgaacgttctgggtacacctattgatatgaaaggtgagattgaaaccgaagagcgttggtcaatccaccgtgaagcaccaacttacgaagagttatcaaactctcaagaactgcttgaaaccggtatcaaagttatggacttaatctgtccatttgctaaaggtggtaaagtcggtctgttcggtggtgcgggtgttggtaaaacagttaacatgatggaattgatccgtaatatcgcgatcgagcactcaggttactctgtatttgctggtgttggtgagcgtactcgtgagggtaacgacttctatcatgaaatgacagattctaacgttcttgacaaagtatcgttagtttacggtcagatgaatgagccaccaggaaaccgtctgcgtgttgcactgactggtctgactatggctgagaaattccgtgatgaaggccgtgacgtactgttattcgtcgataacatctatcgttacaccttagccggtacagaagtatcagcactgttaggtcgtatgccatcagcggtaggttaccaaccaacattggctgaagagatgggtgttctgcaagagcgtatcacttcaaccaaaacaggttctatcacctctgttcaggcggtatacgtacctgcggatgacttaactgacccatccccagcaaccacctttgctcacttagatgcgacagtggtactgagccgtcaaattgcttcgttaggtatctaccctgcggttgacccactggattcaaccagtcgtcagttagacccactggtagttggccaagagcactatgatgttgctcgtggtgttcagtctatcctgcaacgttatcaggaactgaaagacatcatcgctatcttaggtatggatgaactgtcagaagaagataaactggttgttgcgcgtgcgcgtaagatccagcgcttcctatctcagccattcttcgttgctgaagtatttaccggttcaccaggtaagttcgtttccctaaaagacacaatccgtggctttaaaggtattctgaacggtgattatgaccacctgccagagcaggcgttctacatggttggtactatcgaagaagcagtagaaaaagctaagaagctttaa

SEQ ID NO: 295013 - DNA, 417 bp, Proteus mirabilis
atggccgatacatcgttccacctgaaagttgtcagcgctgaaaagcatttatatgacggcgaagtcaaacatattcaggtaactggtagcgaaggtgagctcggtatttatccgcagcataccccgttattaactgccataaaaccgggcatggtacgtgtcgtaaaaacatcgggtgaagaagagtttatctacctttcaggtggtattctcgaagttcagcctacaggcgtcattgtactggcagatacagctatccgtggtcgtgatttggatgaagcgaaagcgttggaatctaagcgtaaagctgaagaacacattcaatcctctcatggtgatgttgattatgctcaagcatcagcagaattagccaaagcgattgcaaaactacgtgtaatcgaattgactagacgctaa

SEQ ID NO: 295014 - DNA, 1374 bp, Proteus mirabilis
atgtctaattcagctaaaagtgttgttattcttgctgcgggaaaaggtacccgtatgtattcacagttacctaaggttcttcataaacttgcgggcaaatccatggtgcaacatgtcattgataccgcaaaatcccttggtgctcaacaaacccaccttgtttatgggcacggtggtgaacttatgaaagaaacattaggttcacaacctgtcaattgggtgctacaagctgagcaattaggtaccggtcatgctatgcaacaagccgcacctttctttgctgatgatgaagatatcctaatgctttatggtgatgtaccgcttatcactaaagaaaccttagagcgtttaattgcggtaaaacctgctggtggcattggtttattaaccgttattttagataaccctatggggtatggccgtattgttcgcgaaaatggcgatgttgttggtatcgtagagcaaaaagacgcctctgaagaacaattaaaaattaaagagatcaatactggtatattggttgctaatgggggcgatttaaaacgctggttagcgaagcttgataataacaatgctcagaaagagtactacattactgatattattgcgcttgcacaccaagaaggtcgtaaaatcgaaaccgctcaccctactcgtcatagcgaaatggaaggggttaataaccgcttacaacttgccgcattagagcgtatttatcaaacagaacaagctgaacgcttattacttgaaggggtaatgttacttgatccggctcgttttgatttacgtggtacgctaactcacggaaaagacgtggtgattgatactaatgttattattgaaggtgaagtcactttaggtaataacgttgaaattggtacgggttgtgtactgaaaaactgtgtgatcggtgatggttcgattatcagcccatatacggtgatcgaggatgcaaatttagcgcaagagtgtactgttgggccttttgctcgtcttcgccccggcgcacagctggcagacaaagctcatgttggtaactttgttgagatgaaaaaagccagtttaggcgttggctctaaagcgggtcatcttacttatttaggtgatacagaagtgggtgctaatgtgaatattggcgctggcactatcacttgtaactatgacggtgcaaataaatttaaaactatcattggtgatgatgtgtttatcggctctgatactcaacttgttgcccccgtttgcgtggccaatggcgcaacaattggtgcaggtacaacattgacaaaagatgtcaacgaaaacgaattagtcattagccgagtgaagcaaacacatatctctggctggaaacgtccggtgaagaaaaaacaataa

SEQ ID NO: 295015 - DNA, 1827 bp, Proteus mirabilis
atgtgtggaatagtaggtgcagttgcacaacgcgatatcgcagaaatcttaattgaaggtttacgtcgtttagaataccgcggttatgattcagcgggattagctgttgtagataatgattgtcatatgacacgtctgcgtgaagttggcaaagtacagatgctggcagaagaagcagaaaaaacacaagttattggtggtacaggtattgctcatacccgttgggcaacccatggtgaaccttgtcaagataatgctcatcctcatgtctcaggcactattgccgtggtacataatgggattattgaaaactaccaagagctaaaagctgagttaattaaccggggctatcagtttgcctctcaaactgatactgaagttattgctcacttagtcaattgggaacagcgccaaggcggcacattacgtgaagtcgtacagcgtgtgatccctcaattacgtggtgcttacggtactgtcattatggatagtcgtacaccagagctattagtggcagcacgctcaggaagcccactggtggtaggtcttggtgttggggaaaacttccttgcttctgaccaactggctttattgcctgttactcgccgctttatctaccttgaagaaggcgatattgtcgaaattactcgtcgtcatgtgcatatttatgatgttaatggcgaagaagttaatcgtgatattatcgaatcgaatgtgcaatatgatgcgggtgacaaaggtatttatcgtcactatatgcaaaaagagatctacgaacagcctttagccattaaaaacacccttgaagggcgtttaaaagcagaaagtattgatcttagtgagttaggatctaaagcaccagagatcttatctcaagtggaacatattcaaatcgttgcctgtggtacatcttataacgcaggtatggtatcgcgttattggtttgaatctttagcggggatcccctgtgatgtggaaattgcatcagaatatcgctatcgcaaaccagcgactcgtcgcaatagtttactgataaccttatctcaatcaggtgaaacggcagatactctagcggcattacgcttatcaaaagagttaggttatttatcatcgctggcaatttgtaatgtggctggctcttctttagtacgcgaatctgaatttgtgttaatgactaaagcaggggctgaaattggggttgcctcaaccaaagcctttacaacgcaactggccgttttattaatgctagtggcctatatgggacgcattaaaggtgttgaagcccttgaacaacaagttgcaatggcgcttcatgcactaccgagccgtattgaaagtatgttgtctaaagataaagtgattgaagctttagcagaagacttctcagaaaaaagtcatgcactcttcttaggccgtggtgatcaatatccaatagcggtagaaggcgcattaaagttaaaagagatctcttatattcatgcagaagcttatgcggctggtgaattaaaacatggacctcttgctttaattgatgctgatatgcccgttatcatcgtagcgccaaataatgaattattagagaaattaaaatctaatattgaagaagtgcgcgctcgtggtggtttactgtatgtgtttgccgatcaagatgctggctttgaagaaagtgaaacaatgaaactgatttctctgcctcatgttgaagagttaattgcgccaattttctatactgtaccattacagttactttcttatcatgtggcgttaattaaagggactgatgtcgatcagcctcgaaacttggctaaatcagtgactgttgagtaa

SEQ ID NO: 295016 - DNA, 1077 bp, Proteus mirabilis
atgttacagttcaatataaactcacaaaatggctcaatgccacatattcgtgtagagaatattcaaaagagatttaatcaatttattgctttagatggtgtttctttagagattaaacaaggcgagttagtctgcctattagggccttctggatgtggaaaaaccacattattacgttgtattgccggattagaaacacaagatcacggtagtatctttaattacgataacaacatctcacaccttccccctcaagcccgtgactatgggatcttatttcagtcctatgcattatttcctaacctgacggtacagcagaatattgcgtatggtttagccggtcagcctcgtaatgtgattaaagatcgcgttaatgaaatgctggagttagttggtttacaagaccgaaagaaaaaatatccaggagaattatctggcggtcaacaacagcgcgtggcattggctcgtgctttggctcctgccccttctttactattactggatgagccaatgtcggcattagatgcacaagtgcgtgaacatttgtgtgtggagctacgtaatttacagcaaagcttaaatatcactacgctaatggtcactcataatcaagatgaagccatgctgatggccgataggatagctgtaatgaataacggcaaagttgagcagtacggcagtagtgaagagatttacaaccatccacaaacaccatttgttgcagagtttgtaggaaaaggtaactggttacctttcaatagaaatcagcacggtgaggcgatgattggctcacgagaagtccaattaaaacatactgcagtacctcataatcaagggcgtctcttttgtcgacctgaatcaatcaaaattaacccaatacaaaacaaacataatcaatacgatgccaatatacaaaatgtggtgtttttgggaagtcgttgcattatgaagtttgaattagaccatttaccgggacatttattacaagccgagatctctgctgctgagctacatagtattcaaaacggtaaagttaaagtgactttaccggctaatgaactacacatatttgcgtaa

SEQ ID NO: 295017 - DNA, 1692 bp, Proteus mirabilis
atgtcagtgatagtacctaccaaatctattaatcgtttagatagtttgtttgttgctggtggtaagttatttattatttgcttacttactcttggggttttattgcctttattggctattttctggcgaggttttacgcctgatatatcacaaggtggtggttttcaggccgctattgatttgttcaccagtgctaattttctgtggttggtgggtaacagtattagtgtttcgttaagcgttgctgttattactgtgccactggcttacctgtttgcttatgctctacatcgcaccttgattccttttaaatccttgtggcgtggaatatcactattacccttactcgctccttctatgctaccgggtatagcattggtttatctatttggtaaccaagggctattgcgtagcttactcacagagagtatttatggttattggggattagtgcttggtgaggtgatctacactttccctcatgcgctaatgattttactctccgcattatccatgtctgatgctcgtttatttgatgctgcatctagcttaggggcgtcttcttggcgcacttttcgtagtgtcacttggtcatcgagccgacatgggattttcgcagcattgtgcttggtatttacgttaactattactgactttggtattccggttgtcgtcggcggagattatcaagtactggcgttagaagcctataaagccgtgcttggtcagcaacaatttggccgcggtgctttaatcggtatgttgttattgctacctgcattgttgaccttcggtgtcgatgtttggttacgtaaacgtcaacgtgatgcaatgagctcgcgtgcccaattctatttaccaaaagctaattttcagcgtgacacgctttatctaatatttgtgatgcttatttgcgcgctatttttattggtattcggtacggccgtttactcctcttttattcagttctggccttataacttatcgttttcgttacgtcattataattttgaaggattgcctgggggatggctcgcctataccaacagtattattttggcattttacactgccactatcggctgctttctgatctttatgggcgcttacttaatagagaaaacggcttctcactcttggcttaacaatctgctacgtatgttaagttttgtaccgatggccgttccggggttagtgttgggattagggtatgtatttttctttaacttaccgaataatccactgaactttttatacggcagtatggtgttattagtgctgtgctccattgcacactttttcactactgcctatatgactgcgagcacggcactgcgccagttagataaagaattcgaggcagcttcattatccttaaaagcgcctttatatcgtcacttttggcgtatcactattcctctttgtttgccggcattattagatatttatcgttatctatttgtttctgctatgacaacggtttccgcggcgatcttcctttatagcccagacactattttagccgcggttgcggtattaaatatggatgatgcgggcaatattggtggcgcggcagctatgtcgacattgattttaaccacctcggcaggagtttcgatattgttatctattgcttcgcaaggtgttcttcgccgtacacaagcgtggcatcagcgtgaagctaaacaataa

SEQ ID NO: 295018 - DNA, 1011 bp, Proteus mirabilis
atgatgttaaaaaaactgatacttgccaccagcttattattttctgcgggaacggtctttgcagcgactgaaattacggtatacaccgcaatagaaagtgaacaattacaagcttataaacaagcatttgaggctaaatatcctgatataaaaataaaatgggtaagagattcaacggggattatcaccgctaaattattagcagaaaaagatcgtcctcaagccgatgttgtgtggggattagctgcatcaagtttagcaatattaaaagcgcaaaatatgcttgagccttatgctccggcgcagttagatgatattgatgtgaaatttcgtgatagcaacaacccgccaacttgggttggtatggatgtctgggcggcaacgatttgctacaacacgatagaagcacaaaaattggggttatctaaacccacttcttggcaagatctcactaagcctgaatacaaaggcaaaatcgttatgccaaatccggcatcatcaggcactgggtttttagatgtaagtgcttggttacaaatatttggtgaacaagagggttgggcatatatggacaagttgcatcagaatattggtcaatatgttcattctggctccaaaccctgcaaaatggctgcatcgggggaatacccgataggcatatcctttgaatatccggcgatccaattgaaacgacaaggggcaccactagacatcatattaccgcaagaaggattgggttgggatattgaagcaacggcgataatcaaaggaactaataagcgagatgccgcgcaaaaattggctgacttttccgcctcaaaggaagcgatgaagctttatagtgctaattttgctgtattagccaataccagtgtacccgtaagccaaacagaattacctcgcgattatgctcaacgtttaattaaaaatgattttatttgggcagctgaaaagcgcgacaccattttaactgaatggcgtaagcgctatgacggtaagagtgcaaaataa

SEQ ID NO: 295019 - DNA, 1128 bp, Proteus mirabilis
atgaaatttgatattgcggttattggtgcgggcattattggtttatctcatgcgtatgcagcgactcagcgaggtttacgtgttgctatttttgagcgcagttacacgcctgtgggcgcttctgtacgtaattttggtcacggattaattttgggtcaagcgccgggaaaaatgctagatttagcgaaaaatagtcgtgaaatttgggcaactatggccaaacaggctaaatttttaacgcgtcaaaaagggacttatctattagcacgtacacaatctgagcaagctgttcttgaagcctttgtcgatggtcgagctaaaacctatggttatgattgtgaattactttctaaaacacaattagccacggtttatggtggtcaattgcaacaccataaagcggcgttgcatggcaaagaagatcaggtgctattttcgcgagaagcgatcccacagttagcggcttatttaggcagcttagctaatgtaacgagttatttttccacattagtacgggatattgatgtagatacggggacattgatcaccagtaatggcacatttagtgcagaaaagatcattgtctgctcagggcacgattatcaaacattactggctgacgaaataaaaaagcttgatcctatagtttgccgcctgcagatgttgcgagtgacagcagagcaaaatattggattggcgcatgcgctaatgacgggattaagttgtactcactatggtgcatttgccgatttacctgaggcacaggctttagcgaaagaaattaaaatgcaatcgccgttgattgagcagtatggtattcatttattaattaccccgactccttatggcgatcttattattggtgattctcatgaatatagcttagatgcacagccttttaacagcgaagaggttgataacctcctgatagagttagctgagcacacattaggttgttcggttcaagtaaaagagcgttggcaaggggtttatggggcaaaaggaaaggagccgatttcaattttaacgccgagtgaaaaagtcactgcagtattgatgcgaacgggtttaggaatgagtgttgggcctggtttaggtgaacaaaatattcgtcaactatttgattaa

SEQ ID NO: 295020 - DNA, 624 bp, Proteus mirabilis
atggcaaaattagataaagaacaggttattgataacgcattgattttattaaatgaagtcggtatggaagggttaacaacacgtaagttggcgcaaaaattaggggtagagcaaccgacactttattggcatgtaaagaataaacgtgcgttattagatgctttagctgagactattttacaaaagcatcatcatcatgttttgccattagcgaatgaaagttggcaggattttttgcgtaataacgcaaaaagttttcgtcaggcgctattaatgtatcgtgatggtggaaagatccatgcaggcacacgaccatcagccaatcaatttgagacatcagagcaacaattgcaatttttgtgcgatgctggctttacgttaacgcaagctgtttatgcattaagttccatcgcgcattttacacttggttcagtgcttgaaacccaagaacatcaagagagccaaaaagagcgagaaaaagtgccaaaaacagagataaactacccaccattattaacacaagctattgatattatggatagtgataatggtgaagctgcattcctttttgtgcttgatgtgatgatttcagggctagaaacagtgctaaataatcatcattaa

SEQ ID NO: 295021 - DNA, 495 bp, Proteus mirabilis
  misc_feature (449)..(458): n is a, c, g, or t
atgaataaatcaattattatcatactgcttgtcacagtattagatgccattggtattggccttatcatgccagtactaccaacactattaaacgagtttgtgagcgaaaacagactcgccaatcattacggtatattattagcactctatgcgacgatgcaggtgatcttcgcacctattttaggaaaattatcagataaatatggcagaaaacctattttattattttcgctattgggtgcggcattagattacctattaatggcttgctctacctcattatggatgctctacattggacgcattattgcgggtataacaggagccactggtgcagtatgcgcatcagcaatgactgatgttactcatcctcatgaaagaacacgctatttcggttttttgggtggtgcatttggtgtgggtttaattattggccccatgttaggggnnnnnnnnnnatatttttgtggtttgagtttcttggaaacaaagtaa

SEQ ID NO: 295022 - DNA, 501 bp, Proteus mirabilis
gtgctattcacacaagtgcgtttcgcttggcacactactgaagtaggtttatctcttgcatttcttggtgtattacatattttttttcaagcggttctcgcaggaaaactggcgcaaaaatggggagaacgcaacacggttatcattagcatgtctattgatgcatttggttgcttattattagcctggataagccatgtttgggttatgctccccgctttaatctgtttagctgcgggaggaatgggacaacctgctttacaaggatatttatcaaaatctgttgatcatcatgttcaaggacaattacaaggaacgttagtaagtctaacgaatataactgggattgtcggcccgttactcttctcttttatttatagttacagcgttgaatattgggatggcttattgtggtttattggtgcaatgctttacagtggattacttgtagccagttattttaaacagaaatcaccaatattaaaaaaatttccctcataa

SEQ ID NO: 295023 - DNA, 291 bp, Proteus mirabilis
atggatgaatatgatcacacactagtatcattggtagttgttggcgcttttattgcattagggaagatgctagttgctaatgaagttatcacattacgactatttattggcaggatcatcctaggatcagcagtttctgttgtggcaggtgctctgttgattttatggccgggtattcatcctattgcggttatggggatcggctctgccctagggatcgccggttatcaacttgtcgaaatttggctaaggaaaaaaggaaatgagctattttcacggaagaaaaactaa

SEQ ID NO: 295024 - DNA, 261 bp, Proteus mirabilis
atgcgtgttttaacaatttactgtcctgaatgtggtgaaaaagcgatgataaagaaaagtaatcgcaagcataaagagttaacagatctttattgtgcctgccgtgatccgctttgtgggcatacctttgtgctaaatcttacctttagtcatactctaagtcccagcgccaaaaaacaagatgcccttttattagcaatgataaaaaatctctcgccacagcaacgagaaaaagccttaaccttgttacaagagatataa

SEQ ID NO: 295025 - DNA, 1065 bp, Proteus mirabilis
atgaaaaagcttattaatcgtgttgatgatgttttatcagaacaactgcaaggttttgctaaagcccaccctgaaatcaatctccatccctcttctttttatgtcacccgtcatgatgcccccgtaaaaggtaaagtagcccttttatctggaggtggcagtgggcatgagccaatgcatgctggttttgttggaaaaggcatgcttgatggggcatgtcctggtgagatctttacctcaccaaccccagataaaatgtacgattgcgcaaaagcaattgatagcggtgaaggtgtattaatgatcgttaaaaactacaccggtgacgtactcaattttgaaactgcgacagagctactacatgatgaaggtgtaaaaattgctacggtattagttgatgatgatgttgcggttaaagatagtctgtataccgccggtcgtcgtggtgtagcgaataccgtattaatggaaaaattactaggtgcggcggctgagcgtggcgatacactcgatgatttggttaagctaggtcatcaaattaataataatggtttttctattggtattgcactacaggcttgcaccgtacctgctgcaggaaaaccctcttttactctccctgaaaatgaaatggaatttggcgttgggatccacggagagccaggaatagaccgtcgcccatttacttcattaaatgataccgttgatgccatgtttaatactctaattgaaaatggtcactatcagcgcaccattcgcagttgggatcgagtcaatggtgattggattgaagagacacaagaaaaacagccactaaaatcaggtgatcgtgttatagccctagtcaataatcttggcgccactcccctttctgaattatatggtgtttatcatcgccttgccctgtgctgtgaaaactttggtcttaacatcgaacgttcgttaattggctcttattgtacatcgctcgatatgtcggggatctcaattaccttattaaaagtagatgacgcgctacttactttgtgggatgcacccgttgctacacctgcgatgacaaaataa

SEQ ID NO: 295026 - DNA, 633 bp, Proteus mirabilis
atggtattaactcatcatcaaattattctttggctacaacaatgcgctcaactttttgaacaaaacagtgactatctcaccgatctcgaccgtgaaattggcgatgctgaccacggcttaaatatgaatagaggcttcaaaaaggtagcggagaaattacctgaatttgccgataaagatattggttttatccttaaaaataccggtatgacattactgtctaatattggtggtgccagcggtcctctttttggcaccttctttattcgtgccgctaagcccaccgcatcattacaaagtctcgatgtaaatcaactttatgaaatgactaaagaaggtgttgatggcattgtcagtcgcggtaaagcacaaccaaatgataaaactatgtgtgatgtttggtggcctgtggttgatagtttaaagcatgcgaatgaccaaagtttatctatagaagatgctatcgataatgcactgaaagttgcagaaaaagcggcggaggaaactattcctatgcaagcgaaaaaaggccgtgccagttatcttggtgagcgcagtataggacataaagatcccggcagtgcctctgtggtattgatcctccaagcgctgtctaatgctatccacgcataa

SEQ ID NO: 295027 - DNA, 1449 bp, Proteus mirabilis
atgattaatatcgtgattgtttctcatagtaaacatcttgctgagggtattgaggcgttggcgaatcaaatgcttaacccaacgcattgccgattagccattgccgcaggtgttgatgatgaagcgcaccctattggtactgacgctgttaaaattatgacggcgattgaatcgctagccgaagctgatgccattattgttatgatggatttaggtagtgccatactcagtacagagacagcaattgaactgcttgatacagaattagcgcaaaaagtgacactatgctcagctccgctggtagaaggaacattagccgctgttgtcgcagcgtcatccggagctagcttagaaaaggttctcgaagaagccaaccatgcactaacccctaaaaagatgcaattgggtgaaaacatgggtggctcagagccaaatgatgtcacgccttctattcaaatgcacggcaaagaagctcattgggtggtaaaaaatcctcatggtttacacgttagacctgcagcgacactggttgagctactgtcaaaatttcgtgctgactatcaattaattaagggagatagacgcattaatccccttagtttaaatcaactttctcttattcaaattcgccaaggtgatgaaataaccttaattgcttcaggggaacaagaaaatgaggctattgatgcctttttagcactggctaaacaaggttttggcgaagcattaccggatgaactcacggagcaaagtttaaccggtactctcgtacccgcttcccccatcaagggaccggcttttatttggcatgagctagaattagctcctattgaaaatttatctgcaccactcgatagcacaatacaaattgagcaatttaatcaagcgataaaagatacactcaatgatttgaagcactatgctgaaaaagccaatcacacattaggtgaacaaataggcgctatttttaacggccatatcatgatgctggatgatgaagaattactcaccaatgttatcgatcgtattaaaacagataacgttagcgctcagcagagttggacgaatgaaatgaaagaacgtatccaactctaccgtactctcagtgatccttatttgagagcacgggagttagatcttcgtgatctgcgcaatcaagttctttaccatttacaacagaaaacgcctcctaaatttaccccatcacaaccctctattttagtggctaaagagttattcccctcgacattaattcagtttgatgcaactcaattattagccattaccttagctgaaggggatagttgttctcacagtgccattatcgccacgcagatggggctacctatgttagttcatttaggtgatggattattaaaaataaaagaagcacaagaattaacccttgatctcaagagtagtgaattaattattggctcaataaattaa

SEQ ID NO: 295028 - DNA, 1278 bp, Proteus mirabilis
atgacacagtcactgctgtctgatattgatatactattaattgatgatgatgaggatattctcgaatcttatcgtcatttgcttaatcttgccggaatggttgccagagtgactgattcgccagaaaaagcattgagtctgctgacaccagaatatgaaggtgcggtagtgttagatatttacatgcctgcgatgaatggcatggaagtcttagcgcgtattcaacaaattgatcctcgtattccggtgattatgatcaccggccacggtgatataccccttgctgtagaggccgttaaaaaaggcgcttatgattttattgaaaagcccattaatccaccgctatttttagagttagttgctaaagcgcataaagagcgaaaatcacttctttcacttagaaaaacgatgatcaccaccactcaagagcgtttagttggcgatagtgcacaaattaccgccattagacagcaagtacagcaaattgctgatattgataaagacttaatgattgaaggtgagatggggacagggcgacatctacttgctcagttattacatgaattaagtcctcacagcgataaagcggtgactacggtagattgtcaaaatttagtagatattaagccactgattgctcaaatagagcaagaggaggtcggcacacttattttacgctccccttatgatttaccttctggtgcacaacgttggttaagtgcttacctattagatatggaaaggcagggtaagcgtcaatttagaacgatcgcgattttagaaaataatacccagcaattagtcactgaagggcgattgatacctgagttctattactacttttcgcaaataactttttctttgccaccattaagcgcaagacgcccagatattattcctctatttagagcctttttacggcaaagtgctcagcggcttgggatcgccgtaccaaaaattgatcgtaattatctcgatatattaaaacgttatgattggcctggaaacattcgtgagctacggaatgtcgctgaactctatgctgttggtattgtgaaaatggttgatagtgagcaacatcgtgccattatcccccctgaagggcctttagataacttagttgatgattatgagcgtcgcttaattgaagatgcactctatttatttgctggccgtgtgagcgatgtggctgattatttaggtatcccacgtaaaaaactctatttacgcatgaaaaagcatgaactggataaagagagttataaacctaaggtttga

SEQ ID NO: 295029 - DNA, 663 bp, Proteus mirabilis
atgaccagtcttgctcatgaattaaatcaacctctctcagccattaatacctatttatatagcgttaaattaacactacagatggagaaatatgaccaacttcctgatcccattgagcgtattgaaaaattatgtgctcgtatgaataggatcattacggcattacgtaatttttctaaaaaatcctcatctgaagttagttatgtttcagcgccgttacaagggctggtggaaagtgccatggtattagtggaatcgcgctctaaacgagagcagtgcaccattatcaataatatccccagtgaactgaatatttgtgccgatccaacacaaatagagcaggtcttagttaacctgtttgttaatgcaatggatgcggtcgcgggaatgggcgaaagtcagatcagcgtcgacctattatcggatgaagctaaatatcaacgagtaggcattaccgatagtggcaaaggatttaatgctgatgttttaccaaaattattcaccccttttaccaccaccaaagatgttgggctagggttagggctatcgatttgccgttctattatgcaacggtttggttatgaaatttacttagcatcggcattaaatggcggtgcgatggttgttttggagtttactcatgacacagtcactgctgtctga

SEQ ID NO: 295030 - DNA, 1668 bp, Proteus mirabilis
atgcagatattaatgcctaagcaatcgggcaaactcggtagacgcctttatttggcgtttatctttagttcgttactcactttattgattggtggggtgatattttttatgtggggaaaattagccactcaaatcaatgcgtctgttggtgactccttacctatgttaaccaccagctataatatggagcgttacagcactaatttacagatgctattaaaagagcgtgagcaaacacaacgtaaatcagtttcagaacaacaaaaacagcaaatttatcaactattagataatctgcgcgagtttccgattgagcaacaatcacaacgcactttttataatcaattagtggatgacttatcaaacttaattgagcagcaagatattttattagataaacgtcgtgaactcgaaaataggttagcacagcttttaggtcaattggcttggatgcatgatgcggtaggtgaagatattaagcctctacttaatgaaattgagtggcatgtcagccaaatgcttaatgaaaaaaatgtacaggaaaatagcttacaactgcttttagaatcaacgttacttcaagagttattcactacagaaaatgaattaattagcttagtggaagaaattgcacatcaacgctatagccgtgatattgatgtcgcatttcactatataagtgtcaaaattgatgaaattatcgctttaaatcaaaaattaaaaagctatccttctaccattgctcatcgccaagtattgcaagaaattattgcgatcactcgttttgacggtgatatctatcaaacattgattgatgatgtcgaaaccgaaaaaaaacttaaagcacttacccctaaattaaatgaaaaattatctcagtttgataatgcagtaagaagtaatgtgcttgccaccagtgaagcattgaataagctcaatgataatacgcgacaactgatggcaacgggaaaaattgtcattatcttaattgtcgttgcttcactattgctcagcattattgtcatgaaaatcttaatagataggcgactgattgctagattaaataagttgagtgatgatctcgcccatgttgctaaaggtcatttaacagagcctgtattaattgaagggcaagatgaaattggattattaagtcgccgtttgcggcgcttttggcgtcaaatgaaagaagttgaagccacgaatgccctgaatctgattaataataccgatgccagtttaattacttgtcatcatgatggacgtatggaaaccgtcaatcccagtgctgctactttattaggtattggtcatgaacagagcaataaaccattatggttattatttagtggtgaagccaatacgatattaagagcgcagtttagtcccacaagtccgctttatttgtttgggcaaagtgagtctattgtgagcatggtaaaacaaggaaagcctcattttctgcaatttaatattcgcgaatatcctcataaagacgagcataaatatattgtgacgatcacagatattactcgccaagaattaagtcgattagaattaaaacatcttgtggcattaaaaacccaagatttacaagaaaagaaccaacaattaaatgaagagattgtgcgtcgtgaacaagcacaaaaacacttaattcagacataa

SEQ ID NO: 295031 - DNA, 1287 bp, Proteus mirabilis
atgagaataaaaataatctttagcctcatactattatttagttggctgtttatcactccagcaaaaagtgatgagcagccattggttatactgacgacactttcagatacacctatgcgaccacttaccgaagcttttagtgctcgttatcctgaaactaaggtacaagtggtttatcggcgtgttgcgatcgctacacggatgatgaagcagtatcctacgcaacctgttgatatagtgatgtcctcttcggctaatttttttcatcatttagatagagaaggactactcgcgcgcttaccgattaactatgaaacaccaaaatggctaactcgtcatagtgatatcttaaatgacaaaataaccacggtgggttattcaggtattgggatcatgagtaacagacaatacttgcaaaagttaggtattccggcacctaaaagttggattgatttaagtgatccgatttaccaagggcacttaactatgacgacaccagccaactctggcacgatgcaactgatggttgaaaatgtgctgcaagaatatggttgggagcgcggatggcaaattttactagaaaccagtggtaacctttcttcgatatcggcacgtagttcacgagtgagtgacgctattgccagaggtattgtaggggcggggcctattattgataattacgcttttaaccaccaaaaacgctttgattttgttgattttagttattttgataaatcaattattttacctgcttatgtcgctattgtggctgaaagcagtaaaagagatactgcggccaaatttatcgcctttcttttatcggatgaaggacaagagattatctataaaagtgatatggcgaagatccccctcagcaaagaaattttacgtaataatgatgagcttgctaataatactgagtttattttaaacagtaatgaagcttatcgccgtagcgaagtggtcaatgttctttttgatcaaatgatcacccataattttccattaatgcgccaagtttggaatgagatccacgaggcagaaaaacaacaaaatcgatcaccagaacggatcgcagcaaccaatcaagcccgaaaaatagccagttcagtactaattagcgaaaaagaagctaattcaccgacattacaagccttatttatgaaagaagccgatcagcgggaatattcagatcaagcgttagccgtattgtaccaatggcgtacattagaagcggaaaaacttgaacaagcattagttttattgaaagaaactaaatctccctaa

SEQ ID NO: 295032 - DNA, 1338 bp, Proteus mirabilis
atgttaagtttctttaaaaccagaaaggatctgccgctaatcgaagcgtccaatgaaaagatccgctcaatatataaaaaatatcagtggcaggtttttcttgggctagtactaggctatgccatgttctatgtggtacgtatggcacttggtgtcgttaaaaagccgatgctagatgccggtattgtgaccactgcagaactgggtttaatggggtcggcgttcttctttacctatgcctttggtaagttttccaatggcttcttgtcggattatgccaatattggccgctttatgtccatctcgctgattgcgtcctcttttgtttgtatctttatgggaatgtcgactgcgagcctattcttcatcttattgtggggaattaatggttggttccaatcggtaggatctgccccttcttgtgtgtctattttccaatggttttctccgaaacagcgcggtacagtctattctatctggggtggctcacgtaatatcggtgaagcaatcacttggatattaactgcgaccatagtgagtttctttggctggcgtgccggttttatcggtgcaggtatcgcgggtattgcagcaggtatcatcttactgatgatcttaaaagatcgtcctcgtacttatggtctacctgatcctgccagtgcgtatggtgaagagtcagaagccgttaaatcaagtgatccaaaagaaactcgccgtgctcaattatttgtcctaaaacaacctaccgtatggatcatcgctgcagcttgcgctgccatgtatatttcacgctacgcaatcagttcatgggcggtgctttatctacaaggctcaaaaggctattcactgattgatgctggctttgctatgtcaacttaccctattgcgggcttctttggcgccatcttagccggtatggcctctgacaaactatttaatgctaatcgtcatatcccaacacttatttatggtatcgccaatattgccggtttcgccctcatgttctggggaccacaaagccgtgttatggatgccattgcattaagtatgattggttttgctatgggcggactggtggtgttcttggcgggcttaacggcttgcgacctgatgccaaaaaacgcagtaggtgcagtaaaaggctttatcggactttttgcttatattgccgcatctgctcaagagcttgtttctgcctcgctgatcaaagtcacgcaagtcggtgatgtcactcactatgatttcacaacggtacagtatttctggattggttctgccatcgtgtccatgatcttagctacgctggtctggaatgcgaaaaaagtcaccatggattaa

SEQ ID NO: 295033 - DNA, 1452 bp, Proteus mirabilis
atgcgtaagacaaaaattgttgcgactcttggccctgctagttgctcagaacagatgattgaaaaactgattttagctggcgctaatgtatttcgtttaaatttttcacatggtactcgcgaacagcatcagtccacagccgcaactatccgtcaggtcgcaaaaaaacatcgtgtatttatcggcattttagctgatctgcaaggccctaagatccgtatagcgagttttaaaaataatgctattcaattaacacaaggggatagttttatcctcaatgcagatttagacagcacacaaggcgatgaacaacaagtggggttagattacccacaacttgtacaagaagtcacaccagggaatattctgttacttgacgacggtaatatccaattaaaagtccgtgcagtaaataataataatattgagacagtggtcactgtcggtggaaaattatctaaccgtaagggaattaatttactcggcggcggtttatccgcaccagccttaacgggcaaagataagcaagacatacacacagcagccgctattcaagcagattatatagccgtttctttccctcgtaacggtgctgatattgaatatgcccgtcgtttaattgttgctgctggcagtcaggcaaaaattgttgccaaagtagagcgtgcagaagtcgtttcatgtcaagccaatatggatgacattattaaagcatcggatgtcattatggtagcgcgaggggacttggcggttgaaattggcgatgccagtcttcctggtgcacaaaaacagttaattgctcgttgtcgtgctctaggttgcccggttattacagccacccaaatgatggagtccatgattgaaaatccaatgcctacccgtgcggaggtgatggatatcgctaatgcagtaggtgatggcacagatgcggtgatgctttctgcagaaacagctgcaggtaaatatcctgaagaagccgttcgtgcaatggctcgtgttgcagaaggtgcagagcgctcttttgccgccaatgccgaaaacccatggcaatccccttcttactattcacaaacaggccgttggattgctttagcggcgaccacagcagcttttcataatgataaacatctgagcgttgctgctttaactgacaatggtcaatcagtcacgcttctatcgcgctttatgccaaataacaatatctatgcattaacagataaccccgcacttgctggtcagttgactgtattacgtggtgtaacgcctgtcacttatcaacgtcaaaataataatgatggtgatgaaaacatcatgcaaaaactgcaaacagaaggattattaacagatattcactcactcttaatcacccgtttatcgacctttgaaaaaaccggtgaaagtgactgttgtcatctagttccggtaaaacaagttacaacagctttaacttaa

SEQ ID NO: 295034 - DNA, 267 bp, Proteus mirabilis
atggcaagtggatgggcaaatgatagtgctgttcaagaacaaattgatgccactattgatgatgccattgcaagagcgcgtaaccaaatgactcagggagaaagtgctgagttttgtgatgagtgtggtgaagcaattccattggctcggcaaaaagcgattcgaggggttcgctattgtattaactgccaagaggcgatagataaaaaatataatacctttagtggctataatcgccgtggtagtaaagatagccaactcagataa

SEQ ID NO: 295035 - DNA, 1737 bp, Proteus mirabilis
gtgaaaagtcaagatttgttgggtttatcttctgctaacattctaaatgctgaatttgagaagaagtaccgtgatgttattgctcactttttcagccgtgatccgcagtattggccgatatttcaggataaaaccattcagtctattacacagtttagaaagaccatgacgaatgataaggatcaattacagcgttatgagaatgggcaggcgttatttgaccgtttaatggctgatgggcagatccagcaacatattaattacccagagaatgatcctaacgagttactcatgttagtgtcgacgttatgcaaaaactgggaaaatccattagcggttgaaaatgtcattgcgatgccaagcgatccgggtgtttatggctcaatattaggattaatgggcaatcctaatatggtttattgtgaatactcaggtgttgctgacgttttagaaaaagtcaccattaaaaaagtagctaaattagtagggtacgatcccgaagttgcctctggggttttcacccaaggtggcaccatgtgtaacttatatggttatctatttggtttacgtaaatcaatgcctaattctaaacatttaggcatggcagccgatcaggattatcgtattattaactctcaagggggccattattctaatatgaccaacttggcgctattaggggttgatgttaataacaagactatccgcattaaggtgtccgaagataatacgattaatttggaacacttagagcgtgaattaagagcttgttttactgttaagtgtaaagtaccaactattatgctgacgacagggacgacggacacctttggtgttgatgatgttaaaggcgtttgcgaattaagagatcgtctgtgtgaagaatttgaaatcgcggttaaaccacatattcacgtcgatgcagcagtaggttggccaattattttcttcttagattatgattttaatagcaaccctctggctatcaacgatattactttagatggtttacgccaaaatgtggcgaaatttaaacatctaaaatatgctgattcaattactatcgatttccataagtggggatatgtaccttatacctcaagtttagtgttagtgaaaaatggcaatgactttgttgcccttgaaaatgatccggaaaacttcacttactttgaacatgaattagaaggtcaaacccatttacaatcaactattgaatgtacacgtagtggggttggtatttttggtgcttattctgcgatgcattatatggggattgaaggctatcaaactatcattgcccattgcctacaaaacgcgaactatatgcgccatcaattacttgctatggggaatgccaaagtcatagtgcctcaaaaccaaggcccaagcgttgggtttaaattatatgatccaaacttagtctctgatcctaatgttgcctttgatctagaatcaacctgtgcgacagataaagaagcctatgactttatggtacataatgcacaatggcatagaaaattattcttacaacggggtaaaaagggattatttaccaactgggttgactctattgcttgctctaagtatgcaaaaaataatcgctatgtttatattccgggggaaaaagctgtctttatgaacccgaatacggaacgttcccatattgataatttcttaaagataattactgaaatgagccatagtttaagtgctaagaaagtcagcaaaatttaa

SEQ ID NO: 295036 - DNA, 1314 bp, Proteus mirabilis
gtgctaacgattatcggattactcattattatttctattgtgacattactaatgatggggaaaacaagcccaattattgcaatgtcggtcacaccattaattggtgcgcttgtcgcaggttattcatttactgaaatatctactttttttgaattaggtattaaaaaggtgagtagtgtcgcaacgatgtttttatttgcgatacttttttttagcataatgaaagatctgcatatttttaaccctctgatccgtatgatgatcagtatcacccgtggcaatgtcattatagtgtgtattgtcacagcgttagtcgcggctgttgtacatttagatggttcgggtgcggcgacattcttaattattattcctgcttttttaccgctatatcgccgtttaggtatgagcccttatcttatgttgctaattatgtgcaccagtatgggggtgatgaatatggtaccttggggagggcctttaggtagagcctcggctgtaaccggtatttcggctgcggaattgtggcaaaagatcatcccagtgcagataattggtatttttggctcgatgctttttgccgcggtgatgggggtgcgagaaaccaaacgtattgctaaagcaaaactaaaagggactacgccttatgagcaagattctttattaagacaatttgatgaagatcagccagaaacaggaacagaaaaaccacaaaaattttggatcaaccttctgttaattatcggctcaatcacgtgtttagccttaggattattttcggcgccttatatttttatggttgcattatcagccgccctagtgatcaactatcctaagccaaaagatcaaatagcgataattaatcatcatgctcctcaagcactctctatggtagcaattattttagcggcaggtgcttttttaggcatcatgtctaatgggaaaatgctggaagctattgccctcgatttagcagcagtattaccttctcattgggtcgataatttgcatattgttgtgggtatattaggcgttcccatggatatctttaccagcactgatgcttattattttgcgctattgcctattgtgcaggaggtcacagctagtggtggtgtccatgttgctgatgttgtgtatgctatggccataggtaataatgccggaacctttgtaagtccattctcaccagccgcttggcttgctatggggcttgcaggcactgatatgggtaaacatttacgttactcatttggttggatttggctatttagcttctttaccctaggtgttggcacattattaggactattttaa

SEQ ID NO: 295037 - DNA, 717 bp, Proteus mirabilis
atggctacccctcatattaacgcagaaatgggcgattttgctgatgtcgttttaatgccgggcgacccgcttcgtgctaaatacattgctgaaacttttttacaagacgtacgtcaagtaaataatgttcgtggcatgttaggttttactggtacgtataaaggccgtaaaatttctgtaatgggccacggtatgggtattccttcctgctcaatttatgctaaagagctaattactgattttggtgtaaaagtgattattcgcgtgggttcatgtggtgcggtattaccagatgttgaattacgtgatgttgtgatcggtatgggagcatgtacagattctaaagttaaccgcttacgctttaaagaccaagattttgcggctattgctgattttgaattagtacaaaatgctgtctctgctgcgaaagcaaaagatattaaagttcgtgtgggtaatattttctcagcggatcttttctactcgcctgatccagaaatgtttgatgtgatggaaaaatacggcatcttaggtgttgaaatggaagcagcaggtatttatggtgtagctgcggaatatggtgcacgtgccctgacaatttgtactgtttctgatcacattaagaaaggtacacaaacaacctcagaagagcgccaaactacctttaatgaaatgattgaaattgcattagaatctgttctgttattagaagactaa

SEQ ID NO: 295038 - DNA, 1227 bp, Proteus mirabilis
atgaaacgtgtacatatcatggtattagattcctttggtatcggtgctgctggtgatgcggagaaattcggtgaccaaggcgcagacactttaggacatatcgcacaagcatttgcagaaggtaaagcggataaagatggtcgtaaaggtcctcttcacctacctaatctttgccgtttaggtttaggtaaagcggctgaagaatcaacaggtaaattccctgttggtttagacaaagatgcggaaattattggtgcttatggctacgcgagtgagatctcttctggtaaagatacaccgtcaggccactgggaaatcgcgggtgtccctgtattatttgattggggatactttaaagatttgaaaaactctttccctcaagagttgctagacaacattgttaaacgtgccaatttgccgggttatttaggtaactgtcacgcttctggtacggttattctggatgaactgggtgaagagcatatgaaaactgggaaacctattttctatacttctgctgactccgttttccaaattgcttgtcatgaagagaccttcggtttagataaattatatgagctatgtgaaattgctcgtgatgaactaaacaaaggtgattacaacatcggtcgtgtcattgctcgtccatttattggcgacaaaccaggcaatttctcacgtacaggtaatcgtcatgatttagctgttgagccaccagcaccaactatgttgaaaaaactggttgatgaaaaacaaggccacgttgtctctatcggtaaaattgctgatatctatgcaaatgtaggtattactaagaaagtgaaagcaacaggtattgatgctctgttcgatgcaacgattgaagagatgaaattagcgggtgataacactatcgttttcactaactttgttgatttcgactcatcttatggtcaccgtcgtgatgttgtcggttatggtgaagcactcgaattattcgaccgtcgcttacctgagctgatggaattagtgaaagaagatgatattttgatcctaaccgcagaccatggttgtgacccaacttggcaaggttcagatcacacccgtgaacacattccggttctggtttatgggccaaaagttaaaccaggttcattaggtcaccgtgaaacttttgctgatatcggacaaactgttgtgaaatacttcggtttatcaccagtagaatacggtaaagcaatgttttaa

SEQ ID NO: 295039 - DNA, 1323 bp, Proteus mirabilis
gtgtttcttgcccaagaaattattcgtaaaaagcgtgatggtcatcctttaactgaagaagagatccgttttttcattaatggcgtcagagataatactgtttctgaaggtcaaattgcagcacttgcaatgacaatttattttcatgatatgaccatgcctgaacgtgtggctttgacattagccatgcgtgattccggtactgtactaaactggaagagtctaaacttaaatggtcctattgttgataaacactcaacaggcggtgttggcgatgttacatcactgatgttagggccaatggtcgctgcttgtggtggttatgttccgatgatttctggtcgtggattaggtcatactggtggaactcttgataagcttgaggctattcccggctttgatattttccctgatgatgaaaaattccgcgatattattcgtcatgttggtgtagcaattattgggcaaaccaattcattagcacctgctgataaacgcttttacgctacacgtgatattactgctaccgttgattcaattccgcttatcactgcatctattttaggtaaaaaattagctgaaggtttggatgcattagtgatggacgttaaagttggctcaggtgcctttatgccaacatatcagaaatcggaagagctagcagaatcaattgtacaagtagcaaatggcgcaggatgccaaactacagcactactgactgatatgaatgaagtattagcatcaagtgcaggtaatgcagtggaagtccgtgaagcagtacaattcttaacgggtgaataccgtaatccacgcttatttgaagttacgatggcactgtgtgtagaaatgttagtgtcaggtcgtttagctgactcacgtcaacaagctcgccaaaaactgcaagatgtgctggataacggtaaagcagcggaagtctttgctcgtatggttgcagcccaaaatggtcctacagattttgttgaaaactacaataaatacctgccaacggcggtattaagtaagcctgtatttgctgagaaagccggttttgtcacagaaatggatacccgagctttaggtatgtcagttgtgactttaggcggtggtcgccgtaaagcaactgatgctattgattacagtgttggattaagtgaaatcgcggcactaggaacagaaatcaatacagatacaccactcgcgatgatccatgccaatagtgaaaaatcatggcaagaagctgcggcagaagtccgtaaagcgatggtaattggtgagacaaaacgtgaaacgtcaccaatggtgtatcgccaagtcagcgaataa

SEQ ID NO: 295040 - DNA, 780 bp, Proteus mirabilis
atgacagatttaaccgctgcagcgcgccttgcgctgtctttgatggatttaaccaccttaaatgatgacgacactgatgaaaaagtgacaaaactatgtcatcaggcgaaaagcccagaaggtaatacagccgcaatctgtatctacccacgctttattccactggctcgtaaagtattacgtgaacagggaacaccagaaattcgtattgcaaccgtaactaacttccctcatggtaatgatgatttagatatcgcattagctgaaactaatgcagcattagcttatggtgctgatgaggttgatgttgtttttccttaccgcgcattaatggcaggtaatgaacaaatcggttttgatatcgttaaagcatgtaaagacgcttgcgctaaagcgggttctttactgaaagttattattgaaacgggtgagttgaaagatcctgcgctcattcgtaaagcatctgaaatctcaattaaagcaggtgctgattttatcaaaacatccacaggtaaagtgcctgttaatgcaacactggaaagcgctgaattaatgcttcaagtgatccacgatatgggtgttggcaaagaagttggttttaaaccagcgggtggggtacgtacagctgaagaagctgcgcaataccttgcattagcaaaccgtattatgggcgataactgggttgatgctcgccatttccgttttggtgcatcaagtctgttaggtaatttattagccacactcggtcatggcgaacaaaaatcgtctagtggttattaa

SEQ ID NO: 295041 - DNA, 1302 bp, Proteus mirabilis
atgcacctcattatgagcttggtcggaatggccacattgatattgatagccattcttttctccagcaaccgacgtgcaattaaattacgcacggtcggtggcgcattccttattcaaattggtttaggcgcatttgtactttattcagaaagtggccgtaaagtgttattggctatttctgatgccgttaaaaatgtcatcgattatggtgaaaacggcatgagcttcctttttgctggcttagtttccgacaaaatgtttgagctatttggcagcggtggctttgtttttgctttgcgtgttttacctgttattgtgttcttctcttcattgatagcagtactttattacttaggtatcatgcaatttgtcatcaagattttaggtggcggattacaaaaagtattaggcacttctcgtactgaatcaatgtctgcaacagccaatatcttcgttggacaaacagaagcaccactggtggttcgcccctatattgctagaatgacaacctcagaactttttgcggtgatgtgtggtggattagcatcagtggcaggttcggtactggcaggttatgcaagtatgggtgtgccattggagtatttgatcaccgcttcatttatggcggcaccaggtggtttactcttcgcaaaactcttggttcctgaaacagaaacacctgatgatcaaaaagatgcttttgataacttaagtgatgaagaaaaacccgctaatattattgatgctgcggcatcaggggcttcttcaggattacaacttgcgttaaacgtaggtgcaatgctactcgcttttgtcgcattaattgccttaattaatggtattcttggcggaattggtggctggttcggttatgaagacttctcgctagaattaatcttaggctgggtatttgcaccaatcgccttcttaattggtgtgccttggagtgaggcaaccattgctggctcttttattggtcaaaaactggtgatcaacgaattctatgcttactcggagtttagtaaatatctgcaagatgaatcacaattagcagcagcaggcttaatggccttgtctgaacaaacaaaagtgattatctcttttgcgctgtgtggatttgctaacctttcctctgttgcggtattactgggtggtttagggggaatggcaccaaaccgtcgtaaagatgtcgcacgcttaggtatgaaagccgttttagcgggtacactctctaacttaatgagtgcaaccatcgccggcttcttttttgcattaaccgcaatggctgtggttgctgcttaa

SEQ ID NO: 295042 - DNA, 783 bp, Proteus mirabilis
atgagtcgatttattgatacgcattgtcattttgattttcccgtcttttatcacgaccttgagaatagccttgctttagcacaacaggctcaggtaaaaaaaattattattcctgcggttgctcagtggaattgggacgcggtaacggaattgtctcgttataacaatgcactatattgtgcactaggtttgcatcctttatatattgaagcgcatacagagcagcacttgattgaacttaaaacacgcctaaaaacgacgccacgttgtgttgcaatgggggagatgggtttggataactatatgacaaatccacatccggaaaaacagcaacaatttttaatagcacaacttaaattggcgatagaatttgatttaccagtgatccttcattcacgtaaaactcatgataatctaagtgctattttgcgccgttattcagttcctcgtaaaggtgtgatccatggtttttccggcagtctgcaacaagcagaacgttttgttcaacaaggctattttattggggtagggggcactatcacttatccacgtgcacaaaaaacacgtcgtgcaattgcctctctacccttagagcgcttgttattagaaacggatgcgcctgatatgcctgtaagtggttttcaaggcgagcctaaccgccctgagcgaattctcgctgttttttcttctctttgtgaattgcgtcaagagtcagcagaggttattgcaaaccaactttacctgaatagtctacaattatttcagttaacagatgatgcctag

SEQ ID NO: 295043 - DNA, 1062 bp, Proteus mirabilis
atggggaagtatataccggttacattaaataatattacggcacttgaatttcaatcatccttaccacaaggcaaagttgcattagtttgcgaaggcggtgggcagcgaggcatctttactgccggtgttcttgatgaatttatgcgctctcaatttgatccttttgatctactcctaggggtatccgcgggggcgcaaaacttatctgcttttgcttgtggacaaaggggttacgcccgcagagtcattaaccgttataccaccaataaccaattctttaatccgattcgttttgttcgtgggggaaatttactcgatcttgactggtatatagaaaccacttcgaaagaaatgcctttaaatatgcctaaagcattacgtcgttttgatagtggtcgcgagttttatatggtggcaagtcgctccgacaattttaaggcaaattattttcaaccagaaaaaagcacatggcttgatattgtgaaagcctccagtgcgatccccgcgttttatcgcaatggtgttttatttcaagatgttgtttaccatgatggcggtattagtgatgcgatcccggtaaaagaggcttatcgtcgtggttgtcgtacaattgtcgttatacgaacagtaccgtctgaatatcaatataccaccgagtgggtggataaaatgggaaaatggtttgagaatggccgttttcaacgctttctcaatatggctcaagtccatattgaaacttatactgacacactaagatttatccaatctccacctgaagatgccgttatcattgaaatatatccaccaacaacactacaatctagtgcattaggaagccgtttaagtgcattaaatcatgattatcatgttggtagacgctgtgggcgctattttctagccactattggtcaacacttctctaagaaaaaatttcagcaacacgataaaaaaatatttagcctatttgaaaatgaagcaaaagcagataaagcggaagatgccgaaatcattcaaaaaggaactcggagtgtgcaccctgaagtaaggagtgttcaagaatga

SEQ ID NO: 295044 - DNA, 348 bp, Proteus mirabilis
atgaatcaacaaaaaataaaattagtattagcgctcgtcacgggtatgacagtgacaatgataagtacagcaactattgcggagacatcgtggtataacgaaattgataaaactaccagtaatgttaacaatgaattaagcgatacggcaatatcgaaaaaaatcgaagaaacactattacctaacccctccattgacagtggatcactttcaattcgtactgaatttggtcatgtcacagttgccggctttgttaaaaatgcagatcaggaaaaacaagtcattcagatcattgaaaaaattgatggtgtaaaaagcgttgaatcatcagtgaatattcaaggctaa

SEQ ID NO: 295045 - DNA, 1590 bp, Proteus mirabilis
atgcaacaccttcgtcctatccgccgtgctcttttaagtgtgtctgataaagcaggtattttagaatttgcgaaagcgcttgtagaaagaaatgtagaacttttatcaacaggggggacagcgcgtctattagcagaagctggcttacccgttatagaagtctctgactacaccggttttccagaaatgatggatggtcgtgtaaaaacacttcaccctaaagtacatggtggtattttaggacgtcgtggacaagatgataccattatggaggaacatgatattcgtcctatcgacatggttgttgtcaatctttatccctttgctaaaacagtagctcgtcccgattgctcattagcagatgctgttgagaatattgatattggtggtcctaccatggttcgttccgcagcaaagaaccataaagacgtcaccattgtggttaatagcaatgactatgaaaaagtgattgaagaaatggacaatcaccaaaacagtctgactttagatacacgttttgatttagccattaaagcctttgagcataccgcagcttatgacagtatgattgcgaactactttggccaaaaagttgcaccttattatggtgatacttcacaaccatcaggaaccttccctcgtaccttaaatcttaactatataaagaaacaagatatgcgttatggtgagaatgctcatcagcaagcggctttctatatagaagagaatattgaagaagcctctatcgcaacagcaaatcaattacaaggtaaagcactctcttataacaatattgccgatactgatgctgcattggaatgcgtgaaatcattttccgaaccagcttgtgttatcgtgaaacatgcaaacccttgtggcgttgctattgcggacaccctcacacaagcatatgacaatgcatttaaaactgatccaacttctgcatttggcggtattatcgctttcaatagaagcttagatgcaaaaacagcaagtgccgttatagagcgtcaatttgtcgaagtcattatcgcgccttctattaatgaagatgctctacctattttagcaaccaaacctaatgttcgtgtattagcctgtggtgaatggcaagaagctaaacctgcacttgatttcaaacgggttaacggaggcttattagtacaagatcgtgatttaggtatggttaaagaagaaaacctaagggttgtcacgcaacgccagcctagtgaacgagagtggaaagatgcgctattttgctggaaagttgcaaaatttgtgaaatccaacgcaattgtgtatgccaaaaatgacatgacgattggcatcggtgcgggccaaatgagccgtgtctattctgctaaaatagcagggattaaagcggctgatgaaggtttagaagtagcaggttgcgccatggcatctgatgcattctttccctttagagatggtattgatgcggcagctatggccggtgtaacttgtgttattcagccaggtggttctattcgtgatgatgaagtaattgctgcagctaatgaacacaatatcgcgatgatttttactaacatgcgtcatttccgccattaa

SEQ ID NO: 295046 - DNA, 1290 bp, Proteus mirabilis
atgaaaattttaatcattggtaatggtggtcgtgaacatgcactagcttggaaagcagcgcaatcgcctttagcaacccaagtgtttgttgcccccggtaatgcaggaacagcattagaacatggcgtacaaaacgtcgatattagtgccactgatattgccgcattagttgcatttgcccaacaaaatcacattgatttaaccattgtggggcctgaggcaccattggtaattggtgtagtagatgcgttcaaacaagcgggactgatgatttttggccccaccaaaggtgcggcacaactagaaggttcgaaagcatttacaaaagattttttagcccgccatcatatcccaacagcagcttatcaaaactttactgaaatagcgcctgcacttgaatatctccataaagtgggcacacctattgtgattaaagcggatggcctagctgcgggtaaaggtgtcattgttgccatgacacataccgaagcagaaaatgcgataaaagatatgttagcaggtaatgcttttggtgatgcaggacaccgtattgttattgaagaatttcttgatggagaagaagccagttttattgtcatggtggatggtgaaaatgtacttccgatggcaacaagtcaagatcataagcgcgtcggtgatggtgactcaggcccaaacaccggcggaatgggagcttattctccagcaccggttgttactcctgaaatccaccagcaagtcatggataacatcatttatccaactgtcaaaggcatggctgccgaaggacatcgctatcaaggttttctttatgcaggcttaatgattgataagcaaggtattgccaaagtcattgagtttaactgccgttttggcgatccggaaacgcaacctataatgatgcgcatgcaatcagacttagttgatctctgtttagcgggtgcaaaaggcgaactagcaggtaaagactccatttgggatccccgccccgctttaggtgttgtaatggccgccggtggctatcctgataactaccgccaaaatgatattattgagggactaacagcaacatcttcttcaacagctaaggtatttcaagcaggaacaaaattaacggttcaaggtgaagttgttacagcaggaggccgagtattatgtgcaactgctttaggggaagatatcgaacaagctcaaaagaatgcctatgctttagccaaaagtattcactggtatggctgtttctatcgccatgatatcggctatcgtgccattgcgcgtttaaaaaagtaa

SEQ ID NO: 295047 - DNA, 693 bp, Proteus mirabilis
atgaacaatagagggggagttgctccccttttgttgagacgacaggggctgttagcaatagggttctcttttttgctcagcgcctgctcttcttctccacaactacccgaattttctgcaacgggctatattgcagatgaaggggttgtgcggctttggcgtttaaataacaaaacatcagagcctcaagtgattatgagtgtctatagcttttatcaaaagcctgaaactgttgtcactttttatgagtaccgccaaaatagattatggcaaattcgcagtgaaatcgttaatccctcccatccttcctcttggcatttacgtttaaataaacgtggcgaagttatctttatgcaacaagagtatcaaggacaaaagcgcccattaacagaagatgaacgtttaaaaatggtatttgcagccagtcgagaacgagagatcagtaaggcattggcgataggtcaggtaaagttagttcaaggaacctggtatcaagatacattgacaacatgtgcgggtgaaaaagtgaatgtatcatttgaagcaccagaacaacgttggctaaaacgtagaacacagcatctaactcgtcccgcttatgttgcttggctggattcccccgaaggtaaccagttgttaatggttgcagaacacgatttttgtaaatgggaaccaacaaaagagagtttgtga

SEQ ID NO: 295048 - DNA, 273 bp, Proteus mirabilis
atgaacaaagctgaattaaccgaatcagttgctgaaaaagcggatctgacaaaaactcaggcaaaagctgctattgaagcgtttatcgactcagtaacaggtgctctgaaagaaggtgattctgtccagttagttggtttcggtacattcaaagtgaatcaccgtgcagagcgtactggtcgtaaccctcaaactggcaaagaaattaaaattgcagcagctaacgttcctgcatttactgccggtaaagcactgaaagacgcagtaaaataa

SEQ ID NO: 295049 - DNA, 591 bp, Proteus mirabilis
atgttgaagaacccaatccatttacgtttagaaaagcttgaaagttggcaacacttaacgtttatggcgtgcctgtgtgagagaatgtatccaaattatcaggtattttgtcgcgaaacaggatttactgatccaaccctgtatcgtcgtattctcgatctagtttgggaaactttaacagtaaaagatgcgaaggtgaattttgattctcaattagagaaattagaagaagctattcctgatgcatctcagtttgatatttatggtgtctatcctgcaatcgacgcctgtgtggcactgagtgagcttattcattctcgtttaagtggtgagtcactcagtcatgctattgaagtgagcaaaatttcggttggaactgttgctacacttgaaatgacacaagcagaaagagaaatgtctgaagaagaattaaaatctcttgctgcggtcactgaagagttcgatattcaatgggaaatttatcgcctacttgttgagtgcgaagaaagagatattgaactaataaaaggtctgcgtacagacctgcgcgaatctggaatgagcaatatcggtatagaattaacgcactaa

SEQ ID NO: 295050 - DNA, 708 bp, Proteus mirabilis
atgcggttcaccgtctatcgaagccttatcatcaggataatgattaatactcagcaattacgtcaagagcagacagagaaagctcaacagattatcttaaccgaccaatttatggcaccaacttatattgcaggtgctgatgtcggatttgaaaatagcggtgcggtcactcgtgccgctattgttattatgcattatccctcctttgaaattgttgaatatcaaatagcccgtattgcaacattactaccttatattcccggactcctttcattccgtgagtgtcccgcgttattagaagcttggcagggcattaagcaaaaaccgcaacttgtttttgttgatggtcaagggatcgcacatcctagacggttaggggtggcaagtcattttgggctcttagccgatattccaaccatcggtgtggcaaaaagtcgtttatgtggtgatgataaaaaattagacgacgatgtaggaagtacggaaaaattaatggataaggatgagcagttaggttggatttatcgtagtaaaaaaagatgtaaacctttatatatttctccaggctataaagtgagtatggagagtgcattagcgtgggtaaaacgttgtataaatggatatcgattacctgaaccgactcgttgggccgatggtattgcctcaaataggcgattatttgagcaattgaataagaataagctctaa

SEQ ID NO: 295051 - DNA, 1074 bp, Proteus mirabilis
atgagtgagttgaaaaacgaccgctatttacgtgcgctgttgcgccaacctgttgatgtcacccctgtttggatgatgcgtcaggcaggcagataccttcctgaatacaaggaaacacgagcacaggcgggagacttcatctcattgtgcaaaaataccgaattggcatgcgaagttaccttacagcctttaagacgttttcctttagatgccgctatcctattttctgatattttaactatccctgatgcgatgggattaggtctgtattttgaaacaggggaaggtcctcgttttaaaacaccgataaatagccttgatgatataaaaaaattacctattcctgatccggaagatgaactaggttatgtcatgaatgcggtacgtgctattcgtcatgcattgcaaggtaatgtgccattaattggtttttcaggtagtccatggacactagctacttatatgattgaaggtggaagtagtaaggcgttcacaaaaattaaaaaaatgatgtatagcgagccacaagctctgcatctattactggataaactggcggatagcgttatcctttatttgaatgctcagattaaagcaggggcacaatccatcatgatcttcgatacatggggaggtgtgctaacaggacgcgattatcaattgttctcattacaatacatgcataagattgttgatggtcttattcgtgaaaatgagggcagaaaagttccggtcaccttatttactaaaggtggtgggcgttggttagaagcgatggcagccacaggttgtgatgcattaggacttgattggacgattgatatcgaagatgctcgccgtcgagtcggtgataaggttgccttacaaggtaatatggatccttctatgttgtatgcgccaccagcaagaatagaacaagaagtcgctacgattttagctggctttggcaaaggtactggtcatgtctttaatcttgggcacggtattcatcaagatgttccaccagcgcatgctggagcatttattgatgcggttcaccgtctatcgaagccttatcatcaggataatgattaa

SEQ ID NO: 295052 - DNA, 786 bp, Proteus mirabilis
atgcatttatatacgctaacaggtggtgaaaaaggctggtggacagtcagcctaggcggccgagtttggttacccaaaggtgaacttccatttggtttagcaacagattggggacttgtgggtaaacaagccaaaattgttggggaatggcaaggagaaaatgtctggctgatttatgacaaaatggaaagcgatatgtgttcaccaaggcttatcgcatctcaagatgaaaagttatttaaattagtcggtcgtggtgttcaacttgctgaattttatcgttctcatcggttttgtggctattgtggggctaaaatgcgccatagtgagagtgaatgggcatgtttatgtgataactgtcatgagcgttattacccacaaatagcaccttgtattattgttggtattcgtaataaagataaaattctattagcacaccatgttaggcataaacattcaccactctacaccgttttagctggttttgttgaagtaggggaaagcttagaagatgcggtagctcgcgaagtttttgaagaaagtcatattcatattcgcaatattcgttatgtttcttcacaaccatggcctttccctcattctcttatgatgggttttcttgccgattatgcagggggagagttacgacatgatccttcggaattaatcagtgcagcatggtatcgctatgatgagttaccacaaataccaccttctgatactattgcgcgacgtttaatagaagatacgatagcgaatattagacaagatgaagaaaatagctaa

SEQ ID NO: 295053 - DNA, 681 bp, Proteus mirabilis
atgacaaacataacgaaacataagatcgctatttttgatttagatgaaacactgttagccggagattctagctgtttatggacaaattacttgtgggagaaaaagagagtcactgatcctgcttttttagctttagataaacaaatgatcgctgactattacgcagaaaggctcaatataaatcagtacttacaccaacatttatcttattttaatcagtatggcatcgaagaaataaatcaatgggttactgattttactcataccataatcaagccattgctctatccccaaggcattaataccataaacctataccgacaacaaaatatccccgttatcattatctctgcaactatgtcttttctggtacatgcgattgcaaaacaacttaatgctgatatttctatgggcattgatatgcagataaaaaataatcattatacaggccatattgagggtattcctacctttagagagggtaaagtcactcgactcaatcagtggaaagaacaaaacaacattaataattcttatatttatttctatactgactcagccaacgatctccctttatgctatcaagcaaatgaggttatcaccattaacgccgatgaaagattaagccaaatagcaacagaaaaagaatggcaacagtgctactggcagttaaataaataa

SEQ ID NO: 295054 - DNA, 1953 bp, Proteus mirabilis
atgtccaaaaatcaaactatctctattaaagatgtttcgcccactgcgaataaacagcgcccacgtaaagaacaacgcgatgcagcgcaatcctttattagcactattcaaggtattaattttcccaattcaaaacgtatttatatcactggtactcgttcagatattcaagtgccaatgcgtgagatccaacttgataagaccctgatcggtggctcaaaagaagatcctatttttgaagagaatgaacctattccagtctatgacacttcagggccttatggtgatccaacttctcaacttgacgttaatcttggcttaaaaaaaattcgccaaccatggattgatgcgcgtaatgataccgaacctctttcacacttaagttctgatttcactcaacaacgccttactgatgcaggattagaacatctacgctttccgttaaaacccagccctagaaaagcgctaaataataagagagtgacgcaattacattacgctcgcaaaggtattattacgccagaaatggaatttattgccattcgagaaaatatggggcgagaacgtattcgtagcgaagtattacgccaacaacatgccggatttagctttggtgcacatttacctgacaatattacgcctgagtttgtacgccaagaagttgctgctggtcgtgccattattcctgccaatatcaatcacccagaatctgaaccgatgattattggccgtaatttcttagttaaggtgaatgctaatatcggcaactcttcggttacctcatctatcgaagaagaagtagaaaaactgatttggtcaacacgttggggggccgatacggtgatggatctgtcaactggacgttatatccacgaaacacgtgaatggatcatccgtaatagcccagtccctattggtactgtccctatttatcaagctctcgaaaaagttaacggtattgcagaagatctcacttgggaaatgttccgtgatactttattagaacaagcggaacaaggggtggattatttcactatccatgcaggtgtcctattacgctatgttcctatgaccgcaaaacgtttaacgggtattgtctctcgtggtggatcaattatggcgaagtggtgtttatcacaccataaagagaatttcctctatacccacttccgggagatttgcgaaatctgcaccgcttatgatgtttcattatcattaggtgatggtctaagacctggctctatccaagatgctaacgatgaagcacagttcgctgaattacataccttgggtgaattaacaaagattgcttgggaatatgatgtacaagtcatgattgaaggcccaggtcatgtaccaatgcagatgatacgtcgcaatatgacggaagaactagagcattgtcatgaagcccccttctatacattaggccctctaacaactgatatagcaccgggctacgatcattttacttccggtattggcgctgcaatgattggctggtttggctgtgccatgctctgttatgtcactccgaaagagcatctcggactccccaataaagaagatgtgaaacaaggtcttattacttataaaatcgccgcccatgcagctgatcttgccaaaggacatcccggcgcgcaaattcgtgataacgccatgtctaaagcccgttttgagtttcgatgggaagatcaatttaatctagcacttgatcctgaaactgcccgtcaatatcacgatgaaaccttacctcaagcatcggggaaagtcgctcacttctgctctatgtgtggacctaaattctgctcaatgaagataacacaagaagtgcgtgattatgcagcaggtatggagcagatgtcgcaagcctttaaagcccatggtagtgagctataccacagtgcagaaatagccagttccgaggtagctgataatgaacagatcctctaa

SEQ ID NO: 295055 - DNA, 648 bp, Proteus mirabilis
atgaacagatcctctaattcggcttttgccccaaccgaaaaaaagttggggctttaccctgttgtcgattctattgaatgggttgagcgcctgttgaaaataggtgtaacaacgatccaattacgcatcaaagataaacagcccaaagatgttgaacaagatataatcactgcaatcaaattaggtcgtaagtataacgcaagattatttatcaatgattattgggaactcgccattaaacatcacgcttatggtgttcatcttggacaagaagatctcgacattgccgatcttgatgctattaaacagtcaggtttatgccttggtatttccacccataatgacactgaactacaaagagcaaaaaggctacttccctcttatattgctttagggcatatatttccaacgacgacgaaagatatgccatcaaagccacaaggtttaagagcactcaaacatcaagtagaacaaactcatgattttccaaccgttgctattggcgggatctctctagaaaaagtctctgatgtcgtagcaactggcgttggtggagttgctttagtgagtgcaataacaaaggcatcagactggcaacaggtaacacttaaattattagaattagtagagggaaaaccatcatgctaa

SEQ ID NO: 295056 - DNA, 750 bp, Proteus mirabilis
atgctaaatgataatgattttatgcgttatagccgacaagtgatgttagaagatataggcttagaagggcaaaccaaaatacagcaagccagagtattaattattggcttaggtgggttaggctctccagcatcactttatctagcaggggctggagtgggtgaacttattttagtcgatgatgataatttgcatgtctcgaatttacagcgtcaaattctctatcgcactcaagatatcccagatgcaaaatcagacatcgccaaacaggctctacttgccttaaatcctgacattaaaatcaccacctataaacaacgtgttaatgatgattttctctctacgttgcttcaaaacatcgatttagttttagattgcactgataacatgagtactcgccaagcaatcaatcgtatctgtgttaaacaacaaataccgcttattagtggcagtgccgttggatttagtggtcagctgatcgtgtttgagcccccttttattcatggttgttaccactgtctctatcctgataacaaagagccacaacgcaattgccaaacagctggaattctaggccccgttgtaggggtcattggtactctgcaggcacttgaagcaattaagttacttgcaggtttaccaagtacgttaagtggaaaactacgtctgttcgatggtagaaaacaaaattggagcaccttgcgcttaacaccatcaaaaaactgtcctgtttgtcgagggttagcatga

SEQ ID NO: 295057 - DNA, 201 bp, Proteus mirabilis
atgaatattaccgtaaatgacgaacgttattctctggatatgcctgtcacgataagccagctccttattgagttaaaacaaccttctatggggatggcactcgctatcaacgacatcattattccccgtgaaaactggaatacacaaatgatcaatgagggtgacacaattcttctctttcaagcaattgcgggaggctga

SEQ ID NO: 295058 - DNA, 780 bp, Proteus mirabilis
atgttgaaaattgctgatactacattcacatcaaggttatttactggtacaggtaaatttgcgacaccaacactcatggctgaagccattaaagcctctggtagccaattagtgacaatggcaatgaagcgtgttgatttaaaaaatggcaatgatgatctaatcgcccctcttaaatcattaggggtaaaattattacctaatacttctggtgcaaaaacagcacaagaagccgtttttgctgcacgattagcaaaagaggcctttgatacccattggatcaaattagaaattcatcctgataccaaatacctacttcctgatccaatagaaacacttaaagcggctgaacttctcgttaaagaaggttttgtggttttaccttattgcagtgctgatccggtattatgccgtcgtttagaagaggtaggatgcgcagctgtaatgccgttaggttcacctattggttccaatcaaggtttacaaactcgcgattttttgcggattattattgaacaaacctcaatacccgttgttgttgacgctggtattggcgcaccaagccatgctcttgaagctttagaattgggtgcagatgctgtactcgtcaacaccgccatagccgtagctaaaaatccagttttaatggctcaagcttttaaagctgcaattgatgctggagagcttgctcgacaatctggactggctgtaccgactgcaataacacatatgcaagcacaagcctctagcccattaacccaatatttagaggctttctaa

SEQ ID NO: 295059 - DNA, 1119 bp, Proteus mirabilis
atgaaaacattttctgattattggcaacaattagattgggatgacatcacgttaagactgaatagtaaaacttgtgaagatgttgaaactgctttatctcatcatactttaactcttgatgattttatggcgctgatctcccctgctggccgacattatttagagccaatggcacaacgcgcccagcaactaactcgacaacgttttggtaatgttgtcggtttatatgttccactgtacctctctaatttatgtgctaatgattgcacttattgtggtttttcaatgagtaatgccatcaagcgcaaaacattaaatgaagacgaaatccttgctgaatgtcatagcattcggcaattaggttttgatagcctgctactcgttacaggagagcatcaaagaaaagttggtatggattatttccgtcaatatataccgcttattcgccagcaattcagtttattaatgatggaagtacaacctctggcgacaaatgagtacgctgaattaaaaacgctcggtattgatggtgtaatggtttatcaagaaacctatcatgaacccacttatcagttgcatcatctaagaggaaaaaaacaagattttcattggcggttacaaacccctgatagattagggcaagccggcattgataaaattggtttaggtgcactaattggtttatctgacagatggcgtaccgattgttatatggtggctgagcatctgctatttttacaaaaacgttactggaaaagtcgttactctatctcctttcctcgtctacgcccatgtgctggtgggcttaatcctgcatcggtaatgagtgaagcagaattagttcagttgatttgtgcttttcgtattttagcccccgatgttgagctttccctttcaacacgtgaatcgccttactttcgcgataatacagtacctttagccatcaataatatcagcgctggctctaaaactcagcccggtggttattctgatagtcatgaggagttagagcaattttcacctaatgataatcgtcatgtcagtgatgtaattaatgccctcaaaacacgaggattacagcctgtatggaaagattgggataactatttaggtcgttaa

SEQ ID NO: 295060 - DNA, 993 bp, Proteus mirabilis
atgaataaacctcttttaatttcttctcatgatgctgcattcaaacgcttcatgatgaatattagtaatgctaaggatttcttttttatccatttatcagacgaattaaaaagctattgtgatttttcaactttaaagctacaaaattcctcttttatcgatattaaattacgttctcgtatgtcagatattctctactcagtgaaaaccaaaaaggggaatatctcaatttatttcttaattgagcaccaatctcgaccagataaaatgatcgcttggcgtatgatgcactatgcgttttgcactatgaatcagcatctacagcaaggttacacatctttgccgttggttgttcctatcttgttttatcatggcaaacgcaaaccttatcctttttctgtcaattggttagattgttttccgctttctacattggcaaatcaactctatcttaataattttgcattaattgatttgaattcaattgatgatgaaattttattaacacatagaaaagccgctgtaatggaaattgcaatgaaacatgtgaacagttgcgatgatcttgataagttagcgatgcttctctcaaaagcgataaatcagaaaaactgcagtgatgaagacactatcgctgttgtacaatatttattctcaattatggacgcggcggattttgaatccatcataaataagatagctgaacaagtagataaccatagagagacgattatgaatattgcatggcggttagaaaataaaggatttaaattaggaaaaatggaggggatagagataggtaaaaatgaaggtatagagataggtaaaaacgaaggtatagagataggtaaaaacgaaggtatagaaataggtaaaaagatagtacaaatacaattagcaaaaaacttattaaaagaaaatgttgagttggaatttattgaacgaataactggtttaagtatacaagaacttaaaatattgcttttaacttaa

SEQ ID NO: 295061 - DNA, 4230 bp, Proteus mirabilis
gtgaaagacttattaaagtttctgaaagcgcaaaccaagaccgaagagtttgatgcgatcaaaattgctctggcatcacctgatatgatccgttcatggtcatttggtgaagttaaaaagccagaaacaattaactaccgtacgttcaaaccagaacgtgacggccttttctgtgcccgtattttcggaccagtaaaagattacgaatgtttgtgtggtaaatacaaacgtttaaaacaccgtggtgttatttgtgagaagtgtggcgttgaagtcacacaaactaaagttcgtcgtgaacgtatgggtcacatcgaattagcttctccagtggcgcacatctggttcttgaaatcactgccgtcccgtatcggtctgctgttggatatgccactgcgcgatattgaacgtgtactgtattttgaatcttatgttgttgttgaaggcggtatgaccagccttgaacgtggccaaatcttaacagaagagcaatacctcgatgcattagaagaattcggtgatgaatttgatgcgaagatgggtgctgaagctgttcagaacttgttacagagcatggatctggaacaagagtgtgaaacgctgcgtgaagagttaaatgagactaactctgaaactaaacgtaagaaactgactaaacgtatcaagttacttgaagcattcatgcaatcaggcaataaacctgagtggatgatcttaactgtactgccagtgttaccaccagacttacgtccactggttccacttgatggtggtcgttttgcgacttctgacttgaacgatttatatcgtcgcgttatcaaccgtaataaccgtttaaaacgcctgctagatttagcagctccagacattatcgtacgtaacgaaaaacgtatgttacaagagtctgttgatgcgttattagataacggtcgtcgcggtcgtgcaattacaggctctaacaaacgtcctctgaaatctttggctgatatgatcaaaggtaaacaaggtcgtttccgtcaaaacctgttaggtaaacgtgtcgactattctggtcgttctgtaatcaccgttggtccatacctgcgcctgcatcagtgtggtctgccgaaaaaaatggcacttgaattattcaaaccatttatttacggaaaactggaaactcgtggtttagcgacaacaattaaagccgctaaaaaaatggttgagcgtgaagaagcggtagtttgggatatcttagatgaagttatccgtgaacacccagttatgctaaaccgtgcaccgacacttcaccgtttaggtatacaggcgtttgaaccaatcctgattgaaggtaaagctattcagttacacccactcgtttgtgcggcatataacgccgacttcgatggtgaccaaatggcggttcacgttccattgacattagaagcgcagttagaagctcgcgcgttgatgatgtcaactaacaatattctgtctccagcaagtggtgacccaattatcgttccttcacaggacgtggtattaggtctttactacatgactcgtgattgcatcaatgccaaaggtgaaggcatggtgttaagtggtccaaaagaagctgaacgcgtttatcgcgcaggtttagcctctttacacgcgcgtgttaaagtacgtatcactgaagagatcaaagatggcgaaggtaatatcaccactgaaactagcttaaaagacactacagttggtcgtgctattttatggatgattgtaccaaaaggcctaccttacgcactggttaaccaaccattaggtaaaaaagctatttctaaaatgctgaatacctgctaccgcgtaatgggcttaaagccaacagttatttttgctgaccaaatcatgtataccggttttgcttacgcagcacgttctggtgcttcagtaggtattgatgacatggttatccctgcgaaaaaagcagagatcattgccgaggcagaagcagaagttgcagaaattcaggaacagttccaatccggtctggtaacagcgggtgaacgttacaacaaagtcatcgatatttgggctgctgcgaatgaacgcgttgctaaagcgatgatggaaaatctgtctacagaaactgtgatcaaccgtgatggtgaagaagaacaacaagtttccttcaacagcatctttatgatggctgactccggtgctcgtggttctgcagctcagatccgtcagttagcgggtatgcgtggtctgatggctaagccagatggctccattatcgaaaccccaatcactgcgaacttccgtgaaggtctgaacgtactccagtacttcatctcaacccacggtgctcgtaaaggtttggcggataccgcactgaaaacagcaaactccggttacttgactcgtcgtttagttgacgttgcacaagaccttgtcgtaacagaaagcgactgtggtacaaccgaaggtgtaatgatgactccggtcattgaaggtggagatgttaaagagccactgcgtgagcgtgtattaggacgggtaacggcagaagatatcctgaaaccaggtactgcagatatccttgttccacgtaatacgctgttaaacgaaaaactgtgtgatctgttagaagaaaactcagtagacagcgttaaagttcgttcagttgtaacctgtgacacagactttggtgtatgtgctaaatgttatggtcgtgaccttgctcgtggtcatatcatcaacaaaggtgaagctatcggtgttatcgcagcacagtcaatcggtgagcctggtacacagttaacgatgcgtacgttccacatcggtggtgcggcatcccgtgcggcagcagaatcaagcattcaggtacgtaataaaggtactctgaaattgatcaatgcgaaatttatcaccaacactgctggtaagttagtgattacttctcgtaatacagaattacgtctgattgacgaattcggtcgtacgaaagaaagctataaagtaccttacggtgctcaattatcgaaaggtgatggcgaagctgtcaacggtggcgaaacagttgctaactgggatccacataccatgcctgtggtgagtgaggtttctggtattatccgttttgctgatatggttgatggtcaaaccattactcgtcaaacggatgaattaactggtctttcttcactggttgttctggatactgcagagcgtactggtagcggtaaagatttacgtccagcattgcgcatcaccgatgcacaaggtaatgatgtattaatcccgaatacagatatgccggcacagtacttcctgccaggtaaagctatcgttcaattagatgatggtgttgctattaatgcgggtgatacgttagcacgtattcctcaagaatctggtggtactaaagatattaccggtggtctaccacgcgttgctgacttgtttgaagctcgtcgtccgaaagagcctgcaatccttgctgaaatcagcggtattgtttctttcggtaaagaaacgaaaggtaaacgtcgcttagttatttctccattagatggcagcgatgcatacgaagagatgatccctaaatggcgtcaacttaacgtatttgaaggtgaggttgtggaacgcggtgatgttatctccgatggtccagaatcaccacatgacattctgcgcttacgtggtgttcatgcggttactcgctatatcactaatgaagtacaggaagtttaccgtttacaaggggttaagattaacgataaacacatcgaagttatcgttcgtcagatgctacgtaaagtgactatcgaaaatgccggtagttctgaattccttgaaggtgaacaagttgaatacgctcgtgttaaagtttcgaaccgtattttagaggaagaaggtaaagtaccagcaacatactctcgtgacctattaggtattacgaaagcatcactggctactgagtctttcatctctgcggcatcgttccaagaaacaacacgcgtactgactgaagctgctgttgcaggtaaacgtgacgaattacgtggtttaaaagaaaacgttattgtgggtcgtctgatccctgcaggtactggttttgcgtaccatcaggatcgtatccaacgtcgtcaacaacaactgccaacggatgaaactgaagcaacaattagtgcagatgaagcttctgctaacttagcagaattgctgaatgcgggtttcggcggttcatcaaataactaa

SEQ ID NO: 295062 - DNA, 4029 bp, Proteus mirabilis
atggtttactcctataccgagaaaaaacgtattcgtaaggattttggtaaacgtccacaagttctggatgttccctatctcctttctatccaacttgactcgttccagaagtttatcgagcaagatcctgatggtcaaaatgggctggaagcggctttccgttccgtatttccaatccaaagctacagcggcaatgctgaactgcaatatgtcagctaccgccttggcgagcctgtttttgatgttaaagaatgtcagatccgtggtgtaacttattctgcaccattacgtgtgaaactgcgtctggtcatttatgaacgtgaagccccagaaggcaccgttaaagacatcaaagaacaagaagtctatatgggtgaaatcccattaatgaccgataatggtacttttgttatcaatggtactgagcgtgttattgtttcccagttacatcgtagccctggtgtgttctttgatagcgataaaggtaaaacgcactcttcaggtaaagtactgtataacgcacgtattattccttatcgtggttcatggttagacttcgaattcgaccctaaagataatctttttgtccgtattgaccgtcgtcgtaaattaccagcgactatcattttacgcgcaatgaactacagcaccgaagacatcttaaatctgttcttcgagaaaacaacgtttgaaatcagtaataataaactgatgatgacgttagttcctgagcgtctgcgtggtgaaacagcttcatttgatattgaagcaaacggcaaagtttatgtcgaaaaaggtcgccgtattactgctcgtcatattcgtcagttagaaaaagaacaaattgagcgcatcgaagtacctgttgaatacatcgcaggtaaagtagtggctcgtgactatattgatgaagcgacaggtgaattgatttgtgctgctaacatggaaatctctttagatgtgttagctcgcttaagtcaagctggtcataaaaccatcgaaacactgtttaccaacgatttagatcatggtgcttatatttcagaaactatccgcgtcgatcctaccaacgatcgtttaagcgcattagttgaaatctatcgcatgatgcgtcctggtgaaccaccaactcgcgaagcggcagaaaacttatttgagaacttattcttctcagaagatcgttatgatctctctgcggttggtcgcatgaagttcaaccgctctttaggtcgcgaagaagttgaaggttctggcatcttaagccaagaagatatcattgaagtgatgaaaaaactgattgatatccgtaatggtaaaggtgaagtggatgatatcgaccacttaggtaaccgtcgtattcgttctgttggcgaaatggctgaaaaccaattccgtgttggtctggtgcgtgttgaacgtgcagttaaagagcgtctatctttaggtgatcttgatgcattaatgccacaagatatgatcaacgcaaaaccgatttctgctgcagttaaagagttctttggctctagccagttatcgcagtttatggatcagaacaacccgctgtcagaaattacccataaacgtcgtatttctgcattaggccctggtggtctgactcgtgaacgtgcaggcttcgaagttcgagacgtacacccaactcactatggtcgtgtgtgtccaatcgaaacacctgaaggtccaaatatcggtctgattaactcattatctgtttatgcacagactaacgagtacggattcttagaaacgccttaccgtgttgtagaaaacaacgctgtaacagatgaaatccactatctgtctgcaattgaagaaggtaacttcatcattgctcaggctaactccgtattagatgatgatggccacttcgtagaagaattagtaacttgccgtcataaaggtgagtcaagtttatttagtcgtgatcaagttcagtacatggacgtttcaactcaacaggttgtttctgtcggtgcttcactgatcccattccttgaacacgatgacgccaaccgtgcattgatgggtgcgaacatgcaacgtcaggctgttcctacacttcgtggtgataaaccactggtaggtacaggtatggaacgtgctgtagcggttgactccggtgttactgcggtagcaaaacgtggtggtacagttcagtatgttgatgcttctcgtatcgttatcaaagtaaacgaagatgagacttatgctggtgaagcaggcattgatatttacagcttaactaaatatacccgctctaaccaaaacacatgtattaaccaaacaccttgtgtttctttaggtgaacctgttgaacgtggtgatgtacttgccgatggtccatcaacagaccttggtgaacttgcattaggtcaaaacatgcgcgtggcatttatgccatggaatggttataactacgaggactccatccttgtatctgagcgtgttgttcaagaagaccgtttcacaactatccatattcaagaacttgcttgtgtgtctcgtgatactaagttagggcctgaagagatcactgcagatattcctaatgttggtgaagctgcgttatctaaactggatgaatcaggtatcgtttatatcggtgctgaagtgaaaggcggtgatattctggtaggtaaagtaacaccgaaaggtgaaactcaactgactccagaagagaaactgctacgtgctatcttcggtgaaaaagcatctgatgttaaagattcttctctgcgtgttcctaacggtgtatctggtacagttattgatgtacaagtcttcacccgtgatggcgtagaaaaagacaaacgtgcattagaaatcgaagaatcgcaattacgtgaagttaaaaaagacttaacagaagagttacgtatctttgaagcgggtctttttgcacgtattcgtggcgttctgattgccggcggtattgaagctgacaaattagataaactacctcgtgaacgttggttagaactgggtcttgctgatgaagagaagcaaaaccagttagaacaattagctgaacagtatgatgaactgaaagctgaattcgcgaagaaactggaagctaaacgtcgtaagatcactcaaggtgatgatttagcaccgggtgtattgaagattgttaaggtttatctggctgttaaacgtcagatccaacctggtgataagatggcgggtcgtcatggtaacaagggtgttatctctaagattaacccaattgaagacatgccatacgatgaaaacggtaatcctgttgacctcgtactgaacccactgggtgtaccatcacgtatgaacattggtcagatccttgaaactcacttgggtatggctgctaaaggcatcggtgataaaatcaatgcgatgctgaaacagcaacaagaagtggctaaattacgtgaatttatccagaaagcttatgatctgggtatggcacctcgtcagaaagttgatttggacaccttcagtgatgaagaagtgttacgtttggctgaaaacctgaaaaaaggtatgccaactgcaacacctgtgttcgatggtgcagaagagatggaaattaaagagatgctgaaattagcagatcttccaacttctggtcagattacacttttcgatggtcgtacaggtgaacaattcgaacgtccagtaactgtaggttacatgtacatgctgaaactgaaccacttagttgatgacaagatgcacgcccgttctaccggttcgtacagcttagttactcagcaacctcttggtggtaaagcacagtttggtggacagcgtttcggggagatggaagtatgggcactggaagcatacggtgcggcttacacactacaagaaatgcttactgttaagtcggatgacgttaacggtcgtaccaaaatgtacaaaaatattgttgatggtaaccatcagatggaaccaggtatgcctgagtcgttcaacgtattgttgaaagagatccgttcactgggtatcaacatcgaattggaagacgaataa

SEQ ID NO: 295063 - DNA, 366 bp, Proteus mirabilis
atgtctatctctaaagacgatatcttaaatgcagttgctgaaatgtctgtaatggacgttgttgaactgatcactatgatggaagaaaaattcggtgtatctgctgctgcagctgttgctgttgctgcgggtccagcagaagctgctgaagaaaaaactgaattcgacgttatcctgaaaggtatcggcggtaacaaagtagcagtaatcaaagcagtacgtggcgctaccggtcttggtctgaaagaagctaaagacttagtagaatctgctccagcagctctgaaagaaggcgtaagcaaagatgatgctgaagctctgaagaaagctctggaagaagcaggtgctgaggttgaagttaagtaa

SEQ ID NO: 295064 - DNA, 498 bp, Proteus mirabilis
atggcactaaatcttcaagacaaacaagcgattgttgctgaagtcagcgaagttgccaaaggcgcgctgtctgcagttgttgcggattcccgtggtgtaactgtagataaaatgactgaactgcgtaaagcatgtcgtgaagctggtgttactgtacgagtagtacgtaacacattgctacgtcgcgctgttgaaggtacttcttatgaagtgctgaaagacgcatttgttggtcctaccttgattgctttctcttctgaacacccgggcgctgcagctcgtctgttcaaagatttcgcgaaagcgaacccagcattcgagattaaagcggctgcctttgaaggtgagtttatcccaggttcaaacattgatcgcctggctacactaccaacttacgaagaagcaatcgcacgcctgatgtcaaccatgaaagaagccgctgccggcaaactggttcgtactctggctgcactgcgcgatcagaaagaagctgcttaa

SEQ ID NO: 295065 - DNA, 702 bp, Proteus mirabilis
atggctaaactaaccaagcgcatgcgcaatatccgtgaaaaagtagatgtagtgaaacagtacgaaatcaatgaagcagttgctttattgaaagagttagctacagctaaatttgttgaaagtgttgatgttgctgttaacctcggcatcgatgctcgtaaatcagaccaaaacgttcgtggtgctactgttctgccacacggtactggtcgttcagttcgcgttgctgtattcgcacaaggtgcaaatgcagaagctgctaaagaagctggtgcagaattagtcggtatggatgacttagctgctaaagttaaagctggcgaaatggactttgacgttgtaattgcatctccagatgcaatgcgcgttgttggtcaattaggccaaatccttggtccacgtggcttaatgccaaacccgaaagtgggtactgtaacacctaacgttgctgaagctgttaaaaatgctaaagctggtcaggttcgttaccgtaacgacaaaaatggtattatccataccactatcggtaaagttgatttcaacgaagctcagttgaaagaaaacttagaagctctgctggttgcgctgaaaaaagcaaaaccatcttcagctaaaggcgtttatatcaagaaagtaagcctgtctaccactatgggtgcaggtgttgctattgatcaagcaagcttaagcgcgacagtttaa

SEQ ID NO: 295066 - DNA, 429 bp, Proteus mirabilis
atggctaagaaagtccaagcctatatcaaactgcaagttgcagcaggtatggctaatccaagtccaccagttggtccagctctgggtcaacaaggtgttaacatcatggaattctgtaaagcattcaacgctaaaactgaaagcgtagaaaaaggtttaccaatccctgttgttattacagtttacgcagaccgttctttcactttcgttactaaaactcctccagcagcgattctgctgaagaaagcggcgggcgtgaaatcaggttctggcaaaccgaacaaagagaaagtaggtaaagtaactactgctcaagttcgtgaaattgcagaaactaaagctgcggatctgactggtgctgatgttgaagctatgatgcgttcaattgaaggtactgctcgttccatgggcctggtagtggaggactaa

SEQ ID NO: 295067 - DNA, 546 bp, Proteus mirabilis
atgactgattctcctaaaaaacgctggtatgttattcaagccttttcaggcttcgaaggccgtgtagcacagtctctgcgtgaacatatcaaattaaacgaaatggaagactcatttggcgaagttatggttccaacagaagaagttgttgagatccgtagcggacagcgccgtaaaagtgagcgtaaatttttcccaggctatgttcttgtccaaatggtcatgaatgatgcaacttggcaccttgtgcgtaatgtgccaagagtcatgggttttattggcggtacttcagacagacctgcaccaattagtgataaagaagttgatgcgatcatgaatcgtctacaacaagttggtgacaaaccacgtcctaaaacactgtttgaaccaggtgaaatggttcgtgttagtgatggtccatttgctgactttaacggtgttgttgaagaagttgattacgagaaaagtcgcctgaaagtgtctgtttctatctttggtcgtgcgaccccagtggaattagactttagtcaggttgaaaaaggttaa

SEQ ID NO: 295068 - DNA, 378 bp, Proteus mirabilis
atgagtgcgaatagcggagctcaagatagcaaacgcggtggtgatatcgctaagtggatcattaccgtcttattgctggtagtagcagtgggtggcaactatctttatcgtgaatttaaccttgcgttgcgggctttagcggttgttattctgttcgcggctgcgggcggagttgcgttgtggacaacacaaggtaaagcaacactagcatttgctcgcgaagctcgaattgaaatgcgtaaggtagtatggccaacgcgtcaagaaacattgcagacaacattaatcgttgctgcggtgacggctattgtgtcattggttctttggggactggatggcattctggttcgtttagtttcatttattactggcctgtga

SEQ ID NO: 295069 - DNA, 336 bp, Proteus mirabilis
atgactgctaaaattgatccaaaagcattttttgatttaccctttgagaatggtaaagacattacggataaagaattaaaagccgcttatgatgcagggcacacttttatccatattgatttaagtgatgcgcatttctcaccacaaattaccttgttcaatggcaatgaattagatcgtattcgcggtggtgttattcgtattgataataactcaacgaaatctactttagttgctgaagggccaagtaaaaaaccagagcaattaaaagccggttattattaccacgcttcaggtactacaggttgggatattattgttaagcctattaaataa

SEQ ID NO: 295070 - DNA, 339 bp, Proteus mirabilis
atgacgactatcgaaaaaattgaacgccaaatcaaagaaaatcccatcctgttatacatgaaaggatcaccaaaattaccaagctgtggattttctgcacaagccgttcaagcgatttctgcttgtggtgagcgttttgcttatgtcgatattttgcaaaaccctgatattcgtgcagagctaccaaaatatgctcattggccaactttcccacaattatgggtggatggcgaattagtcggtggctgtgacattatcttagaaatgtatcagcgcggtgaattgcagaagttattaaaagagactgcagataaataccgtggtgaagaagaagcataa

SEQ ID NO: 295071 - DNA, 639 bp, Proteus mirabilis
atgcctgataaaataaaccctaatgaattatgtaaccgctttcgaggttactatccagtcgttattgatgttgaaacgggtggatttaatgccaaaacagatggcttacttgaaattgctgctatcactttaaaaatggatgagcaaggttggttaaaacctgataatacattgcattttcatgtcgacccctttgagggcgcaaatttagagccagcggcgttagaatttaccggaattgatcctacaaatcctcttcgtggtgctgtcagcgaatatgaagcgttacacgccatttttaaaatggtacgtaaaggaatgaaagacgccaactgtaaccgtgcgatcattgtggctcataatgctaattttgatcatagctttgttatggcggcagctgagcgagcaggtttaaagcgtaaccctttccacccttttgctacttttgatactgcggctttaagtggtttagtactaggacaaactattttagcgaaagcctgtattactgcaggtatcccctttgatagtaaactcgctcatggggctttatacgataccaatcgtacatcattactgttttgtgaattagttaaccgctggaaaaaattaggtggttggccactaccaacgccctaa

SEQ ID NO: 295072 - DNA, 408 bp, Proteus mirabilis
atgcgagtacttcataccatgatccgtgtaggcgatttacaacgctctatcgatttttataccaaagttttaggtatgcaacttctacgcaccagtgagaatgaggaatataaatactcgttggcttttgttggctatggtgatgaaagtagcggtgctgttattgaattaacctataactggggtgtgactagctacgaaatggggactgcatttggccatgtcgcattaggggttgatgatgtagctgcaacttgtgaggctatccgtcaagcggggggtaacgttacccgtgaagcaggccctgttaaaggtggtacaacaattatcgcctttgtagaagatcctgatggatataaaattgaattaatcgaaaacaaaagtgccagtcaagctctgggtaactaa

SEQ ID NO: 295073 - DNA, 240 bp, Proteus mirabilis
atgcaagaacaattagaattcttcgatatcccaagcccttgcattggtcgatgtgaatctaatttacaagggtattgcattggttgttatcgtagtcgtcaagaacgctttagttggtcaacgatgagtcaacaagaaaaacgaaatgtattgagactttgtcgacaacgatatttaagagctcaacaaaaaacagtgtctgaaacagaaaaagagaatgaacagctggatttattttaa

SEQ ID NO: 295074 - DNA, 429 bp, Proteus mirabilis
gtggaatcaacattaggagctgatttagcgcgtttagttcgattatggcgtgccttaattgatcaccgactcaagccattaaaattgacccaaactcattgggtaacgttgtataatattagtcaattgcctccagaacaatctcaaatccagttggctaaagcaattggtattgaacaaccatcattagtgagaactctcgatcagttagaagaaaaaaaactgatttgtagacatacttgttcaagtgatcgcagagcaaagcgtataacgttaacaaaagaatcagaaccttttatttcagaagtttatgcagttattgagaagacacgtcaagaaatattaagtggtataaagaaggaagaaatagacaacttgatttatcttattaaaaagctagagaaaaatataattagattacatgactaa

SEQ ID NO: 295075 - DNA, 468 bp, Proteus mirabilis
atgtttaagcatttacttgttggtctttttgctgtgacaacgctggctggttgtgtaaatacaagctctttatcaggtgatacttatacagcaagtcaagctaaacaagcacaaaacgtaacttatggcaccattgtttcagtacgtgcagtaaacattcaagccggtagtgatgaaaatgttcttggtgctatcggtggtgccgtattaggtggtttattaggtaatacaattggtggtggtacaggccgtaacctagcaaccgcagcgggtgctattgctggtggtatggctggacaacaagcacaaggtgctttaaacacaaccaagggtgtgcaattggaagtacgtttagatagcggtaaaactgtggttgtcgtacaaaaagcagacaatactgcctatagacaaggtcaacgtgttgctgtgattggtaacggcaataatctcaccgtttctccacgctaa

SEQ ID NO: 295076 - DNA, 1113 bp, Proteus mirabilis
atgaaagcagggcgatacattggtgtgatgtctggtacaagtttagatggtgttgatgtggtgttggccgccattagtaataaactggttgctcaacaagccaaccattttttaccttatcctcaaaccttgcgtcaacgcattttagccgtttgccaaggccaacctgtgacgttgcatgagttaggcttattagatgcgcaactgggtgaactctatgcaaaagctattatggaattattagcgaaagcgcgattaagtgctgctgatatcacggcgataggatgtcatggtcaaacaatttggcatgagccagaaagtgatatcccgtttaccatgcaaattggtgataacaatagagtggctgccttgacaggaataaccactgtcggggattttcgtcgtcgtgatatggcatatggtgggcaaggtgcaccattggttcctgcatttcatcttgcagtattaggccatcctacagaaaaacgcattgtgttaaatattggtggtattgccaatatttcgttgctattacctggcgttgcagtgaaaggatatgacacaggccctggcaatatgctgttagacagttggaactgggttcataatcagacagcctatgatgataatgggcaatgggcagcaactggaaatgtgaatacccaattattacaggaaatgctggcagatccctatttttctcgttcagcgccaaaaagtacgggacgagaatattttaatacccaatggttacattatcatttggctaaagtacccaatgtatttccagaggatgtacaggcaactttagtagagctaaccgctatcagtattgcacagcaagtacaactcaatggtggatgtgagcgtttattggtgtgtggtggcggggcaaaaaacggtcaaattatgcatcgtcttgccagcttattacccggtacagaagtctcgttaacggacaaatatggtcttagtggcgatgatatggaagcattagcttttgcgtggttggccgcacgaacaatggcaaatgaacccggcaatttaccttctgttacaggggcatcacgagaaacaattttaggggcgatttatcctacaaatcctcgataa

SEQ ID NO: 295077 - DNA, 654 bp, Proteus mirabilis
atgacagatctggattttattgatgttgctgatcttcgacgtgaatatatgaaaggtggattacgccgtcatgaattaaccgaacagccattagttttatttgaaaaatggcttaagcaagcttgtgaagctcgcttaagtgatcctactgcaatgtgtgtggcaaccgttgatgaaaatggacaaccttatcaacgtattgtgctgttaaagcactttgatgaaaaaggtttagttttttatactaacttaggtagccgtaaagcgagtcatttagaacataaccaaagagtcagtttactcttcccttggtatcctttagagcgacaagtctgttttttagggaaagcagagaaactttcagcatttgaagtcgtaaaatatttccatagccgtcctaaagatagccaaatagcagcttgggcatcaaaacaatcttctcgcatttctgcccgtggggtgcttgaaagtaagtttttggagttaaaacaaaaatttcaacatggagaagtacctctacccagtttctggggaggatatcgagtcacttttgactctgttgaattttggcaaggtagagaaaatcgtctacacgatcgctttatatatcaaaaatcaccagaaggatggtctattgaacgtttagcaccttaa

SEQ ID NO: 295078 - DNA, 1275 bp, Proteus mirabilis
atgtctagcaagaacctaatcacacaattgcaggagcgtgggcttatcgctcaggtcacggatgaggcagctttagtggagcgtttggagcaaggtcctatcgctctctattgtggcttcgatcctaccgctgatagcctgcacttggggcatttggttcctttgctgtgtttaaaacgattccaactagccgggcataagcctgtggcgttggtgggtggtgcaacgggtcttattggtgatcctagttttaaagccaccgagcgcaaactgaatacccaagatactgttcacgagtgggtagaaaaaattcgtaaacaagtgtcacctttcttagatttcgaccgtggtgaaaacagtgcggaattagcaaacaactatgactggtttggtcaaatggatgtgctaaccttcctgcgtgatatcggtaaacacttctctgtgaaccaaatgatcaacaaagaagcggttaaacagcgtttaaaccgtgacgatgtggggatctcttttactgaattcgcttataatctgttacaagcttatgactttgcgtcattaaacaaaaacctcggtgtcgagttacaaattggtggctcagatcagtggggtaacattacttcgggtattgatctaactcgccgtttcaaccaaaaacaagtatttggtatgacagtacctttaattaccaaatctgatggtactaaatttggtaaaacagaaggtggtgctgtttggttagatccgaagaaaacgagcccatataaattctaccaattctggatcaataccgcggatgcggatgtgtatcgcttcttaaaattcttcacttttatgagcattgaggagattaatgcactggaagaggaagataaaaacagcggtcaagcacctcgcgcccaacgtgtgttagcagaacaagttacacgtttagttcatggtgaagaaggtttaactgccgctaaacgtattaccgatagcctattttcaggagctattgcagatttaacgcaagctgatcttgaacaattagcgcaagatggtatgccaactattgagttagaaaaaggcaatgatttacaacaagcactggtcaatgcagaattagttccttctcgtggtcaagctcgtacaatgattggctctaacgcagtatctattaatggcgaaaaacaggataatcctgaatacgtctttgaagaaaaagatttcttatttggtcattattccattttacgtcgcggtaaaaaacattactgccttgttatctggaaataa

SEQ ID NO: 295079 - DNA, 870 bp, Proteus mirabilis
atgaaaaatatactctctattcaatctcatgtagtttttggtcacgcaggtaatagcgctgctgaatttccaatgcgccgtatgggggtaaatgtttggcctttaaatacggttcaattttccaaccacacacaatatccagaaaaatggacgggttgtgtgatgtcggcagagcatatcactgagatcgttgatggtatcgctgctattggtaaattagcacagtgtgatgcggtattaagtggttatcttggctcggcagagcaaggccgacgcattgttgatattgtaaaaaaagtcaaacaagctaatcctaacgcatggtacttttgtgatccggttatgggacatcctgaaaaaggttgtattgtgcctccagaagtttctggcgtactttgtgaagatgccttgcccatcagtgatattattgcacccaacttattagaacttgaaacattagctggtggagcaacgctgcataatgttgaccaatgtgtaaaagcggcccgtcaattatgccagcaagggcctaaaattgtattagtaaaacatttatcacgagcaggctttcgtcatgatcgctttgaaatgttactggtgactgcagatcacagttggcacgtgagccgaccgctggttgattttggtgaacgtcagcctgttggtgtcggggatctaaccagtggtttaatgctggtggatttactaaaaggtgttgagctaaaaacggcattagagcatgttgctgctgctgtttatgaagtgatgttaaaaactaaagagatgaatgagtacgagttacaactcgtcgccgctcaagatcaaatggtgcacccaacccataacttctgtgcaacgcagttagattaa

SEQ ID NO: 295080 - DNA, 612 bp, Proteus mirabilis
atgaaattgtactacacgccgggtagttgctcgctttctcctcatatcgttctacgtgaaacgggtctcgacttttctattgagcgcattgatttacgcaccaaaaaaacagagtcagggaaagattttcttgccatcaaccctaaagggcaagttccggttcttcaattagataatggtgatattttaacggagggtgttgctattgtgcagtatcttgccgatctgaagccagatagaaatcttattgccccaccaaaagcattagaacgttatcatcaaattgagtggctaaactttcttgccagtgaagttcataaaggctacagccctctattttcatctgatacgcctgaaagttatctccctgtggtaaaaaacaaactaaaaagtaaatttgtttatattaatgatgtactaagcaaacaaaaatgtgtttgtggtgatcactttactgtggcggatgcgtatctgtttacgttaagtcaatgggcacctcatgtggcgctagatttaaccgacttaagccatttacaagactatctagcacgtattgcacaacgtcctaatgtgcatagtgcactagtcacggaaggattaataaaagagtaa

SEQ ID NO: 295081 - DNA, 789 bp, Proteus mirabilis
atgggctttatgaccggcaaacgcattctgattactggtgttgcgagcaaattatcaattgcttatggtattgccaaagccatgcatgatcaaggcgctgaactggcttttacttatcagaatgaaaaactcaaacctcgcgttgaagagtttgcagcctcattaaattctaacatcgtattagagtgtgatgtgtcaaaagatgaaagcattgacgcaatgtatgcagagctagcaaaagtttggcctaaatatgatggttttgttcactctatcggtttcgcacctgctgaccaattagatggcgactatgttaacgctgtcactcgtgaaggctttaaaattgcccatgacatcagtgcatatagctttgttgcaatggcaaaagcaagccgtgcaatgttaaatccaaactctgcattattaacgctgacttacctcggtgctgagcgtgcaattcctaactataatgttatggggttagctaaagcttctctagaagcaaacgtacgttatatggcaaatgctatgggtcctgaaggtattcgtgttaacggtatctctgcaggtccaattcgtaccttagcagcatctggtatcaaagatttccgtaaaatgttaagccattgcgaatctgtcacccctttacgtcgcacagtcactactgaagatgtgggtaatactgcagctttcttatgctctgacttatctggcgggatcaccggtgaaatcattcacgtagacggtggttttagcattgcagcaatgaatgaattagagttgaaataa

SEQ ID NO: 295082 - DNA, 810 bp, Proteus mirabilis
atgttcgataaattacttgaagtcaaaaacttatcaaaaacatttcgttaccgtacaggattattccatcgccagcagttgaaagcggtaaaaccggtgagtttcactcttgaaccgaagcaaacactggcgattattggcgctaatggttcaggtaaatcaacattagctagaatgttatccggcgttacagagccaacggggggtgatatttttataaacggtcatcaattaagttttggcgattactcttatcgtagtcaacgcattcggatgatatttcaagatcccacaaactcactcaatccacgtcagcgtattgggcaaacattagatttaccattacgacttaataccgaacttagtggcatagagcgagaaaaacgcatttatcaaactttgcggcaagtgggactattaccagaacatgctaattactatccacatatgtttgcctcaggacaacgccagcggatcgccttagctcgtgctcttattttacagccacaggtgattatagcggatgaagctattgcctctttagatatgtctttacgttcacaaattattaatttgatgttagagctacaagagacacatgaaattgcctatatctatgtgacacaaaatttaggaatgactaagcatattagtgataaagtcatggtgatggataatggtgaagtggtcgagcgtggtaacaccgctgaggtattagcatcacctttacatgaagtgacacgtcgattagtggctagtcattttggggaagcacttacggcagaagcttggcgacaagatttaccttaa

SEQ ID NO: 295083 - DNA, 1002 bp, Proteus mirabilis
atgccgttattagacatacgcaacctaactattgagtttatgacacccgatggcccggtaaaagcggtagatcgcgtttccattaccctcagtgagggagaagtaagaggtttagtcggtgaatctggctccggaaaaagtttgatcgctaaggcaatttgtggcgtgactaaagataatattaaagtgactgcggatcgctttcggtttgatgatattgatttacttaaattgtcaccaagagcacgtcgtcgggtaattggtcataatgtgtcgatgattttccaagagcctcaatcttgtcttgatccggcgaccaaaattgaacaccagcttattcaagcaatccctggttggacatttaaaggccactggtggcaacgttttcattggcgaaaacgccgtgcaattgagttacttcatcgggttggtattaaagatcataaagatatcatgcgtagctatccttatgagttaaccgagggtgaatgccaaaaagtgatgatagccattgccattgctaaccaaccccgtttactgattgccgatgaaccaactaatgcgatggagccggcaacgcaaacacaaatatttcgtttactcacccgtttaaatcaaaataataatatgactattttattaattagccatgatttgcagtggatgagtaaattagccagtaaaattacggtcatgtattgtggtcagaccgtggaaaccgccatacctgaggaactattggttaccccctatcatccttatacacaagcccttatccgctctattcctgattttactaactctttgcctcataaaagccgtttaaatacactacccggtgcgatcccctccttagagcacctacctgttgggtgccgtttaggccctcgttgtccttatgcacaacgtcaatgtattgaagcacctcgattacgtacatttaaaaatcatgcggtggcttgtcatttcccattaaatgtggagacgacagatgttcgataa

SEQ ID NO: 295084 - DNA, 894 bp, Proteus mirabilis
atgcctttagatagccagttttataaagagaaaaaaacaccatcaccagctgcggtgatttggcaatgtttttctaaagatattctctccatggtgggcttttatggtgttatcttcctgttaatattaagtattgttggtccttatattgcgccttatgcactcgaccaacaattcttcggtcatcaattaacaccgccttcttggtatcaaaacggtaatgtcaccttcttttttggtactgatgatttagggcgcgatgtctttagccgtattttaattggtacgagtatgacctttggtggcgcttttattgtcacctttgcggcgacacttatggggttaattatgggttgccttgcaggaatgacccacggcctaaaatccgcagtgttaaatcatattttagatacactgttatccattccatcactcttattagccattattgtggtcgcttttgtaggggcaagtttagagcacgccatgatagcaatttggctagcactactcccccgcttagtgagaatgatctattcagcggtaaatgatgaattaaataaagagtacgttattgcctcacgtcttgatggtgcatcaaatatctctattttatggtataccgtattgccgaatattaccccagtattggtttctgaattaactcgggctttttctatcgcaatattagatatcacggcattaggttttctgaatttaggcgctcaattaccttcacctgaatggggggcgatgctcggcgattccctagagttaatctatgctgcaccttggacagtccttatccccggagccaccattatgatcagtgtattacttgtcaatttattaggggatggcttacaacgtgccattaatgagggggtggaataa

SEQ ID NO: 295085 - DNA, 966 bp, Proteus mirabilis
atgattatctactcgatacgtcgcttactattattaattgtgacgctctttttcttgtcactggtgagctttagtctcagctattacacacccaatgggccgttaagtggtgcttctttatttgatgcctactttttttatacccacaatatgttccattttgattttggaatttcttcaattaatggcgaacccattaaagcacaacttattgaagcatttcctgccactatggagttatgtgcactggcatttatctttgccctacttatcggcattcctgcggggatcatcgcgggtgtatggcgcaataaacctgcagatacttttattagtcatctcgcacttttgggcttttcagttccggtctttggtcttgcattattactgacgcttttcttttcattaaagctaggttggctacctgtttcaggccgtattgatttactgtataacttacagcctataacggggatcgcaatcgttgatgcttggctatcggattcgccttatcgtcaacagatgatcataaacgttttgcaacatttaattctacccgtgactacactagctattgctcctactacggaagttattaggttgatgcgtaatagtacagaagagatcatggtcgagaattatgtgaaagcagcggcaacccgtggcttatcacgctttactattattcgccgtcatattctacataatgcattaccccctattattcccaaattaggcttacagttttctaccatgttaacactaacgatggtgaccgaaattgtttttaactggccaggattaggccgttggctagtaacggccattcgccaacaagactattcggctatttcagccggtgttatggttgttggttcaatggttatcatcgtcaatgtgttatcagatattgtcggtgcgatgagtaatccaatgaaacacaaggtgggatatgcctttagatag

SEQ ID NO: 295086 - DNA, 1692 bp, Proteus mirabilis
atgcgccctattttacttattagtactatgctactggcttcaataagtatgacttgtatggcagagatagctaccaaagctacagagctatctgtcgcgcaagagcctacaaacattcatcaaaatggctttgtctattgtgttgatggcagtgtaaatacctttaatcctcaactttcgagtagtggattaattattgatcccctagccgcgcaactttacgatcgtcttttagatgttgacccttatacctatcgcttgatccctgaaattgccgcacgttgggagtctctcgataatggcgcaacttatcgcttttatttgcgtaaaaatgtgtcattccagacaacaccttggtttacgcctacacgtaaactcaccgcagacgatgttatctttagttttgagcgcatgttttctgccaataatccttataatcaagttaatggtggtaaatacccctattttgatagtttaagtttggcagataatatcaaatcaattaaaaagttaggcaaatacaccgttgaatttaatctaaaatctcctgatgcttcttttttatggcatttagcaacccattatgcgcctatcctttcagaagaatatgccagtaaccttgaaaaatcgggtaatcaatcgcaacttgattggaaacctgtaggctcagggcctttttaccttgatgaatttcagccaggccaatttgttcgattactgagaaatgagcaatactggaaaggtcagcccaaaatgcaacaagtggttatagacacgggtgcaggcggtactggacgtatatctaaactcttaacgggagagtgtgatgttttggcctatcctgcggcaagccaattaaaggtcttacgtgatgatcctcgtttacgccttacattacgttcaggaatgaatattgcttatcttgcgtttaatactaataagccaccgtttaacgatctaaaagtgcgtcaagccatcgcttatgcgattaataatgaacgactaatgggatctatttattacggtacggctgaaacagccgcatcggttttacctcgtgcctcttgggcttatgataatcgcgctaaaattaccgaatataatcctgaaaaatcgaagcaaatattaaaagagttgggacttgaaggacttaaattaaacctttgggtccccagcgctccgcaatcttataatcccagcccgttaaaaatggctgagttaattcaagctgatttagcccaagtaggtattcaaatgaatattcgacctatagaaggtcgctatcaagaaaccagtttgatggatagaactcatgatatgactttatcaggatggtcaacagacagtaacgaccccgatagttttttccgcccattatttagttgtgcggctattagttcgcaaaccaatttaagtcattggtgctcaccggcatttgacaatgtgctacaacaggcgctttatagccaacaactggcctctcgtatagactattatcaccaagcacaagatattttagcgcaagagctaccggttttaccattagctaattctttacgtatgcaggcttatcgttatgatattaaaggacttgtattaagtacatttggtaacgcttcttttgccggtgtgtatcgcgaagcagaagttgatgaggatagtcacaaccaagaggctacaacaaacccatga

SEQ ID NO: 295087 - DNA, 1005 bp, Proteus mirabilis
atgcaagagaatttagagacaataattggtgttgatagtcattttatcgatgttttagaacaaacctcagccctcgctcaactcaaaaaaccggtgttgattattggtgaacgtggtactggtaaagagcttatcgctcatcgattacactatttatcaccttggtggcaaggaccatttatttccattaactgttcggcattaaacgataatttgcttgattcagagctgtttggtcatgaagcgggggcatttaccggagcgaaaaaccgccatcaaggacgttttgagcgtgccgatggcggctctctttttcttgatgagctagccactgcaccgatgctggtgcaagaaaagttgctacgcgttattgagtatggccatttagaacgagtgggaggtagtcaatcgctgcatgtcgatgtgcgccttatctgtgccactaacgcagatctaccggcaatggcggacgagggtaaatttcgtgctgatttactggatagattggcctttgacgtaattcgcctgccccctttaagagagcgtaaagccgatattatgctactggctgaaaactttgcgattgctatgtgccaagagttagggttgccctttttccccggttttagtgacaatgcccgccaaattcttttagattaccgttggccggggaatattcgcgaactaaaaaatgtggttgaacgttctgtttatcgccatggcaccagtgagcgtgaactggataatattattatcgacccttttgcgcgcttttcgtcttcaaccatagctgagcaacgtcagcctcaaaaggagatgatcttttcattaccgccattaccgctagatttacgccagtggcaacatagcacagaaaaaaacttactagagcaagcattgaaagagagtcgttataaccagaagatggcggcagaaaaattagcattgagctatgatcaattacgcggattaataaaaaaacatcacataaaattgtcggtctag

SEQ ID NO: 295088 - DNA, 669 bp, Proteus mirabilis
atgggtatattttcacgttttgctgatattattaatgccaacatcgcttctttgctggataaagcagaagatcctgaaaaaatgatccgcttaatgatccaagaaatggaagacatgttagttgagatcagaacaacttctgcacgcacgctagcagagaaaaaaagcttagagcgccgtattgagcaagcagaaaaacaaattaaagattggcaagataaagcggaactcgcgctgattaaagataaagaagatttagcacgtgcggcgttaattgaaaaacaacgtgttgcttcaatgtgcgataccttaaaacacgaactaattatcattgatgaaacattagatcgccttaaaggtgaaatcagtgaattagaaaataaactgacagaaacgcgtgctaaacagcaatcattagtggttcgccaccaagctgcaaactcttcacgtcaggttcgtcgtcaattagatagcggtaaaatggatgcggcaatggcgcgctttgaacaatttgagcgtcgaattgatcatatggaaggcgaagcgcaaagctatggattaggtaaagaaaaatcattagaacaacagtttgctgagctgaaagccgatgatgaaattagcgcgcaattagcggcattaaaagctaaaatcaatactaataaagagtaa

SEQ ID NO: 295089 - DNA, 231 bp, Proteus mirabilis
atgggctatatatttctgggaataccactgacaatttttgtgttatttattcttcctatttggttatggttgcactataacagccaaaaagggggagggaaggttcagttaacccaacaagaaatgcagcgactgagcgcgctggtggataaagctcagcaaatgcaggaacgcattaagacattagaagatattcttgatgcagaacatcctaactggaggcaatcataa

SEQ ID NO: 295090 - DNA, 357 bp, Proteus mirabilis
atgacgatgcagagcaaatcattgtatcgcttgccacaagaaggcatgatccgtggcgtatgtgctgggcttgcccattattttaatattcctgtgctattagtcagggttattgcggtgattgcactctttgctggtttttttggcttaaccattgttgtttatcttgttttaagtttctttatggagcctgcacctgataattataaccaacatcaggaacagcaagaggatttaaaagctattttaaaagaagtggatagtcaattaacaaaaggtgaaaaacgtttacaacaaatggaacgttatattacttcttcgacttatcagctcaataaacgctttcaagatttataa

SEQ ID NO: 295091 - DNA, 255 bp, Proteus mirabilis
atgaattccactttgataccgacaaccgttaaaacaaataaactcactaaatgggcgaaaaaaggggtaacatttgctttaatgttattaactttatttgggccagccgcaataaccggcggtatattaaaacgtgtgagttataaaccgttacgttggttggttctattgatagctgagcctatgataaaaatggggctagataagttatcgcgtcacgtgtcttgggagaaacatgaaacgcttacaaaatga

SEQ ID NO: 295092 - DNA, 1395 bp, Proteus mirabilis
atgaaacgcttacaaaatgaactaactgcactgattaatcgaggcgtagataggcatttacgcctcgctgttacagggttaagccgcagtggtaaaacagcctttattacctctttagtcaatcaactcaccaatgtacatagtggggcgcgtttacctttattttctgcggcacgcaaccaacagttattaggggttaaacgtataccgcaacataacttaagtattccacgctttacttatgatgaagctatggagtcactttaccatacgcctcctagctggcctgttcccactaagggtgtcagtgaaatacgtttgcaattacgctatcgctctcatgagtctttaacgcgttttataaaagagacttcatcgctctatttagaaattgttgattatcccggtgaatggttacttgatttacctatgcttgagcaagactattttgaatggtctgagcagatgaatagagttaatcaacaacgaacggcacctgtgcaacagtggcagtcgttaataaaaaaatgcgatccctttgcccctgctgatgaaacgctgttagccgagatcgccgcagcttatactgaatacttattagcctgtaaaaaacagggattacattttattcaaccgggacgctttgttttaccgggggaattatccggcgcacctgttttacaatttttcccttgggctgacttaacgcaatacgatagtgctaaattaaaaaatgccgataaaaaaacgaatattggtatgttaaaaaagcgctatgaatattatggtcaacatattgtaaaaggattttatcgcgaccattttcaagggtttgacagacaaattgtcttagtcgattgcctacaacccctaaatcaaggtgcggatgtttttaatgatatgagacaagcgctcacacaattaatgcgcagctttcattatggcaaacgaaccttattaagacgtttattctccccctgtattgataaactgctatttgcagccactaaggctgaccatatcacgccagatcagcatgaaaatttagtctctttgttacagcaacttattcaagatgcgaaacagaatgctatttttgaaggaataagcattgattgtatggggcttgcttctattgctgccacagaaagtggcattgtcgatcatcatggtgaaaaaatcccagccgtaaaaggctaccgactaacggataatcagccgctcgtttatttcccaggagaagttcctaagagattgcctgaaaaggcattttggcaaaagcaaggatttagttttgaatctttccggcctcaacaaatatcgagagacagtgccattccccatattcgtatggatagtgccttggagtttttattaggggataaactaaaatga

SEQ ID NO: 295093 - DNA, 1047 bp, Proteus mirabilis
atgaatgagccattaaaatcacgtattgattttaaacaatcaaccttacaaaacgaagaaatcagcttaaaaaaagggcttgatttcaatcaagatgaacaatttgttccctacaatccgcaattagaggcacaggaaaatgaagggcgtttagaaggtgagatccaatcggccctaaagcctagaaaaagtttatggaaacgcttaataacagtggcgagtactattttaggtgttagtgttattgctcaagcgggacagtggatctatcaatcatggataaattctgattggattgctttaggcgcagccagtgcgggaggattaattgttattgcgggtatgggatcggtaattactgagtggcgtcgtatttatcgtttacgccaacgggctgacgagcgtgataaagcgagagaattactctatagtcatgcaatagggaatggtcgccctttttgtgaagatttagccaaacaagcaggtattaattcacaacatcctgcttatattcgttggcaaagtacattacatgatacgcataacgatagagaaattttagaattatatagccaattagtacaaccgattttagataagcaagcacgggctgaaattagtcgttctgcagcggaatcaacccttatgattgcagtaagtccattagcaatggtggatatggcgtttattggttggagaaatattaggctaattaatcgtattgcacaaatatatggtattgaacttggttactatagccgactaaagctatttcgcttggtactcgtcaatattgcgtttgctggggcgactgaattagtgagagaagtgggaatggattggctttcacaagatttggctgctcggttatccacgcgtgctgctcaaggcattggcgctggattattaactgcccgattgggaattaaagcaatggagttatgccgtccattaccctggattgataataagcctaaattgagtgactttagaaaagagcttattggtcaattaaaaaatacattaggtaataagaagaaagagtga

SEQ ID NO: 295094 - DNA, 426 bp, Proteus mirabilis
atgaagattgaaacaataaaaaaactttcaaaacaaagacgcaagttttatattggttcttctttgaatattactcatattaaccgtcaattggcctttttaacgcctattttggatgatgcaattgataaaataaaatatgcacaacaaaagcaagctctattatcaccaattaaagaaacggcacagatctttgagtatgtaaaaaacaataataaaaagaaagcagcgatatatgcactagattatctcattttttgtttttctcatggttgttgtacaatcaaaaaatttataagaagagaacttatgtttttattggaaaggatcaagcattttatcgcttatgagttaaaagagatcattcaaccttcaacatttttctgttttaattttttaaaagctaatagtgtcaacttttgctga

SEQ ID NO: 295095 - DNA, 1566 bp, Proteus mirabilis
atgcgcttagaagttacctgtaaagatcgcatcgggttaacccgcgaattactcgatctgcttgtattaaaaaatatcgatttgcgtggaattgaaatctttcctattggtcttatttatctaaatttttcgcaaatcgattttaatatatttcaacctttaatggctgaaatcagaagaattgagggggttatcgatgttcgtactgtggcttttatgccatcagagcaagagcatcgagctatgtggacactattagaatcagtacctgtccctgtcttttctattaataccaaaggtcaaattaagttattaaacccagctacacggcatctgtttgaattagatgaaaatgataaaaatgaaaaatcttttaaccaactgatacctaactttaatatccatcgctggttagaacaaaaagatcctcatgctgaaattatctccatcaaattaaaaaaacaacattttgatatggagattgtgccaataaaactgactgatgataatcagtttaatcattgtgttggtgcactcattttattgaaatatcgcggaataattcatgagcatccgaaattaattgttaatgataattcgggatttgaacaagttattgctgttagcacccccatgaaacaattagttgaacgcgctaagaaaatggcaaaaatggatgatcctttattattagtgggggatacggggacgggcaaagatctatttgctaaggcttgccacttattaagtcctcgagccagagagccatttttaggccttaactgtgcctctatgcctgatgatgtggttgaaagtgagttatttggttatgcggcaggtgcatatcctaatgctatcgaaggtaaaaaaggcttttttgaacaagccaatcgaggcactgttttgctagatgaaattggcgaaatgtcgccacaaatgcaaattaaactcctgcgttttttaaatgatggtactttccgtcgtgttggggaagagcacgaagttaaagttgatgttcgaataatttgtgcaacacaaaaaaacttatgggaattagtacaaaaaggactatttagggaagatctctattatcgacttaatgtattgacattaactctaccaccgttgcgggaaagaaaagcggatatcatgccgttagcactgcattttattaatcaatattgtttagagcagaaagcatcaaaacctgttatttcccctgatttatctgcttatttagtacaatatggctggcctggtaatgttcgtcaattaagaaacacaatttatcaagccatggctcagttagtaggcaatacattgcgacctcaagatatcgccttgcctgagcatactgcggatactttatttgatgaagatttgcttgaaggctcgttagatgaaatgactaagcgatttgaagcttctattttaaggcgtctatatcgtgattatccaagtacacgtaaactggctaaacgtttaggtatttctcataccgcgatcgcaaataaattacgtgaatatgatttaacaagtaaaaaagcggataaaacagagaaataa

SEQ ID NO: 295096 - DNA, 504 bp, Proteus mirabilis
atggcacatcaagtgactttacaaggtaatgcggtgactttagctggaaatttccccactgtaggccaaaaagcagccgatttttctttagtaggtaaagatctaaatgatgtttctttagcgcaatttgccggcaaacgtaaagtattaaatattttcccaagtgtagatactggtgtttgtgcagcgagtgttcgccaatttaataaagtagccaacgaattaaataataccgttgtactgtgtatttcagcagatttaccttttgcacaagcacgtttttgcggtgctgaaggtttagataatgttgtcacattatcaacaatgcgtggtgcggaatttaaagaaaactacggtgtcgcgattacatcaggtcctttagcgggattaactagccgtgctgtgattgtacttgatgaaagtaacaacgttatctacacccaattagttgatgaaatcaccactgaacctaattatgacgcagcattagctgtactaaaataa

SEQ ID NO: 295097 - DNA, 1620 bp, Proteus mirabilis
atgcgcaaaatattcgttatatcatgtgcacttgtcgttcaaggattgctcatatcacaggctaatgcggcagtggtgccatcaggaacgatactcgacaaaaaacaggaagtagtgcgacatttaaaagatgaacccgcatcacttgatcccattaatgccgtaggtttaacggaggctcaagttcaacgagacttatttgaaggattagtgatagaagatgagcgagggcgtcccattcctggagtggcacaatcatggcgaacagaagataaccgggtttggatttttacattacgtgataatgctaaatggtcaaatggcgaaaaggtgacggcttctgactttgtttatagttggcaaagattagttgatccaaaaaatctttctccttttgcttggtatgcagccctagcttctattgagaatgcccaaaaaattattgatggtaaattaaaaccaaccgcgttaggtgtggaagccattgatgaaaaaacgttaaaagttaccttagaacgacctgttccttatttccctagtttagcgaccaatttttcactttatcctgtacctaaacacacaatcgaaaaatacggttcagaatggatcaaagtaggtaatttagtcggcaatggggcttttatactaaaagatcgcgttgtgaatgagaaaattgtgttaacgccaaacccttactattgggatcaccacaatacggtgttaaccaaagtcacttttgtgcctattaatcatgaatcacaagcgactaaacgttatttagctggggatattgatattacagagtcttttcctaaacacttatatcacaaattgatgaaagatattcctgatcaagtgtatatccctgagcagttaggtacttactattatgcatttaatacacaagcagggcctaccaaagatattcgggttcgcaaagcgttagctatggcaattgatagaaaaattattacagacaaagtccttggtactggagaaaaatcagcgaatcgctttactcctgatgtgacggctaattttacgcctgagccaacactatatgatgaatacagtcaggatgaattagatagccaagcaaaaatattgttatcagcagccggctatggtcctcataatcctttaactctctctctgctttataataattcagaaaatcatcaaaagatcgccattgctgtcgcttctatgtggaagaaaaagttaggcgtaaaggtaaacttacgcaatcaagaatggaaaacttatattgatagtcgtaattcaggtgattttgatgtgataagagcatcatggataggcgattacaatgaaccctccacattcttatctttattaggctctaagcatgctggaaatatcccaaaatatcagagccagcaatatgatgagattttagtccaagccaatatgacgacagatgaagaggaaagaaatcgtctctataatcgtgctgaacaggttattgcggaagaggcgcctattgcccctatctatcagtatactaatggtcgtctaatcaaaccttggctaaaaggttatcccattgagaatcctgaagatgtcgcttatagccatatgctgtatgttataaagcattaa

SEQ ID NO: 295098 - DNA, 561 bp, Proteus mirabilis
atgaaaaaaaatcttattttatttataagctttattttacctttctctccatcactacatgcttttgagaataatcaggcaatttatggcggttatatatatggaaaaataaaaaaccacaaagcaaatggtgcaataataagttatcactatggatccgatattcactggggaatgttactttcattactgcatatcaagtcaacacatcaaagccattttatagacgctagctcacttaaactaggcacaaaagatgaacatgcaaaggtttctgcattgttaataggcccaacgtatcgaattacaccttctttggctatctacgcccaaatggggcctaaaaaattaaaatatcgagttgataaaagttattcaggcgttgcggtaaccgataccattatcgtcgacaccaccaatgtgatgtttcaagcgggtattgattatagccttagaaaaaatgtaggcattaatcttggctatttacattcagatactgagtcaaacaaacataatattagactaaatagtatccaattatccctaggctatcgtttttaa

SEQ ID NO: 295099 - DNA, 375 bp, Proteus mirabilis
atgaaacggatattattgattatagcagggtggttatgtgttggattagccacattaggtgttgttttaccagtgttacccacaacaccatttttgttattagcggcatggtgtttttctcgctcatcaacacgctttcatcactggttgctatatcgctcttggtttggtggttatttgcgctattggcaaacttatcgcgccatgcctaagggggctaagccgaaagctattttagtcattttagtaacttttgctatctcgctatggttggtctcaatgtggtgggtgagaattttattgctgataattttagcctgtctgttgatatttatgtggagacttcctgtaatagataaacaagatgtctcctga

SEQ ID NO: 295100 - DNA, 198 bp, Proteus mirabilis
atgcactggatcactgactattggtgggttattttaattcttttagttggaataattattaatgccataaaagatatgaataaaatagatccaaaacagtttctaaaaaataaacggaaactgcctccccatcgcgattttaatgataaatgggatgatgaggacgattggcccaacaaaaatgaccagaagaagtag

SEQ ID NO: 295101 - DNA, 2052 bp, Proteus mirabilis
gtgccatctttagatttattgcgctatcaacaagccttcgctcgactaggccagcggcgattactccttttagcggggagctatacatggcaaagggaacaacttcgagctatccaacagcagtgtaaaggcgattggctaatactctcgtcagagatgtctgaggcgataaaaccagaacatgctcatcaactattaggccgtgaatatcttcacgctgtatttgacgctaaccatgcttttaatgctgatgcactagcgatgctaacgggaacgttgaaagccggaagttggcttatcttatgtttacccgatattgttcagtggcaacattatattgataacgatagtcagcgctggaatgatgcgcaaggggttatatctactccccattttatggcttggttagcaaaaattacactagcagataaacaggccattatttggcaagcatcgcagccccttgttctacctgaaataaaaaatacaggccaacagtgggcgttgcctcaagggatgccaaccatacaacagcaacagttattagcgcatcttttacaggcaaaatctggcgtatggagtatcacggcaccacgaggcagaggaaaatcagcgttagcaggaatgttgatagagcagtggtctggctcagtgacggtttgtgcccctgcgagaaacagtattgaagtgctattatctcatacacataaaaccatcgagttctactcaccggataatttgttagctctttgtcatacagagcatttgtgtcgagattggttaattattgatgaagcggcgactatacccattgctcaactgatagctctttgtcagcacttccctcgagtgttaatgaccaccacggtacaaggctatgaaggaacagggcgcggctttattttaaaactgggtgatagcattccaacgttacaaaattatcaacttaccgtacctattcgctgggcgcaggacgatccactcgaaaattggcttaatcaactgttgttacttgatgagccttcttttcatcatgctaaccaatctggcgaggtggtgatcacctcatgccagcatttcgatagtgaacaacgagccaatttttatcaacttttaaccagtgctcattatcgaaccacgcctttagatcttcgacgtttattcgatggacaaaaacagcattattggtctgcatttattcatcggcatcttgttggggcggtgtggtgtattgaagaagggggactagcgaaagccttagcacaagatgtttggcgaggtatacgtcgaccaagaggtaatcttgttgcccaatcgttagtcacttacggcttatccattgaggcaatgtgtttaacttcattacgcatcagccgaattgcggtattgccagcatatcgacgtcaaaaagtcgctgcaaaattagttgcggatattgctaagcagtgccagaaacagagtattgattacctttctgtcagttttggctataccgacgcattagccaatttttggcaacaatgtggtttttatctggtgagattaggcgttcataaagaagccagcagtggctgttatactgctatggctatttacccaatcagtactcaggggcagcaattattacaagttgcacaacaagcactcgcattacaaagtgattatatcactcagcaaacaggtatctctcttgctactgcattgcctagtgccagtgaagcagatcactggctgatgatggcaggttttgctttcgcccatcgctctatattaacggtatatcaaagtgttggttattttctgcaaggtgatagatcacgctacccgttattagtggcattttttattgataagcaatctgtagaggcctgtgtaaaacaattttcgttatcgggtaagaaagcccttgtcacgacactacgtcggcaatgccaacaactgatggcagaaaaagatgagcaattagcacaggcttaccaacattggttaacgactacttcttctggtcatttttgttgggccaatcgtcctcatcatcccatttatcattaa

SEQ ID NO: 295102 - DNA, 453 bp, Proteus mirabilis
atgagtaatgttgatccctcattgctaattttgctggtactcgcaggcctgggcattattagtcataatatgactgtcactttagcaatgatctttttattggttattaaaatcacaccgttaaaccaatattttccattagtcgaaaaatacggtatgaccattgggatcttgatcctcaccgtaggtgttatgacaccgattgccacaggccgcatttccgcacaagaagttttcaattcttttttaaattggaaatcattactagcgattgcaattggtatcatcgtctcttggttaggggcacgaggggtgtcacttatgaataaccaaccgtcaacggtagcgggtttactcgtaggaaccgttattggcgtcgccctatttaggggggttccagtaggtccactgattgctgcggggatcctttcgttattgataggtaagtcatag

SEQ ID NO: 295103 - DNA, 885 bp, Proteus mirabilis
atgcgttggaatgatcgccgaagaagcaataatgttgaagatagaagagggcagccttcttctgcatccggtggtggtaatctcccattaggattaattgcactattattgcgtacaaaatatggctttgtgatcattattattttggtgatcgcaagctttatggggtttgattttaattcgcttacagggcaaacatcacaaccaacacaaaatagccaacaacaatccgccctttataatgaagcggcagattttagcagtgttgtattagccagtacggaagatttttggcaagggatgtttgccaaagccggcgaacaatatcgtgatcctaaattagtgctatataccaacagtaccacaacgcaatgcggtaccggcactaaaatgatggggcctttttattgtcctgcagaccaaaaaatttatctcgatctctctttttataatgaaatgaaaaacagccttggtgggggtggagagtttgctcaaggttatgtgatttctcatgaagtgggacatcatgttcagcatctacttggtatcaccacacaaatgcgtgaaaaacagcaaatggcacgttcaaaagtggaagcaaatcgcttatcagtaagactagaactgcaagctgattgttttgcgggtatgtgggggcgctttattgccggtgaaggccgtgttgatgaagcggacttactgacggccattaaaaccgcacaagctatcggtgatgataggctgcaacgccaacaacagggttacgctgtaccggatagctttactcacggcactgcagaacaacgtaagacatggtttatgcgcggctacaatagtggcgatattaaatcttgtgatacatttgcttcttcgtcattgaactaa

SEQ ID NO: 295104 - DNA, 714 bp, Proteus mirabilis
atgcaaaaaaaagctgagttgtatcgtggtaaagcgaaaacggtttataccactgagtcttctgattatcttattcttgaattcagaaacgatacatcagcgttagatggccaacgtattgaacagtttgatcgtaaaggaatggtgaacaataagttcaattatttcattatgaacaaattggaagaagcgggtatcccaacgcagatggaacgtttgctctctgataatgaagtgctagtaaaaaaactcgatatggtgcctgttgaatgtgttattcgtaaccgagcggctggatcactggttaaacgtttaggtattgaagaaggtactgtcttaaacccacctatttttgatctcttcttaaaagacgatgcccgtcatgatccgatggttaatgaatcttactgtgaaacttttggttgggtatcaaaagaaaacctcgcagaaatgaaacgtcttagttataaagcaaacgatgtcctcagtgaactatttgataaagccggtctgatcctcgttgactttaaattagagtttggcctctttaacggtaaagttgtgctgggggatgaattctcaccagatggtagccgtttatgggataaaaacaccttagataaaatggataaagatcgcttccgtcaaagtttaggtggattaattgaagcctatgaagaagttgcacgtcgaattggtgtttctttagactaa

SEQ ID NO: 295105 - DNA, 1047 bp, Proteus mirabilis
atggcaacactattgcataaatcaaagattatgaaagtcgcgggtctgtcgctggtggttttattggcagcctgttccagtgatcagcgctataaacgtcaagtcagtggtgacgagtcgtatttagagtcagcagcgctaaaaaatttagttgtcccagcgggtatggtgttgcctttgcaaaatggggaatatgatattcctacgcctaaaaagagtgaacctgtgggtttagcattagatattcgcccaccaacacaggctttaaacttattaagtggctcacgtagtgagaataatgcggataatagccgactgttattacccaacacgcccgaaaataccaccttatacgagcaagtttctgctgttttagcggataaaggtgtggcactggctaaaagtgatgcaggacaaaaacagattgttaccgattggatcacttggactcgtgctgatgaaaatgtgcctttccaaagtcgccataatttagcgataagccagtcaggtaatgttgtgatattaacgattacgaatactgggttacgccaaggtgaaaacgagatttccgatccaatggaagtgaagcgttataacaccttactattaaatgaagtggttgacggtttaaaccgcatgcgtaacttaagtgaaaatagcgcaacgagtaatttgcaaggtattatcgacgtacaaacgggaagtgataatgccggactgcctgtcattattgttcgagcaccatttgatgttgtgtgggatagattacctatcgcgctagaaagcgtgggtatgaaaatgggcgatcgtactcgttcgaaaggttcaattgaagtgacttataaaggcttaagtagtgcaagttggagcacgttaggggttgataaaccgacaattaatgaaggggattacaaactacaagtcggtgacttaaataaccgcagtagtttgcaatttatcagtgataaaggtaaacctcttacacagtctgaaaatgatcagatggttgctgcaatgaaagcggcctttagtaagccaataaaataa

SEQ ID NO: 295106 - DNA, 900 bp, Proteus mirabilis
atggtaagtaacaattttgattttacaggcagtatggtggcattagtcacccctatggatgcgaaaggcaatgttgaccgagttagtttacgcaagttggtcgattatcatgttaaagcgggtacagatgctattgtctctgtgggaacaacgggagaatcggcaacattaagccatgatgagcatgttgatgtcgtattaatgactctggatatggctgatggtcgtattcctgtgattgcaggcacgggggctaatgcaacttctgaagctatttggtttacacaacagtttgaaaataaaggtattgcagggtgcttaacggttactccatactataataaaccttcccaagaagggctttatcaacattttaaagcgatttctgaaagcacggctttaccccaaatcttgtataatgtgcccggccgtacaggatgtgatttattgccagtaacagttgcacgtttagctcagttggataatattgtggcaattaaagaggcgacagggaacttaagtcgtgttagtcaaatccaacagttagttaatgatgatagttttatcttattaagtggagatgacgcatcctcattagactttatgcaacttggcggtcatggtgttatttcggttactgctaacgttgctgcgttagaaatggtagaattatgtcgattggcaaaagcgggtgagtttgcaaaagcacgtgaacttaatcgacgcctgatggacttacatcatcagttatttgttgaacctaacccaatcccagctaaatgggcgtgtcaacgtattggattgattgaagacgccacattgcgcttaccgatgactccattaacatcagcgggtcaggatatcgtagagaaagcgctgttaacagcgggaatactgtaa

SEQ ID NO: 295107 - DNA, 558 bp, Proteus mirabilis
ttgcctatacctgataaacattttctcgtactcactgcattagggactgaccgtcctggtatcgttgataccattacgcaattagttagccaatgcgggtgtaatatcgaagacagccggcttgcgatgttcggtcaagaatttacgtttatcatgctactttctggtggttggaatgcgattgcccaacttgaagcattactgccgataaaaagtgcagaacttgatttattgactgtgatgaaaagaaccaaaatgggtgcgccagtctcttacccatcaaccattactgcaaaagtagatatagaagatgcccccggcattgttgaacgttttaccaatttatttagtcaacatcactttaatcttgcagaattagtttctaaaacccatccttctgaggatggtactcctgctcgtttagaaattcagatcacggcccataatccgctagatgatcatggtctcgttattcatgagaaattcaatcaattatgtacagagttaaacgctcaaggcacaataagtatcgtaaatagtctgatgatgaaacaataa

SEQ ID NO: 295108 - DNA, 471 bp, Proteus mirabilis
atgaacccattaaaagccggtgataaggcacctcaattcagtctgcctgatcaagatggagaaatcattaatctgtctgattttgctggccaacgtgtgctcgtttatttttatccaaaagcgatgacaccaggctgtacaacgcaagcttgtggcttacgtgatgagatggatacactaaaaaaagccaacgtcgaggtattgggaattagtactgataagtcagaaaaactttcccgttttgccgaaaaagagatgttaaacttcaccttactttctgatgaagatcataaagttgcagagcaatttggcatttggggtgaaaaacaatttatggggaaaacttacgatggcattcatcgtacgacgttcctaattgacaaaaacggtgtgattgaacatgtgtttgataattttaaaaccagcaatcaccaccaagtggttatcgattatttagctgcacacccatag

SEQ ID NO: 295109 - DNA, 1089 bp, Proteus mirabilis
atgctggacttgcttgttcaatggtataaacgtcgatttgctgatccccaagttatcgcgctggtggtgatcttaattgccggtttttcaattatctactttttcagtggcatacttgcaccattattagtcgccattgtattagcttatttgctggaatggccaacacacttacttgagaagctaggatgtgcacgaatttgggccgtatcaatcgttctgacactatttataggtattagtgccattgttattttgattttagcgccaacggtatggcaacaagccatgacgctaatttcagatatccctaatatgatcaataaattcaatgcatttgctcgagaattacctgaacgattccccgcattaatggatgttggcatcgtggatatgatggcggaaaacttgcgcagtaaattttcaacggtggcagagtcagtgttaaaagtctctttagcctctttaatcggcgttatcacgctctctatttatctgatccttgtgccattaatgacgttctttttattaaaagataagcaacaaatgctcaatgctgtccgtcgggtattacccaaaaatagaattcttgcagcacaagtgtggattgaggttaatcagcaaatcaccaactatattcgtggtaaggttaccgaaatggtgattgttggtgtatttacctattttgtctttgctttttttgatttgcgttattcagtcttattagcggttttagttggcgtttcggttttagtgccttatgtgggggcggtactcgcgactattccagtcattgtaattgcgctttctcaatggggattaggctctgatttttgggcgctatttatcgcttacttagtggttcaaggtttagatagcaacttattagtaccgatattgttctctgaagctgtcaatatgcaccccttagtcattatcttatctgtgattatatttggtggtatgtggggtttttggggggtgtttttcgccattcctttagcgacgttaatcaaagcagtattacatgcgctgcctgatgaaattgccaatgagccacctttagaaacattagaaaagaaaaagtaa

SEQ ID NO: 295110 - DNA, 1473 bp, Proteus mirabilis
atgaaactcagacttaaaaaaccactggtcgcgcttcttgtttctactttgctatcaacatcagtgttgcctgctcacgctgcgattgatattgaagataccctgcccgatatgggaacgacagcaggctcaacattgagtatcaatcaagaaatcgctatgggtgattactatactcgccaattaagaaatagtgcaccattagtttttgaccctctactttctaattacatcaataatttaggtcaaagattagtctctaatgccagttcggtaaaaaccccctttcacttttatttagtgaataaccccaatattaatgcctttgcttattttggtggcaatatcgtattgcactcagcactatttagatacagtcgcaatgaaagtgaattagcttctgttatcgcccacgaaatttctcacgttacccagcgtcatcttgcaagaatgttagaagatcagtctaaaaccacgccactggctatggctggaatattaggctctattttaatatttatggctaaccccaatgccggtttagccacctttacgggaagtatggcggggatgcaacaaaacatgatcaccttcacgcaaatgaacgaacaagaagctgatcggataggaatacaaactctttatcgtgcagggtttgatccacaaggtatgcctaattttatgcagatcttagcagaccaagtgcgctatagttctaagccgcctgaaatgctattaacgcaccccttacctgacagccgtttatctgatgcacgtagccgagcagcgcaatatgctccgcgcaaagtgccacaatcggctaattttctctatgctaaaatgcgggtattaactatgcttgagaaaaaccccgcatcaagtaacgccttgcaaaccacgctggatcagtttaggcaaggaacggaattagaaaaatcagccgccaattatgcacaagccttactctattctcgtgatcgtaaatttaatgacgcgagaaaaatactcgcccctatgctggcaaaagagccaaataatatctggcttattgatgccattaccgatattgacgtagagcaaaaccgtgctgcagaagcgataacacgtttacaacaagcgcttaagcaatcacctaataacaaagtactgacggttaatttagctaatgcttatatgcaaaataagcaatataacgaagctaatcgattattatatcgctatacctttgacaaccctgacgatcctattggttggcagttggtggcggaaaatgcggcaaaacaaggtaatcgagcccaagagcttgcagcttacgctgaagatttggcattacgaggagattttgaaactgccattcgttatcttggtgatgcgagtcgtcaagtaaaattaggcagtaatgagcaagctcgttttgatgcacgtattgatcaattgcgtaaacttcaacataaagacagtcaatttaaataa

SEQ ID NO: 295111 - DNA, 357 bp, Proteus mirabilis
atgaccaacaaagtaacgatttatcataatccgcgctgttctaaaagccgtgaaaccttacatttattagaagagatgcatatcacccctgacgttattcattatttagatacgccgccttctgttgatgagttaaaagcattactcaaagcgctagattttgacgatgcaagaaaattaatgcgcaccaaagaagaaatttataaaaccctaaagcttgctgatgagagctcacaagaagcattaattcaggccatgcataatcatcctaaattaattgaacgtcctattgtggtcgttggcaataaagcgcgtttaggtcgtccacctgaacaagttaccgccctttttaagtaa

SEQ ID NO: 295112 - DNA, 1251 bp, Proteus mirabilis
atgaacatcgtacatagactcaaacttgtttcattcctccaattttttatttggggctcttggcttgttacgtttgcttcatatctatttgataaattacattttaaaggtactgacgttgggctaatttttagtgctttaggattagcatcactgatcgcaccggtgatcatgggatttattgcggacaagataaataaccgtaagctggtctttattaccctgcatattttatccgcgtttgctttagtactgatgtctcaaatgaccacagtgactaccctcttctttgcgacacttctgcatttattgttctttatgccaagcatttctatggcaaacagtattatttttgagttactagaacaaaaacacctagagccaaatgactatttccccaaaatccgtgtttatggcaccgtgggttttattgctgcaatgtgggttattagcttcttaggtttcggtaatagctacgatcaactgtttgttgctgcaatagcctctattatcttagcggtatttgcgatgtttttaccggcgacaaaagcgacagataaaacagaagcaaaagaagaagtggccgcttttagcttatcgaataccttacaagtgtttaaaaagaaaaatgtggttattttccttttctttgccacattgttaggttcagtattgcaaattaccaatacatttggggttccattcttacaagatatggccaaagcacctaatgctgatgactctttcttggctcattatccttctgttttcttatccatttctcaaatttctgaagtggtctttattctatttttacccctgttattaaaacgagtgagaatagaaactatcgtattatttagtatgattgcatggatcttacgttttggtttcttcgcttacggtgactattcatcattaggccaaatcgttctgttgttatccatgattgtctatggttgtgctttcgatttctttaatatctccggctcgctattcctagaaaaagagatcccattacaatatcgctctaccgcacaaggtatgtttatgaccttagtgaatggttttggtacttatttaggtgcgatgctaagtggctgggttattgatttgtataccacagatggtgttattgattggcagtcattctggttgatctttacgggttacactgtggctatcaccgcactttatctgatttacttagtggttccgcagaagaaaacaaaagttgtagaagcacattaa

SEQ ID NO: 295113 - DNA, 747 bp, Proteus mirabilis
gtgttagaatcacgacgtttattaaactattcaggtgaggtgcttctgaatacgccatcacagctatcattaccactatctctgcccgatgatgagacattcgatagcttttacgcaggggaaaatgcatcactcgttgcagcgatccaaactgctattcaccaatcacatggcagttatatctatttctggtctcgtgatgggggcggaaaaagccacttgttgcatgcagcttgtgcagagctttctttagccggagatgcagttggttatgttcctcttgataaacgggcttatttcgtaccagatgtgcttgaaggtatggagcatctttcattagtttgtatcgataacgttcaatgtattgcgggtgatgaagagtgggaacttgctctgtttaatctgtataatcgcgtattagaacttggtcgcacctgtctattaatcacaggggatagacctccccgtcaaattgatttacaacttcctgatctcgcttctcgcctagattgggggcaaatttatcgcttacaaccgctaagcgatgaagaaaaaattcaagcactacaattaagagcgaaactgcgtggatttgaattacccgaagatgtgggtcgttttgtattaaagcgcttagatagaaaaatgcgcacattatttgaaatgctagatgaactcgatcacgcctctattgtggctcaacgtaagctgaccattcctttcgtaaaagatattcttaagctttaa

SEQ ID NO: 295114 - DNA, 1206 bp, Proteus mirabilis
atggaaaaacttgttgatatatacgactttatcgtatctaagcagattttcaccacgctgtttttagtgatcacgttgctggtggtgtggtttctggcaaagatgatctttcgtcgtatagccaagcgtctattgtttttattcaccgaactctcagatgaagagacgatagaagatattgcgaaaaaaagtgcctctattgttgcagtcactctggttctctatataaaccagttattgccttcgttttcagcacagatgaatattatctttgaaacggtttgtcgtgcttttatcgtcatcaatattgcttctcttcttaataacgcgttagatattttcaatatcaggcatgctaaaaaatcgtggcaccgtaacaattcgattaaaggttatattgaaattgctaagatagtggtgtggatcatcgcctttattcttattatcgcgctatttactgaacaatccccactgattattatttccagctttggtgcgatcgctgcggtattgatgtttgttttccaacatacccttatctcattcgtcgctaatattctgatctcaaatggtaaagtgttaaaactatatgattggattgaattacccagcagtaatattagtggtgaagtgattgatatcgcactgcacacaattacagtacgtaattgggataacacgatttctcgtatacccacaaaggactttttaaccgaaaaatacactaactggcaaccgatgttctcttcaggaggccgtcgtatcaagcgtagtttctatattgatcaatcctctatttcatttgctacagaacagttagtgcaggagctaaaaaatactgcgccacttaaaaaaagcattgaagcgatgttagaaggtaaagaagaagagataggcgatattaatacttggttagaaaccaacggggtgaccaatctacaactttttagaaagtatatgttaaattggatcaaaatgcgtggtgatgtgaggccggatatgtatttggtgataagaacaatgccccccacaccaatgggattacccgttgaattatattgtttcactcgtgctaccacatgggtggaatatgaagagacgcaatcagaaatttttgagtatataaatgcttgtgctaagtattttaaattagatatttaccagcaaccctcaggtcacgatctctctaagataacgtttaaatag

SEQ ID NO: 295115 - DNA, 1302 bp, Proteus mirabilis
atgactcgtcgtgcaatcggggtagaagagcgcccaccattattacaaacaatcccattgagttttcaacatctgtttgccatgtttggtgctactgtacttgtgccgattttgtttaaggttaatccggccaccatattattgtttaacggtatcggtactctgctttatctctttatctgtaaaggtcgtattcctgcttatttaggttcaagtttcgcctttatctctccggtgttattgctacttcctttaggctatgaattagcattgggcgggtttattgtctgtggggtgctattttgccttgttgctggcattgtgaaaatcgccggacgcggatggattaatgtgatgtttcctcctgcggcaatgggcgcaatcgttgccgtaataggtcttgagttggctggaactgccgctaatatggcaggcttattacccagcgcagataatcccgttgatagccaaacattgataatctctatggtgacactgggtgtgactattttaggctcagtgatgtttaggggatttttggctattattcctattcttattggcgtgttagccggttacgcactctctttctttatgggcgtggttgatgtgacaccgattaaagaagccaattggtttgctctgcctactttctattcgccgcgttttgagtggagtgctatttttattatcttgccggcggcattagtggttattgccgaacacgtagggcaccttgtggtaaccgcgaatattgttcaacgtgatctcatgaaaaacccaggcttacatcgctctatgtttgcaaatggtttttcaaccattatctccggattttttggctctacacctaacacgacttacggtgaaaatatcggtgttatggctattactaaagtgtatagcacttgggtcattggtggtgcagcaattatcgctatcttactttcttgtgttggtaaactggcagccgcgattgcagcggttcccgtaccggtaatgggcggtgtctctttattactgtatggtgtaataggggcgtccggtattcgcgtattattagattcgaaagttgattataacaaaccacaaaacttgatattaacagcgatcattttaattgtcggtgtaagtggtgcatcaattcaaattggcgcagctgaactaaaaggcatggccttagcaacgatagtcggtattgttttaagtttagtgtttaagctggtgagtattattcgcccagaaactgagttagtggatgatactctggagtcaattaacgaacatacaaacaccaagtaa

SEQ ID NO: 295116 - DNA, 627 bp, Proteus mirabilis
atgaagatcgttgaggtaaaacacccactcattcaacataaattggggctgatgcgagatcatgatataagcactaaacgctttcgtgaattggcttcagaagtttccagtctactgacgtatgaagctaccgccgatttagaaacagagacggtaacaattgaaggttggtgtggtccggttgagatagaacagattaaaggaaaaaaaattactgttgtacctatcctccgtgccggtcttgggatgatggatggagtattagaaaatattcctagcgcccggatcagtgtagttggtgtttaccgcgatgaagaaaccttaaagcccgtcccttacttccagaaactagcctctcatattgaagaacgtatggcacttgttgttgacccaatgttagcaactggtggctctatgattgccacaattgatttattaaaaaattcaggctgtacttcaattaaagttttagtgttagtggctgcgcctgaggggatcaaagcattagaagaagctcatcctgatgttgagttatatactgcatcgattgataagcatcttaatgagcatgggtacattgtcccaggccttggtgatgcgggtgataagatatttggtacaaaataa

SEQ ID NO: 295117 - DNA, 1041 bp, Proteus mirabilis
gtgactaacaaatcctctctcagctataaagatgccggtgtcgatattgatgcaggtaatgctttagtcgatcgtattaaaagtgtagtaaaagaaactcgccgtcctgaagttatggggggtttaggtggttttggtgcattatgcgctattcccactaaataccgcgaacctattttagtgtcaggcactgacggtgtcggtactaaacttcgccttgcgatggacttaaatcgccacgatgatattggtatcgatttagtcgcaatgtgtgttaacgatttaatcgttcaaggtgctgagcctctcttctttcttgactactatgccacaggcaagttagatgtcgatactgccgcacgggttgtaacgggtatcgctgaaggttgtaagcaatccggctgtgccttagtgggtggcgaaacagcggaaatgcccggcatgtatcatggtaacgattatgatatcgccggtttttgtgttggtgtcgttgaaaaatcacagattatcgatggtagcaaagttaaagcgggtgatgcattaattgctctcgcttcaagtggccctcattctaatggctattcactgatcagaaaaattcttgaagtcagtggtgcctgtgctgaaactaccccattaggtgatacatcactggctgataaactcttagcgccaacccgtatttatgtaaaatcactcctgtcattaattgaaaacgttgatattcacgcagtggcacatattactggtggtggattttgggaaaatattccgcgcgtgctacctgaaaatacgcaagctcgtattaatagccaaagttggcagtggcctgaggtctttaactggctacaacaggcaggtaatgtcagcactcatgaaatgtatcgtacctttaactgtggtgtcggcttattaatcgccgtgagccaagctgatgttgaaaaaacgctatcacatcttaatgcctgtggtgaaaaggcatggttaattggtgatattgccccgcaagcagcgggtgatgcacaagtgattatcaattag

SEQ ID NO: 295118 - DNA, 630 bp, Proteus mirabilis
atgaaaaatattgtggtcctgatctcaggaaatggtagcaacctacaggcgattattgacgcctgtagggcgcataaaatcgcgggccaagttgtggctgttttcagcaataaagcacaagcttatggccttgaacgagcgagacaagcagatatccctgcttactttatcgatccggctgattatcctgatagagaagcttatgataaagcgttaatcactcaaattgatggctatcagcctgatattgtggttcttgctggctttatgcgtattttatcgccgttatttgtcaaccattatcagcataagctattaaatattcatccctctttacttcccaaatatcccggtctgcatacacataaacaagttattgagaataaagatacttttcatggtactaccgtacactttgtcacggaagaattagacggtggcccgatgatcattcaagcgcgtattcccgtctcttctgatgataccgaacaaagtttgcaagcaaaaatacaaacacaagagtatcgcatttatcctctcgcaattagttggttagcagaagagagattaaaaatgatagataatcgggcgctacttgatggtaatgttctgtttgacaatcttgattaa

SEQ ID NO: 295119 - DNA, 591 bp, Proteus mirabilis
atgtccggtggtaagaaagttccacctataaaattacgtcctctcgaaagagaagaccttccttttgtccataaacttgataataatgctagcgttatgcgctactggtttgaagagccttatgaagcttttattgagttaagcgacctatatgaaaaacatattcacgaccaaagcgaacgacgttttattgctgaaagtgaaggcacaaaagtcggtttagttgagctggttgaaattgattatgttcatcgtcgtgctgagtttcaaatcattatcgcccctgctcatcaaggccatggttatgcagcccgcgcggcaaagttagcgatggactacgctttttctgtacttaatttatacaaactctatttaatcgtcgataaagagaatgctaaagcgattcatatttatgaaaagcttggctttaagaaagaaggtgatttaatagatgagttttttgttaatggctcttaccgttctgcgattagaatgtgtacattccaagccccttattttgaacaaaaagccaaagcagcaagaccggaaaattttgttaaaccgggtgcaacgataaaacaatatgtctga

SEQ ID NO: 295120 - DNA, 2082 bp, Proteus mirabilis
atgtcccaagaacgactctatattgataaagagatcagctggcttgcgtttaacgagcgagtattgcaagaggcggcagataaacgtaacccgctaatcgaaagggtcaggtttttggggatctattcaaataatcttgatgagttttataaagttcgctttgcggatgtaaaacggcgtattttaattaatgaggagcgtggctcacgctctggctccagtcacgctcgtcatttaatcaaaaaaatccaatctaaagttgccaaagccgaccaagaattcgacgcactgtataacgacttgcttttagagatggcgcgtaatcagatttttttaatcaatgaacggcaaatctcacctaatcaacaaatttggttacgccaatattttcgccaaaacttaagaaaacatatcacgccgatccttatcaaccctgaaactaatttggttgagtttttaaaagatgactacacatatttagccgttgaaattgctcaggggcaaactattcactacgctttgttagagatcccctctgataaagtccctcgttttgttattctgcctacagaacaaggccgaggtaagaaaaagtcaatgattttgctggataatatcttacgctattgtcttgatgagatttttaaaggcttctttgactatgattctttaaatgcttattccatgaaaatgacacgtgatgctgaatatgatttagccactgaaatggaatccagcttattagaaatgatgtcatctaccttaaaacaacgtcttaccgctgagcctgttcgttttgtctaccaacgtgatatgcccgatgaaatggttgctttactgcgtagcaaattaggtttatctaataatgactcggtcattgctggtgggcgttatcacaactttaaagactttattaattttcctaatgagggtagtaagtttctattaaataaacctattcctcgtttacggcatgtttggtttgataatttccgtaatggctttgatgcgatccgtgaacgtgatgtgttactttattatccttatcatacctttgagcatgtattggaattattacgccaagcgtcttttgatcccagtgtcatttcaataaaaatcaatatctatcgcgtagcaaaagactctcggattatcgattcgatgatccacgccgcccacaatggtaagcgtgtcactgtggtcgttgaattacaagctcgctttgatgaagccgcgaatatacattgggctaaacgcttaaccgaagctggcgtccacgttatcttttcagcgcccggcttaaaaattcatgcgaaattatttattatttctcgtttagaagaaggcgaaatcattcgctatgcgcatattggtactgggaattttaatgaaaaaaccgcacgcctttataccgattattctctgttaaccgcgaatacagaaattaataatgaagtacgtcgagtgttcaattttattgaaaacccttatcgtccggtgacttttgaacatttaatggtatcaccgcaaaactcacgtattttgttaaaccagttgatcacaaatgaaattcacaatgctcaagcggggcaccctgcgggtattaccttaaaagttaacaatttagtcgatgaagagttagttaatcgtctttatgatgcctctcaagcaggtgttaaaatccgcctattagtacgcggtatgtgctctttagtccctaatcagcccgattttagtgaaaatattcaggtcaccagtattgttgaccgctttttagaacatgatcgtgtttatgtctttaccaataaaggggatgagaaaattttcctatcatccgcagactggatgactcgtaaccttgattatcgtattgaagttgccgtaccactactcgaccctcagctaaaacagcgtattttggatattcttgagatccagtttaatgatactgtaaaagcacgatatttagataaagatctaacaaatagctatgttcctcgaggaaataaacgtaagatccgcgcccaacttgctgtatatgaataccttaaatcattagaacaaccaggatcacgagcgtaa

SEQ ID NO: 295121 - DNA, 1536 bp, Proteus mirabilis
atgcctttattacaagatgactcttcttcaccacgtcctttagaaattgcggctatagaccttggttctaatagttttcatatgatcatagcccgtgttgtcaatggtgccttacaggtattaagtcgtttaaaacaacgggtgtatcttgccgatggccttgatgataatgataaactcagtgaagaagcaatgttgcgggggctttctgcactttccctttttgctgaaaggttacagggatttccagcagaaaatgtcactgtggtcggtacacatacgttacgggttgctagcaatgccaaagtctttttgcaacgcgcaaaagaggtgatgccctatcctattgaaattatttctggtcacgaagaagcacgcctgatctttatgggcgttgagcatacgcaatctgaaaaagggcgtaagctagtgattgatattggtggaggctctaccgaattagtgatcggagaaaattttgaacccatcttgatcgaaagccagcgtatggggtgtgtcagctttagccgtcaatttttcccgaaccaaaaaattagcgaatccgcttttcgtaaagcacgcgaaaaagcagcacgtaaaatggaaaaaattgcttggcaatataaaatgaccggctgggatgtcgcattaggcgcatcgggtactatcaaagctgcacatgaaattttggttgaatttggtgaaaaagatggtgtgatcacccctgaacgcctattaatgttgaccaaacaggtactacggtttaaaaaatttaaggatatcaccctaccggggttatccgatgagcgtaaacacagttttgtacctggtttagccattttatgcggtattttcgacactttaggcttaaaggcactccatttatctgatggtgcattacgtgaaggtgtattgtatgaaatggaaggccgttttcgtcatcaagatattcgccagcgtaccgccaaaagtcttgctgaacactataatatcgatcgtgaacaagctaagcgcgtcctcaccacaatgcaatcactgtatgctcagtgggcggaacaaaatcctaaactggttcgtcctgatctagaagcgattttagtatgggcggtgatgttgcatgaagtgggattaagtatcaatttaagtggtttgcatcgtcattctgcttatattctttcgaatacagatctacccggttttaatcaagaacaacaacaattattaactacattagttcgttatcatcgcaaagcaattaagtttgatgagttacctaaatttaatctatataaaaagaaacagtattatccattagtacaaatacttaggttagcaacactacttaataatcagcgtcaatcaaccactaaaccggtttctttacgtttagtgaccgatgataatcactggacactctattttcctaaaaattatcttgccgataacacattgatggaattggatttagaaaaagaacaggagcattggcaggccgttccgggctggaaactggatataaaagaggaatctgcttaa

SEQ ID NO: 295122 - DNA, 1464 bp, Proteus mirabilis
atgtctcaatcagctatcaataatgatactgcggctgccatcaatccatattcacaaaaagtggcacacctgcgtcagcaaattctgaacatctttcttgaagatgaccgttttgttgaaacagtgttaggtgaagcaagtgaaagtgataggctgagccaccatgaacttcatgaaaaaatcaccactgttagagaattactacaagatctacacgcggcagatattgcagatattcttgaagcccttccctatgatgaacgtttagccctatggcatttggttgataataatgagcgtggtgcggttttagtcgaagcctctgtcgccgtttgggacagcctaattaaagatatgacggatcgtgaattattacgctcagtcgcttctttgcatgtggatgaacaggcctatattgcggagcatttaccccgtgataccatgcgtcgtcttttgacctatttagaaccaagtctgcgtaataggatcagagaagtcctgcaatatccgaaggatagtgttggacagatgatggattttgagtttgtcaccgtgcgtggcaacgtaacattaaaaacggttcaacgttatttacgccaacgtggctctattcctgaagctacagataaaattttcgttattgataatgccaatcatctgttaggtgaattacccttaaccacagtattaacccagtcgccggataaacgggtctctgatgtcatgaaaaccgatactgtcagctttatgcccgaagagaaaggcgaagatgcagcgggtgcgttcgaacgttatgacttaatttcggctgcagttgttgatagtaatggcctgttaatgggacgtttaaccgttgaagatatcgtcgataatatgcatgaagagagcgataccaacattcgtcgtatgggggggttaagcccagaagaggatgtattcgcccctgtcgggcaagcggttaaaacacgttggacatggcttgctatcaacttatgtactgcttttgtcgcttctcgtgttatcggtgtgtttgagcataccatttcccaattagtcgccttagcaactttaatgcccattgttgcaggtattgggggaaataccggtaaccaaaccattactatgattgtgcgtgcattagcactacatcaaattcagactggtagtttctcgttcttaattttaagagagttaggtgttgcccttatcaacggtattgtttgggggggaataatgggagttgtaacttacttcctttatggtgatattgcgatgggcgccgtaatgacaatggccatggtactcaacctgttgatggctgccatgatgggggtattaataccaatgaccatgataaaactgggtaaagatccggctattggctcaagtgtgatgatcaccgcgatcaccgatactggtggcttctttattttcttaggcctagccactattttcttagtttaa

SEQ ID NO: 295123 - DNA, 222 bp, Proteus mirabilis
atgaattcaatttcgataagtgcggtgttgttagccgcgattgtgctatttgcatctgtgtttgttgtcgctttagtcagcagtctgctactaaaaaaaacgctgtatgggagtctgcaacaagataatttatcagtcagtgttgcggtaagaagaacgtttatggtatcgcttgttgtcgcattactactgatctattactctctttcaacaacagcctaa

SEQ ID NO: 295124 - DNA, 936 bp, Proteus mirabilis
atgatttccagtacatcaaaaggaacactctatggcattgtggcgatattcctttggagtaccattgttgggttaattcgcaatatcagtgagtattttggtgcggtagggggtgctgcgctgatttacacaacgggaacgctatttttgattttgatcttaggggtgcctaagttatctctttttcctaagcgttaccttgcttggggggcacttttatttgttagctatgaaatctgtttatcgttagcgctaggatttgctagtgatagagcacaagctatagagcttggcatggttaactatttatggcccagctttacactggcattagcggtattcttaaataaacagcgattctctatcctattgatagtgggtttattatgctcattcagtgggcttgtttgggttgttagtggtgataatccactgacaatagaaagcttatggaataatatttgtcgtaaccctctcagttatattttggcgtttatcggcgccgtgttatgggcattttatagtaatgtgactcgtcttatttcggggggacacaatggtattgtgcctttctttttcttaacagcattggcactttgggggcaatatattttttctgctccaatcgagtgggtggttaatgtaaaaagtatctcactgttacttattactggggctgcgatagggttagctaatgcagcgtggacggcaggaatgatcagcggtaatgtgacattattagcgacgctttcttattttactccggtaatttctacggctttttcatccctactactctctacagcactctctttttcattttggcaaggcgttatgatggtgacaggcggctctttaatttgttggttagcgactcgtcaaaaaatgacaaaaatgccaaaaacgagcaaatcgaatgtaaaacagggttcttaa

SEQ ID NO: 295125 - DNA, 1275 bp, Proteus mirabilis
atgaaacttgagacactttctgttcacgctggttattcacctgatccaaccaccaaagctgttgcggtgcctatttaccaaaccacctcttatgcatttgatgatacgcaacatggtgctgatctatttgacttaaaagtacctggcaatatctacacgcgtatcatgaacccaaccaatgatgtattggaacaacgcgttgccgccttagaaggagggattgcagcagttgctgtggcatcgggtatggccgcgattacttatgctatccagaccattgcacaagtgggcgataacattgtgtcggttgcgaaactctatggtggtacatataacttaatggcacatacttttccccgtatcggtatcgaagcgcgttttgccccccatgatgatctgctggcacttgaagcgttaattgatgagaaaaccaaagcggtattttgtgaatctatcactaatccaagtggtaatattgttgatattcaagctctcgccactgtggctcatcgtcatggtgtccctttaattgttgataatacggtagcaacgccttacctatgtcgcccttttgagcatggtgctgatattattattcactcactcactaaatatattggtggtcatggtaactctattggtgggatcgtcgttgattcaggtaaatttccttgggctgaacataaagatcgttttgaaatcctcaatacaccggatgtctcttatcatggggttaattatgttgagcactttggtgcggctgcttatattgcgcgatgccgtgttgctccattgcgtggaacaggagccgccctttcgccatttaacgccttcttaattcttcaaggtctagaaacattagcgttacgtatggagcgtcatactgaaaatgcgcaaaaagttgctgaatatttgcaaaatcatcctcaagttgtctgggttaaatatgcaggtttaaccagccacccagagcatgatttagcagtacgttatatgtcaggtaaacctgctggtattctctcttttggtatcaaaggtggtgctgaagcgggtgcgaaatttatcgatgcattgaaattgattgtacgtcttgtcaatattggtgatgctaaatccttggcttgtcatcctgcatcaaccactcatcgccaactcaatgatgaagagctagaacgcgcgggggtttcgcgtgatttaattcgactttcaattggtattgaacatatagacgatattatcgctgatctagaacaagcattaaacgccagtttttaa

SEQ ID NO: 295126 - DNA, 594 bp, Proteus mirabilis
atgaatacaaccgcacatcaccgaaaaaaagatcctatccgcgtccaagagcagttattagaagcggcaagtattattgtggcgaatgaaggaattgcttctttatctttaaatgccgtagccaaagaagcgggtgtcagtaaaggcggattattgcaccattttcctgggaagatagaactgatacaggcggtattcaaacgcttactcggtattatggataaacgaattgcgttaattatggccaacgatccgatagaagcagggcgcttttctcgcgcttatttaacctatatttctgatctcaaacagtcagatgaaagtcgccaattggcaatactttctttagctatgcctaacgagccaataatgcgtcaatgttggcgtgattggatgttaggccatttagccaaaggcgataaacttgataatagctacttaggtacgttaattcgttatgctgccgatggcctttggttatcagaactcacagaaggccctacgatttcacaacaagagcgtagtgcattagttgaaagattattaaaaatgacatttgaatatatggccgacacagcaaatcagtcatgttaa

SEQ ID NO: 295127 - DNA, 861 bp, Proteus mirabilis
atgaaatacagaataaatgcctcaatttattacgacgcaacggatggcgcgatatcgttagaaaaaggtgacgttgatacacatctgtctattaccgctaatgcgttactcttttattttattcaaaatcccggtgtagtaaatcgtgatgaagtattaaaacgcgtgtgggatgacaatgggctagtttcttcaaatagtaatttaaaccaatatttaagtttattgcgtaaaacatttcgtcattatggtattgaaaatattattgtcactatcgccaaagggcgactagagtttaatcctgatatctctgttgaattaattgatgactcaacactgttacctgttacacaaacaaatgagcacgaaggtgaagcaaataaaagtaatatcgcatcacccattgagacatcgttatcatccgagcctgataatctagacagtgaattagaaaaagagcctcaattatcggtaacatcgccacaaaagccagaaatttgttggtatttagccagtattggttttttatttggcgccatatttcttgtggtgatcatctttttaaatcagcatcaatcaaagcctatcacattaacacctctcacccataatgattgtgaattactctctaacgaggccatgattaactcctctgtcagtgataattatattcgcaattttgacgctgtaagaaagaagcttaatttacagtgtgtgaaaggggagcgctttgtttttttctatggtgataaattacaaactaatggcttagggcgtgtctttttagcgcattgcgctaagaacgaagataatccatttagctattgcgataattacttttactattcttggaaatactaa

SEQ ID NO: 295128 - DNA, 519 bp, Proteus mirabilis
atgaaaatctcagggaaacttttatgttttttatcggccctgatttttatcttggtcgccacttatgcagcaacaagattattaactatcaaaaatgaaggtatgatggtttgttcaacaaagggcattatgcgctttgaaaatatggaagatgagaatgtgaatggcaatattcatttctcttttggtgctaatggcaaaggctctattgtggttgaggggtatactacctctaaagcgggttggctctatttacaacgttatgtgaaatttgattacaccacaaagcgggtttcccccaccgagcgtcactattttgtcagtcaatgggagtctagtgcctcctcaattgatgagtctcccgatgttatttttgattattttatgcgtgaaatgtcagatagtcatgatggattatttattaatgcacaaaagctaaatgaaaaaacgttattactcagttcgctcaattccccactctatatttgtaccttaaaacccggcagtaaattcgattaa

SEQ ID NO: 295129 - DNA, 279 bp, Proteus mirabilis
atgggtgatgcattaggtctgattgaaactaaagggttagtggcatgtatcgaagccgctgatgcgatgtgcaaagccgccaatgttgaattgattggttatgaaaacgttggttcaggtctcgtgactgcgatggtgaaaggcgacgtaggggcagtgaaagctgcggtagattcaggtgtggaatcagcgcaacgggtgggtgaagtcgtcacatcacttgtgattgctcgtcctcacaatgacatcaacaaaattgttatcaaacacaaggcatag

SEQ ID NO: 295130 - DNA, 285 bp, Proteus mirabilis
atgggtgatgcattaggacttattgaaactcaagggctagtggcatgtattgaagccgctgatgcgatgtgcaaagccgccaatgttgaattgattggttatgaaaatgttggctcaggtttagtcactgcaatggtaaaaggcgatgtgggtgccgttaaagccgctgtagattctggcttagaagcggctcaacgtgtaggtacggtggtcacttcattagtcatcgctcgtccacataacgatattcaaaaaatcgttgcccagtacaaagtgactgaataa

SEQ ID NO: 295131 - DNA, 279 bp, Proteus mirabilis
atgaaagaagcactcggtctagtggaaaccaaaggtctagtcgcttgcattgaagctgctgacgcaatgtgtaaagcagccaatgtggaactgattggttatgaaaacgtcggttcaggtttagtgactgccatggtgaaaggcgatgtcggtgcagttaatgcagcggttgagtctggtgttgaggcggcaaaacgtatcggcacagtagtgacttctcgtgttattgcaagaccacataacgatatcgagaagattgcagagcaacataaagcctga

SEQ ID NO: 295132 - DNA, 1653 bp, Proteus mirabilis
atggttgcattagataaagatttgcaatcccgacaactggctcgcgagctagttcgtaacgcgaaaaatgcacaacaacaatatgcgaaattttcgcaggaaaaaatcgacaatatagtcaaacacattgcatttgaagctgctcgtcacgcagaagagttggcaaaaatggccagcgaagagaccggctttggtaaatggcaagacaaagtactgaaaaatacctttgcgtcattgcgtgtgtatgaacatatgaaagacctaaagaccattggcattatcaatgacgataaagtgaaaaaagtcatggatgtgggggtacctttaggggttattacagcgttagtgccttccactaacccaacttcaaccattatctataaaaccctaattgcactgaaagcaggtaatgcgattattttttcaccgcaccctaatgcgaaacagtgtagtttccgcgcgctagaaattgtcaaaaaagccgcactagaagcgggagcacctgagggaattgtcgatggtgtgacattgctgacattggaagcgacaaaagaattaatgcacagcaaagatgtgtcattaatcttagctactggcggtgaaggaatggtgcgtgcggcttatgcatcaggcacaccaactatcagtggtggtccaggtaatggccctgcctttatcgagcgtagtgcggatatcaaaaaagcagtgagcgatatcatcaccagtaaaacatttgataatggcgtgatctgcgcttcagaacaatccatcatcgtagaacgttgcatttataacgaagttcaccgtgagctattagcgcaaggtgcttattttatgaatgatgaagaagcagcgaaagtcgcttctatgttattgcgcgctaatggcacgataaatcctgcggtggttggtaaagatgctatctatttaagccagcgcgccggttttactgtacctgctaatacccgcgtcttgattgcactacaagatactgtttcaccgaagaatccctattcacgggaaaaactgtgcccaatcttaggtatgtatattgaagaagattggcaatcagcctgtcatcgtgtggtgcaattgctcactaacgaaggcttaggtcataccttagtgatccatacccaaaatgaagatgttattcgtcagttctctttagaaaaacccgttaatcgtattttaattaatactccggcggcattaggtggtattggcgcaacaaccaatattactcctgcgttaaccctaggttgtggtgcggtaggcggtggttctagctcagataacgtcggcccgatgaatttactgaatattcgtaaagtcggttatggggtacgtagtgttgaagagttaaaacaaccttgtccattagcacaagaagctgctcaacctgctgtttctagcgcaaattaccacaccagcattcttgatgatgatcgttttcgttcaccttctttaacccctgttcatgcggaatgtgcaacagcacaacgtcaaacacaaggtgatgatcgctttggcgcgtccccttatacaacgacagtcagtgcgtgtgcacaacaagtgattgaacaaggtgagatcaccgaagagaacgtggagcgcattatcaaagaagttctcggacgtctgggtaaataa

SEQ ID NO: 295133 - DNA, 264 bp, Proteus mirabilis
atgatcctcgcaaaggtaatcggacacgtagtcgcgacacaaaaaagccctgaactgaaaggaagcaatttattaatgatagcgaccttagatgatgagcttaatccactgaaaaataaaacctatgttgcagtggatagtgtgggtgcaggtatcaacgatgtggtgttggctgaagaatacttcgcactaaacaaagatcgttacaaggcgatgtccgtggttgccattgttgagaaggtttatcgggacagtaaggagtaa

SEQ ID NO: 295134 - DNA, 1149 bp, Proteus mirabilis
atgagtgagtttctgataaaacccaaaattcagtttggcaccaatgcactgaattttctctctgggttaactgcccgccgcgcatttgtggtgacagataaagcaatggtgaagtttggctttgcagataaagtcactgaaaaattaatgcaacgaggtattgagtttcaaatctatgatgatgttgcatcagatcctgatatttctgccattgtcagtggtatgaaaataatggatgcccattatcctgatttggttatcgcactcggcggtggatctgttatcgatgctgctaaagccgttatgtactccctctggcatacccgtaaagagcacagtagaagtaaaccgcagtttattgcgatccccacgaccagtggtactggctctgaagtgacctctttttcagtgatcaaatcacgcagtgaaaaactggtattggtcgatgagtttatgttgcctgatatcgcgatcctcgatcctgaacttgtgaaatctgtacctcctgcaattactgctgatacgggtatggatgtcctttgccatgcattagaagcttatgtgtctaaagctgcatctgatttttctgatgcgatggcagaaaaagcagtcaaattagtgtttagccatctgcttgattgtcatcatcaaggggataacttacttgctcgcgaaaaaatgcacaatgcatcttgcatcgcaggtatggcatttactaatgcgtcgttaggtattacacacagtcttgcccatgcattaggcggtgtttttcatgtccctcatggccgtgcgaatgcgttattgatgacacatgttattgcctttaatgccaatcttcatggtgattgtaatagcgaagcagcgaagcgctatgcctaccttgcccaaagtttaggattacctgcgcagacggtaaaagaaggcgttatcagccttattgtcgccattaatgtattgaaagatgaaatgggtatgccgaagagtattcgcgataccggtgtcagtgaagcggacttttatgcccgtttaacggaaatggtcggacaggctttacgcgatagctgtacgccgacaaatccgcgtgacgtaaacacacaccaattagaaacattgtatcgtcaggcatttgccggtgtatcacacagttaa

SEQ ID NO: 295135 - DNA, 3429 bp, Proteus mirabilis
atggccaaatattctttgacgccacgcgtaaaaatgctggcagaacgtttagtttcacgtaacagttctattagcacagagcgtgcgacgatttttgattcattagataacaatattgccggtgtgccccaagcgattaaacctgcacaacgcttttatcagtttattcgtcattttccaagctatatcgctcaagatgagcttattatcggtagccaatcctcaacaccacgtggtgcgattttccacagcgaagaagaagtgcgtagtgactctatttatcgctttttaagtatcaataatagcgttgcatcacctgattatatgctggtggtgaatcaaggtttcttagccatcaaagcacaacttgaagatagaatgagaagcattggtagtgcggtaaatcgtagcagtatggatgaagccaatttctgcaaatcggcgatttatgcatgtgatgcggcactttattttgcacaactactgtcagctaaagcagaaaatttagccgcaatggaaggtaatccataccgtaaagctgaattattagaaagcgcggctattttacgtaaagtacccgccaagccagcagaaacctttaaagaagcggtacaagttttctatttattacagcttattcttcatctggagaatggtagctacgctatcaacccaatgggctttgataaagcactatacccattctatcaacgtgatattgaccaaggtcgtttaacgccagcacaagcttatgaaattgttgaaagtctttggctaaaactggctgagctatccgaagttcgcgcaacgaaagaagtcgatggctatccaatgtttgatgccatgacccaaggtatcgacattaacgatcctcgcgtcagtattaacgaactttcagaaatgttgttatcagcgcgcgctaatctatcagcattacacagttcactacaagtccgtttatataacggtcgtatgaatacaccaccgcaatatgcttcaccttcagccaatgttgttacaccggcgacagcaaatggtgagttgactgtaatggaaggcttaactccccgtctacagcgcctgcgtaatcgttatttagaggctcgtcctagtgtttcaatttatagagcattagcctttactgaaattgctcgcaataatcctggtttaccgcctattttattgcgtgctaaagctttccgccgtgcttgtgaaaccgcacctatcttaattcaagatgaagagcttattgtgggacatccttgtgggaaaccgcgtgctggcgctttctctcctgatatcgcatggcgttgggtacgtgatgaactcgacaccatgagcacgcgcccacaagatccattccaaatttcagaagaagacaaaaaagtcattcgtgaagagatagtgccattttgggaaggtcgctctttagatgaaatctgtgaagcgcaataccgcgaagcgggtgtatgggagttcagtggtgaaacctttgtcagcgatctctcttatcatcaaattaatggtggtggtgatacttgccctggttatgacgtgctgttattcaccaaagggatgaacggtattaaagccgatgcacaagcgaaattggctgaattaagcatggaaaatcctgctgacattgaccgtatctatttctataaagcgtcgattgaaagttgtgaaggtgttatcgcttatgctcatcgtattgccgagcacgcccgtgaattagcctctaaagagagtgatccacaacgtcgtgaagagttattgaccattgctcaagtcaatgaaaatgttcctgctaatccaccaaaaacattgcaagaagcactgcaaagtatctggactgtagaatcattgtttgaagttgaagagaaccaaacgggactttctttaggtcgcttagatcaatactgtttcccaatgtatgaaaacgacattaaaacaggtcgtttaacgcgtgaacaagcactggaaatgatgcaggcctttatcatcaaatgtgccgaattaatgtggatgtctagcgaacttggcgcaaaatattttgccggctatcaaccctttatcaacttaacggtggggggacaaaaacgctcaggtggcgatgcttgtaacgatttaacttacttgattatggacgcagtacgctttgtgaaagtgtatcaaccttcgctggcttgtcgtatccataaccaatcaccacagcaatatatggaaaaaatcgttgatgtggtcaaagcgggaatgggcttccctgcctgtcacttcgatgattctcatatcaagatgatgttgcgcaaaggcttcgactttgaagatgcacgcgattactgcttaatgggctgtgttgaaccacaaaaatcaggtcgtatctatcaatggacatcaacgggttatacccagtggccaattgccattgaatttgtattaaatcgtggtcgtatggtgctgtttgatagctaccaaggcttagacaccggcgatttacgtgatttacgtacttatgaggatttcgatcgcgcggttaaagagcaagtcgcacatattattcgtttatcagcaattggtacggttatcagccagcgcgttcaccgtgacattgctccaaaaccactcatgtcgctattggttgaggggtgtatggagcaaggtaaagacgtgacagcgggtggtgcgatggttaaccacgggccgggtctgatcttctctggtttagccacttatgtcgattctatggcggcaattcgcaaactggtttatgaagacaaaaaatataccttagagcaaatacgtgacggcttattagctaattttgaagggcacgaagagttactgcgtgactgtttaaatgcaccgaaatttggtaacgacgatgatgttgttgaccaatatgcgttagacattaccgaatggactgaacgtgaatgccgtaaatataaaatgctctactccacatttagtcacggtacgttatctatctctaataacacgccaattggtgaattaaccgcagcaacaccaaacggtcgtttagcatggaaaccattatcagatgggatcagccctacacagggtgcagataaacatggcccaactgccatcattaaatccatcagcaagatgaatgttgaaaccatgaatatcggtatggttcataactttaaattcctcaaaggcttgctagataccaatgaagggcgccaaggattaattaccttattaagaaccgcctctattttgggtaatggtcagatgcaatttagctatgtcgataatgaagtactgaaaaaagcccaattagagcctgaaaaataccgcgatttaattgtccgggttgctggctacagtgcgtacttcgttgaattatgtaaagaagttcaggatgaaattattagtcgtactgtgattgaaaaattctga

SEQ ID NO: 295136 - DNA, 951 bp, Proteus mirabilis
atggagacggcagcagaaataagagggcggatatttaatatccaaaaatactctatttatgatggtgatggtattcgtactctggttttcttaaaaggctgtaatatccgctgcccttggtgttcaaacccagaaggtcttagcagtgaatttcaggtgatgtactctcgcgataaatgcgtagattgcggtaaatgtgttgatgtgtgtccggctggtgtgcattacatgacaaccaatgagcaaggtcagcaagttcatcgcgttgatcgcgccgttgattgtattggatgccgtaaatgtgaagaagtgtgtctttctgatgcactggatattatgggtaaagatgtctctgtatctgaattgatggacattatcatgcaagattacgacttctatatctcttccggcggtggtgtcacaatcggtggcggcgaaatgagtttacaaacggattttgctgtagctctgctacgtgaatgtaaaaagatgatgatcaataccgcggtggaaacacaagcaaccactaatgtagctaattatgaaaaattagcgcaagtcgttgatcaatttctaattgatatcaaacacattgatactactcagcataaagcattatttggcattggtaatgagaatgtccgccgtaatttagagcgtttgatggatctcggtgcaaatgtggttatccgtatgcctttagtgcgaggttataacgactcttatgatgcgattactggtgcgattaactacgccatggcgctgtcaaaacgcggtaatcttcagcgcatcgatatcctaccttatcaccaatttggccgtaataaataccaaaaattggagatgatctaccccattaaaaacgatccgggatatacgccagaagagctcgatcgcttagaagccttctttaaacaatttgattttgagatccgtcttgtccgccactaa

SEQ ID NO: 295137 - DNA, 507 bp, Proteus mirabilis
atgaacagtttaggtgtgattgaaacacgcggattaaccgctgcgatccaagctgctgatgcggcttgtaaagctgccagtgttgaaattatcggttatagaaaaattggatcagggttagtttctgtctgttttcaaggtgagatcagtgcggtaaaaacagcggttgagcatggtgtagatgtggtgagccaaaaagagttggttatcggatcactcgtcatagcaagacctgagccaagtgttatcaccaaattgttgacaataaaaggtaagaaaaaaagcgctgttattagtgaagaaacacaacagaatgcgttcaaaacgctggctgaaaacagggttgaaactgtcatgaagcatgaaagtggtgatagtgacgcgacaaaagaagttgcagatcgactggctcaaaatagtgcccctgaaactaaagcaatgacagcagataaagcaccaagcagtaaaaaagagagtaaacctgaaagccgtaaaggtaaaaaataa

SEQ ID NO: 295138 - DNA, 645 bp, Proteus mirabilis
atgattaatcaacaactaatgggaaaaattctcactcgtttaaatatccccaatgtgggaatgggcataaatcaagggatcgctattcctgttggtatttctaatcgacatgtacatctttcacaacaagatgtagatgcgttatttggtcacggctatcagatcaccccgtttaaagatctaaaacaaccgggacaatttgccgccaaagagtgtgtgatggtagtcgggcctaaaggctctatcagtaaagttcgtgttttagggccggttcgtccacaaagccaattagagatttcaaaagcagattgttttgcattaggtataaaggcacccgtgcgtggttccggtgatttagcaggctccggtaatgcggttttaatggggcctgcgggatatgtggaattaaaacagcaagtcatttgtgctcagcgtcatattcatatgaataatattgatgctagagcgttaaatgtgaccaatggtcagaaagtgcatgtaaaaacagagggtgaacgtagcctgatttttgatgaagtgattgtgcgtgtcagtgagaaatttgcattggaatttcatattgataccgatgaggcaaatgcggcaggacttagaaataacgacagcgtgtttattgtcagctaa

SEQ ID NO: 295139 - DNA, 705 bp, Proteus mirabilis
atggacaatcaattaattgaacggattgttgcagaaatagaaaagcgtataaaaaagccggtgttgttagttttaacaccggcgccgggatatcgtgatgaaatctatcaacgcattagccatttttccactgtacgggcctctatttttgttaccacacaggcacagcaatgccatgatttatcgcagtggtgccatgtaggggatatcactaaagccgatgagtttgatccccataggttatccgcttatcaggcattatttattccctattttgacaaaaagctggtgggggaaattattaatgggttaatgattagtgaagaaggaacacttattcattccgcattggctaaaaatattcctattattgcattaccttacttttgtcagccaaacagtgaaattaatcaaattttaggtttaaaccaaaatgaacactataacttagtgctaaaacagaatattgaacgattaatatcaatgggtattactttttgctcaataaatgaagttgaagataatttaaaaaagaatgcttttgatcacaagttaaaatttattaataaaacggaaacaaaacaaccgaataataatcgctatattactttgaaacaagtaatgagcaaccctgaaaaatatcaattatcacaagataaattaaccgattctgctattgaatatttaaaaagtttgaaagattaa

SEQ ID NO: 295140 - DNA, 408 bp, Proteus mirabilis
atgtccccaaaagcaaaatcatggctttggatgctggcggttattatttcagaaacctcagcaacctcgaccttaaaaatgtttgataatagtgaaggaataacaaagacattattattaggattaattattgttctttatattgtttgttattattcattatctcgtgcagttaaaaatattccagtaggcttagcttatgccacctggtccggaaccggtatcttagttgtatctactttaggtatggcattttacggtcaacatcctgatacggctgctattattggtatggcagttattgccagcgggatcgtcattatgaatctattttcgaaaatgggttccgaagaagagccagaagaaacgacggagttatcgaatataaaacagactgctcgtcagtga

SEQ ID NO: 295141 - DNA, 327 bp, Proteus mirabilis
atgtttaccggattcttatggctggcgctgtctattggttctgaaatcacgggcacctcaatgattaaaaagaccaatggctttagtaaattagccccctctgttttagtgattgccgcttactgtatttgctatttcgctttaacacgtgcaatgggctatatccctgttggtgtggcatattccttgtggtgtggatttggtattgttggggtaacattagttgccatgattttatataaacaaaaacccgatctacccgctatattctcaatggcattgattatctctggtgggataattatgaataccttttcaacgatgtaa

SEQ ID NO: 295142 - DNA, 1131 bp, Proteus mirabilis
atgccaaaaatagtttcttatataagtacaaaatttaatagcgtaaaaaatgctttaggaataaaagataccacgggaaatcctaatttcagtagtgttaagaatagtagtgctatatggtatacagaaattttatctgaaaaaaaagcacctgttctctatatgcgacaaaatatcaataacgtaaataatatccaaagattagtatctacagaagttcttaacaaattatattatgatgaaaactcacctcaatatgatgaaaataattatcaatgtgtacctaattctagatatagagtacgatattgtaaaaaaactttaatagaatctaatggggtattattacctactaataatgtgagtgttaagaactctccttatacgactattgcaagccaatatcctcttaatgataaaaagagtttaaaacattattttaatatgttatttgataatgatataaagacagtttatgttttagcctcgaataaggatattaaatgggacttctcaaaacctgatagtgaatatgataaaagcaattctaagcagaaagggtttaaatactttagagaggatttttattcagataatatagaatctcgccactttaataagtgggatttcagtcgttttaaaataaaaggtaaaaatgggaaatttatagaaaataaaaatggagataatgaaattttactaaatgaaagaagtttagattgcaaagtatatattaataaattaactaaaaaaggttgtgatgaaaagaaaaatataaaatttgtgcatatttataattggagagatcatacagcaatagatgcgacaaaattaaaaaatacaattgatttgattggcaaacaattaacaataaacccaacaaaagaaaatatagctgtccattgtcttgcgggattaggaagaacaggggagtttattgctttaatggagatgatgaaaatgatagaggcaggaaatacaaaaacaaaaagcttagaaagtattctcgttcatttaagggaaaatcgcagttggcaggtacttaaaatgaacgcacaagttgatgagctgattaagtttgcaataaatcataacattcctttagtcaatgataatattgaaataaaataa

SEQ ID NO: 295143 - DNA, 3078 bp, Proteus mirabilis
atgaaattcactgatatttttgtgcgacgacctgttttagcgttagtagttagcaccttgatttttttactgggcgcatttgcgttcagtaaactacctattcgccaataccccatgttacaaaactcaacgattaccattgcaacagactaccctggcgcatcgtctgaactgatgcaaggttttgtgactcagcctattacacaagccgtttcctcggtggaaggcgttgattatatttcttcatcttcagtacaaggaaaaagttttgtcacggtaagaatggagttaaatcgcgatccgacacaagcattaacgcaagtgatggccaaggtcaatcaagtacgttataaattgccagaacaagcttatgatcctgtgattgaactttcttctggtgaatcaaccgcagtcgcttatgttggcttttccagtgagcaaatttctattccagaattaactgactatctatctcgtgtggttgaaccgatgttttcctccattaatggggtcgccaaagtacaagtctttggcggacaacaactggccatgcgcgtatggctagatactgataaattagcggggcgaaacttaactgctagtgatgtcgctgatgccattcgccgtaataattaccaagcggctcctggaaaggtcgaaggtgagtttgttattgcgaatgtttatgtcaataccgatttaaccaatgtggaagaatttaaagatatggtgatccacaatgatggccataatcttatacgtctacgtgatattggcaccgtcgagctaggtgcggctgctactgaaaccagtggcatcatgaatggcaaaaaagccgtcttcttaggcctatttccaacaccaacaggtaacccgttaatcattgttgatggtattcgcgaaaaccttactgatatagaaaaaacactcccaccaggtgtaaatgtggagctggcctttgaaacttcacgttttattaaagcttctattgatcaggtggtgcaaacattaattgaagccattttaattgttattgctgttatttatctctgcttaggctcattacgttctgtaattattcctgtgcttgctatccctttatctatgttgggggcagccggattaatgttggcatttggttttagtattaatttgcttactttactagcaatggttttagccattggattagttgtcgatgatgcgatagtggtggttgaaaacgtacatcgtcatattgaagagggattatcaccagtgcaggccgcattagtgggggcacgagaggtcgcggggccggttattgccatgaccatcactttagccgccgtttacgcgccaatcggtctcatgtcagggttaacaggtgcactgtttaaagaatttgccataacgcttgctggtagcgtcattgtatcgggtattgtggcattaaccttatctccggtcatgagctcattaatgctcaaaccgaaagaaaatgaaggcaggatggctaaaatagccgaatatacctttgataaattggcatattactatagctatttgcttaatttttctttaactcatcgctggttaaccgtcgttttcgccttcgccgtgtttgttagcttgccgtttttatatagccagacaaaacaagagttagcacctttagaagatcaagcgagcgttttaaccgcggtaaaagcaccacaacatgcaaatcttgcctatgcggaacattttaatcagaaacttgatgatatttatatgagcctaccggaaacagacagcacatggatcatcaatggtactgatggcccttcagcaagctttggtgggattaattttgatggttggaaaggtcgtgatcgtaatgccaatcaaattcaggcagacctacaaaatcgtgttgcggatgttgaaggaagcagtatttttgcttttcaattagcatcattacctggctctgtcggcggattacctgtccaaatggtgttacgtagcccattaggttatcccgttttatttgacacgatggaagagatcaaacagcaagcacgagaaagtggtctatttgtcgtagtggatagtgatcttgattacaacaaccctgttgtacagatcactattgatcgtgccaaagccaatacccttggtattcgcatgcaagatattggcgaatcactatccttattagtgggtgaacactatatcaatcgctttggtatggatggtcgctcttatgatgtgatcccccaaagtatacgtcaacaacgtttaactccggcagcacttgcagggcactatattcgtactcaagataacctgttaattccattatcaaccgtagtcaatattaccactcaagttgaacccaataaattaacgcaatttaatcaacaaaatgccgctatatttcaagctattccggcaccgggtgtcaccatggggcaagctgttgcgtttcttgaaaatgtggcaaattccttacccgctggctttagccatgattggcaatctgatgctcgccaatttacccaagaaggaaataccttagtctttgcgtttattgccgcccttatcattatttatttggtattagccgcacaatatgaaagcttggttgatccattgattattttgattacggtaccactctcaatttgtggtgcattagtgccattagctttaggtatggtgacattaaatatctacactcaaattggtttagtcaccttgataggacttatcagtaaacacggtattttaatggtggagttcgctaatgaattgcaagttcataaaaatctaaatcgacgtgaggcgattgttgaagcagcaaaaatccgcttacgccctgtcttaatgactacggcagcaatggttatcgggcttattcctctgctatttgccagtggtgctggagcgaatagtcgctatggattagggttgattattgtatcaggtatgttagttggcacgctatttacgctatttgtattacccacaatgtacagcttcttagcacgaaaccatcaagtcagcgctcagactgagcgtcaaaaacaattacagcaaatcagtgagcaataa

SEQ ID NO: 295144 - DNA, 1107 bp, Proteus mirabilis
atgaataagaaattgacgttaactttatgtgcctcactatttttattaagtgcaggggcaatggtttatgcaacaatgggatctgatgaagatgaaacacagccatttgcttatccaccaacaaaagtggcattagcaaccgcgcaatccgctgaattacccaataccatgcatggtgttggagaattggaagctgctagacaagtctatttagcggcagaaacaaatgggcgcatcgccactatccactttgcatcaggacagaccgtcaccgcgggacaaatcttagtaaaattaaatgatgagccagagcaagcggaattattacgcctacaagcacaactaactaatgcagaaaaactttattcaagaactcgccaactttatagtaaaaatgtggctgcagcagcacaattagatagtacgttatcagagcgcgatatgattgtagcctctatccgtgaagtgaaagcgcgcattgcacaaaaaaccattaaagctccctttgatggtattgtcggcataaaactcgtgcatgaaggacagtatctaaatgctggggaacgtgttgcctcattagtggatgcaagccacttaaaacttaacttttcactcgatgagcaagtggcgccacagctttcaactcatcaacctattaatattgcagttgatgcttatcctaatcaaacatttaccggctcacttaatgccatagaccctcttattggcccttctcgcactgtgcaagtacaagccattttaccgaataccgataacaaattaaaagcgggcatgtttgctcgtgttcaagttacctcccctactcgtcatcaggcattaaccgtaccagagacagcggttacttatactgcctatggggataccgtgtttgtagcgcaatctgacaatcaaaaaaaccttatcgctaagcgtgtctctgtgaaagttggattgcgctacaacggccttatcgagatcaaagaaggcttaaatcagggagatcaagttgttacctcagggcaaatcaaacttagtgatggcacctcaatagcccccatagagcaagatacgttaacactggcccaatctactactcgtcaaccataa

SEQ ID NO: 295145 - DNA, 423 bp, Proteus mirabilis
atgcctaactcaattgcacgtattcttgaaagccaaacattatggattgtcgcaagagtgctaattctattgttatttttatcatcgggttttgccaaggtatttgattatgagaatagtttggcagagatgcgtgcagcagggttaaaccctgattggttttttaatctcgccagcgccattgttttattcgccggatcgattttagttctttttgatcgttatctatggttaggtgctggcgcattagccactttcttatttttaaccattgtgattgtacatacgttttggaatatgaccggcgataaagcgatgttatccatgtattttgcgatagagcatacctctgtgattggaggactaatggcaaccgcaatggctagccacttcagagcattatggaaaaaattcaactcataa

SEQ ID NO: 295146 - DNA, 450 bp, Proteus mirabilis
atgagtaaagagaaaatagattttaatcgagcgctcacggttggcgaagtggcaaaacgcagtggtgtacccatctctacactgcatttttatgaagaaaaaggattgataaaaagttctcggagccctggaaatcagcgccgttacccgtcagtggtactccgttatgtggcaattattaaagcagcgcagagtacaggtattccattaaaagaaattcaggaaatattagggaaatatccaccaaatagtaaattaactgcagaacaatggcatgaaatatcaacggattggaaaatacggctcgatgagcgtattcggcgtcttaagcgattacgtaatggacttgatcactgtattggctgtggatgcctatcattaaatgattgcccattacgtaaccctgatgatattttaggagaaaaagggcctggtgctcaaatgttatga

SEQ ID NO: 295147 - DNA, 432 bp, Proteus mirabilis
atgaaaattgatcctttccgcgcacagcaggtatataactctccttcgactttatctagtgctaacaatatttcgagaaaaggatcagatcctattatcgaaaatttgaaactgactttttatcaagatttaagcaaggcggatcttagccatgctaatgatattcttactttattagaccaatttgatgtcaaagatggaggtaatcaaacgttaaaagagaagcgacaaatagccttattagtttatgcacaccaacaaagtgaattagagcatcatgaaaataaaaacttaattaatcaagcactaatttcacggctctcttatcaaggtttttaccatcaagtcacccaagaattattaggtatgatcgataacaatgatgaattcgaaggtttttttaagcctgatagggtgacattttcattgtga

SEQ ID NO: 295148 - DNA, 693 bp, Proteus mirabilis
atgctacgcttgttacctgacaaccttttaaaatatacctgtgaaggtgtattaatacgagctcactatatacgacagctcgataatattcataaaacaacattagcgaccaagcaggcagcaaaaaaaatgctgcatcactttaatcataaactagataaacttcgtaataagatagctaacgaagcttatgctaaaggattacaggttttattagctgatataataagattctcaattgaatatcaagaaaaatttgtacaatatgaatttcagcaacgagaacaactcgtcgcaacgatcggggaattcttagattcacctgaaatacaagttaaactcactcaatatctgatgtcatctgttcctcttgagcaaaaagtaacactcgatattcccacaacactacagcgctattttgagagtgaactcgacaatagcaatattaagttaaactgccataacaacaagaccattgctattcataccggtgatcaaattactttttttgatcctgccatatttctcaacgatctaagagcacaatttcatcggcctttttctgaaacttatcaaccgatttttgagcaaaacatcaaacaactgctattaaactttatcaatacatttaccccctcagacgatctttcttcaagaaagccaattttaaacgaggataacaatgaaaattga

SEQ ID NO: 295149 - DNA, 573 bp, Proteus mirabilis
atgagtaatctgactgctgaacaatttaaattgatctctaatgtaatgtatgaaccgttaagttatatccattcagactacgatgtattagcatcgccagaagaaaataccctatggcaaaaaatagctaatcgtcatttaattgagcaatatcaacttatactgcatattgattgtgagattgatactaccgtagaaaaaatatttactcattggcacactcttcctcgttgtgctttatttttaggttatttttattctcgtcatacgctattagcacaaaattattatcatttagaacctgcattaaaagcctttttagctctctatcctatgttaaataggactatcgatagcaaaatattactgtcactaaaagatatttcccccatagatattggctatcaattactatttaattttattaagctaatatcgaacgcactagctcaacgttttaaattacttttttcaccaaaatctttatcaattaatattgaatttcctaaatcacttgttttatctcctacactttttttactggtattaaattatgctacgcttgttacctga

SEQ ID NO: 295150 - DNA, 753 bp, Proteus mirabilis
atgaatagacggtatttgttattactatttttatgttgcttacttcctttattaaacggttgtaaggatcaatcactgctcactaatttaagtcaaaggcaagcaactgaaattcaagcggtgttacagaaacaccaaataacaagtactcgtactgcgttaggaaaaggattatttgagatctctgttaaaaaggaaaatatagggattgctattcaaatattagaagaatatcaattaccaacaatttctcgtattgaaattacacaattatttccatcagatgcattagtttcatcgcctcaagctgaaaaagcacgtttaatttcagccattgagcaacggttagaacaatcattattaaccattgatcatcttattgatgcgagagtacatgtcagttatccactatcatcaaatgatcgtataacgccaacacctcatgcttctgctttagttttctatgaagatggcatgatagatagtgatcagctaagtgacgatgttcgcgcttttatccataatgcttttaatgatatggatgagagtaatattactgttttattatatccacggaatatcaataaatttacgatattaaataatcaacttcaccaagataatacgacatcattgagtaactcttggttactcatagggttatcagtaattagtttaattataataattgtggtcatattgattatttatcgtcgtaaacaagtcaataaaatggtaagcgagaatgagtaa

SEQ ID NO: 295151 - DNA, 279 bp, Proteus mirabilis
atggctattgcaactattattccggttaatttaaccaaagagcgacaagatacaagtgatgatagtttatcgactatcatggtaaatggcattattagcagtatgcaatatgaaaaaaagatacaagaaaagttaacaacattaagccaattaggtgatacccaaagttatacaaatttacaaatagaacttagcgattattcaattacgatgagtttagcgagtacgctagcaagaaaatctctcaatgttgtggaaacactacttaaggctcaatag

SEQ ID NO: 295152 - DNA, 234 bp, Proteus mirabilis
atgtgtataagagacagtaacaaagttgaccaatattttcataaacctgtaagaacccaaagtaataatttatcaaaagctttagaagcattaaaggctgatacatctaatgctgctgcattagccgaatatcaagccaaacttgccgaatataatattacacgtaatgcccaatctacatcaatcaaagtcgttaaagatttagcaatgagcattattggtaatatgcgttaa

SEQ ID NO: 295153 - DNA, 1761 bp, Proteus mirabilis
atgattactataaaaaaaacgcacctgctgttacttaccacacttttttcacctgcactctatgccgcctatgagccagcggttgaagcacaacaaggtatggtggtctcttcacaacatttagcctcacaagtaggaaaagatattttgcaaaaaggagggaatgccattgatgcagctgttgctgttggctatgcacaagctgtggtaaatgcttgttgtggaaatattggcggtggtggttttatgactatacaccttgctgatggcaccaatacctttattaattttcgagaaacggcgcctacggcagcatctaaaaatatgtatttagataaagacggtaacttgattaaagaggcaagcctatacggctatcttgcctcaggggtgccgggtacagtgaaaggacttgatgcagcattagaaaaatatggcactctttcacgccaagaagtgatggctcccgctattaaactagccagagaaggctatattttaacccgtgctgatactgacgtattagacaccaccacagagcgatttaaacaagatcctgaatcagcaaaaattttcttaaagcctgatggaacaccatggcagcctggcgatcgcctcattcaaacagacttagccaatacacttgaacttatcgccaaccaaggtgctgatgctttctatcaaggggaaatccctaaaaaagtagaacaagcttcaaaacagcataatgggttattaaccaaagaagattttgcgaacttcactattaccgaaacacctcccattacctgtacttatcgaggttatgaatttatctctgctcctcctcccagttcagggggcgtcactatttgccaaacactgaatattttagaaggctacgatctgaaatcgatgggttttaactctgccgaatatgttcacacgctcacagaagctatgcgtcatgcttatatggatagaaacacctttcttggcgatccgcaatttataaacaatccaacagaaaagttattaagtaaagcctacgccgcagagcttcgccaacaaattacaccgaataaagccaccccatcagaaaaggtacaacccggtattgcacctcatgaaagccctgaaaccacgcattattcggtgattgataaagatggtaatgccgtttcaaccacttacaccatcaatggtcgttttggtgctgtcgttatcgccccggggactggctttttcctcaataatgagatggatgattttacaactaaagttggcgaaaaaaatctttatggcttagtacaaggtgaacgaaatagtattgccccattaaaacgtccactgtcctcaatgagtccaaccattgtgactaaagatggcaaaccctttcttgtattaggctcaccgggaggctctcgtattatctcaatcaccttacaaacggcacttaatattattgagtttggtatgtccccccaagaagccgtcaatagccctcgaattcatcatcaatggctacctgatgaggtttattatgaacaacgaggattatcaaaagataccttagaaaaactttctgccatgggatataaaatggtcgaacaaacgccatggggcgcggctgaattgattatggtcggccttccaggagaacaaggagtgatccctgcttcgtcaggtaatgattctgctgtttcaggggcgatacgcgaaggttatctttatggttcaaatgatgttcgacgtccagcaggtaaagccgtgggctactaa

SEQ ID NO: 295154 - DNA, 603 bp, Proteus mirabilis
atggttctggttactcgcaaagccccagatttcacagcagctgctgttttaggtaacggtgaaattgttaatgatttcaacctgcattcatttatcaaaggcaaacctgcggttattttcttctggccaatggacttcacttttgtttgcccttcagaactgattgcatttgatcaccgttttgaagagttccaaaaacgtggtgttgaaatcatcggcgtttctatggactcagaattcgtacataacgcatggcgtaaaacagctatcgatgatggcggtattggtgaagtaagatacccaatggttgctgatatcaaacacgatatcattaaagcatacggtatcgaacatccagaagcgggtgttgcactacgtggttcattcctgatcgacaaagaaggtgtcgttcgtcaccaagtggtaaacgacctgccattaggccgtaatattgacgaaatgatccgtatggttgatgcactacaattccacgaagagcacggtgatgtttgccctgcacaatgggaaaaaggccaagaaggtatgggcgcatctccagacggtgttgctaaatatctgaaagcgaactcaggcaaactgtaa

SEQ ID NO: 295155 - DNA, 588 bp, Proteus mirabilis
atgaactatcttgctcacttacacctcgcctttagagcgaaaagctccttattaggcaatatgatggcggactatgtaaaaggtacgccgagtaacgattacagccaagcggtaattgacggcattcgcatgcataggcgtattgatgtgctgactgatactcatccattagttaaacaagctcgacaactttttccgaatgaataccgccgcgttgcacccattactttggatatattttgggatcattttctctcactacattgggataaatttgaacctgacataccgctcttggaatttgttacttatgtgcgcaataccattgaaccggatttatggcgaactccggaaaaatttcaagagctcaatgaatatttatggccccaagcgtggttgactcgttatgctgataaaacttatatagcacagacgttaaaaggcatggcaaaaagaagaccgcgtttaagtgcgcttgcaggctcttatattgcactagaaacgcattataaagagttaagtgagattttttggcaattttatccacaattgttagaaagagcacaacatcatcagctggatgactga

SEQ ID NO: 295156 - DNA, 1074 bp, Proteus mirabilis
atgcgtgtatccgattttagatttgacctgcctgagtccttaattgctcattatcctcacccccaacgtagtgggtgccgattattatccctagaggggaaaacgggcaatttatctcacggtgtctttacggatgtattagataaactcaatgccggtgatttacttgtatttaataatactagagtgatccccgcgcgtatttatggtcgtaaagcctccggtggcaagatagaagtattagtggagcgtatgctagatgaacatcgtgtgttagcccatgttcgtgcatcaaagtcacccaaagagggcgcatcactgattttaggggaagacgaaagtgtacaagcaaccatgattgcacgccatgatacactatttgaaatccgttttgatgatgaaagagatgtgctgactattttaaatagtatcggtcatatgcctcttcctccttatattgatcgtccagatgaaagatccgataaagagctttatcaaacggtctataatgagcgtcccggtgcagtagctgcacccacagccggattgcattttgatgagccgttattagaagcgttacgtaacaaaggcgttgagatggcctttgtcactttgcatgttggtgctggcactttccagcctgttcgtgtggataatatcgaagaacacactatgcattccgagtatgctgaagtccctcaagaggtggtagatgccgtgctcgcttgtaaggcacgaggtaatcgggtgattgccgtgggtacaacatctgttcgctctttagagagtgcggctaaagcagccaaagatgcattaatagcccctttttttgatgatacgcaaatttttatttatccaggttaccaatatcaagttattgatgctttgataactaacttccatttgccagaatcaaccttaattatgctggtttccgcatttgctggttataaaaataccatgaatgcttataacgtagcggttgagcaaaaatatcgttttttcagttatggtgatgcgatgtttattacgcgtaatcctttagctatcaatgaaaaagtgggtgaagagtag

SEQ ID NO: 295157 - DNA, 1143 bp, Proteus mirabilis
gtgaaatacgaattagataaaacagatggtcatgcccgtcgtggtcgtcttaagtttgaacgcggtgtcgttgaaacacctgcatttatgccagtagggacatacggtacagttaaagggatgacacctgaagaagttgaagccacaggtgcacaaatccttttaggcaatactttccatttatggttacgtcctggtcaagagatcatgaaattacacggtgatttgcatgactttatgcagtggaaagggccaattttaaccgattcaggtggtttccaagtctttagtttaggcgcaatgcgtaaaattaaagaagaaggtgtgcatttccgtaacccaattaatggtgaaaagattttcttaagcccagaaaaatcaatggaaattcagtatgatcttggatcagatattgtgatgatcttcgatgagtgtacgccatatccatcagattgggattatgctaaaaattccatggagatgtcattacgctgggctaaacgtagtcgtcaacgctttgatgaattaaacaacaaaaatgcattattcggtattattcaaggcggcgtttacgaagatttacgtgatatctcagtgaaagggctagtggaaatcggctttgacggttacgctgttgggggcctagctgttggtgaacctaaagaagatatgcaccgtattttagaacatgtttgtccacaaatccctgcggataaacctcgttatttaatgggtgtaggtaaacctgaagatttagttgaaggtgttcgtcgtggtatcgatatgtttgactgtgtgatgccaacacgaaatgcacgtaatggacatctgtttgtaacaaatggtgtcattaaaattcgtaatgctaaacatcgttcagatacatcaactctggatgaacattgtgattgctacacctgtaaaaattatagtcgcgcttacctacatcatcttgatcgctgtaacgaaattttaggtgcaaggctgaataccatccataacttacgctattatcagcgtctaatggctgaaattcgtcaagcaattgatgagtcacgtttcgaagatttcgtgcatgagttctacgaacgtattggtaaaccagttccaccgctaaatagcagtgcgagtaagtgcgattaa

SEQ ID NO: 295158 - DNA, 336 bp, Proteus mirabilis
atgagttttttcatttctgatgctgttgcttctgctggacaagcagcacctgaagcaagctttatgtctattttaccgatgttagtgatctttattttaattttctattttatgatcctacgtcctcagcaaaaacgtactaaagaacaccgtaaactgatggaatctatcggtaaaggtgatgaagtgttaactactggtggtttaatcggccgcgttgttaaagtttcagataacggctatatcgttgttgctctgaatgaaacaactgaagtaactatcaaacgtgactttgttgccgctgtattaccaaaaggcacaatgaaagctatttaa

SEQ ID NO: 295159 - DNA, 1815 bp, Proteus mirabilis
atgttgatattcgctatcctcatcggtctgctttacgcacttcctaacctatatggtgaggatccggctgttcaaatcactggcgcgcggggaaccgccgccaatgagcaaacactggatcaagttcgatctttattagataaagaaaaaattgaagcgaaatcaatcgcccttgaaaatggtgcgattttggctcgtttcagtaaccctgacattcagttacgtgcccgtgaagcgttgttacctgcgttaggtgacaagttcgttgttgcacttaaccttgcaccagctacgccaaaatggttagaagccattggcggtgagccgatgaaattagggttagacttacgtggtggtgttcacttcttaatggaagttgatatggaaaccgcgttaggtaaacttcaagaacaaaatgttgatagtttacgtactttattacgtgacgaaggcattccatattcttctatccgcaaaacggataattatggtgttgaaatccgtttccgcaacgctgatgaccgttctaaagcatcagattatcttgcgcgtcgtaaccaagatctcatttttagaaatggggataataactcgttaaaagctatttttaccgacgagcgtttacgtgatgcgcgtacttatgcggtacaacaaaatatcaccatcctacgtaaccgtgtcaaccaattaggggttgctgagccattagttcaacgccaaggtgctgaccgcattgttgttgaattaccgggtattcaagatacggctcgtgcgaaagaaatcctaggtgcaacagcaacattagaattccgtttagtgaatactaatgttgatccttccgccttagaaacaggacgcatcccgggtgactcagaagtgaaatacactcgagatggtagaccaaccattctttataaacgtgttgtattgacgggtgaccatattaccgattcaacgtcacaagccgatgagtacggccagcctcaagtaagtatttcacttgatagtgctggtggctctattatgtctaactttaccaaagataacgtcggtaaaccgatggctactctttttgtagagtataaagacagcggtaaacgtgatgaaaacgatcgcgcaattttggtaaaaaatgaagaagttattaacgtggctaatattcaaacccgtttaggtaataacttccgcattactggtatctctaatgcgaatgaagcacgtcaattatctctgttattacgtgctggagcattgattgcacctattcaaatcgttgaagagagaaccattgggccaacattaggtcttcagaacataactcaaggtttagaagcttgtttatggggtctgatagcctctgttgcctttatgattatttattatcgtaaatttggtgtgatcgcgagtacggcgctattagcaaacttggtgttaattgtgggggtcatgtcattattacccggtgcaacgttaaccatgcctggtattgcgggtattgtcttaacccttgcggttgcggtcgatgctaacgtactgatcaacgagcgtattaaagaagagttacgtaatggtcgctcagtacaacaagctatccatgaaggttataaaggtgccttctccagtattattgatgcgaacttaaccacgttaattactgccgtgatcctttatgcagtcggtactggctccattaaagggtttgctatcacaactgctatcggggttgcgacatccatgtttaccgctattgtgggtacacgtgcgattgtaaacctgctgtatggcggtaaacgcatcaagaaactgtctatttaa

SEQ ID NO: 295160 - DNA, 969 bp, Proteus mirabilis
gtggcacaggattatactgttgaacaattaaaccatggtcgtaaagtcattgactttatgcgttgggacaacgtcgcctttactatttcgtttctgcttttggtagcatctattgctatcatttccgtgaaaggatttaactggggattagattttactggaggaacggttattgagatcaatctcagtcaaccggccgatctagataaaatgcgtgatagcttggcagccgccggctataaagatcctctgttacaaaactttggtagcagccgcgatattatggtgcgtatgcctcctgttgaaggacaggctggtcaagaattaggtaagaaagtcatcgatattatcaatgttgaaattgataatgatgcaacagtcaaacgtattgaatttgttgggccaagtgtcgggagtgaattggctcaaacaggggcaatggcgttactttctgcacttatctgtattctgatctatgttggattccgttttgagtggcgtctagcattaggggctgttatttcacttgcccatgacgtggtgatcactttgggtattttatcactcttccaaattgaagttgatttaaccattgtggcgtcattgatgtctgttatcggttattccttgaacgatagtatcgtggtatcagatcgtattcgtgagaatttccgtaaaattcgtcgtggtacctcttatgagatcatgaacgtttcattaacacagacattaagccgtaccatcatgacatcagcaacaacattattagttgtgttgatgctctatatctttggtggttcaatgcttaaaggcttctctttagtgatgttaatcggtgtttcattcggtactgtttcatctatttatgtggcttctgcattagcactgaaaatgggcatgaaacgcgaacacctgattgttcaaaaagtggaaaaagagggtgcagatcagacaacactcttaccttaa

SEQ ID NO: 295161 - DNA, 450 bp, Proteus mirabilis
atgcattgtccattttgcacagccgtagataccaaagtaattgattcgagacttgttggtgatggctcacaagtgcgccgtcgtcgtcaatgccttgtttgccatgagcgctttactacctttgaagtcgcagagcttgtgatgcctcgtgttgtgaaaagtgatgaaatccgtgagccttttgatgaagaaaagctacgtagaggaatgctcaaagcattagaaaaacgccctgtgagttctgatgatgttgaagctgctattaatcatatcaaatcacaattaagggcaacgggcgaaagagagataccttccaaacagatcggtaattttgttatggaacaactaaagaaactggataaagttgcttatatccgttttgcttcggtttatcgcagttttgaagatgtgcgcgattttggcgaagaaattgcaaaattacaagattaa

SEQ ID NO: 295162 - DNA, 1158 bp, Proteus mirabilis
atgatgacaattaacaacagcaacaatcttacgggcaatgagccggctaatgatgaaacctatatgcgtcgagcgatagagttagctgcattaggacgttttacaacatcacctaacccaaatgtgggatgcgtgattgtgaaagaagggaagattataggtgaaggttatcaccatcatgcaggtggtccacatgccgaagtgaatgcattaaatatggcgggtgaaaatgccaaaggtgctactgtctatgttacgcttgagccatgtagccactttggtaaaacgcctccttgtgctgatgctttaatcaacgccggggtaaaacgtgttgttgctgcaatgcaagatcccaatcctcaagtggcaggacgtggtttacataaattagtcgctgcaggtattgatgtttctcatggcgtattaatgcaagaagctgaaaaattgaatatcggcttttttaaacgtatgagaacagggtttccttatatccaattaaaactggccgcctctttagacggtaaaacggcattagcatcaggggaaagtcaatggataacctctaacgcttcgcgacaagatgtgcaaaactttcgcgcgcaagctagtgctattttaacaacgagtgccactgttttagccgatgatcctgcaatgaatgtgcgttgggaagcattatccgatgagataaaagcgatttatccactagagtcattgcgccagcctattcgcattattaccgatagccaaaatagggtaactcccgactataaaattacacaacttgcaggtgagtgcttgcttgctcggactcactctcagcaagaagcttggcaaggtgatgtctcagaaattttgcttcctactaatggcaaaaatagtagtgtcgatttagtgttattaatgatgcagttaggtaaacgcaatattaatagtgtatgggttgagagtggcgcacattttgctggcgcactattagagcttggtcttgttgatgagcttatcatttatattgctccgaaaattttaggcaatgatgctcgaggtttattatccatttcaccactgtcgtcattatctgaagctcctgaatttacaatagattctcttcaacaaatcggccctgatatccgcgtttgtttaaaacctcgttattaa

SEQ ID NO: 295163 - DNA, 471 bp, Proteus mirabilis
atgaacgtaatcaaaggtgttgtcgcggcgccaaacgcacgtgtagcgattgcaattgcccgttttaataattttattaatgatagcttgttagaaggtgccgttgatgcacttgagcgtatcggacaagtttcctcagaaaatattaccgtcgtttgggttcctggtgcttatgagttgccattaactgtaaaagcattagtagaaagcgacaaatatgatgccgttatcgcgttaggcactgttatccgtggtggaaccgcacattttgaatacgttgctggcgaatgcagctctggcctttctcatgttgcaatgcaaagtgagatccctgtgacttttggtgtattaaccactgaaagcattgagcaggcaattgaacgagctggtactaaagcgggcaataaaggtgctgaagctgcaatgacagcacttgaaatgatcaatgtacttaaagccattaaaggctaa

SEQ ID NO: 295164 - DNA, 414 bp, Proteus mirabilis
gtgaaacctgctgctcgtcgtcgtgctcgtgagtgtgctgtacaagctatctactcatggcaattatccggaaatgacatcgcggatgtggaattggagtttttatccgagcaggatacccaaggtgtagatattgcttatttccgtgagcttttagtgggtgttgcaatcaatgcagcacgtttagataaggcgatggagccttatttatcacgtcaactggaagagttaggccaagttgaaaaagcgattttacgtttagctatgtttgaactcagcttccgtgaagatgttccttataaagtagccattaacgaagcgattgaattggctaaggtgtttggtgctgatgacagccataaatttgtcaatggcgtgttggataaagctgcaccaactgtacgtaaaaaataa

SEQ ID NO: 295165 - DNA, 981 bp, Proteus mirabilis
atgccttgtggtgaattctccctcattaaacaatatttcacttctcagccagttaaacgcaaagatgtgagtacgggaattggggatgactgtgcaatattgactgtacctgaaaagcaacaagtggcaattagtactgataccttagtcagtggaatacacttcctgccaaccatttcccctgaagatttagcgtataaagcattagcggttaatattagtgatttagccgcggtgggggcagatcctgcttgggcctcattagctttaacattgccaaaagtcgataatgattggcttgaggcctttagtcgctctctatttgcattagcagagtattattctattcaattgattggtggggatacaaccaaagggccattgagcttaaccatcacaatacaaggtttagttcctcaaggtatggcactattacgctcaggggcaaaaattggtgactggatttatgttacaggctttttaggtgatagcgcggcaggactcgcggttttacaaaatagattacaacctagtcaaccagaaagccgagactattttattactaggcatttgcgtccgcagcctcgtcttttacaggggcaagcattaagatctttagcaagtgctgctattgatatttctgatggtcttatttcagatctaaaccatattttaacggcaagtggttgtggtgctcgtattaacttagatgcgttgccttattctgcggcaatgaaatcacaggtgagtaaagagcaagctgaaatttgggcattaagtggtggcgaagactatgaactatgctttaccgtgcctgaaataaatcgtggggctttagatattgctttagcccatacgggagctgactttcattgcatagggcaaattatgccaattgcagaaggtatacgttatttacgtgaaggtaaagaagtgcaccctaatctgaaagggtttgatcactttggtgataataaataa

SEQ ID NO: 295166 - DNA, 336 bp, Proteus mirabilis
atgtcattaccttcttgtcctaaatgcaactcagagtatacctatgaagatggggcaatgtatgtctgccctgaatgtgcccacgaatggaacgatgctgagccaacaactgatagcgatgagctgattgttaaagatgcccatggtaatttattagccgatggggattcagtgacagtcattaaagatctaaaagtaaaaggtagctcaacgccactcaaaattggtacaaaagttaaagggatacgtttagtggaaggcgatcataatattgattgtaaaattgatggctttggacaaatgaaattaaaatctgaatttgtgaagaaaagctaa

SEQ ID NO: 295167 - DNA, 243 bp, Proteus mirabilis
atgatccagtatggcaaagtatttatgagcaatagaacacaaaatgttcgattacccgctgagactcgatttccggatgatgtaaaagaagtttttgttcgcgtcaaaggcaaagagagaataatcacacctatacaaaatgcatgggatagctttttcttatcagaaaagtctgtaacagatgatttcttatctgaaaggcctgatcaagccacaagtgaaagaggatcctttgatgattaa

SEQ ID NO: 295168 - DNA, 999 bp, Proteus mirabilis
atgaaagatgtcgcccgtttagcgggtgtttcaacatccaccgtttcccatgttatcaataacaatcgttatgtgagtgaaggtatccgcgcaaaggttaatcatgcaatagcaaccttaaattacgccccttcagcattagctcgtagtttaaaaatgaactgcacacgtaccatagggatgttagttaccgccagtaataaccccttttatgctgaagtcgttcgaggtgttgaacgaagttgctatgaacaaggctatagcctcattttatgcaacaccgaaggcgactatgagcgcatggatactagccttgaaaccttgctacaaaagcgtgtcgatgggctgttattaatgtgtactgaagcccgcgcaccatcaagtgaagtattaaatcgttatccacggttacccatggtgatgatggattggtctccatttgaatacagtagcgatattattcaagataactccctattagggggagaattagccacgaattatttaattgaaaaaggttttactgacatcgcctgtattgcgggtccccaagataaacttcccgctaaacatcgcctacaaggctactataatgcgatgcaacaagctgggttacccattcgtaaagagctggttttaaccagtgattttgagtttgcaggtggctttagtgcaatgcaaacactgctctcactccctatacaaccacaggccgtatttacctgtaatgatgcaatggcggtcggtgcttaccaagcgatttatcaaaaaggactacgtgtacctgatgatatttctatcgtcggttatgatgacatcgatttagcctcttatatgatcccccctttaacgactattcatcaacccaaagatgaattgggcaaacttgctgtaagccaattattacgtcgtatggaagatattgaagcacaagccaatctattagtgttaacacccaaactgattgaacgaggctcggtgatagctcataggaaataa

SEQ ID NO: 295169 - DNA, 927 bp, Proteus mirabilis
atgacaactccccgccttgctgttttaggtagcatcaatgttgaccatattatgaatattgcacaatttcccaagcccggagaaaccgtgattggtcatgactataaaatagcatttggtggtaaaggggcaaatcaagccgtcgcttgtggacgtagtggtgccgatatcacgtttatagcctgtgtgggagatgatgctattggtcgcgaaatcatcgctcaattaaaaacagataatattgatactgatgcaattcgtattattcccaagacacctacaggtgtagcaatgatcctagttaatgaacaaggcgaaaatgtcattagcattgttgccggagcaaatagtgctctcactccaagccatttgcatcagtatcgtcatattattgaacaagcagatgctttattaatgcaattagaatcccctctagacactgtctttgaggcagcaaaacaagccaaagcacatcaaacaaaagtgattttaaatcccgctcctgcacagccgttatctgatgaatttctgagttttattgatattattacgccaaatgagacagaagccgaaatattaaccggtatttctgtgcatgatgaagtgggtgcagctaaagcggctaatattttgcacagtaaaggcataaaacacgttttaatcactttaggcagtcgtggcgtatggtttagtgaacaaggcaccggtatgatcattcccggttttcgtgttgaagcagttgatactattgccgcaggtgatacctttaacggtgcatttgttacagcgatattagaaggtaaatcagctcatgatgcgatccgtttcgcccatgcagccgcggcaattgcagtgacacgtcatggcgcgcaatcctccgtcccttggcgtgatgaaattaagtcatttttagcagagcgagcataa

SEQ ID NO: 295170 - DNA, 891 bp, Proteus mirabilis
atgaaactaaaaaaaatagcaacgcttctctcagtggttgctctaagcgctaccataagtgccaatgcattagcaaaagagtctatcgccctcgttatttcaacgctcaataatcctttctttgtcaccatgaaagacagtgcacaaaaagaggcggataaattaggttatgacttagtcgtacttgattcaatggataatccagccaaagaattggcaaatgtgcaggacttaaccgtaaaaggcacccgtttaatgctcattaatccaacggattctgatgctgtaggtaatgccgtgttaatggcaaataaagctaaaattcctgtagtaaccctagatagagtagccaataaaggtgaggttgttagccatgttgcttctgataaccgcctaggaggaaaaatggcgggagattatattgcggaaaaagtgggtaatgatgccaaagtgatccaactagaagggatcgccggaacctccgcttctcgtgagcgtggagaaggctttaaacaagctgttgatgctcacaaacttaatatattagcaagccaacctgctgactttgaccgtactaaaggccttaatgttatgcaaaatctattaaccgctaatccttcagtgcaagcggtatttgctcaaaacgatgaaatggcattaggggcattgcgtgcattacaaacagcaggtcgtaccgatgtcttagtcgttggctttgatggcacaaatgatggcattaaagcggttaaccgaggtgttttaggtgcgactattgcacaacgccccgatcaaattggtattattggtattcaaaccgctgataaaattctgaaaggggaaaaagtggctcccactattcctgttgagcttgaattagtcactcaaaaataa

SEQ ID NO: 295171 - DNA, 966 bp, Proteus mirabilis
atgagtacaaaatcaataccagcgtcaaaacgatggttctctaaggcttggttattagaacaaaaatcactcattgccttattgttgcttattgccgtggtttcaacactcagcccgaatttttttaccttaaataatatttttaacattctacaacaaacctctgttaacgcaattatggctgtaggtatgacattagtcattttaacctctggtatcgatttatcggtaggttcattactcgctttaaccggtgctgttgctgcttctatggtaggggctgatgttaatgcgttagtggctgttgtcggtgctttagcattaggagccgctattggtggcgttacaggtgtcattatcgctaaaggtaaagtgcaggcatttattgccacattagtgatgatgctgttattgcgtggtgtcacgcgtgtttatactgatggcagtccaataaatacaggatttagcgataatgccgacctgtttagctggtttggtattggacgcccctttgggatccccacccctatttggctgatgatgattgtctttttaagcgcgtggtatgtattgcatcacacacgcttgggtcgctatatctatgcccttggaggaaacgaagcagcaacccgtttatctggtattagtgtcgataaaatcaaaattattgtttatgcgctttgcggtttattagcggcccttgccagtgtcattgaagttgctcgtctttcttccgcccaaccaatggctggcaatggttatgaactggatgctatcgccgctgtcgtcttaggtggtaccagtcttgctggcggtaaaggacgcataatgggcacacttattggtgcgttaattttaggctttctcaataatgcactcaatttattaggcatatcatccaattatcaaatgatagtcaaagctgttgtcatcttacttgccgtgctggttgataacaaaaaataa

SEQ ID NO: 295172 - DNA, 1509 bp, Proteus mirabilis
atggaagcattacttgaattaaaaaatattgataaatcatttccaggcgtaaaagcattatctggtgcgacgttacgaatttatcctggccgagtgatggcacttgttggtgaaaatggcgcaggtaaatccacactaatgaaagtgctaacaggtatctaccaaaaagacgcaggtgaaattatttatcaaggggaacgttgctcttttaatggtcctaagtcttctcaagaagccggaataggtattatccatcaagaactcaatcttatccctgaattaaccattgcagaaaatatctttttaggtcgcgagtttacccgtgcatttggtgccattgattggaaaaaaatgtatgcagaagcggataaattacttgctcgcttaaaccttccttatcgcagtcatcgcttagtttctgaattatccattggtgatcagcaaatggttgaaattgccaaagtactcagttttggctctaaagtgattattatggatgaaccgacagatgcattgacagacaccgaaactcgctctctgtttagtgtgataactgaattaagaaatcaaggttgtggcattgtctatatctcacatcgattaaaagaaatttttgatatttgtgatgatgtaactgtgttgcgcgatggtcaatttattggcgaaaagcccgtttcttcattacaagaagagactcttattgaaatgatggtaggccgtaaattagaagatcaataccctcgcatccatattcctgcaggaaaaactaaacttaatgtctctcacttaagtggtgcagatatacatgatgtcagcttctccttatatgaaaatgaaattttaggtatttcagggttaatgggcgcaggccgtactgaattaatgaaaatgatttacggtgcattgccaaaaacacaaggtagcgtggcgttagaaggtaaaatttgtcagatcaaaaagcctgcagatgcacttgcccaaggtattgtttatatctctgaagacagaaaacgcgatggtttagtgctaggtatgtcagtaaaagagaatatgtcactgacggcgctaccttattttagtcgcactatggggatcttaaatcataaagaagagcaattaactgtcagtgactttattaaattgttcaacataaaaaccccgtccatcaatcagatcattggttttttatcaggcggtaatcagcaaaaagtcgctattgctcgcggactaatgactcgtcctaaagtgcttattcttgatgagcctacccgcggtgtcgatgtgggggcgaaaaaagagatttaccaattaattaataagtttaaacaagagggattaagcatcattttgatctcttcagaaatgccagaggtaatgggaatgagtgaccgcattttagttatgcatgaaggtcgtatcagcggtgagttttctgccaataatgtcacacaagagatgctaatggcggcggctgttggtaaacaatatgctgctacagtaggagtttga

SEQ ID NO: 295173 - DNA, 420 bp, Proteus mirabilis
atgaaaaaaggtgtattacttaatagttcaatttctagcgtaattgcacgtttaggacatactgacaaaataacgattgcagatgctggattacccataccctcctctgttgagcgtatcgatcttgctttaactcaggggatccctgactttatgtcagtgttacaaacgatcacccatgaaatgcaagtcgaagccgttatgcttgccatagaaattaaaaatataaacccacttctttttagtgagataacccgttatttgcatttattagaacaacaacaaaaaaaacctatcgagatcatttatgtcactcatgaagaatttaaaacacaacttccagataataaagcggtgataagaacaggtgaatgctctccttatgccaatatcgtgctgttttctggtgtgactttctga

SEQ ID NO: 295174 - DNA, 1875 bp, Proteus mirabilis
atgagcattgatatcgaaaaatatcccacattggcgttggttgaaacacccgaagatttacgcctattaccaaaagagagtttacctaaactctgtgatgagctaaggctatatcttcttaacagtgtcagccgctcaagtggtcacttcgcctcaggtttaggtgctattgagttaacggttgcgcttcattacgtttataaaactccctttgacaatctgatttgggatgtgggccatcaggcttatcctcataaaatattaacgggtcgtcgtgatcgcattgatactattcgtcaaaaaaacggcttacatcccttcccttggcgtgatgagagtgaatatgacaaactctgtgttggtcattcatccacctctatcagtgctggactgggtatggctgttgctgcagagcaagaaaacctaggcagaaagactgtttgtgtgattggtgacggtgcaattactgcaggaatggcatttgaagccatgaatcatgccggtgatattaatccagatatgctagtggtacttaacgataatgaaatgtcgatttcagaaaatgtcggggcactaaataaccaccttgcacaacttctatctggcaaactgtataccacgctacgtgaaggtggcaaaaaagtcttttctggtattcccccaattaaagaattactgaaaaagacagaagaacatattaaaggcatggttgtgcccggcaccatgtttgaagagttaggttttaactatattggtccagttgatggtcacgatgttattgctttagtacaaacgctcacgaatatgcgcgatctaaaagggccgcaacttttacatattatgaccaaaaaaggtcggggttacgctcccgcagagcaagatccaatcagttggcatgcggtacctaaatttgatccgaagaccggtactttacctaaaagcccgaatgcacgcccgacgttttcaaaaatttttggggactggttatgtgaagaagccgccactgatgaaaaattaatggcaatcacccctgctatgcgtgaaggctctggtatggtgcgcttttctaaagagtaccccgcacaatactttgatgtcgcaattgcggagcaacacgccgtcaccttcgctgctggattagccattggtggttataagccgatcgtggctatttactctaccttcttacaacgcgcttatgatcaagtgatccacgatgtggctatccaaaaactcccggtactctttgctatcgatcgtggtggcattgttggtgcggatggtcagacccaccaaggagcttttgatctctctttcttacgctgtatccctaatatgattattatggcacctagcgatgaaaatgagtgtcgccaaatgttgcacacaggttaccattatcaagaagggcctgtcgctgtacgttatcctagaggatcaggggttggtgcgccattacaaccgctgagcgaacttcctataggaaaaggtattattcgtcgccaaggtaaaagtattgcaattttaaacttcggaaccttattacccgaagccttagatgttgcagaaaaactggatgcaacagttgcagacatgcgctttatcaaaccactagataaagaactgatcctttctcttgccaaacaacacgacatactggtcaccttagaagaaaatgccattatgggtggcgcaggtagcggcgttaacgagttattaatgcaagagcgttgtttagtgcccgtactcaatttagggttacctgatctttttgtgccacaaggtggacaagaagagatcagagccgatttaggacttgatgcaacaggcattgaaaaatcgattaaagcttatcaggctcattctttgagctaa

SEQ ID NO: 295175 - DNA, 924 bp, Proteus mirabilis
ttgagtaacgcaactttatgtacggatgcgttccgtcaaaaattacattctgcacatcagcgtgttgatgaagcactcaaccaagcgctacaaacgttgcctttttctgatatgccactcagccaagcaatgcgctacggagcactcttgggggggaaacgtttacgcccatttctcgtttatgcggtaggagaaatgtttaacgtacctgttgctaatcttgatgtgccagcagccgctattgagtgcattcatgcatattcactgatccatgacgacttaccggcaatggacaatgatgatttacgtcgaggaaaacccacttgtcatattgagtttggcgaagccaatgccattttagcgggtgatgcattacaaaccttggcctttgaaattttagccaaaaatgcgatgcctgatgtcgccattgccgatcgcgtagccatgattgctgaattagccacagccagtggtttagcgggtatgtgtggtggacaggcacttgatcttgatgccgaagataaatcaattgatcttgtcgctcttgagaaaattcatttacataaaacaggtgcattaattcgtgcagcggttcgcctaggggcacttagcgcagggcaaaaagggcacgatgtgttacctgcactggataaatatgcccactctataggcttggctttccaagttcaggatgacattttagatgttattgggagcactgaagagactggaaagcgacagggaagtgatcaagaagctggaaaaagtacttatccggctctacttggtttagcacaagcacaaaagaaagcacaggaattgtataacgaagcattggatgccttagcgtttcttgaacaatacgagtacgatacctctacgctaaaacaattagcgaattttatcgtagaacggaaaaactaa

SEQ ID NO: 295176 - DNA, 264 bp, Proteus mirabilis
atggctaaaaaaacgacatcaattaaccaagacaccacgcaaactccaagttttgaagcttcgatgcaagaacttgagcaaatagttaaccgcttagaatcaggtgaattacctttagaagaggcccttaatgagttcgaacatggtgttcgtttagctcgtgtgggacaaaaaacattacaagatgctgaacaacgtgttcgcatcttactcaaagaggatgatgacgctacacctgatgattttatccaagaggctgaataa

SEQ ID NO: 295177 - DNA, 1452 bp, Proteus mirabilis
atgaagtttattattaaattattccccgaaatcacgatcaaaagccaatctgttcgtatacgttttatcaaaattctgaccagtaatattcgcaatgtattaagtacattaggtgatgatatcacggttgttcgccactgggacaacattgtggttgtcagtaaagacgaaagtaaaagcgaagcggtgtgtgatgcgctaactcgtatcccaggtattcatcactttttacaagttgaagagcatagctataccgatttacataatatttttgaacagacctttgctgcctttggtcatttagttgaaaacaaaacgttttgcgtaagagctaaacgccgtggtaaacacagttttacttctaatgaagtagagcgttatgtgggtggtggttttaaccaacacgttgaaagtgcaaaagtaaaattaactcgtccggatgtgaccattaatctagaaattgaagatgataagctgatcctagttaatgctcgctatgaaggtattggtggtttccctattggtacacaagaagatgtattatcacttatctctggtggttatgattctggtgtatcaagttatatgttgatgcgccgcggtagtcgtgttcattactgcttttttaatcttggtggttcagcccacgaaattggcgttaaacaagttgcacattatctttggaaccgctttggacgctctcataaagtacattttgttgccgttgattttgaacccgttgtggcagaaattttagagaaaattgatgatggccagatgggggttgttctgaaacgtatgatggtgcgtgcggcatctcgtgttgctgagcgttatggcgtacaagctattgtaacaggtgaagcattagggcaggtttctagccaaacattaaccaatctacgtttaattgataatgcgacggataccttaattctgcgtcctcttatcacacacgataaagaaaatatcattaatatcgctcgccaaattggtacggaagattttgctcgtactatgccagagttttgtggtgttatctccaagaatcctacagtaaaagcggttaaagccaaaatcgaagctgaagaagaaaaatttgatttttctattctcgatagtgttgttgaaaatgctaagaatatggatattcgccgtattgctgaagagacggtacagcaagtaacagaagttgaaatggtctctgagtttgcaacgaatgacgttgtactggatatccgctctccagaagaacaagaaaactcacctctaaaattagagggtgtagatgttaaagaattaccattttataaattaagtacacaatttggtgatttagataacagcaaaacttatttgctctattgtgagcgaggtatgatgagtcgtttacaagcactatatttacgtgaacaaggctttaataacgtaaaagtgtatcgtaagaagtaa

SEQ ID NO: 295178 - DNA, 630 bp, Proteus mirabilis
atgtctgatacacatcatcgtcctatattagatattggactatcaagactagagtttctgcgaatatccggtaaagggctggcagggatcaccatagcacccgcactactttctcttttaggttgtaagcaagaagaaatagacagtggcgttattcaactgacaaccacacctaaaggtgtattagtgactaatcgtgcccgttgcactggctgtcatcgttgtgaaacagcatgtacaacatggaatgatggtagcgttggctctttcttctcccgtactaaaatccatcgtcatttctattttggtgataaaggcattggctctggagggggcttatatggcgacttaaactttaccactgatacttgtcgccaatgcaaaacacccgagtgtatgaacgtctgcccagtaaaagctatccgttatcaagaagagtttggctgtattgtcgttgatactcgtcgttgtatcggctgtgccgcttgtacaacagcttgcccgtggatgatggcaaccgtcaatccacaaacgaaaaaatccggtaaatgtaatttatgtggtgaatgcgcctcagcatgcccaacaggggcattacacattattgaatggaaagaaattaccgtttga

SEQ ID NO: 295179 - DNA, 2103 bp, Proteus mirabilis
atgattaacggctggactggcaatatactaagaattaatttaactaccggtgccatctctcgcgaaagctcaagccaatacaaatccttaattggtggtatgggctttggctacaaaattatgtatgaagaagttgcacccggtgtaaaaccttttgatgaagaaaacaaagtggtatttgcggtaggcccgctaacaggatcaggcgcaccctgtagctctcgcgtcaatatcacctctctttcaacctttactcgcggtaatttagtggttgatgcccatatgggaggcttttttgccgcatggatgaaatttgccggctatgatgcgttgatcattgaaggtcaagcagataaacccgtgtggatccatattgatgatgaccaagtttccattgaagatgcctcttttttatggggaaaaggaactcgtcaaacaacagaagaactttgtgctcaaacaagccctgaagcgtgtgttgctgctattggccctgcaggtgaaaaccttgtccctctttcaggacttatcaatagtcgtaaccacagtggtggtgctggaattggtgccgtacttggtgctaaaaaattaaaagcgattgtggttgaaggaagccgtggcgttaatgttgccgatcgtaaagcgttaaaagagcttaacgactatatgatgacacaactcattggcgcaaataataatcacgtcgtaccaagtaccccgcaatcttgggcagagtattcacatccgggttcacgctggactgcacgtaaagggctttattggggagcggctgaaggtggccccattgaaacaggggagatcccaccgggcaatgccaatactgtcggctttagaaccatgaaatcaaccttcgatcttggcccagaagcagaacaatacacggtaaaaatggggggatgccactcatgccctattcgctgtatgtcacaacttaatgtcccgcaagcaaaaaaatttggcgtacctcaaacaggcggaaacacttgtgtcgccaactttgttcataccaccattttccctaatggcccgaaagatattgagaaaaaaggcgatgccaatgttgttggtaatcttgtcggcctcaatatttttgatgatatgggcttatggtgcaactacggtcagcttcatcgtgactttacttattgctatacccacggagtttttaaacgcgttctttctgaagaagagtataacgatattccttgggataaacttgaagaaggtgatcccgcatttatcaaagatttctattaccgcttagcccatcgtaaaggtgaatttagtcaccttgctgatggctcttatttaattgcacaacgctggaatttaggtgaggaatattggggtaataagaaaaataaactttggtcaccgatgggtttccctattcaccatgcaaatgaagcttctgctcaagtaggctccatcgtcaactgtatgtttaaccgtgatgcgatgacacatactcatatcaactatatcggtagtggtttaccgctaaaattacaaaaagagattgcaggtgaactatttggctctggtgatgcttttgatgaaaccaaaaactacacgccgattaataaagcaaaaattgcctataccaaatggaccattttgcgtagttgcctacatgatgccgtgacattatgtaactgggtatggccaatgaccgtatcacctcataaaagccgcaactatcgtggcgatttagatatggaagcaaaatttttcactgccattaccggtgaaccaaccacttctcaagatcttgatttagcctcagaacgcatcttcactttacatcgtgcttacacggttaagttaatgaacacaatggatatgcgtaatgagcatgaccaaatctgttcatgggtatttgataaagatcctgatattcctgtctttacggaagggacagacaaaatggatagagaagatatgcaactctctctcaccctattttatgaagaaatgggctgggatccacaattaggctgtccaacaaaagcaactttagtacgccttggattacaagatgttgctgacgatttagcatcacgtggcttattacccaattaa

SEQ ID NO: 295180 - DNA, 714 bp, Proteus mirabilis
atgaataaacagaatgcatcagcctctataccacctgatattgctcatgatgctgatattactttagaacaaccggatatttctcttcgtcgttggctattgccgttatcagagagaggtattgggcatggtactcacaccttaacggatactacagaagaacaaattgaagatatcgcgcaattatcggctgaacaacacctagccaatgcaatccgtcaatgttcaaaagaaggtgaactattagctatttccacgctgtatgatgcgccttattcactctctgaagaagaggtaatgcaattaagagtcgcgttgaaagaggacgctttcgttgatattacttatttaacacataatggtgaggattatttctattctgacactgttatgtcagataactatgcacaattacagcttctcaatagatataccgatatttgtactgccattgcaggtttagttcgctttgaatgcgaaacctaccctcgaccattgaagcaaagcatgttgatgttggagcctttttattacaccgctgcagaaatagacgatgcattgacgctgatgaaaactcaccctgattttcaagatattcagcaaatattcgcctctaacaatgccccttacctatttagtagcaccctaatgagttatggcaaggcgagaggattaacagaatggctggaggtagaacaatatgaaaatccttag

SEQ ID NO: 295181 - DNA, 672 bp, Proteus mirabilis
atgcgtgtttctcgccgtaaatttgtagcaggtataggttctgtgatctttttcagtgcgccactggggagtgccttagcggcagccacagataaaaaaccgatacgctatgccatgatccatgacgaaacacgctgtaatggctgtaatatttgtgccacagcgtgccgtcgattaaataaagtaccaaccggaatggcgcgaatggatattgcacacattccattaagcttaaaagaagataacgataagtaccatttttttagacactcatgtcagcagtgtgaagatgctccttgtatctcggtttgtcctacgggcgcatcttggcgcgatgaaagcaatggtattgttcgcgttaataaagagaaatgtattggctgtagttattgcatatcagcctgtccttaccaagttcgttatcttaatcccgtaacacatgttgctgataaatgtgacttttgtcttgagtctcgattacaaaaagggttcccaccgatttgtgtcagcgcttgcccacaaaacgccctactctttggtagagaagatagcccacaaattcagcaatggctaaaaacacatgactactatctctatcaacttgatggagtaggaaaaccgcatctttatcgacgtgttggacctcatgtacaagggggagataacgtatga

SEQ ID NO: 295182 - DNA, 798 bp, Proteus mirabilis
atgagtgcaataaatatcatgccaaatgcagcacaatttcaagcctcactcaaacagtatgtcttaatctatacaccggactatttaccactttggttaattgttgccggcgtattatttgtcggcatgctacttgtactcgcacttcatggttttttacgttaccgctttgccacaccccatggagagcatcatcaagaagagaaactctatctttactcaaaagcggtacgtttatggcattggagtaatgcaactttatttatcttactccttctcagtggcgggattaaccatttcgccctactctcggcacatgacacggcgttactcgtcaatgtgcatgaaatttgtggttatctactcttagtatgctggttgtcctttgtattaattaatcttgttggtggcaatggtaaattttaccgtattgacagtaaaaactggttgcaacgagtattaatgcaaacgcgtttttatctttacggcattattaaaggggaagatcatccttttccagccactcccaaggttaaatttaatccactgcaacaaatggcttatttaggtgtgatgtatgcattagtaccattacttttaatcactgggatcttactgcaaaatcccatgtttatccctgctgatgctgtgctatttaaagcttggttattaataattcaccaaatactagccgtgtgtagtgtcttttttatctttggtcacctttacctgtgtaccaccggaagaacgccattccaaacctttcgcagtatggttgacggctaccatagacactaa

SEQ ID NO: 295183 - DNA, 969 bp, Proteus mirabilis
atgtcagtcccttcacaggaaaatatcacactaaccaaagaagacttacgccaactgcatgtttcaagttcactttatcgttggtttttgcgttattttccccatggaggtacttaccgtgctatccataatgaattgataaaacaacgtcaaacacaatggatagaaagcttaattcaatatatttatctgcgtcattttagtcagtcctcttttgccaaacaggaacaagaagtgatagaaaacatcttgtccctgttaggcaatgaaaaacaaaccggtgtgacattacaacgtttaccctatcaccaaccgcaatctagcgacgaaaacatccagttttctaccgaatggcatcaactgattgtcaaaagccaacaatttaacaccgcccttgcattatgtggtcgtgataatattgtcgccttatccggtgatgaaaacagtattgctaacactggttatagtaaccaattaatcaacagcggatttgctggaaagatcagtaatacggcagatcaatgtcgtattggtagcttaggaggacgctctcgtatttgtaatagtggcaacgatgttaaaatttacgcttctggccaaggggcgcatattgccaatagtggcataagaaactttattaatgcgactcaatcccgtacaaaagtcaccaatactggtgatttagcacatattactgttactggcgataacgccattgctatcaacacaggtgataactgcacactctctgtatctggggataacagcgtgtgtatctcaacagggcatcttcagcaattttgcttaggaaaaggcggtagcgctgtgattgcctatcacgatggaaaacgtacccgctttaacgttttctatgaaggtgaagataatattgaggccggcattcactactacttagatgaaaaacagcgccctgttgcaatggataatattactgaactcaataattaa

SEQ ID NO: 295184 - DNA, 483 bp, Proteus mirabilis
atggcttttaaatataaaataacaataatcatatttttgctatcttttattttttttgtagtgtatgagttttttattcccgttaaagttatgggagtacataaagatacgtataccacctctattctggttgaggattttccgataactgattatggaaaaataatatggtggaaaaacaatcaagatgttttagataaaaagtatgatttatttaagaataaaaatagtttatttttgatttctatatggaattacggtgatggatatttagaagaaggaaaatacgatcgattatgttttactgaaattaaaagtaacaaaaaatgtatagaaaaagataaagtgatgtcaataatgtattctttaaatgaagaggaaattaggatcggtaattctgcatatattaaagataaaaatggttcttttataaagaaagacaaggatgctaatacaactatcacagtagtccctaatgcataa

SEQ ID NO: 295185 - DNA, 852 bp, Proteus mirabilis
atgtcagcgataattactccattggttatataccaaactcaaagacgtatggatgattacagtgcagatgatatgcgttacggagatttgagtggagatcagctacgaaatcaatttaatttgcgtgatgtttcaatgagagtaaatccatacactttccaaacaatagaaaatgatggattttttaataaagtctatgatgcgaataatcataacatagtgatatcaaaaataggaaaagctgaatgtgcacaaatcttgtttgatgaatttcgccatttatcatcaatgtttgccttccgtagtccttatgcgatccttattaataaaatgataactcatatgcaatttaatgatggcgcaccttataatgatcctttattaaacgatgctatcagagagcaaattttagaagatgattctgataatagttcattactgaaaataagagacgtttttaataaatctattaattggaatactcgaagtataaaagaccgtattgatattcacttggtgctaaaaagttatataggcgatagcgtgcttcctaaattcgatcgtcttgaggatagagtgaatggattggggattaccgtacatgacacttggtcaacgaccattactttacaaaagctagaaatttacaatgattattgtgatgcaattattcattataaaattcaagatcattttggtttagatagtaatgatattatgtctgctctttatcataatttcagattttttagaatttggtttgtattacagcgatatgacaaattaggctttaaaccgtttatgaccaatatggaagcaactattaatataaaaattcggagtccaaaataa

SEQ ID NO: 295186 - DNA, 294 bp, Proteus mirabilis
atgaaactctcattacttaccgatattgatgttagtcgagcttttgctactcatttacgaaaacgacgagaaaaagaaaaatggtctcgggaacatcttgccgagcgcagtaccgtccctgcatcaacaattaaaaaatttgagttacaaggcaaaatttcattacgacaactactgttactttggcagtgtcttgatgatttaaataacctttatgccgttgttgaccctaaaaaagccaataagcctcgtataccaagaaccattgaagaggtattacaagatgaattttaa

SEQ ID NO: 295187 - DNA, 1338 bp, Proteus mirabilis
atggcacatcgattaacttccagagacattctggcattaggttttatgacttttgctctatttgttggagcagggaatattatttttcccccgatggtggggttgcaatcaggggagtttgtttggactgcggccattggttttttgctaaccggagttggcttacctgtgctaacagtggtggcattagcgaaagtgggagggggaattgaagcattaagcacccccattggtaaatctatgggacttttattagcaatagtcgcttatcttgctgtcggccctttatttgccacccctcgaaccgcaacggtctcttttaaagttggcattgctcctttagtgggtgatagtgatattgccttacttatttatagtgtcatttactttttaattgttatcggtatttcactgtatccgggaaaattacttgatagtgttggtcacattctggcaccgattaaaattttagccttagctgtattaggtttagctgcgctattttggccagcaggaacgccgatccccgctacacaagcatatcaagatatggcatttacccaaggttttattaatggctatcttaccatggatacgttaggcgcgatggtctttggtattgttattgtcaatgcggcccgctcaagagggattgataattcgtctttattaacacgttatactatgtgggcgggaattatcgcgggggtgttattaacggcgatttatcttagtttatttaagcttggttctgctagcggcagcattattccagaagcaaaagatggcgcagatattttacatgcttatgtgcaacatactttcggtaattttggtagtttctttttagctctgcttattttcttagcttgtatggtgacagcggtaggtttaacttgtgcttgtgcggagttttttagccgctatttgcctatttcttatcgtacattagtattgattttggctgtattttccgcggtagtctctaatcttggtttaagtaaactgattgcgttctccattcctgttctggtgatgatttatcctccttgtattgtgattattctgatgagtttcactttacgtttttggcataatccaagccgcattattgcccctgcaatggcaataagcttattttttggcatttttgatgccattaaagcatctgatcatttaaaacatttattaccggattgggcggctaaattaccattaagtgagcaaggattagcgtggttaattcctgtattagtgactattgttgtatgcgctatttacgataaagtagctggctcacaacataaaaaagtgatccactctgggataaacaaataa

SEQ ID NO: 295188 - DNA, 1293 bp, Proteus mirabilis
gtgttagaacgactctcatggaaagccctcgtgtgggggctatttctattttgtttacctgcctttgtattatcactatttatcggccaccttccttggttgctcgtggtctcattactgagtgccttgatatggcacgcctataatttaatgaaattatctaaatggttatggctcgatagatcggtattacccccagaaggaaaagggggctgggagcctattttttatggtatacgacaaacacagcaacgtaaccgtaaacgccgtcgagaattaggtgatttaattaagcgttttcgtagtggggcggaaagcctacctgatgccgttgtgatgatcactaatgaaggaaatatcttttggtgtaatagtcttgctcagcatcttctaggctttcgttggcctgatgataatggacaaaatatttttaatttattgcgctatcccgattttttacattatttcaccgtcgccgattttagccgccctttaactattgcattaaataatggtgctattgttgaatttcgggtgatgccttatgcggatgatcaacgtttaatggttgctcgcgatgtgaccgagaagaataagttagaaaattcgcgacgtgatttttttgctaatgtgagccatgaattaagaacacctttaacggttattcaaggctatcttgagatgatggaagagaataccgcagaaaacccggctgaacataaagtgattaagaccatgcaagagcaagcaaagcgtatggacttattagtacaacaactgttacagctttcacgtattgaatctgcgcctcatattgatttgaacacggttgtcgatatgcctgcgctattaagcgtgcttgagcatgacgcgcactcattaagccaagaacaacaaaatatcatctttgatattgaccataaatgggctgttcgtggtaatgaagagcaattgcgtagtgctgtatctaaccttgtctataacgccataaatcatacccctgagggtacgactattcgcgtgagttggaaaaaagtaccacaaggtatgttgtttagtgtgtcagataatgggccgggtatcagtgctgaacatttaacgcgcttaaccgaacgtttttatcgtgtagataaagcgcgctcccgccacacaggtggtacagggcttggattggcgattgtcaaaaagtccttacaacatcatcactcaatactgaatattgaaagtaaagtcggtgtaggaagcactttttcttttatcatgccgcaaacattgttaacagaaaaaaaataa

SEQ ID NO: 295189 - DNA, 690 bp, Proteus mirabilis
atggcaaggcgtattcttgttgttgaagatgaaaccgcaattcgagagatgatctgttttgtattagagcaaaatggttttcagcctattgaagctgaggactatgatactgcattgagttttctgattgacccttaccctgatctggttttattagattggatgatccccggaggctcgggtatccaagtgattaaacagatgaagcgtgaaaataatacccgtgatattcctattattatgctaacagcaaaaggggaagaagaagataaagtcaaaggtctcgaaacaggcgcagacgactatgtgattaaacctttttcgcctaaagagctggtggctcgggtaaaggctattttacgacgattgtcaccgatgtcggcagaagatgtgattgaatttaatggattaagtcttgatcctgtttcacatcgagttaccagtcaagataaacccattgatatggggcctaccgaatttaaacttctccacttttttatgacccatcccgaacgtgtatatagccgagagcagttgctaaactatgtttggggcaccaatgtttatgtcgaagatcgtactgtcgatgtacatattcgtcgattgcgtaaagctatagagcaagatggccatgaccgaatgatacaaacggtacgaggaacgggatatcgtttctctgctcgattttga

SEQ ID NO: 295190 - DNA, 1233 bp, Proteus mirabilis
atgcggattattcacacctcagattggcatttaggacaatatttttttacaaaaactcgcgcccaagagcaccaacaatttctcgattggctattagcgcaaatccgtgaacaacaagttgatgcagttattgttgcaggggatatctttgatactggctccccccccagttatgcccgagagctttataatcgatttgtcgttgcaataagagatactcagtgccaactgattattttagggggtaatcatgattctgtggcaacgctaaatgaatctaaatcactgttagcgtgtttaaataccaccgtcattgctaatgttcacactgaaaccccacaagcccctattattctttatcaaaaaaatcacacacctggagcattactttgtgcaatcccctatttacgccctagagatatgataaatagcaaaagtgggcaatcgggagcagacaaacagggcgctttaaaagaagcgatcgcagattattatcaacgccaatatcaagccgcgctcgacttacgaaaacaactcaatgttaacatccctatcattgccacagggcatctgacaacgataggcgccagtgttagcgattcggtacgtgaaatttatatcggcacattagaagcctttaacgcaaccctatttcctccatttgactatatcgcccttggtcatattcatcgcccacagcgcgtcaataaatcgggtcatattcgctacagtggttcacctattccattaagttttgatgaaagtgcacaacagaaaagtgtttgtcttatcgattttgagcaagataagttagcggaaatgacactattacccatccctgagtttcagctattacgcactctttcaggctcgttacaagaaattgccacacaactcgaaaagttagcaacacaatataatgaaatggataccacgatttggctagatattgaagtttcaactcaagattatctcagtgatattcaaacccgtattcaagagctaactcaatcgccactctttgaagtgatcgtattaagaagagcgagaaaacaacgtcaagcactgatgcaaaatgagaaagaaaccctaactgaactgactgtatatgatgtatttgaaaggcgcttagctcaacaccagtttgaaaccgaggaagacaaaacacggttaaccacactctttaagcaagcggttgaaatggcagagcaagaggataacaacgcacgatga

SEQ ID NO: 295191 - DNA, 3726 bp, Proteus mirabilis
atgaaaatcttaagtctgcgctttaaaaacattaactcactcaaaggcgaatggaaaattaactttgatcaagagccttttgttagcaatggactatttgccattacaggcccgacaggtgcgggtaaaaccacgctcttagatgcaattagtttagccttatatcacagaacgccacgcttagataaagtaacccaatctcaaaatgaattaatgactcgtcacactgcagaatgtttagctgaagtggaatttgaagttaaaggggttgcctatcgggcattttgggaacaacgtcgtgctaattataaagaagagggaaacttacaagccccacaggctgagttagcaaaaattaatcgtttaggcggtgaagataaagttttagccaataaaattagccaagtaaaagaaaaaataatctcgatcaccggattagatttcgatcgcttcactaaatccatgttgttatcacaagggcaatttgctgcatttctcaacgctgatgacaaatctcgtgcagagctacttgaagagcttactggtacagatatctatcgccatatttcacaaacaatttttaaacattggcgcgaagaagagcaggctttaaatacgctaaaacaacaagctcaaatgatggcattattggatgcaacaacacgccaagagctattaacacaacaagccaatattcaagcacaagtaacaaggttacaaaaagaacaacaggaataccaagttgctaagcaatggcaagaaaaagcgctagaaattcagcagcaacaacaatcagcccaagcgggactctatgaggctcaacaggcattaattattgctcaacccgatattcaacgcttagaaaaaaatgagccagcagaaaaaattcgccctctttatgatgaaaaaaatcgtcgtcttacagagcaaaactatttagcaacacagttaacaagcttaaaaacagaaaaacaggctattgaacaacaaagcctacctatcaataaaaaattggcagactttcatgaacaattaaaaacgcatcatgagaaaaaacagcacactttacagttaattcgtgagaaggtactgcctttagataatcaattggtgctgttacaacaagaaattagtactaataaccaacacaagcataaattagaaaaaatatgcgctgaatatctgcaacattctcagttagccgagaaaaaattaatcaccacacaacaacaagttaatcaattaaataacgacttaacacaacacgcctatcatgcacaacttgcggaaaatctacccttatggcaacactattttcagcaatataatgaaatatcaaaccaatatcttgccaaccaaaaacgagaaacagcagagcagggaaaagtcataagtttggaaaaagcattacaacaagctacccaaacattagccacccaacaagagcaacttaatttacagcaacagcaactacaatcttatcaaacacaattggaagcgcgtcaaaaagcagacaaacccgatgaaataaaaccgcgattacaacaaattaatctgcaaaaaaatgcattggcaaaaattataaatttacacactcaattacaacgtaatggcaaagagcagcaacattatcaaactacattgagtgaaaatcagcaaaaaatagcggctctaacccaaacgattgcagaaaatgatctggcactaaaagagaaagcacaacatcttaaagatttaaatgacaactatcttttgctacaaaaagtcgccgaatatgagcaagagcgtgcacgtttactgaaagataaaccttgtcctctatgtggctcaacacagcatccttatgtagaaacctatcatgacatcaaaccagatgagacaaagctacgtttagaagcattacaacagcaggtgcattcactcaccatcaccttagccgaacagcgaacccaacgggtaaactatggctcacaaaatagcaccttgagtgacaatatcgctcagttaacccaagagaatagcgtactgacccaacagtggcagacgttagcacaagcacaccatttaccgttagttgatgatgcagataacttactgacattagaacaatcattaaatcagcaagagcttattctcacagaaaaacttgacagttatcagcaattagaagcccaaacacatcaaaagaatacgcattttctcaatgcaaaagagcaatttaatcaacaacaacaatcggttaagcaacagcaaaatgatttagattatttgcaaaaaacaatcaaaacctatcagcaacaaagcgagcacttgcaccaacagcaacaacaattagcacaacatattcagtcagcgattgaaaaacaaggctatacactccctgaatttgagcagttcacgccatggttggcggctcgtcaacaagagcaccagcaatatcaaagtcagttaaaagagcttcagctattacaacaaagcctacgtgaacagcaagtgacgcaaaatgaaaaaaaacgttatttagcagaaaaacaggctgaacttgaggcgctattagcaaaattaagccaacaacagcaccaacaaacacaatggcaggatcaacgacaagccttatttggttcacaatctgtagagcaggtacgtagtgaacttgataaacatagccaatttttacaaacccagattgagcaatatactcaagaaaaaaaccaactcgaaaaccgacttaatcaattaattggccaatatcaagagagtgaaaaagccctacaacgagcaataacacaagcacaacaagccactgaacactatcaacacgcgttaaaagagagtctttttgccgatgaaaatgactttttagcctctctattatcggtagaggaaaggacacgtctgcaagagcagcaaaaacagcgacttgataaacttttacaagaaaaaacgcgccttgagacccaagaaaaagcctatcaacaacatttattacaacaaccattactctcaacccaatgtactgctgagcaatgtaatatccatttagacgacttagcaaagcaacataacgcattgcaagaaacactatttagtctgcaaatacaattacgccaagatgatgaaaaacggatagagcaacaaacactattagcgcaaatagccaaacagcaagcgcattatgatgattggagttatttaaatgagttagttggctctgcatctggtgataaatttagtcgctttgcccaagggttaaccctcgaccatcttatctatctggctaatcgtcgcttagaaaaactacatggtcgttactttttacaacgcaaaacgacaggtagccttgaattacagattgccgatacatggcaagcagatgctctacgcgatacacgtacactttctggtggagaaagttttttagtcagcttatcccttgccttagcgttatctgatttagtcagtaataagacgcaaattgagtcactctttttagatgaaggctttggcactctcgatcctgatacactagatattgctttagatgccttagatagccttaatgcttctggcaaaattattggtgtgatcagtcatgttgaagcgatgaaagagcgtattccggtacaaataaaagtgaaaaaagcggggggtttaggaataagtcagctagcaccagagtttagatatggtaataagagcaatgaaaatcaatcagttaaagactag

SEQ ID NO: 295192 - DNA, 600 bp, Proteus mirabilis
atgtctaacgcattcacagaattaatgaaaaaacgtagaacaatttatcatttaggtaatcaactgcctattagcgaagacagagttgctacgatcatcaaagaagcggttaaagaaagccctagcgcatttaactcacaaacttctcgtgttgtcgttttatttggtgaacaacaccagaaattatggaatatcgttaaagatactctgaaaaaattagtccctgcggatgcatttagcgcaacagaagccaaaattaatagctttgctgccggtgcaggctccatcctttattttgaagatactgatatcgttaaagggcttcaagagcagttcccactgtatgctgaaaactttcctgtttggtcagagcaagccagtggtatggctcagctttctgtctggactgcacttgcggctgaaaatgtaggggcatcactgcaacactacaatccaattattgatgatgaagttcacgcaacttgggatattcctcgccattggaaattaagagcacaaatggtctttggctctatcgaacaagaagcaagtgagaaaaattatattgaagatgacgctcgttttaaaatcttcaaataa

SEQ ID NO: 295193 - DNA, 327 bp, Proteus mirabilis
atgtccgaaccacaaaaagagattgatgtttaccagtcagctcgttttgaaaaggcaatgaaaaaattgccgggatctgatgtgaagatcattgaagatgaaattgatcaaataatcgataatccattaattggagagcaaaaaaaaggcgaccttgctcatcttagagtacataagtttagacttaatgatttaaccgtactgctaggttactcatgggttgccaataagctggaactgtatttattacatataggctctcatgaaaatttttatgaagctcagaaaaagcagcgaaagcatgatattaaactgatcaagtcataa

SEQ ID NO: 295194 - DNA, 231 bp, Proteus mirabilis
atggctatttccgtaagattagatgaaggctttgtgtctgatgctaaaattcatgcggaagcgaaaagcagaagtgtccctaaacaaatagaacactgggcaaaaataggccgtatagctgaagataatcccgatctgccatatagctttatcgaagaattgttactggcacaggcggaagtcgaaaacaaaaaggtttctcgatatgtccgaaccacaaaaagagattga

SEQ ID NO: 295195 - DNA, 1623 bp, Proteus mirabilis
atgaaccataaatataaactcgtagcccttgcagtaagctccgtcttattagcaggttgtgctaaaaattatgacgaagcgaacgtcgttgatgtccgtgtgattgcactcaatgacttccatggtgcattaaaagcaccaggtccaaacaagcctggtggtattgagcatatggctacgctggtcaaagagctgaaaaaagataacccaaataatattgtggtagctgccggtgatatggttggtgctagcccactgttatcttcaatgttccatgatgagccaactattgaagcgctgtcattagcaggtttagaagcaacttcagtgggtaaccacgaatttgataaaggtatgggtgagttactgcgtaagcaaaacggtggttgccatccagttacaggttgtcaaggtcctactgaatttaaaggtgctgatttccaatatttagcggctaacgtgactgttaacgaaacaggtaaaacgttattccctgaatatgtgattaaagagttcaatggtattccggttgcctttattggtttaactttagaaggtactgcggctatcgtgacaccaaaaggaactgaaggtttaagcttccacaatgaagcaaaaacaatcaacgctttagtgcctaagttacaagctcaaggtgtacaggcgattggtgttctgatccacgaaggtgctgcacagcgccgtgatggtggtccagtaaatatcaacgcatgtaatggtattacaggtaaagtacttggtgtggttgaacaattagatccagcggttgactttgttgtaacgggtcatactcaccaagcttataactgtactattaacggtagatcagtgacttctgcacaatctaatggcgcaatgttaacgcgtatcgacctgaaattagataaaacaacgaaagatgttgttgatgtagaagcgcgtaatatttgggttgataaccgcaaatatgaaaaagatcctgctgtcactaaactgttagaagcttacgagaaaattgctacaccattagcgaaccgtattattggtaaactagaaggtaacttaaccaagcaaactaacgatgcgggcgaatcgggtctaggtcaagttattgctgatgcccatttatatacggcaaaaccaaaagatatgggtggcgcacaaatcgccttaatgaacagtggcggtattcgtgctgatatgacgggtggtgatgtttcttataacgctatttataccgtacagccattctctaatgtactgttaacacaaacattaacgggtgagcagatcaaacgcttattagagcaacagtgggatcgttcacgtccacaagtattagcggtatcgggtaatttccaatatacatgggacagcaaagcacctgttggacaacgtgtgattgttgaatcaatgcgtattgatggtaagcctgtggatatgaaagcgaattaccgtgtagttgcaaatgaatacttagcaacaggtggtagtaacttctctgtactgaaagaaggtaaagatccggtttacagcgtgccagatgttgatgcagtagtgaaatactttgctgagcagtcacctattgctcaaccaaaagcgaacaacattactcgtaaataa

SEQ ID NO: 295196 - DNA, 777 bp, Proteus mirabilis
atgcgctttataaagctattacctgctattttagctgttattttagcgggttgtgtgacacaagcacctgaagttaaacaaccattaaaaccgcaagcaaaattagttgaaggcgtatcttgtattttacctgatgcacctactgccaattatgactatattgcgacaaatgatcgttatggtcaaaatagtaaagcatcaacagattactttaaattagccattaattactcaccggctttttgtgattataaaaaaaataatattaagcgtttaaataacgataacgaaaaagagcgtgctaaacgcgaattcgataaatttgaaatccagtgtttctcagataataaatttggctggattgttcatgggctatgggctgaaacctgcgatggtaaatcatgggatgaatgccgtgactggaaagacatacgcaagcatcctcgtttatgtaaaggggatttaccaccattagaatactcagcgattaaaccttacttatgttcatcaccgggtattgacttattgcaaggtgaatgggaaaaacatggcgtttgtgcctttgatacgccagaagcattctttggtcagcaacaagcgttatttgacgcattagtgttaccagaaggccgcccttcaaatagtgaattgattaagttcttaaaagaaaataatccatcattgaaggataaagaaattcaaattaatcgagatgaattctatatttgttatagcaaagatttcgaagtgattgattgtccgaaacgtgaatattga

SEQ ID NO: 295197 - DNA, 1956 bp, Proteus mirabilis
atggttaagaatgtgttgaaaatctcaacattagcaatgttggtcgcattcaatgtgaatgctgcgacagtcgatctccgtattatggagacttcggatgttcacagtaacttaatcgactttgactacttcaaagacaaaccaacagaacagtttggttatgttcgtacggcgaatttaattaaagccgcgaaagctgaagcaaccaatgcgattttagtggataacggtgacttgatccaaggtagtccactggctgactatcaagcagctaaaggcttagagaaaggggaagctcatccagcgcaccagttaatgaataccatggggtataccgtaggtaactttggtaatcatgaatttaactatggtttagattacctgaaaaaagccattgcgggcgctgaattcccatatatcaatgccaatatcatggatgcgaaaacaggcaaaaactatttcacaccttatatcattgttgatacaccagtaaaagatcgtgatggcaaagagcacactatcaagattggttatatcggctttgtaccaccacagattttaatctgggataaagccaatctggatggaaaagtcgttgtcaatgatattacagaaacagcgaaaaaattcgttcctcaaatgaaaaaagagggtgcggatctgattgtggctatccctcactctggtttctcttctgagccttataaagctatggctgaaaactcagtctattatctgagtgaagttgatggcattaacgctattatgtttggtcatgctcacggcgtattcccaagtaaagaatttgaaggcattaaaggtgttgatgttgctaaaggcactgtaaatggtgttccagcagtaatgccaggccaatggggtgatcacttaggtgttgtcgatatggttatcaataacgacagcggcaaatgggtgatgacccaagcaacaggtgaagcgcgtcctatctttgataaagcaaacaaaaaagcattagttgaacgtgatgccgagttagcgcaaatcattgaaaaagcacaccaaggtactcgtgatttcgtcggaaaacatattggtaaagcgtcagctaatatgtatagcttcttagctttagtacaaagtgatccaacggtacaaatcgttaacgatgcacaggttgattatactaaacactttattcaaggtgatccgaacttagacggcctgccagtattaggtgcagcagcaccatttaaagccggcggacgtaaaaatgcacctgcagacttcgttgaagtagaaaagggtgacttaacattccgtaacgcagcagacttatatctgtatccaaatacattagtggttgtaaaagcaaccggtgcagatgttgttgagtggttagaatgttcagcgggtatgtggaaccaagttgatcctaattcaactaaaccacaatacttaatcaactgggatggtttccgtacttataacttcgacactatcagtggcgtagagtataaagttgatttaactcagcctgctaaatatgacgttgattgccaagttgtcaataaagatgcaaaccgtatcaaaaatgtcacttaccaaggcaaacctatcgatcctaaagcaactttcttaattgcaaccaataactatcgtggatacggtggtaaatttgcgggtacaggtgaaagcaatatcgcctttgcatcaccagatgaaaaccgtgcaattttagcttcttatattgctaagcaaacgaaagaaaatggcgaagttgcaacaaaagctgcgaataattggtctttcttaccgattaagacagataaacaattagatgttcgctttgaaacttcaccaagtgaaaaagccgctaactttattaaagattttgctcagtatccaatgacctttgtggaaaatgacgatatcggttttgcaatttacaaaatcgacctaactgagaagaaataa

SEQ ID NO: 295198 - DNA, 1200 bp, Proteus mirabilis
atgggtattttaatcatgaaaagcttaaagcctttagcagcgctggtaggtttattggttctgtcgggatctgcaaacgcagtaaatgtgtacaacgataaaggtacacgttttgatgttaacggtcagttccgtttaaaaacgcaagtgactagccaaaatcatgaaatgaaaatgaatgatgatggtagccgtatcggtttctttggttcccatgaactgactaacgatatcaaagtgtttggtaaattagagtggggttcagatactcaaaaaaccaatagtgataaccctaaatctaattttgagatgtataaccgtgtaggctatgttggtttttctcatcgcgattatggacaaatccaatttggccgtacttatatcccgattgactgggtaaaaaaatcaagctacggctatggtaatacaggggtattttactttagtgatgtattaggccgcgctgtgggttatagcaatggttatgctgatggtaaaggggttggtaaaaacaactttatgactcgtttaccacaaactatctttattgaaacaaaccgttatgaagggtttaagcttgcaggtacgataacgggtaaaactggggatgataatactcgtactaccggtgatattactcgtgcttactccattgttggtttttataaatcaaccttcggtttagagtttgatgcgggttattctgcagctaaaggtgaagcaacccatagcagtaaaagtacggttcgaggtaaaacaccagaaaatagtatcttagcattcggtgcagaatacttcttccctggtcgcgaattctctatcggtatcgactatggtcaatctcgtgggaaaaactcaggcttaactttagcgagcaatgcctcagaaaaagattacagatggaactcagttaaaggcgattggaaagcgaatttatatggtgttggtgtgaaatggcactgggatcgtatcgaaagtggtatgtatgcgggttattacctgcgtgatggcgatgctaacactttcaactacaaaaaagaaacctatactgtgggtgtagataaacgttttgcggtatctaaatacaacaacttacgtttattcgctgaaatggcatatgatgatgctcgtagcgaaaacccagcttatgaagataaaaaacaatatatctttgaaactggtatgcgtctgtacttctag

SEQ ID NO: 295199 - DNA, 441 bp, Proteus mirabilis
atgatggaagaactccgccagaccttagatcttcagttatcacagctcaataccattgcgggtattttacgtgctgagcaacagttattatgtgcaggaagtattgatatcaataagctgcatgaaataactgaacagaagaattttgtattaacagctctaggtcataccgatcaaaaacgtcaaatactcagtaaacaagttggtattgatagaccctatcaaggacagccttttttagctgatttatggggacaactggttgatctaacggaagagttaaaacatcttaatcaacacaatggcttattgttagagcaacatattactcgcaatagtgaaacgctacattttctacagaaaaatcatagcccaacactttatggtgcagatggacaagcacagcgttcaatattagctgggcgaaaaatacaaatataa

SEQ ID NO: 295200 - DNA, 300 bp, Proteus mirabilis
atgagtattgaacgcacaaatccacttatcccaatcacggccatttctcagcgtaaccttaatgaaggtgcccaagaagcacgaaaaaccggtaatacgcaaacaaaagcaatggcgggtgatacttctgtgaaactaagtgaagcacagaaaaaattagttcaacctagcaatcaagacatcaatgtcgagaaagttgcccgtttaaaagcagcgattgccgatggaacattaacaatggacagcagcaaaattgcggaagcacttttccgagaagctgctgaaagcataactaaataa

SEQ ID NO: 295201 - DNA, 657 bp, Proteus mirabilis
atgtctgttagaacgtttatcggtgttatttcttttttctttatagtaaatagcggtatagccaatcccctacccgaagcgctacagcaatttttccaaacgcgccaccacaaagacgataaagtcaccgtaaccgttttaaccccagaggataaatggccacattgccaacaacaagaaatcctacagcatgcaggctctcgcaattggggacgtctttctatccccattcagtgcgataatcaacgtcgttttatacaagtagatgtgagtgtttatggacaatatttagtcgctaaaaaagagattaatcgtgatgatgtaataacaaaatcttcgattaagatcataaaaggagatttagaaaagctaccttatgacgtgttaagagatgctgtttttattaaaaatgccattgctatgcgccatattgcgaccgaaaaaccaataacatcaactatggttcgtcgcccttgggccattttagcggggcagactgtaacggtttttgcacaaggtgatcactttcaaatccgttatgaaggaaaagcgattaacaatgccgttgccaatgaaagtattcgtatacgggtcaaatcagggcaaattattactggtgaagcgctggaaaatggctctgtacgtatccccttgtaa

SEQ ID NO: 295202 - DNA, 414 bp, Proteus mirabilis
atgctcgataaattagaaaatacgtttcattttcaacaagaagcgctttcactacgtaataaacgccaagaaattttggcggcaaatattgctaatgctgatacgccaggcttccaagctcgggatattgatttcgcggctgagttgaaaaaaaccatggaaaacgggcgtactggtagtcatggattgcaactgacaatgacatcagaacgccatattcctattaagccgggttatcgcttagaggctgatttgctttatcgggttcctcatcaaacatcgatggatggtaacacggtcgatatggatatggaacggagtaattttgccgataatagcgttaaatatcaggcagatgtgacatttattaactctcaagttaaaagcatgatggctgtattgcaacaaggataa

SEQ ID NO: 295203 - DNA, 405 bp, Proteus mirabilis
atgtctttatttagtattttcgatatttcaggttctgcactttcagcacaatcacaacgtttaaacgtcagtgcaagtaatatgaccaacgtagatagcgttgtggggcctgatggtgaaccttaccgtgcaaaacaagtggttttccaagtgaatgcgccagcgggtcaagatattggtggtgttcatgttacgcaagtagtggatgatccgaccccctttcgtatggaataccagccaggaaatccatttgcagatgaaaaaggctatgtgcgtaagcctaatgtcgatgtagtcggtgaaatgatcaacaccatttcggcgtcaagaagttatcaggctaacgttgaagtgatgaatacagcgaaatcgctgatgcaaaaaacgttaatgataggtcaatag

SEQ ID NO: 295204 - DNA, 801 bp, Proteus mirabilis
gtgggtatttctgcctcaatgaatgaacctactgataataccattatcggggaagcgccttcatcctaccacactaaaaaaggggggagtgatgatattaaaggtaatttcctgacgttgcttatcacgcagatgcaaaaccaagatcccaccaatccaatgcagaataatgagttaacgtcacagttagcacagatttctacggttgaagggatagagacgctaaataaaacagtcaataccattgttgggcaaattgaccaaagtcaggcattacgtgcgacctcattggttaatcatatggtgatgattgccggtaatgaaatcagcgttgataagattaataatggtgaaaacgctggatctgatacagataaagatacagatacagatacaacacctgatactaaattaggtaagttacgtgcatctactgatgcgacagataatgaaaatatcttctccagcgcttttggttttgaatcctttagtccaatagatacgcttacagtcaatattactgatagtagtggggctaaagttcgcacgatcgaaatgaattcaaaaattctgccggatgtttatcacttcttttgggattgcactgatgatgatggtaataaagttcctactggaaaatatcaatttacagtaaatgccacatttaatgatgctcaagttccagtaaaaacacttaaaagtgcgatagtcaattccgtttctatgaaagagggaaaacctcatcttgatgttggcctcggtgtcatcgtttcattggacgaaattcgtaaagttttttaa

SEQ ID NO: 295205 - DNA, 1221 bp, Proteus mirabilis
atgtccttttctcaagcagtcagtggtttaaatgcagcagccgctaatttagatactattggtaataatatctcaaactctgcaacctacggttttaagggggcaacagtctcttttgccgatgtttttgccggctctggtgcagggcttggtgtaaaagtatcaggcattagccaaaactttaaagatggtagtatcactactactaaccgcccaaccgatgtggcgatttctggtggtggtttcttccgtattgaagatagtaacggtggcgttttctattcacgtaacggtgaatttggcaaagataaaaacggctatctcactaatatgcaaggcatgcgtattacaggttatccagtacaaaacgtagacggtaaaaatgtagtacaaaaaggggcaacaccaacgcctatcattattcctaccgatatgatgaatgcaagtgcaaccgataaaatggatatgacggttaacttgaattcagctgaagaggctatcgatcaaacaacacataaatttgatcccaaagataacgattcttataactttagtactaacgtgacaacctacgatagcttaggtaatgaacataacctgaacttattctttgttaaaaccaaagataacgaatggagtgtgtatgctcaagacaccacaacaggtgagccagcacaagatctaggtaaattagtttataaggataacggggtattagatgaaacagcacctaagctgaaaaactttactaccgttgcttataaaggttcacaacccatggatatggaaatgaactttagtggtagtacgcagcaaaaagtcgctgaatcaagtgtctctaaactcgcgcaaaatggttatcaagcaggggaatttaccaatttccgtattgagccagatggttccattatggcgacctactcaaaccaacaaagccaagtggttggtcaaatcgcattagctaactttgccaatcctggtggcttaagttcacaaggtgacaatatgtggtctgaaaccaatggttcaggctcacccattgttggtgtggcaggctctggcgtattcggtaaattaaccaacaatgccttagaagcctctaacgtagatatgagccaagagttagttaacatgattgttgctcaacgtaactatcaatctaatgcgcagactatcaaaactcaggatcagatcctgcaaacactagttagcatgcgctaa

SEQ ID NO: 295206 - DNA, 756 bp, Proteus mirabilis
atggatcatgtgatttataccgcgatgggcggtgccagacactcaatggaaaaccaagctgtcgtggcgaacaatttagcaaatgcatcaacaccagggtttaaagcgcaacttagtgcgatgcgagccgtacctatcaatggcgaaaccttaccgacgcgtacacttaccgtcgcgtcaacgcccggtagtgatcagcgtcagggaacgatgaattacaccggcagaccgatggacgttgcgttaagtgataatggctatttggctgttcaacttgaagatggtacgcaagcgtatacccgaaatggcaatattgagcgtaacgctgatggcatgttgatggtacaaggccgtcttttgatgggcgataatggcgcaattgaagtgccaccacaagcggaaattagcattgctaataacggcattgtcacggctcatgtccctaccgatccaccaaaaatgctagggcaaattggtcgcctaaaaatggtgaagccagaacaaaatgatttggtacgaggcgatgatggtctatttcacctatcacctcaaggtacagcacgagtgggtgaaacgttacctgcggacgataacgtcaaagtccttgctggtgtattagaaggtagcaacgtcaatcctgctgaagccatggtcgatatgattgccaatgcccgccgtttcgaaatgcaaatgaaggtgatccacagtgcagatgataatgcgcagcgcgctaaccaattgctatcaatgagttaa

SEQ ID NO: 295207 - DNA, 783 bp, Proteus mirabilis
atgatccgttctttatggattgctaaaacagggttggatgcacaacaaactaacatggatgtgatttccaacaacctcgcaaacgtcagcacaaatggttttaaacgccaacgtgcggtttttgaggatttactctatcaaactattcgtcaaccgggagcgatgacatccgagcagacgaatgcgccttctggtttacaaattggtactggtgttcgcccagtggcgacagagcgtttacatagccaaggtaatttagcccaaactaatggtacgcgtgatgttgctatcaaagggcaaggttttttccatgttcaattacctgatggtacggatgcttatactcgtgatggctcttttcaaatggaccaaaatgggcaactagtgacctccagtggctttcaaatcgtcccagcgattattttgccagaaaccgctaaaaaggtgatggtaggtcgtgatggtattgtcagtgtggagattgaaggatcgcctgcacctcaacaagtagggcaattaaccctcaccacatttattaatgatagcgggttagaaagtgttggggaaaatctgtacttagaaacagccagctccggagcacccactgaaaatgcgccgggtattaacggtgcaggcttgttatatcagggatatgttgaaacctctaacgttaatgtcgcggaagaattggtcaatatgatccaaactcagcgtgcttatgaaattaatagtaaagcgatttcaacttctgatcagatgttacagaaactcacgcaactctaa

SEQ ID NO: 295208 - DNA, 744 bp, Proteus mirabilis
atggatacaaaggtcattactgacaattctggggcaagcaagcttagtgtcagatggcgtcgtcatcaacgtttaggtaccgccctgttggtactgacactagcagggtgcgctcagataccgaaaaaaccattggttgaaggacacaccacggcaatacctactgcgcctaccacaccagcacctaatggctctatttttcaggctacccagccggtttattttggttatcagccattatttgaagataggcgaccgcgaaatattggcgatacattgactatcaccttgcaagaaaatgtcagtgccagtaaaaactcgtcggcgaatgccagtcgcaatggtaaagccggtttccttgcttctatcacaccaaggttcttagaaggattattagggaatagccgtactgatatgggcatggaaggaaacagtgagttcggtggtaaaggtggtgctaatgcaaataacacctttaaaggcaccattacggtaacggttgatcagttattggcaaatggcaatctacacgttgtgggtgaaaaacaaattgcgataaaccaaggtactgaatttattagattttcaggcgttgtgaatccgcgcactatcagtggctcaaacacggtcaattcaacccaagttgctgatgcgcgtattgaatatatcggagacggttatattaatgaagcgcaatccatgggatggctacaacgtttcttcttaaatgtatcacctttttaa

SEQ ID NO: 295209 - DNA, 1107 bp, Proteus mirabilis
atgaaaaaattagcgattagccttttctttatcgtgatgacatgtgtcggcttttctgcccatgccgaacggatcagagatcttacttcggttgaaggggtaagagaaaatgcgctgattggttatggtttggttgtcggcctcgatggtacgggtgaccaaaccatgcaaacaccttttaccacgcaaagtctaaataacatgctctcacaattggggatcaccgtacctgcgggcaccaatatgcagttaaaaaacgtcgcggcagtgatggtgacagcaaaactacctccttttggtcgtactgggcaatctatcgatgtggttgtttcttcattaggtaatgccaaaagtttacgaggtggtacgttactgatgaccccacttaaaggggtagatagtcaggtttatgcggtagcccaagggaacattgttgtcggtggctctggtgcttctgcgggaggcagcagcgtaaaagtcaatcagttagcgggtggacgtattagtaacggtgccattattgagcgtgagttaccttctcagtttggtcagacgggattattaaacttacagcttaacgaagaaaacttcacgctagcacaaagtattgctgatgcgattaataaactacgaggggtaggaacggctcttcctcttgatgcccgtacggtgcaattacgtgtgcctcttggtaaaagtgaacaagttcgtttcttagctgatgtgcaaaaccttgaggtaaaacgagttattgctgatgctaaagtgattatcaatgcaagaacaggttccgttgtaatgaaccgtgatgtggtattaggtagctgtgccatcgcacaaggcaacttatctgttacggtagatagccaagtgaatgtgagtcaaccgaataccccctttgcaggtggtagtacagttgtgtcacgtaatacgagtgttaatgtcaatgaaaagggtggttcattacaaaaagtcaacgccagtgctagcctcaatgaagtgatccgttcactcaatgcgctaggtgcgaccccaacagatctcatgtcgatattacaagcgatggaaagtgcgggttgtttacgggcgagattggagattatctga

SEQ ID NO: 295210 - DNA, 987 bp, Proteus mirabilis
atgaaagagttatctctgctttcttcaatgccgaatatttcaacgccggcatatgatagtaacgcattgaataaacttaaatatcaggttggacaaaatgccgatcagcaaggactgcgccaagtggcgcagcaacttgagggggtttttgtgcaaatgatgttaaaaagtatgcgtgaagctattccacaagagagtatgttcaattcagaaagcactaaaatgtacacctctctttatgatcagcaaattgctcaagatttatccaaaaaaggcttggggtttgctgacatgattgaaaaacaactgtcagctaaagtaacaatggaaccgagcgaactggccggtaaaacgccgatgccattagacagcagtgatatttttcaatcaatgccaacacaagcattaggccagctctatcgtgagatgcaaccgttacaaaatgcagttgaaagtacggtaggcaagttaaaaggattgtctgaaagtagcgcttcttttgccgctaaattgttagggcctgctaaacaagcgacacaaggtacaggtattcatcatcttttagttgtagcacaagcggcactagaatctggctggggtaaacgagaaattttaacgggtgatggaaaaccgagctacaacctgtttggtattaaagcggggcgttattggaaagggcctgtcactaatattatgacaacggaagtgattgacggtaaatcgatcaagatgcgtgataatttccgtgtctacggctcttatgtggaggctatccaagattatctaagattgcttacggaaagcccgcgctatgccaaagtaccgcaagccaaaacaccagaacaggctgcttatcatattcaagaagccggttatgcaaccgatccggggtatgccaaaaaacttgtttctattatagggcaattaaagggacagggtgagcaagttgcgaaaacttatacgcatgatttaagtgaactcttttaa

SEQ ID NO: 295211 - DNA, 1644 bp, Proteus mirabilis
atgtccaacaatttaattaatacagcgatgagcgggcttaatgcagcacaagctgcgatgagcacaattagtaataatatcgctaaccaaaaagtaaattggtataaccgtcaaatgaccgtatttaatgaaaacggtggcacgatgaccagtaatggttatattggaaatggtgttaatgtgagtcgtattcatcgcgaatataatgagttccttgcggggcaaatgaatcgtgcggtaacaaaacagagtgctttaaatagctataacaaaaatatctcgcaaataaataatttattagcggataaaggcaatgatgtttccagtgcaattgatgacttctttactagcttacctaatgtaacgaacaatgcggaagataacccagctcgtaccaccatactgggtaaagcggaagcaatggtgaatatgtttaacaaagcggatcaatcattacgcgatctcgaaaaagacattaatagccaagtcactaataccactaagaatattaatgaatattccaagcagatagctaaattaaatcaagaaattagccgctcccaaggttttaatggtgccgagcctaatgatctgctcgaccaacgcgaccgtttaattcaagagctaaatacgctagttgatgtacaggtgacccaacaagatggcgggtttgttaatgtcagctttgccaatggtcttcctcttgttgcggggacgcgctcttatgaagtctctgctattccttccaataaaaacagtgaacgccttgttgttggttatagcaacggtattgatgaagttcgtgaagttgatgctaaacgtattaatggcggtgaattaggtggcgcttaccgtagccgtaatgaagtattagatgcaagccgaaatcaattaaaccaattagctttagtgttgggcgatcaatttaataaacaacatgagcaaggttttgatttaaacggcgataaaggtgataagttcttcaacctaggtggggcacataccatgcctaatggtaagaacaaaggtgatgcgactttcgatgtcaaatacactgacacaagagaagttaaagctgcggattatacggttaagtatgaaggtggtaaatggaatgtcactgtagagccggggaatcgtaaatttacagcaacacctaatgcaacaacgggtgaattagaattcgaaggaatgagcatcaaagtcaatggagctgcacaagagggcgattctatcgttgttcaatctgtaggcaacgtgattgcaggaatgagtgttgcaatcagcgatccaagcaaaatagctgccgcgggtacaaaagactctggacctagtgataatgagaacatgaaaaaattgttcgaattacccgatgaaaaacttatcgatggtaaagcaacaattgctggtggttatggctcactaataagtatggtgggtaataaagtgaatactgcgcaagttgattatgatgcgcaaaatgcgatcaccagcagtattttaacacagcaacaatcggtttcaggggtcaacttggatgaagaatacggcgaaatgtatcgtatccaagagtattacatggcaaatgcaaaagttattcaaactgcaaataccatgtttgatgcgattatgcaggtcttataa

SEQ ID NO: 295212 - DNA, 945 bp, Proteus mirabilis
gtgcgtttaagttcaaatcaaatttacactcagcgagtggataatattactagctcgcaaagtagatggatgacagaagggaataaaatttccagtggtcgacgtgttgaaaaaccttctgatgatccgatggcggcctcacaagcggtaatggttaagcaatctgaagcgcgtaatcagcaatatgcgacagcacgtggatttgctaaaaacagcatgtcattgcaaatgagcctttcaagccaaatggtcaatatcaccacaaaaattcaagaaacattagtggctgccggtaatgatggcgcattaagtgatgaagatcgtgcctctcttgcggaacaattaagtggtttaaaagatcagttagtggggattggcaatacgaaagatggtgttggacgttatgtttttgctggtttccaaacagataaaccaccttttgttgcagacaaaacgggtaaaatcacctatcaaggtggagacaagcaaattactcaaaaagttgatagcaatattgaaatggtatccaactttacagggatagaaacgttacaatcatcgggaggaaaaggcacagagccagatatttttaatgccttagatgaagccatcagtgcactacgtgaacctctagttggaaaaccacaagctgatcgtgatgctgcattagataagattaatacggctaaccgtgttaatcgcgccacattaaataatatttctagtgtggaagctaaattaggtttacagcttcaagaacttgataatttagatgatttaggtgcagatacctcattaagaaatgctaaacgcttaagtgagttacgtgacttagattggacacaagcaatttcagattattatcaagaagagtcggtattacaggcatcttataaagtctttaatgacatgaaagagatgtcgatgtttaagatgtatcgttaa

SEQ ID NO: 295213 - DNA, 783 bp, Proteus mirabilis
atgataaccttgaccagtgaaatacttaatggctacatcagtgattttttctggccatttgtgcgtattttggcactctttagtaccgcgcctttgtttagtgaaaaacagacacctaaaaaatttcgtattggactcgcctttttaaccacggcgttaattgcaccagggctaccgcaaagtcaagtacctctcttttctatcatggctttttgggtactgatccaacaaattttaattggcacaattttaggcttatctatgcagttagcttttgcttctgtacgtcatgcaggagaagtgattggtttacagatggggctgtcatttgcgactttcgtcgatccttcaggtggcccgaatatgcctattcttgctcgtatctttaacatgttaaccatgttgctttttatggtgtttgatgggcatttatggctgttatcagtattagcagatactttctatgttgttcctattggaaatcagacctttaattcattgggtatccttactttagtacaaagtggtggcactatatttattaacgggatgatgttagccatgccattaatcactctactattagtactcaacctttcattaggtattttaaaccgtatgacaccacagctttctgtttttgtggtcggtttccctcttaccctcacgatcggtatgttggcgttatcactgattatgccagcattacctatgtttactgagcgtgtctttagcgatactttcaatcgtattaccttaatattgcagcaattagtttcttga

SEQ ID NO: 295214 - DNA, 270 bp, Proteus mirabilis
atgacgcctgaatctgttttagcattaggaacggaagcgatgaaaattgccttatcccttgctggacctctattattgtctgcactggttaccggtttagtaataagcatgctgcaagcagcaacacaaataaacgaaatgacactgtcgtttattcctaagatccttgctgtattagcggctattttagtcgcaggcccgtggatgctcagtttgttattagactatatgcataacttatttactggcattccaggaatgattggctaa

SEQ ID NO: 295215 - DNA, 771 bp, Proteus mirabilis
atgcatcagtgtgtctcttattttaacgcattaaagcgctggcctctcttcgctagtgtccttattttgtcactattgccaagccatgcgtttgctcaattccccagtgttatttcacacccattaccgggaggtggccaaagctggtcattgccagtacaaacactgatttttatcacagccctaggttttattcccgccgtattactgatgatgacgagttttactcggattatcattgtgctgggtttattgcgtaatgcgttaggtacaccttctgctccccctaaccaagtggtactgggtcttgcgctatttatgacattttttattatggcaccggtgtttgataaaatttatcaagatgcttatctcccttttagtgaagataaaatcacttttgaacaagcactcgataatggctcacaaccactgcgccagtttatgatgcaacaaacgcgcgaaaccgatcttgcactttttgctcgtcttgctgatgcccccgcatttgaaacacgcgatagcgtacctatgcgaattttagtgcctgcttatattaccagtgagctaaaaaccgcttttcaaattggttttatgatttttatcccttttctcatcatagacttagtggttgccagcgtcttgatggcactcggtatgatgatggtgccacccgccaccgtttcactgccttttaaactcatgttatttgtattagtcgatggctggcagttaatacttggctcattggctcaaagcttttttaactag

SEQ ID NO: 295216 - DNA, 447 bp, Proteus mirabilis
atggaacagatcccttccttttccagccaaggtgcggttaatactgccgcacccgccacaacgcaaactatccaaacaccggcgcaacctttacccgttggacaaagccttgtgcaagtcagcaccgcgcttgcgggtattattgtactgattattgttgcaatgtggcttttccgccgttttggctttgctcgcggtacatttaaagctaatcaagcacaactcacggttaaagcgagctgttcattaggtaccaaagagcgtgttgtcgttgttgaaatcgagcaggaatggcttgtattaggggttacggcatcgcagattaatctgttacacaccttacctattcctaatcatgcctcgcaggaagcgcctataccaccttcttcaccgttatttattcaattattacaaaaaacgctaaagcgagataaaggcaactcataa

SEQ ID NO: 295217 - DNA, 411 bp, Proteus mirabilis
atgagtgatgaaaatcgcccaactgataattcacaatcggctgaggatatgtgggctgatgcaatggaacagcaaactggcaaaagccaagataatagttccgacgtattcgaacatctgttacctgaagatgatacgcttaatcatctatctgatatcaatttgattatggatattcctgtcaaattgacagtagagttagggcgtaccaaaatgacgattaaaaaactcctaagcctatcacaaggctctgtagtgtcattagatgggcttgcgggtgaaccccttgatattcttatcaatggctacttaatcgcccaaggagaagtcgtggtcgtttctgataaatatggtattcgcattaccgatatcatcaccccttcagaacgtatgcgccgtctgagtcgttga

SEQ ID NO: 295218 - DNA, 1032 bp, Proteus mirabilis
atgagcgataatatcctttcacaggcagagatagatgctctgctgaatgatgacacatcaggtgacgacgcccaaaaaagcgcgaacagggaacctgcgatagcgaaggatccgaatgaaccggatattcagccttatgacccgaacacgcaacgtcgtgtcgttcgagaacggttacagtcgttagaaattattaacgaacgttttgcgcgtcaattccgtatggggctgtttaatatgcttcgccgaagccctgatatcacggttggtggcataaaaattcatccttatcatgactttgcccgtaacctacctgtaccaactaatctaaatttggtgcatttaaaaccgttacgcggcacagcattatttacctttgagccgaatctggtttatatcgcggttgataacctgtttggtggcgatgggcgttttccaattcccgttgaaggacgcgaattcaccaatacagagcagcgtattatcaacaaaatgttaaaactggcacttgatgcctatcgtgatgcttgggactccatcttcaaaattcaagttgaatatgttcgttctgagatgcaggtaaaatttaccaatatcacctcatcaccaaatgacattgtggtgacgacaccttttcaagtagaaattggctctatggtaggggaatttagtatctgtattccttttgccatgattgaaccgctacgtgaacggctaatcaatccaccaattgaaaaccttcgccaagaagatagcgtttggttagacagtttagtaaaccaagttaagcactcagagcttgagttggttgctaactttactgacattccgctgcgtttatcaaaagtccttaccctgaaaaaaggggatgtgctccctattgataaaccagaaagattgattgcacatgttgatggtgtgccggtattaacaagtcaatacggtacagttcatgggcaatacgcccttcgtgttgaacatttaattaaccctgttttaaacgctctggatgaggaacaaaccaatgagtga

SEQ ID NO: 295219 - DNA, 483 bp, Proteus mirabilis
atgtctaattacagcaatgaacgtaaaagctatagcttaattctgatcatcctattattggtgatcgccattattgcagcggcattcggtggatatagttggtgggcattgaagcatgctaaatcaggtactacgggcactagtcagcaaaaagttataccggcccccgtttttatgtcattagagccttttaccatcaatctgattgatgaagaagaacatttagatcgcgtactctacatagggatcacgttacgcttacatgatgagaatacacgtaagcgcttacatgattatttacccgaagttcgtagtcgcttgctactacttctttctcgtcaacacgctaataaaattgcaacagatgcggggaaacaacaactcatgacagaaataaaagaaacgctgagaccgactcttgtaccgggtgaatctgaacagatcctctccgatgtactgtttaccacgtttattctgcgataa

SEQ ID NO: 295220 - DNA, 1413 bp, Proteus mirabilis
atggagataacgcttctgaccatggatgtcacagcaacctctccgggaacgacatccgctacaacaagtcaacccggtgataatgcgtcgacatttgcacaacttctgagtactcaacctcagaatacacccagtgataaaaaaaacgcctctatttcaggccattcctcaaaagagaataaggcgcacaatcacactgaaaaaaataaagaccaacaaaatgatgacgatattaatactattgtcactgaatatgcggcattagaggcgccagcaacgaaaaatacccatcttgccctctcgttacctgataatgagcaatttagctcaattcttgaaaataaaacggcctcttcattaatgtccgcagaagaattagcagcagagcttcctgtacaacttgccggacttgcagggttaaaatctacatcgctttcagccaaccaagctcatcagccacatttattgggaacctcgttaaagcatgctgggaatggaaacgagttatctcaccttatggcagaaaatgcccgtgctgagcgagatcttgtcgataaatggcaacaattcaatacgcaagctaatgcagatgacaaatcattacttgctcaattacgccctgaaacagcgtcattaacccaacttgcaacacatgaagctcgccatttaacgaatgggcattcagcaaagaaagttgataacgcttcactgttatcttccgtggcagaaaaagcggatggattgttagccgatgacaaagcatcagccaatacaaaattagccgataatctggcaaaccaagtaatcggtaataaccgtattgctgaacgcgatctacacaatagtttatcgacctcttcggtgtttgcctcttcatcagtagcaagtcatgcacaaccgtcatcaatgatgcaagcgcaaatgcactttccttcgatgcctaccccgatgttaaatgcacaaataggcacaccggaatggcaacagcaactcaatcagcaaattgtgatgtttagtcgtaatggtttacaaaaagctgagctacgtttacatcccgaggagttgggttcattacatattcgcatgaaaattgaagatggacaggctcaattacatcttgcctctcaaaatggacaagtgcgtactgtgttagaaaattccctgcatcatttgcgtcaagcgctctctgaaaatgggatacaactcacacaaagtcaagtgtctagcgacagtcatgacggttggcaacaacaaaatatgtcagattcctctcaatttagtggaaatggtgccgataatcatcaaagaagcgagggtaattctatgcaattagcctcagaaacggcacaaaagataacccttacgcctcaagagttagcctctgctcgtggtggtgtcgatatttttgcctaa

SEQ ID NO: 295221 - DNA, 447 bp, Proteus mirabilis
atgcgggagcagtcacctttagtgacactgagggaactggcacagacagcggcagaacaagccgctgtccaactagcccaagtccgccagagtcatcaacagatggaacagcaactcaatatgttgatcgggtatcaggatgaataccgtgttcgtctcaaccagacgttaaatgtgggaggcatgtcatcagcatcatggcaaaactatcaacaatttctcaaaacacttgaattaactatcgagcaacataaacagcaacttcgtcattggcaagcgcaactcgaccttgcaacggaacattggcgagaaaaacagcaacgactcaatgcgtttgagacattggagcaacgcgctgaagatagccgtaagcgacaacttgatcgtattgagcagaaacaaatggatgagtacgcacagcgtagtactttacggagaacaacttga

SEQ ID NO: 295222 - DNA, 1374 bp, Proteus mirabilis
atgaccgcaagattggggcgttggttagaaaaactcgctgatgcagaatctcgtttaaataaaattccgcgcattcgccaatatggtcgcttaacccgtgctacaggcttagtcatggaagctaaggggctagttatgccccttggttctacctgcttaatagaacgtaccattggtaaaacggttgaagaagttgaaagtgaagtcgtcggatttaacggtagccaaatgttactcatgccactacaagaagtggaaggattaaccccaggtgctcgagtctacgctcaatcgatccccggtcgtgaaggcgaaggccgacaattaccccttggtgatgccttattaggccgcgtacttgatggctcaggtgatccgctagatggtttaccgccgccagataccagttatcgagccccactgattacaccacctatcaacccattacaacgtacccccattacagatgtacttgatgtgggtgtacgtgccatcaatgcactgcttacggtcggtcgtggccaacgtatgggactctttgccggctcgggtgtcgggaaaagtgttctattaggtatgatggcgcgttttactcaagccgacgtcattgtcgtagggcttattggtgaacgtggtcgtgaagttaaagactttattgagaatatcctaggtaaagaaggattagcacgctcggtggtagtagcagcacctgctgatgtttcaccactcttacgaatgcaaggtgcttcttatgcaacccgtattgccgaagattttcgtgatcgcggtaaacatgttttattaattatggattcgttaactcgctatagcatggcgcagcgtgaaattgccttagccgttggtgaaccgccggcgacaaaaggttatcccccttctgtatttgcaaaattacccgcacttgttgagcgtgccggtaatggcgttgatggtggtggctccattactgctttctataccgtgttaacagaaggtgacgatcagcaagatccaatcgctgattctgcccgtgctattttggatggccatatcgtgctttcgcgttcactggcggaatcgggtcactaccctgctattgatattgaagcgtccattagccgtgcgatgacctcactgattgataaaacacattatcgccgagtacaagtatttaagcagctattatccagttatcagcgcaatcgcgacttaattaatgtaggggcttatgccacaggcagtgatcctatgctggataaggcgattgccctttatccatcattagcaaaattcttacaacaagatattcaagagcaatgtagctatcaacatgcttgtgaacaacttaatcaactgatcacactagattcattctga

SEQ ID NO: 295223 - DNA, 723 bp, Proteus mirabilis
atgtctgataaaaatactgatacaaactggaagccttgggttccaaaagaacttattgactgggaattaaaagtcaaggaagacacggggttagacgagaaggaagacgaaaatcaagaaaaagaagtcgttcagcaacagaaagtcctcgagcaaattaatatgcttgatgacatgaaagaaaaggcccaaaaactgggccatgctgaaggctttgaggcagggaaaaaccagggttatcaggaaggctatcaggcaggattacaatcgggtatcgaagaaggtatccgtcaaggcattgctaaacaagaaccttttattaatgaatggcaaggcttattagctgaatttagacattcattaaatggtttagatagtgttattgcctcacgattaatgcagatagcactcacagcggccaaagaagtacttggacaacctgcggtctgtgatggctctgcattacttgctcaaattacactgatgttgcaacaagagcagatgtttgcaggggatccgcagctacggattaaccctaaacatatccctctgattgaaaaggaattaggcgattctcttaccgcccacggttggaaagtggtggctgataatagtatccatgtagggggctgccgtgttgtaaccaatgatggtgatcttgattccacaattgcgacacgttggcatgaattgtgtcgtcttgctgcaccggaggcgttgtaa

SEQ ID NO: 295224 - DNA, 999 bp, Proteus mirabilis
atgagtaatgacttaactggaaccgaaaaaagcgccgttatgttactgacattgggtgaagatcgcgcagcagaagtatttaaacatctaacgacacgtgaagtgcaacaactgagtattgcgatgtcttctatgcgtcagatctccaatcaacaactcattgatgtgatggcaagcttcgaagaagatgctgttcagtatgcagcattaaatgtgaatgctaatgattatttacgctctgtacttgttaaagccttaggtgaagagcgtgctaataatctgctcgatgagatctcagaaacccgtgaaaccacaacaggtattgagacacttaactttatggagccacaaatggctgccgatattatccgtgatgaacatccacagattatcgccaccattttagttcacttaaaacgtggtcaagccgctgatattcttgctctgtttgatgagaaattacgtaatgacgttatgttacgtatcgcaacatttggtggtgttcagccatcagccttagctgaattaacggaagtactgaacaatttacttgatggtcaaaatctcaaacgtagcaaaatgggtggtgttcgtactgcagctgaaattatcaacttgatgaaaagtcagcaagaagaaaatgttatcaccgcagtacgcgactacgacggcgaattggcacagaaaattatcgacgaaatgttcctgttcgaaaaccttatcgatatcgacaaccgttcaattcagcgcattctacaggaagtggaatccgaatccttggttgtggcattaaaaggttgcgatcaagaactacgcgatcatttcctcaacaatatgtcgcagcgtgctgctgaaattatgcgtgatgacttggcgtctcgtggacctgttcgcatgtctcaagtggaagctgagcaaaaagcaattctgcttattgtacgtcgcttagctgagagcggtgaagttgttcttcatggaggagacgatacctatgtctga

SEQ ID NO: 295225 - DNA, 1722 bp, Proteus mirabilis
atgaatgccgaaaaaaccgacgttgtgaaccagaaaaaaggttttaacgccattattaaccggataaaagccgatccgaaaattccgcttattattgcgggatcggcggcgattgccatttttgttgctgcttttttatggctacaaagccctgattataaagtgctttatagtaatcttagcgataaagatggtggcgaaattgtcacacagttaacacaaatgaatgtaccctatcgcctatcacaaaatggttctgcgattatggtacctgacaatcaggttcatgaattacgcctgaaactcgcacaagcggggcttccaaaaggtggagctgccggttttgaactacttgataaagaaaagtttgggatcagccagttcagtgaacagattaactatcaacgtgcacttgaaggggagcttgctcgtaccatcgaaaccttaggtccagtgcaaaatgctcgtgttcatttagcattacctaaaccctctctttttgttcgtgagcaaaaatcaccttctgcttctgtaacagtaggtctgctgcaaggtagagccttggacgaaggtcaaattaatgccatcgtacatattgtagcaagtagtgttgcaggtatgcccgatagtaatgtgaccattgttgatcaaagcggtaagttattaacacagcccgatgctttaggtcgtgatcttaattctattcaactcaaatatgtccaagagttggaaagtcgctaccagcaacgtattgaaacactattaggccctattgttgggcgtggtaatgttcatgcgcaggtcaccgctcaagttgatttttctcatacagaagaaaccgctgaagagtacaagcctaatcagccccctaaccaagctgcagtacgctcaaaacaagtgagccaaagtgagcaaaatggaggcatgttagctggcggtgtgcccggtgcgttatctaatcaacctgttgcaccaccgcaagcgccgattgaaaaagccaaagacacgacggctgatgagaaaacaacatctaccaatgctaatcgttcaatgacacgtaatccaaacagcaatagccgtttagatgaaacaaccaactatgaagtagatcgtcgtattcgtcatgttaaacgacctgttggcaatattgagcgcctttctgttgcggtaatcgtcaattacaaaaccgtagaagacaagaaaaaagcaacagaaggtgaagagcctattgtcgaaaataaacaagttccgttaaccgatgaacagcttcaacaaattgaaagtttagtacgtgaagcgatgggttattcccaagagcgtggtgactctttaagtgtggttaattctcaatttaacgataccgaagagccagtgattagcgttcctgtgtgggaaaatccacaaatattggctaaagcattagatttaggccgctggttattgcttgttatcatcgcgtggatcttatggcgtaaattagtgaaacctcaacttgaaaaacgccgtgaagcagaagtcgccgcacaaaaagcgattttgaaaaccaagcttgaagtgacagatgatgtcaacgaagccgaattagatgaagaatcaagacgtaaacaagcacgtcaacgtgttagtgccgaattacaaagccaacgtattcgagagatggcagaaaaagatcctcgtgttgtagccatggtaattcgtcaatggatgagtaaagaacaatga

SEQ ID NO: 295226 - DNA, 312 bp, Proteus mirabilis
atgtcaattccagctattgaaagtgttctggataaaatgcaaattcaaactttacaagcatccaatattgccaaaccccagccagtacaggcaggatttgcaactcagttggttcaagcagtaggtaaaattaacgaaactcgtgttaatgcaaccaacaaagtacaagcatttacgttaggtacgcccggtgttgaattaaatgatgtgatggtggatatgcaaaaatccagcatctcattacaaatgggcgtacaagtgcgtaataagctggtcgccgcttatcaagagattatgtcaatgcaggtgtga

SEQ ID NO: 295227 - DNA, 693 bp, Proteus mirabilis
atgaaaaaagtattactcagtcttgctatgctgagtgtaatatcaacgccggtattggctaaaacgcctgttgctaacttaaaaatcaatggtgatattaagccaccaacttgtactgttcatggggcgacacaaagtgatgttatttttgattacggagtcataagcccaacacttatccctcaatcaaaaaactacgagtatcctttaactacaggtaaaaataccgttacggttgaatgtgatgctaaaacatatttaacctttgttgcatctgatacttatgacagtgcggaattagctaatgatacgacaggacaatttcatttagttgataaagcaaatcctgaagccgctgttggtgcagctttttttatatggacaaatattactgtcgatggtaagcctgcgtatatttcacgagcaaatgatgttgctattacggggaataaatttaataacgtcctatacaaaggccctaccaatggttggacctcagaacaacaatcagatattaataaaaactctctgtctctcatttcaggtgaaattttccaagcgaatttcagtcaaggaaagacaagtcgtacttttattttatccaaagatgcactaagtaaaaaaggaatagatattgctgatggattagattttgtcggagaggttgttctcacttttaactttggggtctaa

SEQ ID NO: 295228 - DNA, 564 bp, Proteus mirabilis
atgagccattccactattagaagttacttacacttatcaccttccattgctaaagatgtttatattgacgtaacagccactgttattggtgatgtacgccttagtgaagatgtcaacatttggccaatggttgtgatccgcggtgatgttaactatgtcagtgtaggagcaagaactaatattcaagatggctcagtgctacatgttacacatgcatcagaaaatactcctaatggttttcctctcatcatcggtgatgatgtgactgttggacacaaagcaatgttacatgggtgtacaatcggaaaccgagtattagtcggcatgggatcaatcttacttgatggtgcaattattgaagataatgtattgatcggcgcaggaagcctagtaccacctggtaaacgactagaaagtggttttctttatttaggtagcccagtaaaaaagatccgcccactcacgcctgcagaaatacaacactttatctactctgctaataattacgtaaagtggaagaacgactatttatcaacgactcattccgccattgataaacagtaa

SEQ ID NO: 295229 - DNA, 264 bp, Proteus mirabilis
atgaatcaatccattcaatttcctgatcgtgagcagtggcttgaagatcaaaaatgcgttcttttccctatcatggtcaatggaatgttatttgattgccaaatcaccgaacaagagctaaaggcacgctttggtgataatagcaatgctctttgtttgtttaagcggcatcgatgggaaattgaagaagaatttgaagagttggctaagctgtatgaagtgtcaactcttcatccattttactgtttatcaatggcggaatga

SEQ ID NO: 295230 - DNA, 825 bp, Proteus mirabilis
atggaaaaatatgtagtgatgggcaatcccattgaacatagtcaatctccttttattcatcagcttttttcgaaacagtcagggattgattatgaatatgggcgtttactggttccattaggcgaatttgataaagtagcaacgcaatttttttctcaaggtggacgtggagctaatgttaccgttccttttaaggaagatgcttttcgctttgtggataaattaacacaaagagcacaagcctgtggtgctgttaatactattttaaaattagatgatggcacgttattaggtgataatactgatggtcagggcttaattcttgatttggctaggttagattttattatccccggaaaaatattatcggttcttgttataggggctggtggtgctacacgagggatattattaccattattaaattataattgtgacattactttgactaatcgcactgttgaaaaagcacaacaattagcacaagaatttagccaattcggtacaattagagctagtgctccaccaaatgttacagataaacattatgatctaattattaacgcctcttcatctagtatgacagacgatattcctcctatacctgataatgcttatggttttaaaactgcttgttatgatttgtattataaggcaggcatgacttcttttttataccatgcattaaaaaatggtagtacacgcttatctgatggcctaggtatgctcgtagggcaagccgcttatgccgttgagttatggtatgagcgagtaccggatattaatccaacaataaatattttaagagaaaatttgaataaatga

SEQ ID NO: 295231 - DNA, 570 bp, Proteus mirabilis
atgaataacgaagtatcacctgtaaataatacaattatagaagcactgcaaaataatcaagttattgcctatccaacagaagctgtgtttggtgtcggttgtgatcctgatagtgaaagcgcggtaatggcattacttgagttaaaacagagagccattgagaaagggcttattttaattgctgataactatgaacaattaaaaccttatattgatgataacgcattgactcaagaacagcgggagcggatgtttgcctcttggccaggcccaatcacttgggttattccagctaagtcaacaacgccaaaatggctaacagggcggttttcttccttagctgtaagggtcacggatcaccctattgtgaaagcattatgtgtggcttatggcaaaccattagtatcaaccagcgcaaatttaagcggactgcctccatgccgtagtattgaagaagtaaaagagcagtttcgtaaccgaattgctattgtaaatggcgaggttggtggcaggaaaaatccttctgaaattagagatgcactcacaggtgagctatatcgacaaggataa

SEQ ID NO: 295232 - DNA, 558 bp, Proteus mirabilis
atggcaaaaataatgccgtttacgcatccatctgagcaagaaaaatgtcctgaatgtggcagtgatttaattataagaaatggtggccatggcccttttctaggatgttctgcttatcctaattgccattatattaaggcgttgaaatctcaaggcgatggacaggttattaaagtattagaaggacagccttgccaatgttgtggcgcagatttagttttacgacaaggtaagtttggcatgtttataggctgtagcaattatcctgcttgtgagcatatagaacaaattgataaacctgatgagactgtgattcattgtcctcagtgcgagaagggcaaattattacagcgtaagtctcggtttggtaaaatattttatgcttgtaaccaatatcctgaatgtcaatttgtactaaataacaaaccgattaatggtgagtgcgaatattgtcattatccattattgatggaaaagaggtcttctcaaggagtaagattagtgtgcgccagcaaattgtgtggcaagcaacaaacaaaaagagaagaacatgaataa

SEQ ID NO: 295233 - DNA, 1158 bp, Proteus mirabilis
atggatgccagagaaatatggataagacttaatgttgtttcaagattgccagtaaataaagcgattaaggtggtggaatacttacaatcattggcgcaattaaatcgtaaagtgttactagaatgtggcctatcagaacaacaaagtcaccaatttatgaggcttcaggcaaattgtgtcaaaagtacattaaagtggctagataaaaatgaatcatcactcttaacaatttctgattcagattatcctttgctattaaaacaaatatcttctccacctcttttgctttttgttgcaggtaataaagagcatttaaaaagcacacaaattgcattaattggtagtagagatgctacacagtatggaactaagtgggcgacttattttgcacaacagctcgtgaaaaataaattcacaattacaagcgggttggcgcaagggattgatggtgttggacatcgtagtgctttaaaacatcatggcgtcactattgctgtattggggagtggtttagaacaaatttacccatcatttcatcgtcgactagcagagcaaatcaaagagtcgggtgctcttgtttcagagcatcttccgatggctccacctttagctcgtcatttcccgcaacggaatagaattattagtggattgagttcagctctattaattgtagaagctggcataaaaagtggatctttaatcactgccaattatgctctacaacaaggcaaagaattgtttgtgttacccggattactgggtgattcacactttgaaggaaatcatcagttgctaaaacagggggcgaatttagcctcttcgccagatgatattatggaatatttaaatagctcttggcagtggttgatctttaatcataatgatgatttacaagacgagcatatcgcagaggttggctcagctgccaataaaaaagagtccagcaatatgccattagaaattgaaaaacttacacccactcaacagcaatcaataaatttgatattgcctttgttaggttttgataaagctatcccgattgatattattgcgaataagagcggtttatccacatcagatttagctcctcttttattagagcttgagcttatcgaaaaagtcgctattgtggcgggtggctatattcgattggaataa

SEQ ID NO: 295234 - DNA, 516 bp, Proteus mirabilis
atggcagtattacacgtattacattatccagacgagcgccttcgcaccattgcaaagccagtcgaaaaagttgatgccgaaattcaaaaaattgtcgatgatatgtttgaaacaatgtatttggaagaaggtatcggtttagctgcgacacaggtggatatccaccagcgcatcatcgtcattgatatctctgaaacacgagatcaaaaactagtactcattaatccagaacttcttgatcaggaaggtgataccggaatagaggaaggttgtttatcaatacctgaacaacgcgcatttgtgcctcgtgcagagcgcgtaaaagtaagagcgcttgattacaacggacaaccttttgaattagaagctgatgacttactcgctatttgtattcaacatgagatggatcatttagttggcaaattatttgtggattacttatctccattaaaacgccaacgtatccgccaaaaagttgaaaaactcgataagagaagagcaaaagcgggacaatag

SEQ ID NO: 295235 - DNA, 951 bp, Proteus mirabilis
gtgtctgattcattacgtattatctttgcgggaacacccgactttgcagcccgacatttagctgctctgttatcaactcaacatcatattgttggggtattaacaccaccagataaacccgcaggaagaggtaagaagctgacgattaatccagtgaaagaactggcattaactaataacattcctgtttatcaaccgacatcattaaaaccagaagagaatcatgagtggatcaaagcactacaacctgacgttatgattgttgtggcttatggtatgattttacccaaagcagtacttgatatccctcgtttaggttgcttaaacgtccatggctctcttctccctaaatggcgaggtgctgcacctatccaacgtgccttatgggcgggcgatacagaaactggcgtcaccattatgcaaatggatgttggtttagatactggcgatatgctttataaagcatcatgcccaattactcatcaagatacgagtgcttccctttatactaaattagcagagctggggcctaaagcactaattcatacattagatcttatcgttagcggtgagttaaaagcggaaaaacaagatgatagcttagcgaattacgcagaaaagctatcaaaggaagaagcaaaaattaattggtcgttatctgcacaacagatagaacgttgtattagagcgtttaatccatggcctatgagcttttttatgctcgatgatcagccggtgaaagtatgggaagcgcaagttatcgcgtcggataataccaatcaaataccaggtacattattgaaagcagataaaacaggcatttatatcgtaacaggtgaaggtattttaaatatcaccaagcttcaaccatcaggtaaaaaaccgatggcatcagccgatttcctaaattccaaacgagattggtttacccctgggaaaatcattcaataa

SEQ ID NO: 295236 - DNA, 1269 bp, Proteus mirabilis
atgaaaacgtcatacaacttacgcagtattgcagcaaaggcaatagctcaagttttagatcaaggcttatcattaagttcggtgatccctgaattacaaaaaaatatttcagataaagacaaagcgctcttgcaagagctctgctttggtaccttacgtaccttgccccagctagaatggatcatccaacaactaatggataaaccactgaaaggtaaacaacgaattttacattacctcattatggtcggtttatatcagctcctttatactcgagttcctgcccatgcagcactcgctgaaactgttaatggtgcgatcgcactgaaaaaaccacaattaaaagggttaattaacggtgtattacgccaatttcagcgtcaacaagatgtattaatggaacgtttccaaaataatgatagccgttatttgcacccttcttggttactcacacgaataaaaaatgcctaccctgagctatgggaaagtattattgaaggaaataaccaaaagccaccaatgtggttacgggtaaatcaaatacatcattcacgtgaacagtacttagcgctgcttgaaaaagaagggatcagcgcgttctccgatgaccaccaccccaatgctattcgtttagaaacaccttgtaatgttcacctgttaccagggtttaatgagggctgggtcactgttcaagaccgcagcgctcagcgttgtgcagaattattagcgccacaaaataacgaacaaattcttgatttatgtgcagcccctgggggaaaaacaacccatatcttagaaatagcccctaaagcgcatgttctcgccattgatatcgatgagcaacgtttagccagagttaaagaaaatctaaaccgcttaaagctacatgccacagtcaaaagtggtgatggacgttatccagagcaatggtgtgcaaatatgcaatttgacaggatcttacttgatgctccttgctcagcaactggcgttatacgtcgccatccagatatcaaatggctacgtcgtaatgaagacatagctcagttagcgcaaattcaaaaagaaatattacatgctatatggccatacctaaaatcaggcggcacattagtttatgctacttgttctattttaccggaagaaaatagccaacaaattgcagccttcttatcgtcaatgcaagatgctcaatgtgactatcagcatcaatgcttaccggagcaatatagcggtgatggcttcttttatgcgctgatcaacaaaaaatga

SEQ ID NO: 295237 - DNA, 1377 bp, Proteus mirabilis
atgaaaattattatcttaggcgcaggtcaagtgggtggcactctcgctgaaaatcttgtcggtgagaataacgatattactgttgtcgatactgatgctacccgtttacgtcaacttcaagataaatttgatttaagagttgtaaatggtcatggatctcatccgagagtcttaagagaagcgggggctgaagatgcggatatgctagttgccgtcacaaattctgacgaaacaaatatgatagcatgccaagtcgcttatactttatttaatactcccaataaagttgctcgtatccgagcctctgaatttgttcgtgaagcagataaactttttttaccagaagcaattcctattgattacctcatctccccggaacacctcgttatagattatatctataaactaattcaataccccggtgccctacaggtagtaaactttgctgaaggtcaagtcagtatcgtggcagtaaaagcctactatggtggatcacttgtgggtaatgcactatccactctacgtgatcatatgccacatattgatactcgtgttgcggctatctttcgccaagatagacctattcgccctcaaggatcgaccattattgaagcgggtgatgaggtctttttcgtggtggcatcacaacatattcgcgcagtaatgagtgagctacaacgattagaaaaaccttataaacgcattatgattgttggtggcggaaacgttggagcaggattagcggcaagattagaaaaagattatagcgttaagctgattgagcataatcaacaacgtgctaccgagttagcagagctcctccatgatactatcgtgttttatggtgatgcatctgatcaagagctactcgctgaagagcatattgagcaaatcgatgtctttattgcactcactaatgatgatgaagcaaatatcatgtccgcaatgctcgcaaaacgtatgggggcaaaaaaagccatggtacttattcaacgcagtgcttatgttgatttagtccaaggtggagtcattgatattgccatctctccgcaacaagccactatttcagcactattaggtcatgttcgcaaagcagatattgtcagtgtctcctcattacgtcgcggtgttgctgaagctattgaagccattgcacatggtgatgaaaatacctcaaaagttgtcggtagacgtattcaagatatcaaacttccgccaggcacaattatcggcgccattgtccgcaatgaagatgtcattattgccaatgcaagtcactcaatagaacaaggtgaccatgtgatcatgtttattacagataaaaaatatgttcctgaagtagaaaaactgttccaacctagtccatttttcttataa

SEQ ID NO: 295238 - DNA, 408 bp, Proteus mirabilis
atggcttttttcaaagagtttcgtgaatttgcaatgaaaggcaatgttgttgacatggcagtcggtgtcatcattggtgccgcattcggaaaaattgtttcatccttagtagctgatgtgattatgcctccattaggcttactcattggagggatcgattttaaacaatttagtttagtactaagagaggctcatggggatatacctgccgttatcttaaactatggtgcctttatacaaactgtttttgattttgccattgtcgcgtttgctattttctgtgcgattaaattaattaataagatgcgcagacaagaagaagaacaacctaaagcaccacctgcaccttcagcagaagaaactttattaacagaaatccgtgatctattaaaaaatcagcaaaaataa

SEQ ID NO: 295239 - DNA, 204 bp, Proteus mirabilis
atgtctagcaaatatcagcaccaaaaaggtgtgatcaaagataatgcgttagctgcacttgttcatgatcctttatttagacaacgggtagaaaaaaataagaaaggcaaaggcagctatatgagaaaggcaaaacataataagaaaggtaactgggaggccagtgataacaaatattttcaattgttatcactggccttttag

SEQ ID NO: 295240 - DNA, 414 bp, Proteus mirabilis
atgtatcgcatcggccaaattgcaaaattagcgaatgttacaacagatactatccgtttttatgaaaaacaaggattgatggaacatgatagacggacagaaggtggctatcgtctgtatacagaacaagatttgcaaagattacgctttattcgttatgccaaagagttaggctttactctggatgctattactgagttactttcaattagagtcgatcctgcgcatcatacttgtgtagaatcaaaacatattgttgatgctaggctagcagaagttgaggctcgtctaaaagaaatggaaaagatgcgtgattctttaaaaatgttaagcaatgcttgctgtggaaccgctcatgaaagtacatattgttcaattctagaaatacttgaatctggagcgacaaagcaataa

SEQ ID NO: 295241 - DNA, 387 bp, Proteus mirabilis
atgcgccatcgtaagagtggtcgtcaattgaaccgcaacagcagccatcgtcaggctatgtttcgcaacatggcaggttctttagttcgtcatgaaatcatcaagacaactttgcctaaagcgaaagaactgcgtcgcgtcgttgagccgctgattactcttgccaagaccgacagcgtagctaatcgtcgtctggcattcgcccgtactcgtgacaacgaagtcgtggcaaaactgtttacagtattaggtccgcgttttgcgagccgtgcaggtggttacactcgtattctgaagtgtggcttccgtgcaggtgacaatgctccaatggcttacattgagcttgttgaccgtgctgattctgaaacagaagcagctgctgaataa

SEQ ID NO: 295242 - DNA, 990 bp, Proteus mirabilis
atgcagggttctgtgacagagtttctaaaaccgcgcctggttgatatcgagcaagtgagttcgacgcacgccaaggtgacccttgagccattagagcgaggcttcggccacactctaggtaacgcactgcgccgtattctgctttcgtctatgccgggttgtgcggtaacagaggttgagattgatggtgtactgcatgagtacagcaccaaagaaggtgttcaggaagatatcctagaaatactgctcaaccttaaggggttggcggtaaaagttcatggtaaagatgaagtaattcttactttgagcaaatctggcattggccctgttattgcagccgatatcatccatgacggtgatgtcgaaatcgtcaagccgcagcacgttatctgccaccttacagacgaaaacgcatctattaatatgcgtatcaaagttcagcgtggtcgtggttatgtgccggcttctgcccgaattcattcggaagaagatgagcgccctatcggtcgtttactagtagatgcgtgttatagcccagttgagcgaatcgcttatactgtggaagcagcgcgtgttgaacaacgtaccgacttggataagctggtaatcgagatggagactaacggtactatcgatccagaagaatcgattcgccgtgcagcgactatcctggctgaacagcttgaagcttttgttgacttacgtgatgttcgtcagcctgaagttaaagaagagaagccagagttcgatccgatcctgctgcgcccagttgacgatcttgaattgactgtccgctctgctaactgtctgaaggcagaagcaatccactacatcggtgatctggtacagcgtactgaagttgaattacttaagacgcctaaccttggtaagaaatctcttactgagattaaagacgtactggcgtcgcgtggtttatctctgggcatgcgccttgagaattggccacctgcaagtatcgctgatgaataa

SEQ ID NO: 295243 - DNA, 621 bp, Proteus mirabilis
atggcaagatatttgggtcctaagctcaagctgagccgtcgcgaaggtacagatttatttctgaaatctggcgttcgggcgattgacaccaagtgtaaactggaacaagcaccaggtcagcacggcgcacgtaaaccgcgtctgtctgattacggtgttcagttacgtgaaaaacaaaaagtacgtcgtatttacggtgttctagagcgtcaattccgtaactactacaaagaagcaacacgtctgaaaggcaacacaggtgagaacttacttactctgttagaaggtcgtctggataacgttgtttatcgtatgggctttggcgcaactcgcgcagaagcacgtcagatggttagccacaaagcaatcatggtaaatggtcgcgtggttaatattgcttcttatcaggtttccccgaatgacgtagtcagcgttcgtgaaaaatcgaaaaaacagtctcgtattaaggctgctttagagctggctgaacagcgtgaaaagccaacatggctggaagttgatgctgctaagatggaaggtgtgttcaaacgtattcctgaacgtactgacttgtctgcggacattaacgagcacctgatcgtcgagctttactccaagtaa

SEQ ID NO: 295244 - DNA, 390 bp, Proteus mirabilis
atggcaaaagcacctattcgtgcacgtaagcgtgtaagaaaacaagtctctgacggtgtggctcatatccatgcttctttcaacaacacaatcgttactattacagaccgtcaaggtaacgcgttgggttgggctactgccggtggttccggtttccgtggttctcgtaaatctactccgtttgcggctcaggttgcagcagaacgttgcgctgaagctgttaaagagtacggaattaagaacttggaagttatggtaaaaggacctggtcctggtcgtgagtcaactatccgtgcattaaacgcggctggtttccgcatcactaatattactgatgtgactccgattcctcataacggttgtcgtccaccgaaaaaacgtcgcgtttaa

SEQ ID NO: 295245 - DNA, 357 bp, Proteus mirabilis
gtggcccgtatagcaggcattaacattcctgatcataaacataccgtaatcgctttaacatcgatttacggcattggtaaaactcgttcacaggctatctgtgaagcaacgggtattgctgaaaatgttaagatcagtgagctgtctgaagagcaaatcgacaagctgcgtgacgaagttgccaaatacgttgtagaaggtgatctacgtcgtgaagttaccctgagcatcaaacgtctgatggatcttggtacttaccgtggtttacgtcatcgtcgtggtctaccagttcgcggtcagcgtactaagactaacgcacgtacccgtaagggtccgcgtaagccgatcaagaaataa

SEQ ID NO: 295246 - DNA, 1323 bp, Proteus mirabilis
atggctaaacaaccagggttagattttcagagtgctaaaggtggtataggtgaactaaaacgcagattactgtttgttcttggtgcactaattgtctttaggattggctcttttattcctatccctggtattgatgccactgtgcttgccaaattgctcgatcagcaaaaaggcaccatcattgaaatgtttaacatgttctctggtggtgctcttagccgtgcttctatctttgcgctgggtatcatgccttatatttcggcatcgattattatccaactattatcagtggttaaccctcggttagcggagattaagaaggaaggggaggccggtcgtcgtaagatcagccaatatacccgttatggtactttggtgctggcgatattccaatctattggtatcgcaacaggcttaccgaatatgccaggaatgcaaggtctggttattaatccaggcttaccattctatattacggctgttgtgagcttagtcacagggacaatgttcctgatgtggttaggtgagcaaatcactgaacgtggtattggtaacggtatctcaatcattatctttgcaggtatcgttgcaggtcttccacctgccattggtcaaaccatcgagcaggcgcggcaaggcgaactgcacttcctcctgttattgttggttgcagtattggtgttcgcggtaactttctttgttgtttttgtagaaagaggacaacgtcgtatcgttgttaactatgcaaaacgtcaacaagggcgtagaatatacgcggcacaaagtacacatctaccacttaaggtaaatatggcgggtgtaataccggcaatttttgcttcaagtattattctgtttcctggtacaataacctcttggtttggcgatggtacaggatggggttggctgacgacaatttctttaaatttacagcctggtcaacctatttatgtgttactatacgctgctgcaatcatcttcttctgtttcttctatacggcgttggttttcaacccaagagaaacggcagataacctgaagaagtccggtgcatttgtaccaggaattcgcccgggagagcagacggctaaatatatagataaagtgatgacacgtttaaccttaatcggtgctctgtacattacctttatctgtctcatcccggagttcatgcgtgacgcaatgaaagtacctttctattttggtggtacttccctcttaatcgtggttgtggtcatcatggattttatggctcaagtgcaaactctcctgatgtcaagtcagtatgagtctgcattgaaaaaagcaaaccttaaaggctaa

SEQ ID NO: 295247 - DNA, 435 bp, Proteus mirabilis
atgcgtttaaatactctgtctccggctgaaggtgccaagcatgcgcctaaacgtgtaggtcgtggtatcggttctggcctaggtaaaactggcggccgtggtcacaaaggtcagaaatctcgttctggcggtggcgtacgtcgtggttttgaaggtggtcagatgcctttataccgtcgtttaccaaaatttggttttacttcacgtaaatcattcgtgactgcggaaatccgtctgtctgatttggcttatgttgaaggcgatgtaatcgatctgaatgcactgaaagccgcaaacgttgttggcccacagattgaatttgcaaaattaattctgtctggcgaggttaaccgtgcagtgactattcgtggtctgcgtgttaccaaaggtgcccgtgcagcaatcgaatcagctggcggtaaaattgaggaataa

SEQ ID NO: 295248 - DNA, 186 bp, Proteus mirabilis
atgaccatggctaagactattaaaattactcaaacacgcagtttaatcggccgtctgcctaaacataaggcaactatggctggtttaggtctgcgtcgcatcggtcacactgtagaacgcgaagatacaccagcagttcgcggtatgatcaacttggtttcctatatggttaaagttgaggagtaa

SEQ ID NO: 295249 - DNA, 501 bp, Proteus mirabilis
atggctcacatcgagaaacaagctggcgaactgcaggaaaagctgatcgcggtaaaccgcgtatcgaaaaccgttaaaggtggtcgtatctttagcttcaccgctcttacagtagttggtgatggtaatggccgcgttggttttggatatggcaaagctcgcgaagttccggcagcaatccagaaagcgatggaaaaagcccgtcgcaatatgaaaaccgtcgctttaaacaacggtactctgttccaccctattaaaggtactcatacaggttctcgcgtatttatgcagcctgctcatgaaggtactggtatcatcgcaggtggtgcaatgcgtgcagttctagaagtggctggcgttcgtaacgtactggctaaaacctatggttccacgaatccgattaacgtcgttcgtgcaacactggacgctttagatagcatgaagtctccagaaatggtcgcagctaagcgtggtaaatccgttgaagaaattctggggtaa

SEQ ID NO: 295250 - DNA, 354 bp, Proteus mirabilis
atggataagaaagcagctcgtatccgtcgtgcgacccgcgcacgccgtaagctccaggaactgggtgcgactcgcctggtggtacatcgtacccctcgccatatttatgcgcaggttattgcaccaaacggttctgaaactttggtggccgcttctactacagaaaaagctatcattgagcaactgaaaaacactggaaacaaagaagcagcagcagtagttggtaaaattgttgctgaacgcgctctggaaaaaggtatcaaatcagtatcatttgaccgttccggtttccaatatcatggtcgagtccaggcactggcagatgctgcccgtgaagctggccttcagttctaa

SEQ ID NO: 295251 - DNA, 534 bp, Proteus mirabilis
atgtctcgtgtggcaaaagcacccgtcgtcattcctgccggcgtagaggttaaactcaacggtcaggtaattacgattaagggtaaaaacggcgagcttactcgtactatccataatgcagttgaaattcaacatgctgacaaccaactaactttcgcaccacgcgatggttatgctgatgcatgggcacaagcgggtactactcgttcactgctaaatgcaatggttgtaggtgttaccgaaggcttcactaagaaactgcaactggtaggtgtaggttatcgtgcgtctgttaagggcaacacagttaacttatcagtaggttattcacatccagtggaacaccaactgccagcaggcatcactgctgaatgtccaacacaaactgaaatcctactgaaaggtgcggataagcaagtgattggtcaagtagcagctgaactgcgtgcttaccgtcgccctgaaccttataaaggtaaaggtattcgttacgccgacgaagttgtgcgtatcaaagaggctaagaagaagtaa

SEQ ID NO: 295252 - DNA, 393 bp, Proteus mirabilis
atgagcatgcaagatcccatcgcggatatgctgacccgtatccgtaacggtcaggccgcgaataaagttgcggtcacaatgccttcctccaagctgaaagtggcgattgccaacgtgcttaaggaagaaggttatatcgaagattttaaaattgaaggcgacactaagccagaactggaaatcactttaaaatatttccaaggtaaggctgtagtagaaagcattcagcgcgtaagccgtccaagtctgcgcatctataaaagaaaagatgagctgccacaagttatggcaggactgggcatcgctgttgtttctacctcaaaaggtgttatgactgatcgtgcagctcgccaagcaggtcttggtggcgagattatctgctacgtagcttaa

SEQ ID NO: 295253 - DNA, 306 bp, Proteus mirabilis
atggctaagaaatctatgaaagcacgtgatgtaaaacgtgcgaatttagctgagaaattcttcgcaaaacgcgcagaactgaaagctatcgtttcagatgtaaacgtatctgatgaagatcgttggaatgctgttctgaaactgcaaacactgccacgtgattcaagtccttcacgtcagcgtaaccgctgccgtcaaactggacgtccgcacggtttcctgcggaaatttggcctaagccgtattaaagtccgtgaagccgctatgcgcggtgaaatcccgggccttagaaaggctagctggtaa

SEQ ID NO: 295254 - DNA, 540 bp, Proteus mirabilis
atggcgaaactgcatgattactacaaagacgaggtagtccaaaaactgatgtctcagtttggttaccattctgtcatgcaagtccctcgggtcgagaagatcaccctgaacatgggtgttggtgaagcaattgctgataaaaaactgctggataatgcagcggctgatttagcagcaatctcaggtcaaaaacctctgatcaccaaagcacgcaaatctgttgcaggcttcaaaatccgccagggctatccgatcggctgtaaagtgaccctgcgtggcgaacgcatgtgggagttctttgaacgtctgatctctattgctgtaccacgtatccgtgacttccgtggtttgtccgctaaatcattcgatggacgtggtaactacagcatgggcgtgcgtgaacaaatcatcttccctgaaatcgattacgataaagtggatcgtgttcgtggtttggatattaccattactacgactgcgaaatctgatgatgaaggtcgcgcattgttagcagcgtttaacttcccgttccgcaagtaa

SEQ ID NO: 295255 - DNA, 315 bp, Proteus mirabilis
atggcagcgaaaatccgtcgtgaagacgaagttatcgtgctaactggtaaagataaaggtaagcgcggtaaagtaaaacaggttctttcttctggtaaagttatcgttgaaggtatcaatctggttaaaaaacatcagaagccagtaccggctctgaaccaaccaggtggcatcgttgaaaaagaagctgcaattcaagtttctaacgttgcaatcttcaatgcggcaaccggcaaggctgaccgtgtaggttttagattcgaagacggcaaaaaagttcgtttcttcaaatctaataaagaaactattaagtaa

SEQ ID NO: 295256 - DNA, 372 bp, Proteus mirabilis
atgatccaagaacagactatgctgaacgtggccgacaactccggtgcacgtcgcgtaatgtgtatcaaggttctaggtggctcgcaccgtcgctacgcagatgtaggtgacatcatcaaaattaccattaaagaagcaattccacgtggtaaagttaagaaaggtgatgtactgaaagcggtagtggtgcgcaccaagaagggtgttcgtcgccctgacggttctgtcattcgcttcgatagcaacgcttgtgtattgttaaacaacaacagcgagcaagttattggtacgcgtatttttgggccggttactcgtgaacttcgtaacgagaagtttatgaaaataatctctctggcacctgaagtactctaa

SEQ ID NO: 295257 - DNA, 255 bp, Proteus mirabilis
atgaccgataaaatccgtactctgcaaggtcgtgtggtaagtgacaaaatggaaaaatctgttgttgttgctatcgatcgtatggtgaaacatccattatatggtaaattcatccgtcgtacgactaaactgcatgtacatgacgagaacaacgaatgtggcatgggtgacgtagtagaaattcgtcaaacacgtcctatctctaagactaagtcttgggcgttagttcgcgttgtagaaaaagctgttctgtaa

SEQ ID NO: 295258 - DNA, 192 bp, Proteus mirabilis
atgaaagcaaaagagctgcgcgaaaagagcgttgaagagctgaacactgaattgctgaacttactgcgtgagcagttcaatctgcgtatgcaggcagcaagtggtcagttacaacagtctcatctgttgaaacaagtgcgtcgtaatatcgcacgcgttaagactttactgactgagaaggcgggtgcgtaa

SEQ ID NO: 295259 - DNA, 411 bp, Proteus mirabilis
atgttacaacctaagcgtacaaaattccgtaaagtgcataaaggccgcaaccgtggcttagctataggtacggatgtaagcttcgggacttacggtcttaaagctgtgggccgtggtcgtctgactgcacgtcagatcgaagcggcacgtcgtgcaatgacccgtgcagttaagcgtcagggtaaaatctggatccgagtgttcccagacaaaccaatcactgaaaagccgctcgaagtccgtatgggtaaaggtaaaggtaacgtagagtattgggttgccttgatccagccaggtaaagtcctatatgaaatggatggtgtgcctgaagaagtggcccgtgaagcatttcagctagcggcagcaaaactgcctatcaaaaccacctttgtaactaagacggtgatgtaa

SEQ ID NO: 295260 - DNA, 702 bp, Proteus mirabilis
atgggtcaaaaagtacatcctaatggtatccgccttggcattgtcaagccttggaattccacatggtatgcgggtaccaatgaattcgctgacaacctagacagcgattttaaagtgcgccagtacttaactaaagaactggcaaaagcatctgtatctcgtatcgttatcgaacgtcctgcgaaaagcatccgtgtgactattcacactgctcgcccaggtatcgttatcggtaaaaaaggtgaagatgtagaaaaactgcgtaaaaacgtagcggatatcgctggcgttcctgcgcaaattaatatcgccgaagtacgtaaacctgaactggacgcaaaattagttgctgacagcatcacttcacagctggaacgtcgtgttatgttccgtcgtgctatgaagcgtgcggtacagaacgcaatgcgtttaggcgctaaaggtattaaagtggaagtaagtggtcgtttaggcggcgctgaaatcgctcgtactgaatggtatcgtgaaggtcgtgtacctctgcacactctgcgtgcagatatcgactacaatacctcagaagcacatactacttatggtgtgctcggcgttaaggtatggatcttcaaaggtgagatcctgggtggtatggctgcggttgaacaggcggaaaaaccagccgctcaacctaaaaagcagcagcgtaaaggccgcaagtaa

SEQ ID NO: 295261 - DNA, 333 bp, Proteus mirabilis
atggaaactatcgctatacatcgccacgctcgttcttctgctcagaaggttcgcctggtggcagacctgattcgcggtaagaaagtgtcgcaagctctggaaactctgacctataccaacaagaaagctgctggtttagtgaagaaagtactcgagtctgctattgctaatgcagaacacaacgatggcgctgacattgatgatctgaaagtagctaagatctttgttgacgaaggtccttctatgaagcgcattatgcctcgtgcaaaaggccgtgcagatcgtattctgaagcgcaccagccacatcactgtggttgtgtccgatcgctga

SEQ ID NO: 295262 - DNA, 279 bp, Proteus mirabilis
atgccacgttctctcaagaaaggtccatttattgacctgcacttgctgaagaaggtagagaaagcggtggaaagcggtgacaaaaagcctgttaagacttggtcccgtcgttcaacgatctttcctaacatgatcggtttgaccatcgctgtccataatggtcgtcagcatgttccagtttacgtttccgacgaaatggttggtcacaaactgggtgaattcgcgccgacccgtacttatcgcggtcatgcagccgataaaaaggctaagaagaaataa

SEQ ID NO: 295263 - DNA, 825 bp, Proteus mirabilis
atggcaattgttaaatgtaaacctacgtctccgggccgtcgccacgtagttaaagtggtaaacccagagctgcataaagggaaaccttatgcgccattgctggaaaagaacagcaaatccggtggtcgtaacaacaatggtcgtatcactacccgtcatatcggtggtggtcacaaacaggcttaccgtattgttgactttaaacgcaacaaagatggtatccctgcgacagtagaacgtctggaatatgatccaaaccgttcagctaacatcgctttagtgctgtatgctgatggtgaacgccgctacatcctggctccaaaaggcctgaaagcgggtgataaagttcaatctggcgttgatgctgctatcaaaacgggtaacaccttaccaatgcgtaatatcccggttggttctaccgttcataacgtagaaatgaaaccaggtaaaggtggtcagttagctcgttcagctggtacttacgttcaaatcgttgcgcgtgatggtgcttatgtcactattcgtctgcgttctggtgaaatgcgtaagatcccttctgattgccgtgcaactatcggtgaagtaggtaactctgagcacatgttacgcgttctgggtaaagctggtgcaagtcgctggcgtggtattcgtcctaccgttcgcggtactgcgatgaacccagtagaccacccacacggtggtggtgaaggtcgtaactttggtaaacacccagtaacaccttggggcgttcaaaccaaaggtaagaagactcgtaaaaacaaacgcactgaacactttatcgttcatcgtcgtactaagaaataa

SEQ ID NO: 295264 - DNA, 303 bp, Proteus mirabilis
atgatccgtgaagaacgtctgctgaaagtactgcgcgcgccgcatgtatctgaaaaagcttctatcgcgatggaaaaatcaaacaccatcgttctcaaagttgctaaagacgcgaccaaagcagagattaaagcagctgtacaaaaactgtttgaagtcgaagttgaaagtgttaacactctgctgatgaaaggcaaagtgaaacgtcacggtcagcgtattggtcgtcgtagcgactggaaaaaagcttacgtcaccctgaaggaaggccagaatctggacttcgtcggcggcgctgagtaa

SEQ ID NO: 295265 - DNA, 606 bp, Proteus mirabilis
atggaattggtaatgaaagacgcgcaaggcgcgctgactgtttccgaaactaccttcgggcgtgactttaacgaagcgcttgtgcatcaagtagtcgttgcatacgctgctggtgctcgtcaaggtactcgtgctcagaaaactcgtgctgaagtttctggttcaggcaaaaagccatggcgccagaaaggtacaggtcgtgcacgttcaggttcaatcaagagcccaatttggcgctctggtggtgttagcttcgcagctaaaccacaggaccacagtcaaaaagtaaacaaaaagatgtaccgcggtgctctgaagagcattctgtcagaactggtacgtcaagatcgtctgatcgtcgtagagaagttctctgttgaagcgcctaaaactaagcttttagcacagaaactgaaagatatggctctggaagatgtactgattgtcacagcagaagttgatgagaatctgtatttagcagcacgtaacttatacaaagtagacgttcgtgatgcagcaacaatcgatccagttagcttaatcgccttcgacaaagtcgtcatgactgctgacgctgtgaagcaagttgaggagatgctggcatga

SEQ ID NO: 295266 - DNA, 630 bp, Proteus mirabilis
atgattggtttagtcggtaaaaaagtaggaatgactcgtatcttcactgaagatggcgtttcaatccctgtaaccgttatcgaaattgaaaacaaccgtgttactcaggtcaaagatctagagaaagacggttatcgtgcaattcaggtgactacaggtagcaaaaaagcgaaccgtgtactgaaacctgaagcaggtcattttgctaaagctggcgttgaagctggccgcttactgcgtgaattccgtctgaacgaaggcgaagaatacactgtaggtcaaagcattagtgtagaaattttcgctgacgttaaaaaagtcgacgttactggaacatctaaaggtaaaggttttgctggtactgtaaagcgctggaacttccgtactcaagatgctacccacggtaactccttgtctcaccgcgttccgggttctatcggtcagaaccagactccgggtcgtgtatttaaaggcaagaaaatggcaggtcaactgggtaacgaacaagttaccgttcagagcctggaagtagtacgtgttgacgctgagcgcaacctgctgctggtcaaaggtgctgtcccaggtgcaactggcagtgacctgatcgttaaaccagctgtcaaggcgtaa

SEQ ID NO: 295267 - DNA, 312 bp, Proteus mirabilis
atgcagaaccaaagaatccgtatccgcctgaaagcttttgatcatcgtctgattgatcaatcaactgcggaaatcgtagagactgctaagcgcacaggtgcgcaagttcgtggtccaatcccactgccgactcgcaaagagcgtttcacagtgttgatttctccgcacgttaataaagatgcgcgtgatcagtatgaaattcgcactcacaaacgtctggttgacatcgttgagccaaccgagaaaaccgttgatgctctgatgcgtctggatctggctgccggcgtagacgtgcagatcagcctaggttaa

SEQ ID NO: 295268 - DNA, 474 bp, Proteus mirabilis
atgaaaggtgataaaaaaatgatagcccaccttaataaattattaggtggtgaacttgttgcaattaatcagtatttcttgcatgcccgtatgtttaaaaattggggatttactcgccttaatgcgatggaataccatgagtctattgatgaaatgaagcatgctgataaatatattgagcgtattttatttttagaaggtatccctaacttacaagatttaggaaaactcaatatcggtgaagatgttgaagagatgttgcgttcagatcttgaactcgaattagggggagcaaaagacttacgtgaagctatcgcttatgctgattcaattcatgattatgtgagcagagatctgatgctagaaatcttaacggatgaagaagggcatatcgattggattgaaacccaactggagcttattgagcgtatcgggctacaaaactatcttcaagcgcaaatgattgaagagtga

SEQ ID NO: 295269 - DNA, 198 bp, Proteus mirabilis
atgtatgtctgtctgtgtcatggtgtgagtgataaaaaaattatctctactgttcataaacatcaaattcgaacaatcaatcaattgcgtcaaatcctacctgtaggcagttgttgtggtaaatgtatacgtcaagctcgtcaacttatagatgatgaacaacacctcctttatcctcaaatttctgaagttgcataa

SEQ ID NO: 295270 - DNA, 147 bp, Proteus mirabilis
atgccaacaccttgctatatttccattgaagggaaaacacaaggtaacatcacggcagatcctgtcagtaatatattacccacattatttatgccagaaggcataacggcgatgaaaaggttcaaatatgctaatgacaatgattaa

SEQ ID NO: 295271 - DNA, 750 bp, Proteus mirabilis
atgctaatgacaatgattaaattatttgttcttattccttatctattgttaggtggttgtagtgggcttatcaatatatatcttgataataaattccccgtcaatatgaataatgatggcaaaaaaatcacggtttattcaactatttcacctgaaacagcagtggaagttattggtacttatacgtcaaataagtgtgaacgttctcattttaatgcttcttatactaaagtcacttattcctctttaacgcaagaagtggaagcagaacgtaaaatagcagaggataataaaaccgcaacctatatcgtgcctattgatggagggggatggtgtaattggaagctagtagaaatagatatagccccagtctctactatttataaaagtcatatggtgattagtgaagttattccaattaccgatgacaagcattcaaaaatagaactatttactacattagctcccgtaatagtggaaagcaagaatgatcaaaaaatctattatgcatcatcagaaatggaaggtgaaaagaaattatctaataaattaaatggagaaatttattttaattataaagttgaacctaaactaaccacgactatttcaaatgataaaaaagctattttccctaatggcaatattaaaacactgagtggatcgacttatagtaaaatgattggttttaatgaaataatcgagaatagtgatgagaaagcgtttacttcttttgttcggtatattgattaa

SEQ ID NO: 295272 - DNA, 975 bp, Proteus mirabilis
atgaaattacaacagttgcgttatatcgttgaagtggtgaataacgatttaaacgtctcaacgacagcagagcgtttatatacctctcagccggggatcagtaaacaaattcgtatgctagaagatgagttgggtatacaaatattctctcgcagtggtaagcacttaacacatgtgacgccagcgggggaagaaattgtcagattatctcgtgagatattatccaaaacagaagctatccgctcggctgcaggggaacacacttatcctgatcgcggttcgctttctattgccaccactcatacacaagcgcgttatgttttaccccctgtgattaaaggttttatagaacgttatccggaagtgtcattacatatgaatcagggttcaccgacacaaattgcagaagatgtttgccgtggtaaaagtgattttgctatagcgacagaatcactacatctgtataacgatttagtgatgttaccttgttatcgttggaatcgtattgtggtggtaactaaagatcacccattggcgcaaaaacgtgaagttaccttacaagagcttgcaacttacgatatcgttacttatacccatggttttactgggcgttctgatcttgacgaagcctttggtaaagtgggtttaaagcctaaaattgtttttactgcaacggatgcggatgtaataaaaacttatgtcaggctacacttaggtattggtgtgattgcgagtatggcatttgatccgatgcttgatagcgacttagtcgctattgatatgcgtgataaatttagttatagcaccacaaaaattgcatttcgacgtagtggttttttacgcggttatatgtatgactttatgtggcgttttgccccacatctaacacgtaatttggtggaacaagcgacagctttacgcaccaatgaagaaattgaagagttatttaaagatatcgagttacctttagtttaa

SEQ ID NO: 295273 - DNA, 834 bp, Proteus mirabilis
atgaacaatcaacaagccgaacaactaaaaaagattatgatggctgatagttattttgcacaacctattacgcccccttttccacagcctttagcaataaaatcattacaacagacacttaatatcaaagatacagaaggacttgttcaatttattatcgcttcacctaaacgttttaacgaatcagaaaaaatgatcatgacacagctgaaagatatacaaattgccttaatctctattatgtcgaatcatctttcagtattaaaaaaagaagatagtgaagcttattatcaaccagagcattggctagaaacccttaatcatttgcctttgcttagccgtaataaagttgaaagcaaacgacttgataagcaaacatttgatttttcaattgctcaagcctttgtgcaactgttattaggtgcagccattaatgcagcgtcaccgtcattagccgagtttatcgattttttacgcaatcagggacaacaaattgaactaggaatacgccaatcctttgatagctataaaacgataactattgcaggtgtgacggaaatccttaatcataataatcagcttatttttgtacctaaattaaaaataatgagtctacgtttctcacatcgaacagccaaaatgttattagccagttgttcggggcgaaaatttacgatttcagtagaatacacaacaatcacctcaatttttgatattggtgcacttaatgatccactgattaatcgacaattttatgcttttttaaataagtttcgtcagttgagtattactcaatctgattcattttttagtggggactttttattgcaatag

SEQ ID NO: 295274 - DNA, 2673 bp, Proteus mirabilis
atgtcgttacgtctgaaaaaggagagtctttctacgctctctgtaggtactcatcaatatgagtattaccgtctttctgaagttgctcgtcaattaggggatatcactcgtctccctaaatcgttaaaggttctgctagaaaatttagtccgctatcttgatgatgatacggttgttgaagatgatattaaggcattggttgattggcaaaaaaatgcccacgcctcccgtgaaattgcctatcgcccagcaagagtattaatgcaagattttacgggtgtacctgccgttgttgatttagccgctatgcgtgaagccgtaaaatctttggggggaaatgtagaaaaagttaatccactttctcctgttgacttggttatcgaccattcggtgatggttgataaatatgccagtgatgatgcttttgagaaaaacgttgaaattgaaatgcagcgtaactatgagcgttatctctttttacgttgggggcaacagtcgtttgaacgttttcgtgtagtacctcctggaacgggcatttgccatcaggttaacttagaatatttaggtaaagcgatatggtctgaacaacaaaatggccgacatattgcttaccctgatactttggttggaaccgattcacatactactatgatcaatggtctgggcgtgttgggttggggcgttggtggcattgaggcggaagctgcgatgttaggccaaccgatttcaatgctgatccctgatgtggtaggttttaaattaacgggtaaactacgtgaggggatcacagcgactgacctagtattaaccgtaacgcaaatgttacgtcaacatggtgtggtagggaaatttgttgagttttatggtgatggactagcatctttacctcttgctgaccgagcgacgattgccaatatgtcacctgaatatggtgcaacctgtggcttctttcctattgacgaaattacactagattatttacgccttaccgggcgtgaagagcaagaaattgcattagttgaagcctatagtaaagagcaaggcttatggcgtcatgccggtgatgaacccattttcacctcaaccttatcgttagatatgggtactgtggaagcaagtcttgctggccctaaacgtccacaagatagagttaatttgctgaatgtaccaaaagcatttaaagctgctgtagagcttgaaacaaataaaaaacctcttgctcaatatcctcaggtcaccattgataatcagcctccttttaccttaacggatggtgcggtagtaattgcagcgatcacctcatgtaccaatacctctaaccctaatgtcttaatggctgcaggtctactggctaaaaatgcggtagaaaaaggcctacagcgtaagccatgggtcaaatcgtcactagcccccggctctaaagtggtgacagactacttagcactggcaggattaacaccttatttagataaacttggttttaatttggttggttatggttgtaccacatgtattggtaattcagggcctttattagccccgattgaagaggcgattaaagataatgatttaactatagccgctgtattatcgggtaatcgtaactttgaaggtcgtatccatcctttagtgaaaaccaactggcttgcttctcctcctttagtcgtggcttatgcgctatctggtaatatgaatattgatttgaccaaagagccattaggtgaaaataagcagggcaatccagtctatttgaaagatatttggcctgacagtaaagccattgccgatgcggtggaaaaagtaaaaacgcagatgttccataaagagtattctgcggtatttgatggtgatgaaacttggcaatcactaaaaatacaagataccccggtgtatgcttggcaacctgattctacctatattcgccatcctcctttttttgaaggtatgacaaaaacacctgaggcgattaaagatattcaccaagccagtattttagccatattaggtgactcggtgaccaccgatcatatttcacctgctgggaatattaaagccgatagccctgctgggcgttatcttcgagagcatggtgttgaaccaaaagactttaactcttacggttcaagacgtggtaatcacgaagttatgatgcgaggaacttttgcaaatatccgtattcgtaatgaaatggtgccggggatcgaagggggctttacaaaacatattccaacgggagaaacgttagccatttatgatgcggcgatgcgttatcagcaagaaaatacgcctttagccattattgccggtaatgaatatggatcaggctctagccgtgactgggccgccaaaggtacacgattattaggtgtgcgagtggtgatagccggatcgtttgaacgtattcaccgttctaatttgattggtatgggagtattacctttagaatttcctaacggtgtatcacgccagactttagggctcaaaggtgatgaaaaaattgagataacggggcttaattcgctaacaccgggtcaagatgtcgctgtcaatattacttttgcagatggtcgccaagaaactattatggctcgttgtcgtattgatacgcaaactgagctggcttattttgaacatggcgggatcttgcattatgttattcgtaatatgttgtaa

SEQ ID NO: 295275 - DNA, 816 bp, Proteus mirabilis
atgccattacatttttctggtaggatttttgcgtctcttttattagctgggacactattaacaggttgcgataacaatgataacaaccgttatgcaattaaagtgggggtgattaatggtgcagagcaagatgtggcagaagtcgctaaaaaagtggctaaagaaaaatatggtttagaggttgagctggtgggttttagtggctcattgttacctaacgatcccactgcaaacaaagaattagatgccaatgtgttccaacatcgccctttccttgagcaagataatcgttctcgtggttataacctcgtcgcggtaggcaatacctttgtttttcctatggcgggttattcaaccaaaattaaacatcctcaagaattaaaacccggtgatacaatagcactgcccaatgatccaaccaacttggggcgcgcattattattgctacaaaaagagaaactgatcaccttaaaccctgacagtggcctattacccacaacactcgatattattgataatccacttaaattaaatattatgcaattagaaggtgcgcaactacctcgagtattaaacgatccccaagtaacagttgcgataattagcacaacttatatccaacaaattaatttatcaccaaccaaagacagtatttttattgaagataaaagttcaccttatactaatattattgttacaagagaagataataaagaagcagagaatgtacgcgattttattaaagcctatcagtcacccgaagtggcaacagccgctgagactatttttaaaggtggtgctattcaagggtggtaa

SEQ ID NO: 295276 - DNA, 600 bp, Proteus mirabilis
atgaaattaagacgtatcgcagaagcaaaactccctactccttttggtgagtttttaatggtgggttttgaagaaattgccacaggaaaagatcatgttgccctcgtttttggtgacatttctggcacaaaacccgttttatcccgtattcattctgaatgtttaactggcgatgcactatttagcctgcgttgtgattgtggttttcagctagaagctgccctttcacaaattagcaaagaaggccgtggtgtattactttatcatcgccaagaaggtcgcaatattggtttacttaataaaatccgcgcttatgcattacaagaccaaggattagatactgtcgaagctaatctaaagttaggatttaaagccgatgagcgtgacttcaccctttgcgctgatatgtataatctattaggcatacatgaagtacgattattaaccaataatccaaagaaaatcgaaataatgaaagaagctgggatcaacgtggtggagcgtgttccattaatcgtaggacgtaatccaagtaatgctcattatcttgatactaaagcggataaaatgggacatatgttatttaaaaaagcgcaataa

SEQ ID NO: 295277 - DNA, 720 bp, Proteus mirabilis
ttgaataagcaaatatcagtattgatgcttttaggaagtggattgcttttgattgtacctattgtggtgcttattctgggatggcaatggcaaccatcagcacatcctctgggaggcgaaagcactttatggatagccaatagtgcggctaaaccttggggagctttaactatattactttgccttgttttgctcttttttattcttaaactacctaaaaaagcatttattcagttggcaattattatggtcgcgactttgatgttggggcagttgatcaaagtggttgtaaaaaatagcgttaaagagccacgaccttatgtggtttgggtcagtaaccaactatcaatatcaccagaacatttttaccaagtgtctcgtcctgagcgtgagcaactgttgcataatggattatctcattcgtcgctgatccctcaatggcaattaagccattggcgagcagaaaccggttatgcctttccttctggacacagcttattctctgcaacactggctttatttgtgtttgtgctgtgtatgttacgacgtcattattttttagccagcttagggatattatggggtattgatgtgactgtcggacgaataatattaggtatgcactgggcatctgatgtgattgtcggtattctgattagtgctgtgttggtgtggtgtgcattttggatgattgaacgacgattgttgttaaaaccttga

SEQ ID NO: 295278 - DNA, 318 bp, Proteus mirabilis
gtgaagaaagttctactttttattttggttgttctggtgctagctattgtcgtaatagccatgacgttaggttcaaataatgatcaggtgatcaccttcaattatcttattgctcaaggtgaatatcgtatctctactttattagccacgctgtttggtgttggttttgtactgggctggatcgtcagtggcgttttttacttgcgagtacgtttatcattagtaagagcaaagcgtaaaattaagcgccttgaaagtgagcaaaccaaacaagaaagccaagaaaatcgttctacagccgtttctactgtaaaataa

SEQ ID NO: 295279 - DNA, 1170 bp, Proteus mirabilis
atgcttgagttgctgtttctgttattaccggtcgctgcggcttatggctggtatatggggcgtcgtggtgcgcaacaggataaacagcaaaatgccgatcgcctgtcacgtgaatatgtggcaggggttaactttttactttctgatcaacaagacaaagcggttgatctgttccttgaaatgcttaaagaggatagctcagcctttgaagcacatcttactttaggtaatctatttcgctctcgtggtgaagttgaacgtgcgattcgtattcaccaatcgttaatggagagcgcggcactctcttttgaacaacgtcttctcgctattcagcaacttggccgtgattatgtcgcagcaggggtttatgatcgcgctgagcatatgtttttacagctgattgatgagcaggattttcgtcaaagtgcattacaatccctcctagccatttatcaacttaccagtgactggggtaaggcgatagaaaccgcagagaaattggtaaaactgggtcaacatgaacttaaagagcaaattgctcatttctattgtgaactcgcattgcaagaaatgagcagtgataatcttgataatgcgctaagttttctacaaaaagccgggcaaatggatccactttgtgcccgtgtttccattatgtatggtcgtatctatatcgcgcgcgatgaaaaaaataaagccattgatgtattaatgaaagtaattgagcaagataaagagatggtcagtgagaccttgccaatgctttttgaatgcttccaatctcaaggtgatcccgcacgttgggaagcctatctacgtcaatgtgtcgagagtaattgcggtgccattgcagagctttatcttgccgatattattgaagagaaagagggcattgaagccgcacagttatatattaatcgccaactagaacgtcatcctaccatgcgacttttctatcgtttaatgcgctatcatttagctgaagcagaagaaggacgcgcaaaagagagtctgatcttattacgttatatggtcggtgagcagatccgcacaaaacctgattaccgttgccataaatgtggttttacctcccatgcattatattggcattgtccatcctgtcgctcttgggataccgttaagccgatacgtggcttagatggtcagtga

SEQ ID NO: 295280 - DNA, 747 bp, Proteus mirabilis
atgtcatttgattgtgataaaaaatcgcccagctctacctgcgcgcccgttattgtggcactagactatgaagaccaaaaaagtgcactcgattttgcacaacgtatcgacccttcatcttgtcgccttaaaattggtaaagagatgtttactcgctttggaccgcaatttgtaacgcaattgcaacagcaagggtttgatattttcttagatttaaaatttcatgatatacccaatacggtggcgagagcagttgccgcagctgccgatttaggggtatggatggtaaatgtgcatgcgagtggtggtagtcgtatgatgcgtgcggcaaaggagagcttaagctcatttggcaaagaggcaccgctattaaccgctgtcactgtgttgaccagtatggatcaatccgatctcactgaattgggcattaacctaactccagcagaacaagccgaacgcttagcattactggctaaagcctgtggtcttgatggtgtggtatgttcggcccatgaagccactcgttttaaacaagtgtgtggtgatgactttttattggtcactcccggaattcgacccgcggggagcgaagtgggtgatcagcgtcgagttatgacgccagagcaagcgatagtggctggggtggattatatggtgatcggcagacctattacacgcagtgaaaatccactggaaactttacagcaaattaatcgttctatacaaggtgttgtgcaacatggataa

SEQ ID NO: 295281 - DNA, 324 bp, Proteus mirabilis
atggataataattctcggctggtttattctactgatattggtcggattaaagaagaagagcagaaacctacacgccccgccggtgatggtattgtgcgtatccaacgtcaaaccagtggccgtaaaggtaagggtgtttgtgttatctccggtattgatttggatgatgcagctctggctaaattagcggctgaattaaaaaagaaatgtggttgtggtggcagtgttaaagagggattaattgaaatccaaggtgataaacgggatttaattaaatctttattagaagcgaaagggatgaaagtgaaattggccggaggctaa

SEQ ID NO: 295282 - DNA, 1944 bp, Proteus mirabilis
atgtttcaagacaatccgctgcttgctcagctaaaacagcaactccatgcccaaacaccgcgcgtggaaggccttgtaaaagggacagataaaggctttggcttccttgaagttgatggtcagaaaagctattttatccctcctcctcaaatgaaaaaagtgatgcacggtgatcgcattattgctgccgtacatactaataatgataaagagtccgctgagcctgaagagctggtagaaccctttttgactcgctttgtcggccgtgttcagaaaaaagaaggtgataatcgtctatggattattcctgatcaccctctactcaaagatgccattccttgtcgtcctgtaaaaagcttaacgcatccatttgccgatcaagattgggcagtggcggaaatgcgccgacatcctcttaaaggtgataaacatttccaagctgaattaactgattttattaccgataaagatgaccattttgcaccttggtgggtgacattaatgcgtcatcaattagagcgaaatgcacctgaagtagacagtgaaacattaaccttacatgatgatctaccacgtgaagatttaaccgcgctctcctttgtgaccatcgatagtgcttcaaccgaagatatggacgatgcgttatatattcgtaaagaagaaaatggtcaactttcactgtatatcgctattgccgatccaacggcttatattcagcctaatagcaaattagataccattgcagcacaacgagcgctaacaaactatctaccgggctttaatatcccgatgttacctcgtgagctatcagataatctctgctcattgcgccctaatgaaaaacgtcctgcgttagtctgccaagtgggtatcatggaggatggtgcattaaccgatgagatccacttctactcagcatgggtagaatcaaaagcaaaactggtttatgacaatatttctgattggctagaaggtgaagaaacacagtgggcacctgaaaatgagattgttcatgaacaagtcatgctattaaaagagatgagcgagaaacgtcatgtatggcgtgaacaacatgctctcgtctttaaagagcgtcctgactatcgctttattcttgatgacagtggcaacgtattagatatcgtggcggaaaaacgtcgtactgccaaccgtatcgtggaagaagcgatgatcaccgccaatatttgtgcggcaaaggtacttagtcgcaatctcggttttggtatttataacgttcatactggttttgatccgctctatattgatcaagtctcacaaaccttaaaagagcacggtattgaaaccaacgcagatgagttattaacccttgaaggtttctgtcgcttacgtcgtgaactggataatcagccaaaccaattccttgatagccgtattcgtcgtttccaaaacttcgctgaaataaaaacagagccaggccctcattttggtttaggccttgaagcttatgcgacatggacatcaccgatccgtaaatacagtgatattttaaatcaccgtttattaaaagcgattatcagcaaaagtgcggcagaaaaaccgcaagatgaagattgtgttcgtattgccgaacgtcgtcgtgctaaccgtatggccgagcgcgatgtcggtgattggttatatgcgcgcttcttaaaaccttttgctggcactgagagtacctttaatgccgaaattattgatattactcgtggtggtattcgggtacgtttagttgaaaatggggctattgcctttattcctgcaccatttttacatgcggtacgtgacgaaattcaatgtagtcaagaaactggctctgtcattattaaaggtgaaacagcctataagctcaacgacattattccggtacgtattgaagatgtgaaactagaaacgcgtaatattgttgctcgtccgatttaa

SEQ ID NO: 295283 - DNA, 639 bp, Proteus mirabilis
atgaatcaagctaaacgtatagaaattttaactaggttgcgggataacaatccgcatcctactactgagttaagatttaactccccgtttgaattattgatctccgtgttactctctgcacaagccaccgatgttagtgttaataaggcaacagcaaaactttatcctgttgccaatacacctcaagcaatgctggaattaggtgttgaggggatcaaatcctatattaagaccattggcctatttaatacaaaagctgagaatgtgattaaaacctgccaaatattggtagataaacatcatggccaagttcctgaaaatagagaagctttagaggcattacccggtgtcggtcgtaaaacagcgaatgtcgtacttaacaccgcttttggttggccgaccattgctgttgatacccatatctttcgcgtgtgtaatcgcactaaatttgcaccgggaaaaaatgttaatgaagtggaacaaaaactgctaaaagtggtaccggcagaatttaaagtcgattgccaccattggcttatcctgcatggtcgttatacctgtattgccagaaaaccacggtgtggctcttgtattattgaagatctctgtgagtataccgaaaaaacagatccacaataa

SEQ ID NO: 295284 - DNA, 705 bp, Proteus mirabilis
atgagtatgatcaaagaactgttttcacaaggattatggaagaataactctgctttagttcaattattagggctgtgcccattactggcagtgtcttctaccgcgaccaatgctctaggcttaggtctagccacaacattagtattagtttgtaccaatgtggcagtgtctagtttacgtcgttgggttccctctgaaattcgtattccaatttatgttatgattatcgcatccgttgttagtgcggtacaattgcttatcaatgcctatgcttatggtttataccaatcgttaggaatatttattcctcttattgtcactaactgtattgtgattggtcgtgcagaggcgtttgcagctaaaaatgaagttttcccttcagcaattgatggctttgctatgggattaggtgcaacagcggcactctttgttttaggggcaatgcgtgaaatattaggtaatggcactttatttgatggtgctgatttattattaggtgaatgggcgcaagtattaagggttgagatagtacatttagactcacctttcttactggctattttaccacccggtgcctttattggtttaggttttatgctggccataaaatacctgattgatgaaaaacagaaaaaacgcgttccatccacgaccaaaacctatgaaaaagaacaaggttgtggcagtcatattgttaaaaactaa

SEQ ID NO: 295285 - DNA, 627 bp, Proteus mirabilis
atgatcgagatactaaaacgtcatgggttaacattagctatctttgcggcctgtaccacagggttaacggctgtcgtctatcacttgacggcgaatactatcgcagagcaagcggctttagaaaaacagaaattattagaccaagtgatcccaacctctctctacaataaccatctcgcgcaagattgttatattttgacagataaagcattaggtaatgaaaaaccacataaactttatgttgctcgttttaatggtaaacctgtcgccgccgcattagaatcaacggcacctgacggttattcaggggcgattgaattattagttggtgctgattttagtggcaaagtactcggtgttcgcgtgacaacacataatgaaacaccggggctaggtgataaaatagaaacgcgtatttcagattggatttactcattaagtaacaagtttattaccagtgatcatgactcacattgggcggtaaaaaaagatggtggtgattttgaccaattcaccggagcaactatcacaccaagagccgtcgttaatgcatcaaaacgcactgcatggttaatacaatctttacctgaaaaattagataccctttcagcttgtgaggcgaattaa

SEQ ID NO: 295286 - DNA, 1077 bp, Proteus mirabilis
atgaaatttagaccaatacaaaataacaatagcaaattgaaaatcgccagctctccatttactcataatcaacaatccaccagtcaagtgatgttgtgggtaatattggccgctattccaggtattctatgccaactatacttctttggtttagggacgctatatcaaatcatcttggcaatcattgtcgcgctattggcggagactatttgtgtcaaactcagaaaagaagatccacttctatacctaaaagataattccgctttactaacaggtatcttactagcaattagtattcctcctttagcgccttggtggataattgttttagggacattttttgcggttgttattgccaaacatatttatggcggattaggtcaaaacccatttaatcccgcgatggtcggttatgtggtgctattgatctcttttcctgtacaaatgacatcatggatgccccccattgaattacaagcagtgtcttataactttatagatagcttaagtattttctttaccggacatacaccctcaggactcacccttgaagatttaagacgctctgtagatggcattacccaagccacaccacttgatagttttaaaaccggattattaacccactctattgatgaagtattagcaacgccaatcttacaaggtggatttgcgggaatgggttggcaatgggtgaatgttgcctatctggttgggggcgttatcttgttatataaacgaattattagctggcaaattcctgttgccatgttaacgctacttggtgtttgttcactgatcagttgggggatcgatgctactcgttactctcagccactattacagcttttctcaggtgcgacgatgttaggggctttctttattgccaccgatcctgttagcgcctccaccacaccaaaagggcgattaatctatggtgcaatcattggcctattagtgtggattattcgtgtctatggtggttatcctgatgccgtggccttctcagtcctattagctaatattgctgtaccgcttattgatagttatacccgtcctcgggtttatggacattaa

SEQ ID NO: 295287 - DNA, 2514 bp, Proteus mirabilis
atgtttaatctcttttcgttatttaaaaaagataaaatttgggattttaaaggcggcattcatcctcccgaaatgaaattacaatcaagtcgcacgcctatgcgtatagcccagttaccggatgaggttaccatccctattcatcaacacttaggtactcctgggcaactttgcgttaaagtgggtgatcatgttttaaaaggccaagccttaactcgtggcgtaggaagaacattacctgttcatgcttctatatcaggtacggttacggcaatagagccatttccaagcactcacccttctggtctacctgaaattgcagtgaaaattgtctctgatggtaaagacgaatggcgagaaaaatcaccactagttgactatcaatcacaaagtaaagaggtattgcttacccgtattcatgaagcaggcattgctggattagggggagcgggttttccaacagccacaaaattaaaaggtggtggtgatttagttaaaacgctcatcataaatgccgctgaatgtgagccttatatcacggctgatgacagacttatgcaagagcacgcagatgaagttattgcgggttgtcagatattaatgcatatactgtcaccggatgaagtgctgattggtattgaagataacaaacctgaagctattgccgccttaaaacaagcattagcagcactcacaaatgaaaaacgtatttttattcgggtgatccctaccaaatatccatctggaggcgctaaacagttaaccaaaatattaacgggcaaagaagttccttctggcggtcgctcctctgatattggcgtattaatgcaaaatgtggggacggtagtggcaattaaacgtgccattatcgatgatgaacctttaattgaacgtgtcgtcaccgtaactggacaaggggctaaaaccccaggcaacttttgggcgcgtttaggtactcctatttatgcacttataaaacaagcaggctttgttgctggctctgagcagatggtcattatgggggggcctttaatgggcttcaccttacctgacttaaatgcccccgttataaaaattactaactgcttattaattccctctccagaagagatggatacagataatattgaagaagcctgtatccgttgtggtcaatgtgttgacgcctgccctagtggtttactaccacaacaactttactggtttagtaaagggaaagagcatgagaaagcgcaacaacataatttatttgactgcattgagtgcggggcttgtgcttttgtctgccctagtaatattccattagtgcaatattaccgccaagaaaaagcagaaatacgagaaattgatgcggaagctaagcgagcggctgaagctaaggctcgctttgaagcgaaaaaaatccgtatggaacgagaaaagcttgaacgtgaggcaagacatcaacgtgctgcagttaagcttgatgatcaccaacaaaatgaagtgcaatctgcactttctcgtgtaaaagaaaaacatagcattggcaaaattattgctgttaaagcaggagaacaacctgacaacgcagcggctattgctgcacgcaaaaaacgtaaagaagaagcccgagcaaaacaagctgctaaattggcacaacaggtaccacaaaatacccataccaccgccgatgcagaaagtgatccgcgcaaagccgctgtagcggcagcattagctcgtgtaaaagctaagaaagctcaacaagcgcaagcaactgcaaaagtagacactcctgctgaaactcaggctgaggtggaaaccgatccacgcaaagccgctgtagcggcagcattggcccgcgtaaaagctaagaaggctcaacaagcgcaagcaaccgcaaaagtagacacacctactgaaactcctgctgatgctgagctggaaatcgatccgcgtaaagctgctgtggctgctgctattgctcgggtaaaagctaaaaaggcccaacaagcacaagcaactgcagaaatagacactcctgctgaggctcaggctgaggtggaaaccgatccacgtaaagcggctgtcgccgctgctattgctcgggtaaaagctaaaaaggcccaacaagcacaagcaactgcagaaatagacacacctgctgaggctcaggctgaggtggaaaccgatccacgtaaagcggctgtcgccgctgctattgctcgggtaaaagctaaaaaggcccaacaagcacaagcaactgcagaaatagacacacctgctgaaactccggctgatgctgaggtggaaaccgatccacgtaaagcggctgtcgccgctgctattgctcgggtaaaagctaaaaaagcccaacaagcgcaagcaactgcaaaagtagacacaccggctgaaactcaggctgaagtggaaaccgatccgcgcaaagccgctgtcgctgctgctattgctcgggtaaaagctaaaaaagaagcacagcaacgccatgctaaagaagaagtgacattggattaa

SEQ ID NO: 295288 - DNA, 627 bp, Proteus mirabilis
atgaattctttatggatagcaattggtgtactgggtgtactagggcttctattcggcctgattttaggttattccgctcgtcgctttaaagtagaagaagatcctattgtggaaaaaattgatgccatattaccacagagtcagtgtggtcagtgtggtcatcctggttgccgcccttatgcagaagcggtagctaataatggagaaatgattaaccgttgtgcaccgggtggtgaacaggttatgttaaaaattgccgaactgatgggggttgatccacaaccacttgacggtgatgaagaagcattaaatccggtgagaaaagtggctttaattgatgaagacaactgcatcgggtgcacaaaatgtattcaagcatgcccagtggatgccatcgtcggcgctactcgtgcaatgcacaccataatagaagatctctgcacagggtgtgatttatgtgttccaccttgtccaacagactgtattactttagttcctgtgaaaatgacgacctctaattggaaatgggatttaaatactatccctgtaagaaatattcctgcagagccagaagaaacacccgaagatgaaccgtcattaaagacggaggataacgctcatgtttaa

SEQ ID NO: 295289 - DNA, 582 bp, Proteus mirabilis
atgactgattacttgcttttattcgttggtaccgtcttggtgaataactttgtactcgtcaaattcctcggtttatgcccatttatgggtgtatcaaaaaaattagaaaccgcgataggaatggggtttgcgacaacgtttgtcatgacgattgcctctattagctcttggctaatggatacctttattttagttcccttagacttactctatttacgtacactcagctttattttagtgattgctgttgtggtgcaatttacagaaatggtcgtaagaaagacgagtccaacgttatatcgtctattggggattttcttacctttaattaccaccaactgtgccgtattaggggtcgcgttactgaatatcaatcaatcacatacctttatgcaatcagcagtatatggttttggtgctgcggtaggattctccttagttatggtgttatttgcagccattagagaaagactggctgtcgccaatattcctgctcctttcaaaggctcttctattggcttaattactgcgggtttaatgtctcttgcctttatgggttttagtggtttggtgaaactgtaa

SEQ ID NO: 295290 - DNA, 468 bp, Proteus mirabilis
atgaaattaaaacctcagacaaacgttttgcccgagcaatcccctaaagcccctattacgggttggttacttgcccctttggcttatttgctgttgtcgatagtgggcttaggtttaatgtctgttttatatttaatacgatatttttcagatttttcgattatccaccagctaccttttcatatggtatcaagctggtatctttccgtgttaacaacatgggcgatgtttgcatttaccgcttatttattaagacagttcttttaccgcgctaaaaattttcctcgtttatttattatttggttattaattaacttattgttggcgataaaaagtttcggttttgcccctgttgatgatcaaaccgcggttaagtcactattatgggccgttatggcaactgtctgctttgtgccttatatcaaatatgctaagcgtgtccgtgaaactttcacacaagatcgataa

SEQ ID NO: 295291 - DNA, 1044 bp, Proteus mirabilis
atgacaaaaaatttaaacgtggggattataggctatggttatgcaagtaaaacctttcatgctcccctgatctgtaccactgagggggtaacactgtcagccatttcaagctctgatgaaagtaaagttatcgctgattttcctaatattacggtgtatgccaacccacaacgactgattgatgatccagacatcgatttaattgttattccaacacctaataacactcactatacctacgcctcacaagccttaaaaaacggtaaacatgttgttgtcgataaaccttttactttgacactcgatgaagcagaaaaattggcacaacaagcgaaagaagctaagagattactctcagtttttcataatcgtcgttgggatgccggttttcttaccgttcaaaaattactcgccgataaaacattaggtgaagtcagtgcctatgaagcgcatttcgatcgttttagacccgctgtgcgccaacgttggcgtgaagatgccggacttggtggaggactttggtacgatctggcccctcatttactagaccaagcggtatgtctttttggtcaaccttatgcaatcactgctgatattgctcagttgcgccctaatgctaaaaatgctgactactttcatacactattagactatggtcatctgaaagttattttacatgcctctatgttggttgcctcacctacgcctatttttgctattcatgggaccaaaggcagttatgtaaaatatggtttagatacccaagaagatgcattaaaagcgggttatctcccgactgaaatgtataactggggggctgatcctcaagagggtgaattaacattatcgacagagagtggtgaattagtaacaacaaagttaccgactctatcaggtaattatcccgcttattatcagcaaatttatcgtgcgattgcatttggtgaagagagtcctgttactgtgtcacaagccattaatgttatgcgtttaattgaagccgggagcctttcaaatcaatcaaaaaccacaattaagctgtaa

SEQ ID NO: 295292 - DNA, 987 bp, Proteus mirabilis
atgtcttggtggcaaaagctaaaaattgactcttttttaatgattatgatcttggtggtcatactcgcaacattattacctgcgcaaggtgagataaaagtcatctttcaacatctcactacggctgcgatcgccttattgttttttttgcatggggcaaagctttctagagaagcgatattgtcaggacttggtcattggcgcttacatttagtggtttttgccagtacttttgttttattcccattactagggttgggactacagtttatggtacctgactggatgtcacctaccgtttatatgggatttttatatctttgtgctttacctgcgacagtacaatccgctattgcctttacttctgttgccggtggtaatgtagcagcggcaatctgtagtgcatcagcatcaagcattttaggggtatttttatcccctgtgctggtgggttttttaatggaaacacaaggctctgctgagcattttgatactgcgggggcgatacaatctattttattacaactgatggtgccttttattatcggtcatttatctcgtccattaattggccgttgggttgataatcataagatgttagtgaatagaaccgatcgctcttctattttgctggtggtttatgttgcatttagtgaagccgtcgttgaaggtatttggcataaaattgacggttggtcgttattgactatcaccattgtcagttgtgtattactggctattgtacttgttattaatatttatagtgcaagatggcttggctttaataaagctgatgaaatcacgattgtattttgtggctcgaaaaagagcttggcgaatggggttcccatggcaaatgtactatttcccgcagcaacggtggggatcatgctattaccgctgatgctatttcatcaaattcaattaatggtttgtgccatattagctcagcgttatgccaatcaagctaaaaaacaccatcagtag

SEQ ID NO: 295293 - DNA, 1002 bp, Proteus mirabilis
gtgattgacacacagttgcctttaaccgatttgcaccgccatttagatggaaacatccgtccggaaacaattttagatttagcacaacaacataatattgccctacctgcctatgagctagaaacattgcgcccacatgtgcagataactaaaaatgagcctagcttagtgagcttcttacaaaagctagattggggcgttgctgtactcgccgatttagacgcttgtcgccgtgttgcttatgagaacgtcgtcgatgttgctaatgcaggtattgattacgcagaattacgcttttcaccttactatatggccatgaagcatcaattaccgattgaaggtgttgttgaagcaattattgatggtgtacaaagtgccttacacacttatgatgttgagatccgtttaatcggcatcttaagccgtacttttggtgaaaatgcctgccagcaagaattaaatggtctattaaaacatcaagataaaatcaccgcacttgatttagctggcgatgaattaggtttccctgggcatttattccaacctcactttaaccgtgctcgtgatactggctggaagatcaccgttcatgcaggtgaagcggctggtgctgaaagtatttggcacgcgattaaagaattaggggcaagtcgtattggtcacggtgttaaagccattgaagatccccgtttgatggattatctcgcagagcaccaaattggtattgaatcttgcttaacctcaaatattcaaaccagtactattgcctctttagcacaacatcctcttaagaagttcttagagcacggtattatcgcctcgctcaatactgacgatccggccgtggaaggtattgagttaaaacatgagtatactgttgctgctcctgcggcgggtttaactgcagcacaaattcgccaagcacaaattaatggtcttactatggcttttattagccaagctgaacgtgatgcattaattaaaaaagtgagtttaggttaa

SEQ ID NO: 295294 - DNA, 1287 bp, Proteus mirabilis
atgtcttttcaggaacaacagattacatttgatagtcgtcatcatcagttaaccaatataaatgtttggacaccagatagccagtggttagtttatgatgtacgtcccaatggtggatcttttacaggattaaccatagaaaaaattcatgcgaaaacaaaacagcaacagataatttacaccgccactcaaggcgctcatgttggggttgccacaataagccctgtggcaccggtacgttatgcttttattcatggcccagaaaatcccgatgatttatggcattatgattttcatcaccgtcgcggtgtgattgttaatgagcaggaagatcttggtgcagttaatattgatgcttgttccctgacatcgccttatcaagctggcgcgttacgtggtggaacccatgtgcatgtgtttagccctgatggtacacgtttaagctttacttataatgatcacataatgcatgagttagggcgcgagttcgatcaacgtaatgttgcaatcgcagtgccactcaaagccgttaaagttgcgaaaaagcacccccgtgagtatgacggtgaatatttctgtaccctaataagccaaacagtcgcttatccacaaaaaggcagtgatgaaattaataaagcctatgaagagtgttggataggtaaacaaggttataccaaagctgatggctcacaacagcgttgggctattgcttttattggtgatacggtcagtgaaagtggtgagaaggtcgctgatatcttcttagttgatttgccagatgatgatcatgctttcagcctagaaggtgataaacctctggcaggaacagagacgacgatgccagctcctgcacaagggattgaacaaattcgcttgacgaatacccaccatagaaaatatcccggtgttttaaatcaacctcgtcattggttaagaagttcaccgcaaggagatgcggttgcttttctgatgaaagatgatgatggtgttgtccagctatataccgtttcgccaaccaccaaagcgattagacaggtcacttcacagcaatgggatattcaatctgcattcacttggagccatagcggagaatatctcacctttatttgtgataatagcgtgatgttatgtaatgctaaaacaggtgaattaacgcgattaactgataaaacagcacaagcaccaagtggtgacgcagtcgtattttcacctaatgatcagtatattgcttttatgcgtgatattgatggttatcggcaaatatttacggtagaaagtgggttataa

SEQ ID NO: 295295 - DNA, 618 bp, Proteus mirabilis
atgttacttagtgttctttatattattggtattaccgcagaagccatgacaggggcacttgccgctggtcgtcgtaaaatggatgtttttggcgttatcatcattgcatcagccactgctattggtggtggttcagtaagagatattcttcttggtcactaccctttaggttgggtcaaacaccctgagtatattgtcacagtagcttgtgcagcggtgatcactatttgggtcgcccccatgatgaaacacctgcgacgtttatttctcattttagactccatcggattgatggttttttccattatcggtgcccaaattgcactcgatatggaatatggtcctattattgctgccattgcagccgtgatcaccggcgcttttggtggcgttttacgtgatatgctgtgtaataccattcccctcgtcttccaaaaagagatctatgcgggtgtcgcatttggcgccgcttggctctacatgggattactgttttacacgccactccctaaagatgtcgtgattattattacgcttgttgccggactcacggctcggctactcgctatccgctataagcttggcttacccgtatttaattatgaaaatcaagattag

SEQ ID NO: 295296 - DNA, 624 bp, Proteus mirabilis
atgatccaaggaacactttatattgtttccgctccaagcggtgcgggtaaatcaagtcttattcaggctttattaaaaacacagcctttatatgacacacaggtttctgtctctcatactacccgcccaatgagaccaggagaaaaccatggtgagcattacttctttgtcactgaagaagaatttaaaagtatgatagcaagtggagattttatcgaacacgcttgtgtgtttggtaactattacggtacatcgggtaaagttatcaaacagatcttagccagtggcgttgatgtctttttagatatcgattggcaaggtgcgcagcaggtacgtaaaaagatgcctgaagctcgcagtatttttattctgccaccgtctaaagaagagctttaccgccgacttcgcgggcgtgggcaagatagtgaagaagtgattgctaaacgtatgtcacaagctgtgtctgaaatggaacattttaatgagtatgactatttgctcatcaatgatgatttcaatactgcgcttgctgatttacaatcaatcattcgctcagaaaaattacgccttgatcgtcaaacactacgacatggtgatttaatcagcaaattattggcagactga

SEQ ID NO: 295297 - DNA, 276 bp, Proteus mirabilis
atggcacgcgtaaccgttcaagacgctgtagagaaaattggtaaccgttttgacctcgttctggtcgcagcacgtcgtgcgcgccagttacaagttggcgctaaagatcctttagtaccagaagaaaatgataaaatgacggttatcgcactacgcgaaatcgaagaaggtttgattaacggtaaaattcttgatgctcgtgaacgtcaagagcagcaagagcaagaagccgcagaattacaagcggtttcagcgattgcggaaggtcgtcgttaa

SEQ ID NO: 295298 - DNA, 2127 bp, Proteus mirabilis
ttgtacctgtttgaaagcctgaatcaaatcgttcaaaaatacttgccacctgagcaagttgaacaactcaaaaaagcctttatcgtcgccagagatgcccacgaggggcagactcgttcaagtggtgagccttatattactcaccctgtggcggttgcctgtattcttgccgatatgcgattagatcatcaaacgctaatggcggcattgttgcatgatgtcattgaagatacacctgcgacatttaaagatatcgaaactctgtttggcagtacggtggcagatctggttgaaggcgtctcaaaactggataaattaaagtttcgagataaaaaagaggctcaggctgaaaactttcgcaaaatgatcatggcgatggtaaaagacattcgcgttattttgatcaaattggcagaccgaactcacaatatgcgcacgctgggttcactacgcccagataaacgtcgccgtattgcacgtgaaacgctggaaatttatagtcctcttgctcaccgtttaggtatacaccatattaaaactgagctagaagaattaggctttgaggcactacatcctaatcgctaccgcgtgattaaagaagttgttaaggcagctcgtggtaaccgtaaagagatgattaataaaatcctctctgaaattgaagggcgccttacagaagcgagtattcaatgcaaagttaacggtcgcgaaaaacacctttattccatttatcgtaaaatgttgctaaaagagcaacgttttcactcaattatggatatttatgcctttcgcgtcatcgttaaagatgtcgatacctgctatcgcgtgttaggccaaatgcatagcctttataaacctcgccctggccgcgttaaagactatattgctatccccaaagctaatggttatcaatcccttcacacttcgctcattggtcctcatggtgtccctgttgaagtacaaattcgtaccgaagatatggatcaaatggctgaaatgggcgttgcggcccattgggcttataaagagcaaggtgagcagccggggacaacagcccaagtcagagcacaacgttggatgcaaagtttacttgaattgcaacaaagtgcaggtagctcttttgaatttatcgaaaacgtgaaatcagacctttttcctgatgaaatttacgttttcaccccagaaggtcgcattgttgaattaccaacgggtgcgactccggttgattttgcttacgcagttcatactgatattggtcatgcttgtgtcggtgcaagggttgatagacaaccttatccactctcacagtctttacgtaccggacagaccgttgaaatcattactgcgccgggtgcaagaccaaatgcggcttggttaaactttgtcgtcagttcaagagcccgttcaaagataagacagttgctcaaaaatctaaaacgtgaagactctattaatttaggtcgtcgtctacttaatcacgctttaggccatcataaagtggcagatattccgctagaaaatattgaacgagagttgaagcgcatgaagcttcactcaatggacgatattatggctgagataggtttaggtaatgcgatgagtgttgtcgtggcgcgtaacttattgattgacaaccaacaacaagaagaacacacacatctaagcataaccaatgacgaaacacctaaattacctattaaaggggctgatggtgtacttatctcatttgctaaatgttgtcgccctattcctggtgatcctattgttgcgcacattagccctggtaaaggcttagttattcatcacgaatcttgtcgtaatattcgcggttatcaaaaagagccagaaaaattcatgccggttgagtgggataaagatattgatggtgattttattaccgaaatcaaagtcgatatgataaaccatcaaggtgcattagcgaatttaaccgcagcaattaatgacgctaattcaagcattcagagcatgaataccgaagagaaagatggacgcgtctattgtgcatttattcgactgacagccaaagatcgcatccaattagccaatattatgcgtaaacttcgtatcatgcctgatgtattacgtgtcagccgtaataaaaactaa

SEQ ID NO: 295299 - DNA, 720 bp, Proteus mirabilis
atgaatccaacacgctatgcccgcatctgccaaatgatggcgatgcggcaacctgatctcactgtttgccttgaagaagtgcataaatctcataatgttgctgctgtaatacgcactgcggacgcggtggggatccctaaaatccatgctatctggcctgaagaaaaaatgcgtatgctggtttctcccgcagcgggcagtaatagctgggtaaatgttaatactcacccaaccattgccgacgccatcaacacttttcgtgcacagggcatgcaagttcttgcgacccatctctcagataaagcggttgattttcgtgagattgattacacacaaccaacctgtattattatggggcaagaaaaaactggtatatcaccagaagctatcgcgctggcggatcaagatatcattgtaccgatgatgggtatggtgcaatctttgaatgtttctgtggcgagtgcattaattttatatgaagcacaacgccaacgtcaggcggcgggcatgtataatcgaaccgaaagtgcattaactgcagaagagcaacaaattttactctttgaaggtggctatccagtacttgctgaagtttctcgtcgtaaaggactgcctcgcccttatattaatgatcgtggtgaaattgaagcaccggactcatggtgggcagaaatgcaaatgacacaaaaacaacttaggaaatttaaactgacggagtaa

SEQ ID NO: 295300 - DNA, 2088 bp, Proteus mirabilis
atgaaaggaaaactgcttgatgcaatccccttaaccactcttcacggcgtaggtgcaagtcaggcagataaactggccaaaatagggttagtcactgtggaagacttattgcttcatcttcctttacgctatgaagatcaaacccatctatatgccatcagcgatctacttcctggtattccagccactgtttccggtgaaatcttaagaaccgaagtaaattttggtcgtcgaaaaatgatgacctgccaaatttctgatggttcaggtattttaaccttacgcttctttaacttcacggcagccatgaaaaataaccttgctcagggtaagcaagttatcgcttatggtgaaataaaacgaggaagtcgaggccctgaaattattcaccccgaatacaaaattaaagtagctggctcagaagttaagttacaagaaacgcttacccctatttattcaacaacagaaggcttacgccagacatcgttgcgtaaattaatagaacaagccttaaccttacttgatacttgtgccattaatgaactgcttcctgatcaatttatttatggtttaccgccactcgctaccgcgttacgaaccttacataatcctccccctgatattgcgttttctgaacttgaaaaggggcaacatcctgcacaaaaacggctgattattgaagaattattggcgcataacttaggtatgcttaatgctcgggcaggagcacaatcctatcgtgcagaacccttactaatgccacatggctcaacattacgtgaacaatttcttgcaacattgccctttacccccaccacagcacaacagcgcgtcgtcaatgaaatagagcaagatctagaaaaaaattatcctatgatgcgcctaattcaaggggatgttggctcaggtaaaaccttagttgctgcactaagtgcattaagagcgatagccaatggtaaacaagtggctttaatggcacccactgagttactagcggagcaacatgccctcacctttagaaaatggtttgagccttttggtattcaagtggggtggttggctggcaaacaaaaaggtaaagcgcgagaagcacaacaaaatgcaatagctaatggcgaggtttccatcattattggcactcacgccatttttcaagagcaagttaagtttcactctctcgcattagtcattatcgatgagcaacatcgctttggagtacatcaacgccttgcattatggaaaaaaggcgaagagcaaggctttcatccacaccaattggtgatgaccgcaacccccattcctcgaacactggcgatgaccgcttacgcggatatggatacctccattatcgatgagctacctcctggtagaaccccagtaacgacagtggctatccctgacactcggcgaaatgacatcattgaacgtatcagggtggcttgtagcgaagaaaatcgccaagcctattgggtttgtacgttaattgaagactccgaagtccttgaagcacaagcagcacaagttatttatgatgagctgacgattgccttaccggaaatcaagattggattggttcatggtcgaatgaagccggcagaaaaacaggcggtgatggccgactttaaagaaaacaaactacagcttttggtcgcaacgaccgtgatagaagtcggggtagatgtacctaatgccagtttaatgatcattgataaccctgaacgattaggtcttgcacaattacatcagctacgagggcgtgttggtcgaggtgctgtggcttcccattgtgtcttattatatagaacgccgttaactcaaactgctcgtttacgtttacaagtgctcagagacagtaatgatggctttgttattgcacaaaaagatctcgagataagaggaccaggtgaactattaggaactaagcagacgggcaatgcacaatttaaagtcgcagacttattacgcgatcaggcgcttattcctgaagtacaacgtattgctcgttatttacatcaacattatcctaagcattcgcaagcgttaatcgaacgctggctacctgcaaagacccaatatagccaagcttaa

SEQ ID NO: 295301 - DNA, 1215 bp, Proteus mirabilis
atgtatcatctcgatgtttatggcacgctagtcgcggccactttggttcttttactcggacgtaagttagtgaaatctgttccttttttagaacggtatacgatcccagaacccgttgcaggtgggttacttgttgcagctcttttacttgcattaaaatcatttatggactgggaaattagctttgatctctccttaaaagatccactgatgctcgctttttttgcaacaattggtttaaacgcgaaccttgccagcttaaaagcgggaggaaaagcgctgtttatttttgtgtttgtggtcgttggattacttttagttcaaaacacagtaggtattgcattagcagaaatgctaggccttgatcctcttatgggattattagccggttctattaccttatcaggtggtcatggaacgggtgccgcttgggggaaaacattcgttgaaagctacggctttatgagtgcctctgaagtggctatggcttgtgcaacctttggtttagtgttaggtggattaattggtggccctgttgcgcgttatttaattcgtaacattccaacccctggcgcaggcagtgatgatcatgaaatgcctacagcctttgagaaacccgctacggggagaatgatcacttcaatggtgttattggaaaccattgcgatgatttctatctgtttaatggcagggactttcttatctcagttactagaaggtacggctttctcattacctacctttgtgtgtgtactgttcattggcgttattttaagtaatagtctatcaatgctcggtttttatcgtgtatttgatagagccgtttctgttttaggtaacgttagcttatcgttatttttagcgatggcgctgatgagcttaaaattatgggagctggcatcactggcaatacctatgttggttattctcggtgttcaagcggcagtaatggcattgtatgcaatttttgtcactttccgtgttatgggtaaaaattatgatgcggcaattttggcagcgggtcactgtggtttcggtttaggcgctacgccaacggctatcgctaatatgcaagctgtgacagatcgttttggtccttctcatcttgcattcttagttgttccgatggtcggtgcattctttattgatatagtgaatgcgatagtgatcaaattgtatctgatgctaccattctttacgcctatagcagggtga

SEQ ID NO: 295302 - DNA, 1344 bp, Proteus mirabilis
  misc_feature (47)..(56): n is a, c, g, or t
atggttacttcagaaaatcgtaatttgtcacaaagtagtcagatttnnnnnnnnnnatctagccgatattcttgcctaaaagtaaataataattttgtcgccgtaataacccctgctatcttaatttgccaagcattagggttacctgcacatgacactcaacgcattatcagtatgtcattattcgcctcaggtattgcatcactgatccaaattcgagcttggggtcccgtaggttcaggtttattatcaattcaaggcaccagttttaattttgtggctcctctgattatggggggattggcattaaaaaatggtggcgcggatattccaacaatgatggcggctctatttggcactttaatggttgcttcacttaccgaagtgctattatcgcgttttttacatttagctcgccggattatcacaccattggtatcaggaattgtggtgatgattatcggcctttctttaattcaagttgggcttacttctattggtggtggttacgccgctattgaaagtaacacctttggctcacctaaaaaccttttattagcgggttcggtattagtggttattattttacttaaccgtcaaagaaacccttatttacgtgtcgcttctttagtgattgctatggctgtcggttatattttggcatggtggctagatatgctacctacaccgcctgaacaacaagaaacaccgattatcaccgtaccagaacctttctattatggcctctcatttgattggcatttacttatcccactaatgctggtgtttatgatcacctcattagaaaccattggtgatattactgccacctcagatgtttcagaacaacccgtcagtgggccactttatatgaaacgcattaaagggggcgtattagcaaatggattgaactctatggtttctgcattttttaatacctttccaaactcctgttttgggcaaaataacggcgttattcaattaacaggtgtggcaagtcgctatgtgggctatgtcgtagcagccatgttgattattttagggttatttccctctgtggcagaatttgtacaacgaattcctgaacctgtactagggggggcaacgcttgttatgtttggtactatcgctgcatctggggtgcgtatcgtctctaaagaggcactaaatcgtcgtgctattatgatcctcgccatctctttggccgtaggacttggggtatcacagcaacctcaaatattacagtttgcacctgattggctaaaaacattactgtcatccggtattgctgcaggcggtctaaccgctattattttaaacctgatttttccacccgaaaaataa

SEQ ID NO: 295303 - DNA, 1689 bp, Proteus mirabilis
atgcgctggctgataaaaagtttggtatctctgatacttatcgttattttatttattattgtgatttatgcctttcttcaaacacaatggggtgcgcaaaaaaccagtgaatggttaacacagtatagtgattatgacattcgcttttccggtattgaacatgatttaactcaaccagaacaaattgttgtttatgatctgtccattaaccccaaacaagataaaaccgccgtattagcccaatcagcacaacttagatttaactggcaattttttactatgccgtcccatctgcaaaaaattactttagagaatggtaaaattattttagctaataaaatagctccccttcctgttagtgcagatattctccagtttaaaaatatgcagttagatagcatgccaacatctagcacaacattcacctttagcgctaacaaaataacgggaggtatcacaccttggaaacctacctcgaccgatcctattggtgcggggcattttcagttttccattgctgatggcatgataggaaaaaatagctttaataattttattgttgctggcgaatatcaaccaaatcgtattttgattgaaaaattagccacccagttccttaatggctcactctctttatcaggccaatatcaagataaccaatggcaacttaatgatgtttacttaaccggactgcgttggcaatccacaaaaaccttagaagagttacaacaatcattaagtcaatctccagtaatgactatcaagcaattgaacattgttgattttactgccgaagggaaacagtgggcaataagtggattggctgggcagttttctcaaattgagtggaataatagcctatcactgacatccggtgagctaaacaccgatgatattgtatataaaaatcaacatgtcactgatgtgatcgctaagttaaatcagcaagataatttatttaacatagataatttaagcttacgctatgaaaaagggctaataaaactagcaggacaatggaacagcgagacaaagactttaaatattgaagatgcaacactctcaggtattttatataccctacctgagcaatggctctccttctttgctaaacctattgagcaagatgtgaagagtatcaatattaagcagttatcattaaaccaatctatcctcattgatattaatcccctcttttcttttcaatttaccggcctaacaggccaactgaaaaatttaatcatcgccaaagatgggcaatggggattatggcaaggcaccgcgacgttaagtgctgatagtggtacattaaatggcgtagagcttcgccgccctgacctaacattaatgacacaacaagatactgccattatcccacagttttctgctttcgtagataaaggcatcgtgcgtggctctgctgcattagaacaaaacaataaccaaagactattttctcttatcgtcaatgggctgaatgtgcccctctctttgcctaataatatgggttggaaattatcgcaacctaccgatgaaacaggacaatttaccttaaagcttaaaggcaacttagccgctgacgctgttataccgaccttaaatggtacattaataggtaaaaaagatgaccaaacgcctatcgatgacaggatgcaagacggcgaaataataaataatttatccttttga

SEQ ID NO: 295304 - DNA, 240 bp, Proteus mirabilis
atgtctgatgacaatttttccctgccaacaatcactcttgatgaatttcagcaagcacccttaaccgcacttgaaaatagtagtagtgtcgaagtgtgtgataataaccaaactccgttattttattgcctatcaaaacaggattatgacacgctaatggggcgtattatggatgcagaattagccgccattgtacttgaacgtcgccaaaagaaactcgatgaactggatttagagtga

SEQ ID NO: 295305 - DNA, 879 bp, Proteus mirabilis
atggacaccaatttatctactcgtcttaataaatatatcagtgaaagcggtatctgttcacgtcgtgaagccgaccgttatatcgagcaaggtctggttcttatcaatggtaagcgcgcaggcattggcgatcgcgtaacggctggcgatgaagtgaaagtgaatggacgattaattgaagcgcaagataattctgagctggtgttgattgcactgaataaacctgtaggtatcgtcagtaccacagatgaaggtgagaaagataatattgttgattatgttaaccatagcacccgtgttttcccaattggtcgtttagataaagattctcagggactgatttttttgactaaccatggtgatctggtcaataaaatcttacgggcgggtaactcccatgaaaaagagtatttggtcacggttgataaacccattactgatgaatttattcgcggtatgggggcgggtgttcctattctgggacaaaaaaccaagaaatgtaaggtgaaaaaagaagccgcaatggtatttcgtattaccttagtacaaggtctaaaccgtcaaattcgtcgtatgtgtgaatattttggttatgaagtcaccaagcttgaacgtatccgtattatgaatgttagtttggcgggattacctgtcggggaatggcgtgacttaacggatgatgagctgataaagctatttgatgctattgaagcatcaagctctgaagcccctaaacagaagcaaaataaacctaagaaacagataagtagtaatgcgaaagcgttagggatccatattccgaaaacaaaagccaaagagacggaaaataatacgcgtaaacgctttgcacaaccggggcgtaaaaagaaaaaacgttag

SEQ ID NO: 295306 - DNA, 915 bp, Proteus mirabilis
atgtatcatttacgaacccctaagacgcaagcagaattagcagcttattatacttttcgttgggaaatgcttcgtaaaccgttacatcagcccgaaggctccgaaaaagatggttatgataccttagcgcatcaccagatggtggttgatgacagtgggcaacccgttgctattggtcgtctctatataaatgccgataatgaaggtgcaatccgctttatggcggtacgtgaggatgctcaaggtaaaggattaggctctttagttgccatggcgttagagtctttagctcgccaagaaggggtaaagcgtattgtttgtagcgccagagaagagtctgttcgtttctttgaaaaattaggttatgagaattgtggtttagtcacaggccctcaaactaccccgatcaaacattactttatgaaaaaaagtattgaatcattagatgatattctccatcgtcctgattggtgcgcggagttgcaaaaacagtggcatcagcatatccccctaagtgaaaaaatggggttacgtattacgcaatatacgggcacccgtttttataccacgatccctgaatccggtaatcaaaacccacaccatactatttttgccggtagccagttttctttagcaacactgaccggttgggggctgatttggttgttaatgcaagagcataaactgcaaggcgatattgtgctggtggatgcgcatattcgttatcgtaaaccagtctctggtcggccgtcagccgttgctgatatggaaaatttaagtggtgatttaggacgattagcgaaaggaagcaaagcacgtattaagttagatgttgatatttgtggtgatgaaggaacgggggcggtttttagcggcacttacattgtgttaccctcacaaaataaacagtgctaa

SEQ ID NO: 295307 - DNA, 438 bp, Proteus mirabilis
atgattgcgttaatccaaagagtgacacaagcgaaagtcgatattgccggtgtgactgttggcgccattaatcacggcttactcgtgctattaggagtagaaaaagacgataaccaacagaaagcaaaaagattgtgtgaaaaagtgtgtggttatcgtattttcagtgatgaaaatgacaaaatgaatctgaatgtacaacaagcaggtggtagcctattagtcgtatcgcaatttacactggctgccgaaacccaaaaagggatgagaccgggtttttctaacggagcgcctcctgaaatggctgaaaatttatatcactattttgttgagcagtgtaagcaacaaggtttagaaacccaaacagggcaatttgccgccgatatgcaggtcaccctgactaatgatggcccagtgacattctggttgcaggtctag

SEQ ID NO: 295308 - DNA, 618 bp, Proteus mirabilis
atgctttatatctttgatatgggtaatgtgattatcgatattgatttcaatcgtgtttttgccgtgtggagtaaactcagtggggttccattagccagtataaaagataattttacgactggggaaacctttaaactacacgaacgaggcaatattacggatatagaatttgcagaagctgtctgtgctgagcttggtattggactgagttttgaacagtttgcagaaggatggcaggctatttttatcgctgttcgcccagaagtcatagatataatgaataagctaagagagcaaggtcatcgtgtggtggtattgtcaaatactaatcgattacatcaagattattggcctcagcactatcctgaaattgccgcttcagcggactttctctatttatcccaagatatcggtatgagaaagccagatcctgaagtgtataaatatgtgctacagtccgaaggcgttgaagctcaagatgctgtcttctttgacgatttacaaaccaatgtcgatgcagccattgcgctaggtattcaaggcgttcatgtcgtagataaaaatacggttgttgaatactttaaagatcatgattttactctcccagtaacagaataa

SEQ ID NO: 295309 - DNA, 1818 bp, Proteus mirabilis
gtgatcgaaaacttgcgtaatatcgccatcatcgcccacgttgaccatggtaaaactactattgtcgataaattactacagcaatctggcacgttcggtgaacgtgaaaccgttgctgagcgcgtgatggactctaatgatctcgaaagagagcgcggaattactattcttgcgaaaaatacagcgattaaatggaatgactatcgtattaatatcgtagataccccaggacacgccgacttcggtggtgaggtagaacgcgttatgtctatggtagacagcgttctattgctggttgacgcgatggatggcccaatgccacaaactcgctttgtgacacaaaaagcgtttgctaacaacttaaaacctatcgttgttatcaacaaagttgaccgtccaggtgcacgccctgattgggttgttgatcaggtctttgatctgtttgttaacttaggtgcgactgacgaacaactggatttcccaattatctatgcatcagcattaaatggtattgcgggaacagattataatgacatggctgatgatatgactccattatatgaagctatcgtcaaatatgtagagccgccaaaagtcgatctggaggggaccttccagatgcagatttctcagttagattataataactatctgggtgttattggtattggccgtattaagcgcggtaaagtaaaacctaatcaacaagtgactatcatcgatagcgaaggtaatacccgcaacggtaaagtaggtaaagtattaggtcatttaggcttagagcgtatcgatgttgacgttgcagaagctggcgacatcattgcgattacaggtttaggtgaattaaatatttctgatacgatttgcgaagtaggtgctgtggaagcattacctgcattagccgttgatgagcctactgttagcatgtatttctgtgttaatacatcaccattctgtggtcgtgaaggtaagtttgttacttctcgtcagattttagatcgtctgaaaaaagagttagttcataacgtagcactgcgtgttgaagagactgaagatccagatgcattccgtgtatcaggtcgtggtgaattacacctatcagtactgattgaaaatatgcgccgtgaaggttacgaattagccgtatctcgtccgaaagttatcttccgcgagattgatggtcgtaaacaagagcctttcgaacaagtcactatcgatattgaagagcagcaccaaggtgatgtgatgcaagcgatgggtgagcgtaaaggtgaaatgcgcgacatgcaaccagatggtaaaggacgtgtacgtttagactacattatccctagccgtggtttaattggcttccgtactgagtttatgacgatgacatcaggtactggtttactgtacgcaacattcagtcattatgacgatgtgcgcccaggtgaaatcggtcgtcgtaataatggtgtgatgatctctaatggtcagggtaaagccgttgcttacgcgctgtatagcttacaagatcgtggtaagttatttgttactcatggtgcagaagtttatgaaggccaagttattggtattcatactcgctctaatgacttaacagtaaactgcttaacaggtaaaaagctgacaaatatgcgtgcttctggtacggatgaagcgacaacgctgacgccacatatcaagcaaacattagaacaagcattagagtttattgatgatgatgaattagtggaagtgactccacaatctattcgtttacgtaaacgtcatctctcagaaaacgatcgtcgtcgtgcttatcgtagcaaagactaa

SEQ ID NO: 295310 - DNA, 1410 bp, Proteus mirabilis
atgtcccttgaacatgtgttatccatgattgaagaacataaagttagatatattgacttacgtttcactgatacccgcggtaaagaacaacatattactattccggcgcatcaagttaacgatgatttctttgaagaaggaaaaatgttcgacggctcctctattggtggttggaaaggcattaatgaatcagatatggtgctaatgcctgatgctacaacagcgatgcttgacccatttttccaagatccaacattaattattcgttgtgatgttttagagccaggcactatgcaaggttacgatcgtgacccgcgctctatctcaaaacgtgcagaagactacttaaaatcaagtggtatcgctgacaccgtcctatttggccctgaacctgaattcttcctttttgatgatattcgttttaaaaatgatatctctggtgcttcttatgccatcaatgatattgaagcagcatggaataccaatacacaatatgaagaaggtaacaaaggtcatcgcccaatggtaaaaggaggttacttccctctccctccggttgattcctcacaagatattcgctcgaccatgtgtaatatcatggaagagatgggcttagtggttgaagcacaccaccacgaagtcgcaactgcaggtcaaaatgaagtggcaacccgctttaataccatgaccaaaaaagcagatgaaactcaaatttataaatacgtagtacaaaacgtcgctaacgtatttggtaaaaccgcgacctttatgccaaaacctttagtgggtgataatggctcaggtatgcactgccacatgtcactgtctaaaaatggtgtcaatttatttgctggtgataaatatggcggattatctgaaatggcgctgtattacatcggtggtattatcaaacatgctcgtgcattaaacgcatttactaacccaaccactaactcatataaacgcttagtgccgggatttgaagcccctgttatgctggcttattctgcccgtaaccgctcagcatccattcgtattccggtagtcgctagcatgaaagcacgccgtatcgaagtgcgtttcccagatcctttagctaacccttaccttgcatttgcagctcaattaatggcaggtcttgatggtattatcaataaaattcacccaggtgatgccatggataaaaacctctatgacttacccccagaagaagctaaagagatcccaacagtggcaggttcattagaagaggcgctcaatgcccttgataatgaccgtgaattcttaacccgtggcggtgtattcactgatgatgctttagacgcttatcttgagctattacgtactgatgtgcagcgtgttcgtatggcaccacacccacttgaatttgaaatgtattacagtgcgtaa

SEQ ID NO: 295311 - DNA, 1047 bp, Proteus mirabilis
atggaaacggcggatttacctgataacacacttattttggattcattaatccactcagtattggttatcaaccaagagtttattatttgctatgcaaaccatgctgcattgcaattactggctcaaagtcgtcgtaaattatttgaaaccccttttagcgcactgtttagttattcctcttttgatgaacagttaatgcgtgaaacattagcaaatgggcaaagcttcactgataacgaagtgattttggttattaataaccaatcacacactatgtcgctcagtgcccagcctatttccgagcaacacattttgttggagctggcgcctatggatagtcaacgccggttaagccaagagcagatacaacaagcacaacaaatggcggctagggaattggttaggggactggcacatgaaattaaaaatccactcggtggattacgaggggcggctcaattattagcaaaatcattacctgatcctgcgctgactgagtatacccaagtcattattgaacaagccgatcgcctaagagcgcttgtggataggttactcggcccacaacatcccggcaccaaaacctttcagagtattcatcatgttgtagagcgtgttgcacaacttatcacattagaatgccctgaaaatgtcaccttactcaaagattacgatcctagtctacctgagctttcacactatccggatcagattgagcaggtcttgttaaatatcacccgcaatgcattacaggcagtggagaaaactgggggaactattattttgcgaacccgaacagcgttccaagtcacactgcagggtgaacgtcatcgactagtggctcgcattgatgtgattgatactggcgcgggtattcctcctcatctacaagacacgcttttttacccgatggtcagtggcagagaaggcggaaatggccttggtttatccattgcacgtagcttagtcgaccaacacgccggtaaaattgagtttaccagttggccgggaaataccgagttttctatttacttgccaataaaatag

SEQ ID NO: 295312 - DNA, 1422 bp, Proteus mirabilis
atgcaaaaaggaaatatatgggttgtcgatgatgatagctctattcgctgggtgcttgagcgagctattacacgagaaggccttacatgtaaaaccttcgaacacgctaatgacgtcctcagtgcactcaatagtgaacttcccgatgtattattatcagatattcgtatgcctgatattgatggtttatctctattaaaaagcgttaaagagcaacaccctacgttgccggttattatcatgacagcgcattctgatcttgatgccgcggtaaatgcttatcagcaaggggcatttgattatctccccaagccttttgatattgatgatacacttgcactcattcatcgtgctattacgcactatcgagagcaaaaacaacctaatacaacagaaactaaccttcaatctgtctctgacatgattggcgaagcccctgcgatgcaagaggtttatcgcattattggtcgcctttctcgctcatcaattagtgtgcttatcaatggcgagtcgggtactggtaaagaattagttgcacatgctcttcatcgccatagcccgagagcacaagccccttttattgcactcaatatggcggctattcccaaagacttaattgaatcagaactttttggtcatgaaaaaggggcatttactggtgcatctcaagtacgccaaggccgttttgaacaagcaaatggcggttccctctttcttgatgaaattggcgatatgccactggatattcaaacccgcttattacgcgtcttggctgaaggacaattttatcgtgttggcggttatgcccctgtgaaagtcgatgtgcgtattattgccgcgactcatcaagacttagaaaaacgcgtaatggaaggtgattttcgtgaagatctctaccatcgactcaatgtaatacgtattcaattgcccccactgcgtgatagaacagaagatattccaagcttagcgcgttattttctccaaaaaaccgctcgagagcttggtgttgaaaccaaagtgctccaccagcaaagtttacattgcatgatggaataccactggtcaggtaacgtcagacaattagaaaacgtatgtcgttggttaacggttatgaccgctagccaagagattatgccgcaagatttacctcaagagatccgccaatcagatgagaagagcaaatcgatacctcgagtctcctctcaacattggtcacaacatctttcattatgggcggatgaggtattcagtgaaggcaaagaaaatattcttaatgacgctctaccgcaatttgagcgcaccttactactcagtgcgctttcctatacaaaaggccataaacaagatgctgctcgtttattaggatggggaagaaatacgctgacacgtaaattaaaagagttaggtatagaggagttttaa

SEQ ID NO: 295313 - DNA, 1374 bp, Proteus mirabilis
atgtcagaacaaacaattatttgggatcttgacctgatccataagtataactattcaggtccgcgctacacatcatacccaacggcattggaatttaatcagcaatatagtgatgcggatttcgaacaagcaacaaagcgttatcccgaacgacctctgtcactgtatattcacattcctttctgccataagttatgttatttctgcggttgtaataaaattatcacgcgccataaacataaagctgatgaatatcttgatgttttagaaaaagaaattattaatcgcgctcgctattttaaaaatagaaaagtgacccaaatgcattgggggggcggtactcccacttttcttgataaacagcaaattagtcgcttagtcgccttattaagacaacattttcattttgtggaaaatgctgagctctctattgaaattgatccccgtgagattgagttagatgttattgatcatttacacaatgagggatttaaccgcctaagtatgggggtgcaagattttaataaagaggtgcaacaaaaagttaatcgtgaacaagatgaagcatttatcttttcattagtagcaagagcgcgtgaagtgggctttcattctaccagtattgatttgatctatgggctacctaaacagactaaagaaagttttgcttttacgttaaaaaaagtgattgaattgtcccctgatcgcttaagtgtgttcaattatgcccatttacctaatttatttgccgcacaacgtaaaattaaagatgaagatttaccacttgcagaagaaaagttagagatcttgcaagagactatcaccacactcaccacaaatggttatcagtttattgggatggatcactttgctaagcctgatgatgaattagcggttgcacaacgccaaggcattctacatcgtaatttccaaggatataccactcatgaagagtgtgacttattgggaatgggcgtttcagctatcagtatgctgggtgatcactatgcgcagaacgaaaaagtgctaaaagagtattatgctcgcgtaaatagcgaagggcatgcgttgtggcgtggactctctctaactcatgatgattgtattcgtcgcgatgttattaagaccttgatttgtaatttccatcttaactttactgagattgaaaatctatatcagcttgatttccaagattattttaaagaagacttagcattgcttgcaccaatggcagaagatggattggtggagatcagcgcagaaaaaattcaggtcactccaagaggacgtttattgatccgtaatatttgtatgtgttttgatacttatttacgtaatcaaatgcgccaacgccaattctctcgagtgatttag

SEQ ID NO: 295314 - DNA, 1665 bp, Proteus mirabilis
atgagcttatcgtttaaattatctgcatgcgcactgacagtgactttagcaatggcgcctgtgatgtctcaggcatgggaaaaagataaaacttaccaaattaccatcctacatactaatgatcaccacggtcacttttggcacaatgatcatggtgagtacggtttagctgctcaaaaaaccgtcgttgacaatattcgcgatgaagtcgctaaaaatggcggtagcgtattgcttctgtctggtggtgatattaatacgggggttcctgaatctgatttacaagatgcagagcctgattttaaagggatgaatcttgtcggttatgacgctatggcgctgggtaatcatgagtttgataatccactcgaagtgctacgccaacaagaaaaatgggctactttccctttcctttctgcgaatatttatcaaaaaagtaccggtgaacgtttatttaaaccttatactatttttgataaacaaggagtgaaaatcgcggtattaggtttaactaccgatgatactgtgcgtattggtaatcctgctaacttccctgatactgagttccgtaaaccggcagatgaagcgaaaaaagtcgttgaagaattacgtaccacagaaaaacccgatattattatcgctgctacccatatggggcattatgacgatggtaatcatggctctaatgcaccgggtgatgttgaaatggcgcgtgctttaccgaaaggctatttagatatgattgtcggtggacactcacaagatccggtttgtatgtctcaagagaataaaaattacaaacaagcagattatgttcccggcacgccttgcgctccagataatcaaaatggcacatggattgttcaagcccatgaatggggtaaatatgtaggtcgcgctgattttgagttccgtaatggcgagttcacattaaaacactatcagttaattccaattaacttaaataagaaagtgaaaaaagaagacggaaccactgagcgagtttactacacagaggagatccctcataaccctgaaatgatgaaattactgaccccttatcaagagaaaggtggtgagcaattgaatgtgaaagtcggggaagtggttggtaaattagaaggcgatcgtagcaaagttcgttttgaacaaacgaatatggcgcgtttactgttatctgctcaggcggagcgtgcgaatgctgattttgccattatgagtggtggtggtgtacgtgattcgattgaatctggcgatattacttataaagatgtattaaaagtacaaccctttgctaacgaattagtctatgttgatttcaaaggtgaagaagttgaaccttacctatccgcagttgcttgcatgaaagtagattcaggcgcttatgcacaattttacaatgtaagtttaaccgtagatgcagattgtaaagtgagtgatgtaaaaattgcgggcaaaccattagataaaactaaaaattatcgtatggcgacattaaactttaacggtattggtggtgatggttatcctaagattgattcacacccaggatatgtcaataccggctttgttgatgcagaagtgctaaaaggttatatcgaaaaacactcaccactaaaagcggctgattttgaaccgcaaggcgagattgtgtataaaaaatag

SEQ ID NO: 295315 - DNA, 480 bp, Proteus mirabilis
atgactcccgcagtgaatttactggaaaaacaaaaaattaaatttactcttcacccttatgaacatgatgcgaatgtacataactttggtgatgaagccgttgaaaagttaggactagataaccgtcaagtgtttaaaacgcttcttgttgcgttaaatggtgatgctaaaaacctagccgttgcggtcaccccagtatcaagtcaacttgacttaaaacgagtcgccaaatgccttaaagctaaaaaagcagaaatggccgatccacaaatagcacaaaaagtaacaggttatttagtcggcggtataagcccattaggacaaaaaaagcgccttcccacggtgattgatgatcaagcacttaagtttgacactatctatgtctcaggaggtaagcgagggctggatattgaactagcggctgaagatttatgctcagtattaggtgcacaatttgccctgatccgtaaagaggattaa

SEQ ID NO: 295316 - DNA, 810 bp, Proteus mirabilis
atgaaggatataatacagaaaatcaagaaatggatcggtatacagaaaacatcttattacccctatcctgctattgatatttcactccctaatcatgtctctttacatcttgttggtagtatccatatgggcgtgccaacgatgtcaccattatccaatgtgctgattaataaaatagcaacagcggatgcggttattgtcgaagcggatatttcaaccgaaactcagccctttgatcagctatcgttattgcgagagccattagaacaacgagtaaatgaaacacaacttgccactatcatcagccattgtgatcttctttctattccacgttaccaaattgatgataaaccactgtggcaaatcgcgctgatattacaatcaacccaagcgatgcaacttggattacaaccacagcacggcattgattatcaagttatccaacaagccaataaacaacaaaaagcgattatagagctagaaggtattgagcgtcaggtcgcattattattagattttccacaagacggcgcacaattactcgaagatacgctaaaaaattggcatgaaaatgcacgggcattgcaaattatgatcaattggtggttaaattataccagtgaaaagcacccttctcctttgccaaatacttttagcaaagcggtatttgatattttaatggaaaagcgcaatcaagtctgggcaacaacgctttctaatcttccagcaggccactatgttgtcaccgtcggtgctcttcacttatttggtgaagataatttagttgatcgattaacttatcaagcataa

SEQ ID NO: 295317 - DNA, 1584 bp, Proteus mirabilis
atgaattataataaattatttcttatttctttctctttgatttattctgcaaatgttttttctaatacggatagcccatcaccaatggataatctatctccatctatgacttttagcccaccagtaattagcccaagcccattaccaacaggtaacccttcacaattaggaaatagttctatggtagaatcaagtgtaggtattccccaaacatcaacaactcatctaccacaaccaccattaatgggttatggcgcaccaacaataggtaatacatcaggatataggacacaatttccaaatacagatgctaatccaattaaaacaattaaagcaattaaagcaattaaagcaattaaagcaattaaagcaattaaagcaattaaagcaattaaagcaattaaagcaattaaagcaattaaaacataccttgacatgactgatcatgcaaccgattatcatagtaaattgataggtgaatacatttcagcctttatttctatttctagaccttctacatctacatcatctgaaaatattttagtcagcctttctaaacctttttttgatcatatgtctaaagcaatagatgttgattctgatgaagatggaagtatgttagtggataaaagtaaaaaggatatcgctcgtactatgtcttcttatttagaaagtctagaagcaggctttttagaaacaatgaacgatgaaaatactagtgagataagactaacacagatggcattattacatcagatacaagattttaaaaatattgttgacgaaagtatagaaaaaggtacctcttttactattgttgcaaatcaagatctagaaacagcagaaccattaactgaaatccaaatgattactaagcgattatcgcaaccagtaacacgagttgatattgctaatgcatatgttttattatcaggaaaaatagataatgaagttggagctatagcgaatcaacaacaaataactactgaaacgttaactttacaggataataaaattactaaagtagaaagtgatgtaaaaaaaaatgaaggtaatatagctgttaatagagaaggtattactaaagtagaaagtattgtagaaaaaaataaagaagatatacaaacaaatagagaaaatattaatcaagttaaacaaactgctgacgaaaataaaaaatatgtaaagcaatacctagctaatgatttcgatgttaatgaacaatctaaaagtttagtaggtcatcttggctctttatatgcaggaaataagttaaacacagataatattaatgccattagaaatgatcttagccattttaaaaatgaaaccaataatcgtttctataaagttgaaaagcgcgctaatcaaggaattgcctctgttgcagcgatgagtaatttaccctttaatgatgcagcaacctttagcaccgcaatgggtatcggtaattatcgtaatgccacagcatttgcatggggaatgcaataccgtatcaacgaaaatgttaaagttaaagcctcaaccgcttggaatgacgctaacaattgggtctctgcgggggggatcggtattagttggtaa

SEQ ID NO: 295318 - DNA, 2955 bp, Proteus mirabilis
atggcaaaaactacgctactcgcactacaagggctttcatgctcccactgtgttaacagtgtaaaaaaatcacttgatgcccgcaatgatatagaacagtccacggtgactattcaatacgctaaaattgacagcaacgcaactgttgaaagcttaatcaaaaccattgaagaagccggatatgaagctcatctagccactcaagctgatgtaaaactaaatttgagtggacttaactgtatgaaatgcgttggtaaaacagaaaacgcgttgttagccgttgacggtgttgttgcggtcaatgtagacaaaacatcggctgaaatttttggtacagcaaacgcaaaagatttaattgccgccgttgttgctgaaggttttgaagcctcattagcaaacgaagaagaaaataaaccaaaaacgattgaactgactttatcaggcttaaattgtggtcattgtattaattcagtgaagaaagctcttgaagggactgatggggtagaaagtgcacaagtggaattaactcatgccacagtaacaggtacggcaaacacagagagtgtgatcacagccattcaagatgctggttatgatgcaaaattagcaggagccaaccacccaaaaactgagccgctgacgcaaacggatgcaccactggaagcatcgtcagcggcgatttgtgatattccagtagaagaagccatccttgataataataatgctgatatcagtatcgatgatgatagcactcagctattaatcgacggtatgacttgtgcaagctgtgttagcaaagtacaaaaagccttacaaagtgtttccggtgttgaaaatgcacgtgttaatttggctgaacgtagcgcacttgtaacgggtcatgttaatcatgatgacctgattaatgcggtcgaaaaagcaggctatggggcagaaattattcaagatgatgtaaaacgtagagagcgtcaacaagaagtcgctgttgctaatatgaagcgttttcgctggcaagcagccttagccttagtcgttggtattcctgtaatggtatggggaatgatcggcgataatatgatgttaacggaagctaatcataatatctggttaactatcggtattattacgcttattgtgatgatagctgcaggtgggcacttttatcgtaatgcgtggcaaagcctaaaaaacggcagtgccaccatggacacgctcgttgcgttaggtacaggggcggcttggctctattcaattagtgttaacttatggcctgaggtgtttcctgcccaagcaagacatctctattacgaggccagtgcgatgatcattggtttgataaaccttggtcatatgcttgaacaaagagcccgtcagcgctcctctaaagcattagagcgtctattagacttaacaccaccaacagcaaaagtagtaacggataatggcgaagttgaaatgccattagcggatgtgaaacaaggtatgatcttgcgtttagcaaccggtgataaagttcccgttgatggtgaaatcacccaaggtgaagtgtggatggatgaggcaatgttaactggtgagcctattccacaacaaaaaagccttggtgataccattcatgcaggtactaccgtgcaagatggctcagtgctgtttaaagctgcagcagtaggcagtcaaactacccttgccagaattatcaaactggtacgtcaagcacaaagcagtaaacccgaaataggtcaattagcagataaaatttccagtgtatttgttcctatcgtcgtcgttattgcgttaattgcaggggctatttggtacttttttggtccttcaccacagattacttatgcactcgtcattatcacaacggtattaattatcgcttgtccttgtgctctaggattagcgacccccatgtcgatcatttcaggtgtgggacgtgccgcagaatatggcgtattagtgcgtgatgcggatgcattacaacaagcaagccaattagataccttagtttttgataaaacaggtaccttaactgaaggcatgccacaagtaactgagatccacacattcaatcagataagtgaaactcaagcgctagcattagcaggcgcactagaaagtggctctaatcatccattagcaaaagcgattttaaccaaagctgaaggtattaaattaccgcaaataagccaatttagaactcttgcaggtatggggttaagtggtgaaattgacggcaatattgtgctgttaggtaatcctaaactaatgaaagaatctggcattgatataagtgagataaacgccttaatagaaaaccaatcagcgaaaggggtaacccccgtcttattggcacaaaatgggaaaatagcggccctactttctattcgtgacccactgcgagaagataccgttagtgcattacagcgtctacatcatcaaagttatcgtttggtcatgttaactggagataaccctattacagccaatgcgatagctaaagaagcgggtattgatcaagtgattgcaggcgttatgccagaaggtaaagcacaagcgattagtcaactacaggcagaaggtcgtcgcgtagcaatgattggagatggtattaacgatgccccagcactggctaaagcagacgttggtattgcgatgggtggtggcagtgatatcgccattgaaaccgcggccattaccttaatgcgccatagcttacatggtgttgctgatgcggttgagatctcaaaaggcacactgcgcaatatgaaacaaaacttgtttggtgcatttatatataacagtttaggcattcctattgctgccggtatcttatatccttttaccggtacattattaaaccctgtggttgcgggggctgccatggccttatcatcaatcactgtcgtcagtaatgccaaccgattattacgttttaaaccgaaaaaatag

SEQ ID NO: 295319 - DNA, 402 bp, Proteus mirabilis
ttgaatattagtgaaatcgcaaccaaaaccggtttgacgacaaaagcaatccgtttttatgaggaaaaagatctgataaccccacctcatcggggtgaaaatggctatcgatactatttaccacaacatatcgaagaattaacactgttaaagcaagctcgtgaagtcgggtttagtttagaagagtgtcgttcattgctgatgttattacgtaatccctcacgtcacagtgctgatgtgaaagaggcaaccttaaagaaagtggctgagatagagaaaaccattaacgaattaaatgccattcgtcaacggcttctcttattagcaaatgaatgcccaggcgatgatggggcggaatgcccaatcatcaatcatctttctggttgttgtcatcatcaataa

SEQ ID NO: 295320 - DNA, 522 bp, Proteus mirabilis
atgattgaatggattagtgctcagccagcacttttctggctttgtcttggtgtcttactattaatcgccgaaatgctgggcactgcaggctacttactatggtctggtatggccgcattatgtgttgcattaatcgcatggatcttacctattggttggcccattcaaggtattctatttgcattactcaccgttattagtgcaatcctttggcgtatctggcttaaacgcaaaaagttatccaaagaagcagaaaacctaaaccaaaaaagccaccaacttattggtataaaagcagttttgttatcggatactgaaaatggttttagtcgcataaagcttgctgatgggagttggcgagtctattctgacacgccattaaaagcaggtgatacagtcaaagtgattgctattgatggtatcaccttgcacgtcacctcattttctcccaccactcgctcggcatcatcaacacagcatgctgctgttattgatgatgacaacaaccagaaagatgattga

SEQ ID NO: 295321 - DNA, 924 bp, Proteus mirabilis
atggaaatagttattggtattattatcttattcgccattattttagttttaagtggtgtaaaaaccgttccacaaggttatcagtggactgtcgagcgttttggacgttatacacgtacccttgctccaggccttcaactccttattccatttattgaccgtattggtcgtcgtattaatatgatggaacaagtattagatatcccttctcaggaagtgatttctcgtgataacgccaatgtcagtattgatgcggtctgctttattcaagttatcgatccagtaaaagctgcttatgaggtgaataacctagagcttgcaatcatcaatctaacgctaaccaatatccgtactgtgttaggctctatggaactggatgaaattctttcacaacgtgatcagatcaatagccgtttattactgattgttgatgatgcaactaacccatggggtattaaaattacccgtattgaaattcgtgatgtgcgcccaccacaagagctaatttctgccatgaatgcgcagatgaaagctgagcgtactaagcgtgctgatattctagaagcagaaggtatccgtcaagcggcaatcttaaaagcggaaggtgaaaaacaagggcaaatcttaaaagcagaaggtgaacgtcagtctgctttcttacaagccgaagcccgtgagcgtgcagcagaagcggaagcaaaagcgacgcaaatggtatcagaagctatcgctaaaggggatatgcaagccattaactactttattgcacaaaagtataccgatgccctgtcacaaattggttctgccgataacagcaaagttgtaatgatgccattagaagccagtaacttaatgggtgcaattggtggtatttcagaattattaaataccaaaaaaagtgactcaggtaacaagagcaattaa

SEQ ID NO: 295322 - DNA, 858 bp, Proteus mirabilis
atgttagcaactgcacatattgttgatgtaaatgaatcgaatattcagcaagttatagaacaatcgatgacaaaaccggtcatgatgtacttctattcagagcgtagtcctcattgtgcagagcttggggcaacgttggataaactagcggctgaatttgctgatcagtttgtattagctaaattagattgtgatgttgaacagatgattgcctcgcaatttggtctacgagcgatcccaactgtttatatattgcaagaaggtcgtcctgtcgatgggttccaaggcccacaacctgaagaagctattcgccaaatccttgccaatatcttacctaaaccagaagaattaaaagcggcgcaagcttcagcactattagcagaaggtaaagcagacgaagcattaccactgttaaaagaagcacaccaaattgatcctaaaaacagtgaaattaccttagccctcgcaggtgctttaatttcattaaataaacataatgaagcagaagaattattagccacaattccattgcaagatcaagatagctactatcacagtttattagctcaaattgaactgcaaaaacaagctgccgacacacctgaaattcagcaattacaagataattttaatcagcaacctgacaatactgaactcgctattcaactggcgttaaaactgcatgaagtggcacgtaatgatgaagcccttgaattgctatttaattttctgaaaaaagatcttaatgccggtgaaggacaagttaagaaaaccctgatggatattttatctgctttagggactaatgataatctagcatctaaatatcgccgaatggtgtattctttactttattaa

SEQ ID NO: 295323 - DNA, 771 bp, Proteus mirabilis
atgcaaaaaacggtattgattacaggaagttctagtgggattggactgtgtgcggcaaaaacactcaagcaaaaaggatatcgagtactggctgcttgtcgcaaagaagatgatcttaaccatatggaaacattggggtttgagcctatttttcttgatctcgatgacgcagaaagtatcgaaaaagccatattagaagtcattcgccttactaatgggcgtttatatggattatttaataatggtggttttggggtttatggtccattaaatgcgattagtcgccagcaaatggaaaaacaattttccactaatttctttggcttacatcagcttactatggggttactgccggcgatgttacctcatggcgaaggacgtattattcagacgagctcggtaatgggattaatatccactcccggccgaggtgcttatgcggcgagtaaatatgccgttgaagcttggtctgatgcattaagaatggaacttgcctctacggggataaaagtcagtttaattgagccgggtccaataaaaacacgctttactgaaaatgttaatcaagcccaacaagataaaccggtaaaaaatccggggattgcgagtcgtttcacattaacacctgatgatgtagtgaaaaaactaatccatgctttagaaagtccaagacctaagttacgttatcctgtgaccttactcacttatgccgtcaaagtgttaaaacgactcctccctgatagacttatggataggatcttaaacggctaa

SEQ ID NO: 295324 - DNA, 582 bp, Proteus mirabilis
atgatgatgtttagctttaagtctatcgctgctgatacctttttgatctttggtgacagcctaagtgccggatatcgccttcctattgaaagcgcatgggcgcaacgcctcgcggataagtggaaattaacttatcctgaaataaatgtcgtgaatgcaagcatcagtggcgaaaccgcatttcaaggtcaaaataggctccctgatttattaaaacagcaccaacctcgttgggttttgattgaactgggtgcaaatgatggcttacaaggctaccctgtagcccaaacgaaagaagcgttgcaaaacatcattacccaagtaaaagaagcgggagcaacgccactctttatgcaaattatgatttcgcctaattatggtaaacgctatacgcaatctttttctgcgatttacccacaattggcgaaagacaatgctcttgagcttatcccattttatatggagcaaatagcagataaacctgagtggatgcaaaacgacagcattcacccaaatgaagcggctcagccttttattgctcaatggatggataaaaccctatccccttacctaacacgttaa

SEQ ID NO: 295325 - DNA, 687 bp, Proteus mirabilis
atgtcgacggaaaaggttcttgaagttcatcagttaaccaaacaagtaggagaaggtgatagtcagatctctatattgcagggtgttgagttagttgtcgagtctgcacagacaattgctttaattggtgagtcaggatcgggcaaatctacacttttaggtattattgcaggattagatgatggaggcgctggtcgtgtgcaattaatgggacacgatctgaccaaaatgaatgaagaagagcgggcaaaattacgtgcacaacatgtcggatttgtttttcaatcttttatgctaattccaacgttaaatgccttagagaatgtgcaacttcctgcgttattaaaaggtgagtcagaaaaacagagccatacgcgagccgttgatttacttaaacaattgggtttgggtgagcgcttgtatcatatgcccgcacaactttccggtggtgagcaacaacgtgttgcattagcaagagctttttgtacccaaccggcgatcctgtttgctgatgagccaacaggtaatcttgatcgaaaaacgggagataaaattgccgatttactgttttcccttaatcgtgattatgccacaacattaattttggtcacccacgataatgagcttgccgctcgttgtcagcgaagattacgtcttgttgatgggcaacttaaggaggagtcatga

SEQ ID NO: 295326 - DNA, 2442 bp, Proteus mirabilis
atgatctggcgttggttttggcgtgagtggcgctcgccggctttattaattgtttggctctctttagcgctggcggtggcttgtgtgctggcgttagggcgtattggtgatcgcattgataaaagtatttatgctcaaagtcgtgatcttatcgccggtgatttagtgctacgcgcctcgtatcctgttgatgaaaattggctagctgaagctaaaagaatggggctaacacttagtcgtcaaatgcaatttaccaccatgtcttatgccccagaaggtgatactcctcaattggcgttggtaaaagccgcggataacttatatccactctatggtgagctagaaactcagcctgtagggctaaaagcggagaaaggcacggcgttagtggatgcaaggttactggcgcttttggggatcaaggttggtgataatattgatgtcggtgatgccacttttacaattagcggtgtattagttcaagagcctgatagtggttttaatccttttcaaattgccccgcgtattttaattaatcttgctgatgttgaagcgactggtgccgttcagccgggaagccgcttaacttaccgttatatgtttgcgggtaatgaagcattaattgatgaataccaacaacgctttgatcccttattaaaaccggatcagcgttggaatagcttaaaacaagataatggtgcgctatctcaatcaatggagagagcaaaaaactttttactattatctgcattattaacactactattggcgatttctgccgttgcggtttcaatgacacattattgccgtagtcgacatacgctaattgcggtattaaaaaccttaggtgctgataatcatgcattacgtaaatggattataggtcagtggggtgtgattattgttgcggctatcgtggtcggctcactggtcggttggggctttgaattagtattgttgcagattttagcaccggtattaccaaaaagtttacctgatgcgagctttatgccatggctatggtcagttggctctttactactcatcgcgttattgacgggtttacgcccttatcaccaattaatgtcaacgcaaccttcccgcgtgttgagaagtggtactacggcacctagttggccactacgttattatttacccatcgttgcattgattgttgttggcgctttaactctgtttgccggaacgggtgttttattgtggtctattttattaggtatcgtcgtcattgctttcttgcttggcgtgattggttggcttggattatggcttttaaagcaatttaaatttaagcaattgagtgcccgtttagcggtgacacgtttattacgccagcctttccaaaccatgacgcaattagccgctttttcattatcctttatgctattgacgctattggttttgctgcaaggggatttattggaaaaatggcaacagcagttacctgaagatagtcctaactatttcttgattaatatgtcaaagcctcaggtacagcagattaatacattattagccacttatcatgtggcaccgacagatgcttatccggttgtgttagcacgtttaacagcgattaatgatcacaatgcgaaagtgtgggcagatgcacgggatgcggggaataataccgtacgaagagagcttaatttaacgtggcacagtgaacttcctaaagataatgttattgtcgaaggctcatggcctcccgtcggtaatggcgtttcaatcgatcagggggttgcacaaaagttagaaataaagctgggggatgagctaacttttgttggtgatactcgcgagtttaaatctgttgtcaccagcattcgccatgttgattgggaaaatatgcgaccaaatttcttctttattttcgcagaagaagggctaagcaatcagcctgaaaaatggatgagcagtttttattacaatggtgatggaagtttgatcaccgcattaaatcgacaatttcctacggtcagtgtgctagatacgggtgcattaattcagcaagttcagcagatcttacagcaagtcagccgagcattagaaattatggttggattagttatgctgtgtggggcattgctattagtggcacaaattcaagtcggtatgacacagcgtcgtatcgagttggtggtttatcgaacattaggcgcgagtaagtcactattaagacgcacgctttgggcagagtttgccttattagggttaatggccggtttagctgcagcgataggggctgaagttgcattagggttattgcaaaaatcggtatttaatttcccatggcaaccacaatggatgatgtggatagttgttcccgctcttgccgccgtattactttcactttgtggcagtattttaggggttaggctattacaagataaaggccaatatcgtcgtattcagggagaatag

SEQ ID NO: 295327 - DNA, 1026 bp, Proteus mirabilis
atgaatgaagaattaatcatgaaatactcaattggtatcggcatagctttggcgtgttttatcgcctttcttgccatatcttttttacatgataaacaaaaaaaacgtcgtagaaacataattattcacatcatccaagctattttactttgtagtttagtggctattgtaagccaatactgtgaaatggcagtggtagattttaaactacactttatctcttttcagatgattaatttctttagctatcttgctatcgcattaatcctgatgagaaaatttttcttactcattaatttattagaaaaatcacaaattaaaaaaggcagtgatcctacctcagcccgtattatttcgcgtatatttaaaatcactcttcttgtcatcatgatcttactgttcggtgagcattttggcatgagcttatcgggcttaatgacatttggtggcttaggcggtattgccattggtatggcaagtaaagacgttatgagtaaccttttttcaggtgttatgctctattttgatcgcccttttaacattggtgattgggtacgttcacccgatcgcaatatcgaaggaactgttgttgagattggctggcgtatcacgaagataatgacctttgatcatcgcccgttatatattccaaactcagtattttcatccattagtgttgaaaatcccggcagaatgaccaatcgacgtattgaaacagaattagggttacgctatgaagattcggacaaagttggggttattgtcgaagatatccgcacgatgctacaacaaaacgacaaaatcgacaccaaacagactttattggtctattttaatcaattcgccgattcatcattaaatattatggtgtactgttttaccaaaaccacagtatgggcagaatggttagatgcgcagcaagaagtttatttaaaaatgattgatattgtgcatcaacatggcgctgacttcgccttcccatcacaaactgtatatattgaaaaatcatcgcctgtatcaccataa

SEQ ID NO: 295328 - DNA, 1269 bp, Proteus mirabilis
atgccagtcacgcaacaaaattttggtcctatctatcagtggagcatactgatactgctaggtttagtgtactttctcgctaccgcaacaacatttacctctttaggtgtggttctacctagtatgatagctgaactagagtggaactggacacaagctggccttggttttactttattgggcttaacctgtggacttgcgagctttttacccactttacttatccgtaaattaaacgtccgcttcacactcctcattggactgattatttttgtcagtggattctattttctatatgaaaccaataccatcacacgctactttcttggtaccgccttacttggggtaggttttacactattagcaaccgtaccgggcacttacgtgctatcgcgtctatttgaaaaacagtcttttgcttttggtgtctattttactattggtggattgggaggggttgctggcccttggatctattttttagccacacatctttggcacacatggcgtatgcattggcttatttcagctattattctatcaattattaccctgctgactattttagtattacgagaaggctcagcagaaaaagcgcatgcgaaaaaaatcagtcaattacaaagtagtaaacgtatttatcaaaccaaagcgatatggaccgcacgtcatgctttacgaacatggcaattttatgtcattgctgccacttacaccgcttttctatggtgcgggatcacagtaaatagttttgcagttgcacatattattgaaaatggttttagtgaaactattgctgcaacgctactgagcaccatggcttttatcaatgcattctcacgattagccggtggagcgattggggaatggttagagcctaaaaaattactgattgccagcttaacgattattattatcggtctattagcactgagtatggctaatagttggatctacctaatgctatttaccctttgtgtggggatcggttatggtatgaccttcttagcctcaagtgtattactggctaactattttggtcgcgcaccttatttagaactattttcggtgatgaacctgatctcaacattggcctgtttagcccccttctttgctggggctattaaggatatttcaggcagcttcacacctgcatttttaattctcactatccctgttttagttattttggtgatcacactatttatgcgcccaccaatttatcctaacttccaacatgccagtgaaaaacataatgcgccaagataa

SEQ ID NO: 295329 - DNA, 1068 bp, Proteus mirabilis
atgaagccggtttgtgttcttggtaatggacagttaggtcgaatgttacgtcaagcgggtgagccattaggtattgcggtatatcccgtagggcttgatgctgaacccgaagcggtaccttatcaaaagagtattattaccgcagaaattgaacgttggccggaaaccgcattaaccaatgagttagagcaccatgctaactttattaaccgagatatttttccattactcgcagatcgcttaccacaaaaacaactccttgatgaacttcatttagcgacagcaccttggcaaccattaacttcggctgagcaatggcctgagctatttaatcagctaggggagtttattatcgttaaacgccgtgttggtggttacgacggacgaggtcaatggcggatacacccaggtgacgaacaacaattaccagccgaaatatatggtgaatgtattgtcgaacaaggtattcctttctctggagaagtctctttagttggtgcaagaaatcgtcagggggattgtgttttttatccactcactcacaatcttcatcaagatggcattttacgcatgagtgttgcgctaccaaatcctcccgaggcattacaacaattagcagaggatatgcttagcaagatcctcaataaactaaattatatcggtgtaatggcgatggaatgctttgttgtcggcgataaattactgattaatgaactcgcacctcgcgtccacaacagtggtcactggacacaaaatggtgcttctattagccagtttgaacttcacttacgcgctattcttgatttaccgatgcccaaacctgatgtttgccaatcggcggtaatggttaatcttattggaacggagatcgacaccaaatggctatcattacctttagttcatctacattggtatgaaaaagaagtgcgtccagcccgcaaagtagggcatctcaacttagtacataatcaccatcaagctctgcaaaagaccttaagtgcattaagtcccctgctcgatgaagcctatcaatatccgattaaatgggcgctagaaaaattaagctag

SEQ ID NO: 295330 - DNA, 522 bp, Proteus mirabilis
atgtcttctcaagttggtctcaatacctcatcccctcgtatcgctattgtgatgggttcgaaaagtgactgggcgacaatgtgtcatgccgcagaagtcctagacgcgttacaacttccttaccatgttgaaattgtttccgcacaccgaacaccggataaattatttcgtttcgcagaacaggccaaagagaatggttttgacgtgattattgcgggtgctggcggtgctgcacatttaccggggatgttggcagccaaaaccttagttcctgtattaggggttcctgtacaaagtgctgcattaagtggtgttgatagcctttattctattgtacaaatgccgaaaggtattcccgttggcacactggctattggtaaagcgggggctgctaatgccgcgctacttgccgcacaaattttagcattacactctgctgatatttttaatgcattaacacaatggcgagcaacacaaacacaagaagtccttaatcaccctgatccaagggaggcgctatga

SEQ ID NO: 295331 - DNA, 723 bp, Proteus mirabilis
atgtgcaccctgtttattgcagatctgcatttaagtgagcacgaaccggcaattactgccggttttcttcgctttttacaagagcaagctatccacgcaaatgcactttatattttgggcgatttctttgatttttggattggtgatgatgatcctaacccactacatcagcgcatagcccaagcattaatggcattaaaaaatgcgggagtgccctgctattttattcatggtaaccgcgatttcttaatcagctctcgctttgcaaaagagagcggaatgacactgctaccacaagaaaaagtgcttgagatagagcaacatcgcattttaatcttacatggtgatacactttgcaccgatgatgaagcctatcaacgctatcgtaaaaaagtccacaataagtttattcaacgcttattcctactccttcctctgaccattcgattacgtattgctaaaaaaatgcgctctcgtagtcaaagtagcaaccaatacaaatctgaagcgataatggacgttaatgctcaagccgttatcaatacctttaaacaatttaatacccagtggatgatccacggtcatactcatcgaccggcgatccacactgtcgacattgatgggaaaccacattatcgaggggtattaggtgcttggcatacggaaggctcaatgtttaaagtcacctcagataaaatcgaactgatccaatttccattttaa

SEQ ID NO: 295332 - DNA, 495 bp, Proteus mirabilis
atggttacttttcataccaattacggcgatatcgtgattaaaacatttgcagataaagcacctgcaaccgtagaaaattttttagattactgtaaagaagggttctacgataacactatcttccaccgtgttattaatggttttatgatccaaggtggtggttttgaacctggtatgaagcaaaaagaaactaaagccccggtaagaaacgaagcaaacaacggtcttgccaataatcgtggtacattagcgatggctcgtaccaacgatccacattctgcaacagcacaattctttatcaacgtagcagataacgacttcttaaacttccgtgcagaaaatgccaatggttggggatattgtgtatttgctgaagttgttgaaggaatggatgttgtagacaaaatcaaagccgtttctactggtcgcagtggtttccaccaagatgttcctcgtgaagatattatcattaacagtgttactgttagcgaataa

SEQ ID NO: 295333 - DNA, 1425 bp, Proteus mirabilis
  misc_feature (765)..(774): n is a, c, g, or t
atgctaaagatttttaatactcttactcgacaaaaagaagaatttaaacctatccataaaggaaaaataggtatgtacgtgtgtggcatcactatttatgatttatgtcatattggtcatggacgtacatttgtggcatttgatgccataacccgctatttacgttatttagggtatgatgtgaattatgtgcgcaatgtcactgatgtggatgataaaatcatcaagcgtgcgattgaaaataatgaaacttgcgaacaattaacgacacgtatgttagcggaaatgcataaagattttgatgcattgaatatcttacgccctgattcagagccacgagccacacatcatattgcagaaattattgctcttaccgagacattaattaaacgtggtcatgcttatgtagcagaaaatggtgatgtgatgtttgccattgataccgatccggattatggcttgctttctcgtcaagatttagagcaactacaagcaggggctcgggttgaagtcgctaacgtaaaacgcaatcctatggatttcgtgctttggaaaatgtcaaaacccggtgaaccaagttggacatcaccatggggagaagggcgaccaggctggcatattgaatgttcagccatgaatggtaaagaattaggtcatcattttgatattcatggcggtggttcagatttaatgttcccgcatcatgaaaatgaaattgcacaatcaacctgcgctcatgatggtccttatgttaactattggatnnnnnnnnnnggtcctcatgttaactattggatgcattccggtatggtgatggtagacaaagaaaaaatgtctaaatcactgaataacttttttactattcgtgatgttcttgcctattacgatgctgaaacggtacgttatttcttattatcaggacactatcgtagccaactaaattataccgaagagaacttaaaacaggcgcgtaccgcattagagcgtttatatacttctttacgtggcactgatgcaaatgctcaacctgctggtggtgaagcgtttgaagcgcagtttattgaagcaatgaacgatgatttcaatacaccagaagcctattctgtgttatttgatttagcccgcgaagtgaatcgcttaaaaaccgtcaatatggaggcggctaatggtttagcagcggtgttgcgtaaattggccaaagtattaggcctattagagcaacaaccagaacacttcttacaaagtggtgcgcaagcagacgatgctgatgaagtagaaaaaattgaagcgttaattcaacaacgtaatgatgctcgtaagaataaagattgggcagctgcggatgccgctcgtgatgctttaacagcaatggggattgtattagaagatggcccacaaggtacaacatggcgtcgtaatagctaa

SEQ ID NO: 295334 - DNA, 942 bp, Proteus mirabilis
atgagacgtcgagtcgctaccattacattaaatcctgcttatgatcttgtgggattaagtacccctattgaattgggtgaagttaaccgagtaacaacagcgggatttcatgctgccggtaaaggtatcaatgtagccaaagtattaaaaagccttggtattgatgtcactgttggcggttttttaggtaaagagaatcaagatggctttcaaaaagagtttagtgaagccgggattgctaatcgcttccaaatggttgaaggtcgcacacgtatcaatgtcaaactgactgaacccagcggtaaagtaactgattttaacttttcagggtttgaaatcactaaacaagattggactcgttttgtaaatgacacactcagctgggcgggtcaatttgatatgatttgtgtcagtggaagtgtaccaccaagtattgatttaaatgattttactgcttggatgaagcgactacgtagcgaatgtatgtgccttatttttgatagtagcagagaagcatttgtcgcggggttaaaagcgttaccttggttagtaaaacccaatcatcatgaactagaaatttgggcaggtaaacccttacctgagctttctgacgtggtacaagctgcccatgaattacgccagcaaggtattgctcatgttgttatttcgttaggtgaacaaggcgctatgtgggttaacgcctctggtgcgtggatggcaaaaccgcctaaatgtgatgtggtcagcacggtaggtgccggtgactctatggtaggtgggttgatttatggtttgatgatgaggcaaaccagtgaacataccttacgtcttgctacagcaatttcagctcttgccgtcagtcaaactaatgttggaataactgatcgagaacaattggcaagaatgatgaccgaagttgaattaacgccactaaaaatctaa

SEQ ID NO: 295335 - DNA, 264 bp, Proteus mirabilis
atgaaaaaagatgataataatagcgttagtatgtcggatttttttaataaaaaaacagggttgtttataaagtataaaaggaaagagttaggtttaacaggacaggatttagcgatcatattgaatgttagtcagcaacaaatttctcgatatgaaaatggaactacaaatattactgttaccttacttaataaaatactgatgatattggactcatcatggagtgagtttttaacatttaatgaattaactgataggtattaa

SEQ ID NO: 295336 - DNA, 519 bp, Proteus mirabilis
atgaaaaaattattattacctctagtcatgagcagtgcattatttagtggatatacattagctaataccggtgaagttcaatttattggtgcggttacgtcggaaacgtgtgatattgatacagaaattggtggtttagttaaatcaacaatcgatttgggtaaaatgaccactgcagataccaatggtaaatatgttgaatttgaattagtccctcgtacggatgaatgcctgaaaaaaaccagtggccaagttggttggcaaagtgcaggttttactaattcaggtcttgctaatatgaaaggtactgccggtggtgtatctattcaattaacagcgattaattcaaccacacctaatcaggatgtaacttataataaccaaagtgttgattttggtaatggtaatgatccaattggtaatatgaaatttaaagcaagaatgacagcaacggcaggtcaaactgttacagagggtactgtaatttcaagcgcaacttatgcagtagcttataaataa

SEQ ID NO: 295337 - DNA, 2376 bp, Proteus mirabilis
atgcgtttaaaatcaattaatgcttttgtgttatccttgttagtaagtccattttatgtttgcgcagatttaaatatggacttcttacatggaggagttcaactgcaagctgctggtgtatttgatgaaaataccaattatcctgctgggcattatattgttgaggttattttcaatcgaaaattaattagtaaaaaagaattaattatctcaccagaagataatgaaaatttatgtttaaaaaaagattggattaatgagttatcgcttccaataaaattaaatttatttgaattatattatcatcctgagcgcgattgttatgatattagccgttatcctggggctcaggttatttttgataattcgaagcaaactttaacatttagtattcctcaaattgcattagatgaatctctgcgccggcaggaatgggattatgggataacaggtattaaattaaactattcgggctatatttctaaaaccagttcttcacaagcacaaatttatggtgattttgatttatatgctaatttaggtcgttgggtcgcttatgttcgtagtagttaccaaaggaactcgggtacagaaacatcggaggcaacagtttccacagcaattaaatcaatacaaggaagttttaccgtaggtaaaacaataacctctttatcaatattacctaactttgctttttatggaatgtcactgcgctcggaaagggatatgcgcccatgggaaaaacgaggttatgcaccggttatttctggtgttgcaaactctaatgctaaaattactatatctcaaaatggatatgtattaagttcacaagttgttcccgcaggggcttatcaattaaaaaatatagcaccagtaagtaatggaaatataacagtgacagtagaagaaagtgatgggacaaaaacagttcgctattatcctgttgccacactttcttccttattacgcacagatgaaataaattacaacattgctatcggagaaaaagaaacagtaggtaaaagagaaaatagtttattttttctaggtgcatttgactacggattaactaatgttacggttcatgctgcgggaattttgcataataattataaaagtgcagcattaggaatgagtaaagattttggacgatttggtgcaatgtcatttactgctaatactgctgtaagtgtatttcaaaaacagacaccaacagcacccgaagttaggcagtctggtatcagctattcgttacaatatgcaaattcattgactgataatactaatttacagctactcgcatatcgctatactggtaaagattatgttgattttaatgagtttaattcaaatgctttatatcatcgcagtaatcgtaaagagcgttatgaaacgatattgtcccaaagttttgatggtagctttgttagcttatctgcttggatgcaaacatatagaaatagtattagtaatgaagttggcgcaaatattacttacaatacaacaattaaatctgtcgatttctcattatcagcggattatcaaaaattaaacgattatgagcatgataattatattatttctgttggaataaatattccctttagcttatatgataaaaatcatttttgggcaaattctgttagctacgataggaaaaataaagctagttttaattctggtgtttctggaagtattaatgaaaaaataaactatagtatcaatacaagtaaagatcgtgataactggtctaattctgcttattttggtattgatcatagtattattaatacgggatatgcgatttctcagaatggccatcaaactaccagttctattaatgcttcaggaagtttattagccaccccagatacaggattattattcagtaatgtcagaagagatactgtcgcaattgcaaaaattaaaaatatagagggtataacattcaatgactcaccgccaactgacaaagaaggaaacactattgttggggtatcaccatacattgaaaataatttaaaaataaatacagaagaaattccgaataatgttgaattacttgattctgttcaaaattttactccagtagataaagctattatttatcgcgagtttaaatattcaacaattcaaaggtatatattaagaataaaaaataaaaatggtgattttatttctgctggaagtgctgttagaaataaaaatgatgaatatataggatttgtttcaaattctggggttcttttattaaatttattagataagcctaataagctattcgttatatcacctaatggtgaaaaatgtactttaaatttggagaaagtagaatctaatgatcataaaattatggaaattgaatgtaatgaatag

SEQ ID NO: 295338 - DNA, 669 bp, Proteus mirabilis
atgaatagaatagtatttgtttttgctttaatcatatcgtcattaacctgttttaaagcatattcagcgtttacgcttaatggtactcgctttatttatgatgaaggtcgcaagaatatcgcgatagaagttaagaataatagtgataaaacctatggtggccaagtttggattgataatcttaatgggaatgaagtgttctttattcctgcacctaatttattcaaaataactggaggagaaaaacaattaatccgcttgctatatgtaaatgatattttacctaaagatagggaatcattgttttggctcaatattcaggaaatcccgccaatttcttctgccgatgacagtaatgtgcttgctgttgcattaaacacacaagttaaactgatttatcgccctaagattttagctgaaaaacgcgaggatgcagaaaaaagtctgacatatagtggttcagttttaaagaatcctacaccttactattttgcattaactcaagtgtcagtcaataataatcctttggtcttgtcaaaagacattgagcaatctattagtttatttccacctttcagtgaggtaaatgtgcagcgcccattgttaggtaaagtaaccgttgaagctattgatgattatggtgctagacgtgttattgagcttaattaa

SEQ ID NO: 295339 - DNA, 1011 bp, Proteus mirabilis
atgaaaaataaatcattttatttcacgctattattattttttattgctatggatacttctgctgctcgatgtcggaatgtgtcaatcaaatataattttccagcccaaatagatattacaaataaaaaagtgggagataagctttattcttttggtgcgccagacgcccctataaacgttgctggtcaatgtctacgtgctaatagtggggcgggaaatacaaatggaaattatatttatattgttgatcaatatggatcatcaccaacattatgcccgactactggtacagttgataaaaattcaccagatggatacttgcgttttcgttcaacgggaagttgtgctaattcttcttggctgctagttcttgattataaaatatctggggttggctggaccaatttaacaggtcccggtggtggtactgattcaggcgttgtttatttacaaaaaaagccacctgtaggaaaaacggttattaatcctgtctatatgttgaaacgtaattattattctcgaattggtcaaatgggcaatacgttacaaaaggaaagcgttgctcttagtgcaccaacatcgatgacgttgataaataatgcttcttgtgcagtgtctgttaatgacgtcgcatttggtgaacaaaccgctagtgacgtaaaaatgaatactattgcaggaaaaaatataaatatttcttttacgtgtaatgctgtattacctgcatacacactcagtttttctggtaaagatggtgtgaataatgccacaacagggatcattaaggttaaagataatagttctgtggggtatcaactttcttgggcagatagcacggttaaacccattaatagtgctgtagttattaataatgtggcaatagctccgaatacaaagccaaaaaccaataattttactattccgataagggtaaaacctgttgcgttatccactcagccaatccctgggccggctaatactgcattaacgattaatataaagttaaattaa

SEQ ID NO: 295340 - DNA, 534 bp, Proteus mirabilis
atggtaaaaaaatcttgttttatgtttagcgttattttatttcctatttatgttggagcaacaagtttcacctctaatgttactggtggaacagtcacttcaaatttaagtatgacagtgaaagcctcttgcagtacaacggttggtgatgtgacatttggtgaccaaagcgcgggtgatattaaaaaaggagctgtcgcagagaaggtaatatcattggctattgtatgcgatacaaaaatgactaattacacattagcatttacggcggctgatggtgttaaagatgtagcaaatggcattattaatactaaattaaattcaacggtgggttatcaacttaagtggggagattcgaccgttaaacctgtggatacagcaattactattaatggcagtacaattaccccaacaaacaagccaacgcaagaaagttttactattccaatcaaagttaaacctgttgctcttggggagactgtttctcctggtgcagcaaatacggcgttaaacattaaactaactttcaattag

SEQ ID NO: 295341 - DNA, 549 bp, Proteus mirabilis
atgtgcaaatctatattgcttaccagcctgttaatctttatcacaagaagttgttatggctctgagttaaatgcaacctcaatcattggcggtgctgttcaatcgcaatttagtatgaatgtaaaaatagctacatgcttacccgctactgttgacaatgttacttttggagcagttgatacagcgactattttatcgggtgaagttgaagggcactcaacactctttttggattgtacgggcacaattaagccacaaagagttacaatactttttgaacctgctaatcctcatttaaccatgggtagtgtgggttatattggttcaaaaaataccacacttggctattttgtgtcgtgggaagatgaacaaataggtgctattggtgaaggggtaccaatggggaaggtacttttttttaaaaaaacggatgcttcattgatgaaagttaaacttaaaataaaaccagttgtacttccattaggaggaaagtccgttcatttgggtaatggaaatacccatataactatcaaaataaaatatatctga

SEQ ID NO: 295342 - DNA, 537 bp, Proteus mirabilis
atgaataaaaaaatatatatgtattttattattacttgtttaagtaattttcctcaaccaagtttatcagatgaaatcttacctgatgctcaattaacaatttctttggatgtagttagaatcacttgtgatattaataatggaaaaggatttaataaaatagtagattttgatgttatcaacgaaagtaatttattagctggtaatcaaccagccgtaaaaacacagtttattgttgattgccaaaaaagtggttttaaacctgagcatattgatatcaaagttaagcctggtagccaaggtgcattaaataatggtattggtggtgaacttaaaaccaatttatctggtgtaggaatttatttatcatgggcagactcaagcccaataaatctatctggagtgaataaaagttttagtgcagatcttaataatcaatttgatattagtttttttgcaaaaccatatgctcgatctcaaattgttgaaaaaggttcactaaaaagtagcataattattaatgcattatataagtaa

SEQ ID NO: 295343 - DNA, 204 bp, Proteus mirabilis
atggaagacacctatcgaggttgggtagaatacctgtatgactcagagcaacgtttaaaaaaagtcgccagtagtgaaaaccttgataccatgctgttttacgatcgcgcggataatctacttgagcgtccgcaatcagaaattgatgctgaacactcccctagcactaaagacagttttctattcatggggacaaaattatag

SEQ ID NO: 295344 - DNA, 711 bp, Proteus mirabilis
atggcgtggcatagcgataaatatggcttacgcaatgaataccgctgggcactttcagaagataatctttggcgagtgattgaaaacaaaacgagcgaaggcgaaagctatcgtcttgaatatgatgatatcaacctcacacgaaccgcttattggcacgatggttcaacctcattttggcaacttaatcatgatcaccaaattattcattataccgaccgtataggcattaaaacggcgctaatttgggatgagtttggattaccttgcggttgtcgcaatgcgttgggtcatacacatattagtgaatgggacgcactgggccgactactcagcataacggatggtaatggtaatggtaaccaaacgcgttggcaatatcagaatgaacgcgagcgccttatcactgtattttggccggataacacagagtcgcgtttagcgtatgacagtttggggcgactggttgaagaagctcacttaggcgaccgagtcttcacatccgcaccacgcacaatattactcgactatgatgcggcgggtaaccttgtcaaacgtgagaccttaactgatcgctaccaatatcaatgggatagtatgaaccgcctattggtcgccagcaaacagcccaatcaacgtggtcttgaaatgagtttgcaagcgaatcaaagtccattttacctacgatgcacttggccgcattactcgtga

SEQ ID NO: 295345 - DNA, 1092 bp, Proteus mirabilis
atgggatttaaatgtggtatcgtcggtctgcctaacgtagggaaatctacactgtttaatgccttaactaaggcaggtattgaggcagccaacttcccattctgtactattgagccaaatacaggtgttgtacccatgcctgatcctcgcttagataagttagcagaaattgtaaaaccacaacgagtgttacctacaacaatggagtttgttgatattgcaggtttggttaaaggcgcatctaaaggtgaaggcttaggtaaccaattccttaccaatatccgcgaaactgaagctatcggccatgtcgtgcgttgttttgaaaatgacaatattgtgcatgtggcgggtaaagtcgatcctgcagaagatattgaaactattaataccgaattagcgctttctgatttagatacctgtgaacgagcaatgcatcgtaatcagaaaaaagccaaaggtggtgataaagttgctaaagcagagatggaagttttagagaaatgtttaccgcacttagaaaaagccggtatgttgcgtgcattagatttaagtgatgaagaaaaagcgattatccgttatttaagctttttaaccctgaaaccaaccatgtatattgctaacgtcaatgaagatggtttcgaaaataatccttatcttgatacggtacgtaaaatcgctgaagccgaaggctctgttgttgttcctgtttgtgctgctatcgaagcagatattgcagagctagacgatgaagagcgcgaagagtttatgcaagatttaggcatcgaagagccgggcttaaaccgtgttatccgtgcaggttatgcgttactcgatttacaaacttactttactgctggtgtaaaagaagtccgtgcttggacaatccctgtaggtgcaactgccccacaagctgcaggtaagatccatactgactttgaaaaaggttttatccgcgcccaaaccatctcatataatgactttatcacttatggtggtgaacaaggtgcgaaagaagccggtaaaatgcgtgcggaaggtaaagattatatcgtgcaagatggcgatgtgatgaacttcttgtttaatgtgtaa

SEQ ID NO: 295346 - DNA, 585 bp, Proteus mirabilis
gtgagtaaaattaaacttatcgtcgggttagccaaccccggtgctgattatgcccagactcgccataatgcgggtgcttggtatgttgatttattggctcaacgtcatcaacaatctctaaaagaagagagcaaattcttcggctatactgctcgtattaatttaaatggtaatgatgttcgtttattagtccctaccacttttatgaatttaagtggtaaagcggtattagcgatggcaaatttttatcgtattcaacccgatgaaatattggttgcacatgatgaactggatttaccaccgggtgtggtaaaaatgaaattgggtggcggtaatggtggccataacggactaaaagatattcagagtaaatttagcaataaccccaatttttatcgattacgtattgggattggtcatcccggtgataaaaacaaagtggtcggttttgtgttaggtaaaccaccaacaagtgagcaaaaacttattgatgatgcaattgatgaagcccttgcttgtacagatattctgatgcgtgatggttacgaaaaagccattaatcgtttacatagctttaaagcttaa

SEQ ID NO: 295347 - DNA, 279 bp, Proteus mirabilis
atgaaatataaacatgcttttgccgttggcaatttattgatggctatcggtatggtgcttatgctcggtagtctcggttataatcttcttagccatatttttccattaggactacctgatattttatctgatgcttcgctaatggggatctttattggtgcacttgtttggttagcaggggctcgtattggtggtagagaaaccgttgcagaaagatattggtggttgcgtaatcatgacgaacgttatcgtcgccatgataatcatcgttatccataa

SEQ ID NO: 295348 - DNA, 948 bp, Proteus mirabilis
gtgcccgatatgaagctttttgctggtaacgcaaccccggaactggctcaacgtgttgccaatcgactctatactagcttaggagacgctgctgtaggtcgttttagcgacggtgaagtcagtgtgcaaatcaacgaaaacgtacgtggtggtgatgtttttatcattcaatcaacctgcgcaccaactaatgataacttaatggaattagtggtcatggttgatgcattacgtcgagcttccgctggtcgtatcactgctgttattccttacttcggctatgcccgtcaggatcgccgtgttcgttcagcccgtgttcctatcacggctaaagttgttgcggatttcttatctagtgtaggcgtagaccgtgttttaacctgcgacttacatgcagaacaaatccaagggttctttgatgtaccggttgacaatgtcttcggcagcccgatccttttagaagatatgcttcaaaaagaattggacaaccctattgttgtttctccagatattggcggtgttgttcgcgctcgagctatcgctaaacttctgaatgatactgatatggcaattattgataaacgtcgccctcgtgctaacgtttctcaagttatgcatattatcggtgacgttgctaatcgcgactgtatccttgttgacgatatgatcgatacaggtggtacattatgtaaagcagcagaagcgctgaaagaacgtggtgctaaacgtgtatttgcttacgcgactcaccctattttctctggtaatgctgttgagaacatcagaagctctgttattgatgaagtggttgtctgcgatacaattccattgtcagcagaaatcaaagcattaaataaagtccgctcattgaccttgtctggtatgttggctgaagccattcgtcgtatcagtaatgaagagtcaatttctgcgatgttcgaacattaa

SEQ ID NO: 295349 - DNA, 876 bp, Proteus mirabilis
atgacactaagttggccctctcctgccaaattaaatctgtttctctacattaccgggaaacgccccgatggttaccataatctacaaaccttatttcaatttttagattatggcgatacgctaacttttacgccccgtaatgatacgcagttaaccatcttaacccccgttgaaggggttgcagatgaagataatctgattattaaagcagccaaattattacgtcaatactgccatcagcaccatattcccctacgctatcaaggggcagatattagtattgataaaaaactgcccatgggaggaggtttagggggaggctcttccaatgctgcgacaacactgatagcccttaattaccattggcaagcaggcctaagcgatgaaacattagccacactcggcgtgacgttaggcgcagatgtgccggtatttgttaaagggcatgccgcttttgctgaaggtgttggtgaaatattaaccccagcatcacccaaagagtgttggtatttagttgctcaccccggaatttctatcccaaccccgacaatcttcacagatccagaattaaaacgtaattcgcctattcgctctctgggcgcattattacaggctccgtttgcaaatgactgtgaaatgatcgcaagaaaacgttttcgtgaggttgaatatctgctttcgtggctgttagaatatgcaccgtcacgcttaactgggacaggtgcttgtgtattcggtgagtttgaatcgcaagaggccgctagtgaagtgttaattaacgcccctgagtgggtgcacggatttgtggcgcaaggcgttaacatttcccctgtgcatttattccgctcaaggatacctgtgttattgcacccgtaa

SEQ ID NO: 295350 - DNA, 639 bp, Proteus mirabilis
atgcgctcacgcatttttccaaccaaatcacttttgcgtctccttccgctagctgcgctgctactaagtgcatgtaatttaaataatatacaaacacaaggttcagcgtcagataacgatgttcaatggcaatcgcgtcaacaagcattaaataagatttcacaatatgagacacgtggcgccttcgcttacattgaaggcacctataaaacttacgcacgtttctattggcaagataaaggtaccgatcgctatcgcttacttttaaccaatccattggggacgacagagctagacttaaatgtgatgcctggtgtgattgaagtgactgataatggtggtaaaaagtattatagtgacaatccaactgaaatgatttatcagctcaccggtatggtgatccctttaaaaaatttacgcgcttggttaattggtttaccaggtgatgccacggattttgaactcgatgcaaatcatcttttaaaatcggttacatggccaaccccagaaggtgattgggtggtaacctaccaatcctatgacaccgcaataacaccgaacttgccacagcgccttgaattaaaacaaggtgaacgcacgataaaattaaaaatggataactgggatatacagcaatga

SEQ ID NO: 295351 - DNA, 1263 bp, Proteus mirabilis
atgacgttattagcattaggtattaatcacaaaacagcccccgtagcgttacgtgagaaagtctctttttctcctgataccatgggtgacgccttaaataacttgttacagcaacctgctgtaagaggtggtgtagtgctgtctacttgtaaccgtactgagctttatctgagtctagaagataaagaaaatagccatgaacaactgatcagttggttatgtcagtatcaccaaattgagcctcatgagcttaaaaatagtgtttattggcatcaagataatcaagcagtgagccacctgatgcgcgttgctagtggtttagattctttggtattaggtgaaccgcaaattttagggcaagtcaaaaaagcgtttgccgattctcaaaattatcactcgctctcttcagagctggaacgtctgtttcagaaatccttttcagttgcgaaaagagtgagaacagagacccaaattggtgctaatgctgtttctgtcgcttttgctgcctgtactttagcgcgccaaatctttgagtcattatcatcattgactatcttattggtcggtgcgggtgaaacgattgaattagtggcgcgtcacttacgtgaacatcaagtcaaaaaaatcattattgctaatcgcaccaaagagcgagcgcaacgtttagcgaatgaagttgacgctgaggttatcactttatctgatattgatgagtcactttctcaagcggatattgtgatcagttcaacagcaagtccgttgcctattattggcaaaggcatggtagaaagggcgttaaagaaacgtcgtaatcaaccaatgctactcgttgatattgctgtgcctcgtgatattgaacaagatattgaaaaactgagtaacgtttatctttatagtgttgatgatttagaagctatcattcagcataaccgtgaacagcgccaagccgcagccattgaagctgaacatatcgtgcaacaagagagtggccaatttatggattggttacgtgctcaaggtgctgtcggggcgattagagaatatcgcgatagtgcagaaatgttacgtgcagaaatggcagaaaaagcgattgcattgatacaaaatggcgctgatgcagaaaaagtgatccaacagctttctcatcagttgatgaatcgccttattcatacaccaaccaaatctcttcaacaggctgccagtgatggtgatattgaacgcctgaatctcttacgtgaaagtttgggtattacccataattaa

SEQ ID NO: 295352 - DNA, 1083 bp, Proteus mirabilis
atgaagccttctattgtcgctaagttggaagctctacaagagcgttatgaagaaattcaagcacttctagcagaagctgatgttattgcctctcaggagcgttttcgtgcgctttcaaaagagtatgctcaattaacggatgtcacatcttgttatcgtcaatggcgaaaagtgcaagatgatatggaagcggcagaaatgatgcttgatgatcctgaaatgaaagagatggctcaagaagagctaaaagaagcacaaagcgtcaatgaggagctagaacagcaacttcaagtactgttattacctaaagatcctgatgatgagttcaactgtttccttgaaattcgtgccggaacgggtggtgatgaagccgcacttttcgccggtgacctgttccgtatgtatagccgttatgccgaagcacgtcgttggcgtattgaagtgatgaatgcaaacgaaggcgaacatggcggttataaagagatcattgccaaagtcattggtgatggcgcttatggggtactgaaatttgaatcaggtgggcatcgtgtacaacgcgtgcctgaaacagaatctcaaggacgcattcatacttctgcttgtacagttgcggtattgcctgaagtgccagaagctgaattacctgaaattagcccaagtgatttacgtattgatacttttcgctcatcaggggcgggtggtcagcacgtaaataccacggattcggccatccgtattacgcatatcccgacaggcattgtggtagagtgtcaggatgagcgttctcaacataaaaacaaagcgaaagcgatgtcagtattaggtgcgcgtattcgtgctgccgaagtacaaaaacgtcaagaagccgaagcatctgaacgccgtaacttattaggttcaggagatcgttctgatcgtattagaacttataatttcccacaaggtcgcgtgacggatcatcgcataaaccttacgctttaccggttagatgaggtgatggaaggtaaactagatgcacttattcaacctattgtcactgaatatcaagccgatcagctatccgctttatctgagcaagattaa

SEQ ID NO: 295353 - DNA, 849 bp, Proteus mirabilis
atgaattataaacaatggctgcatcaagcagccttgcaattaattgatagtgacagcccaaagcgggacgcagaaattctattagggcacgtaacaaaacgtgctcgtacttatttgattgcttttagtgaaactgtacttttagaagatgaactagtgcaattgtcatccctccttgctcgacgtataaagggcgagcctatcgcttatttagtaggagagagagaattttggtcactacctttaaaagtctctcctgcaacacttatccctcggcctgataccgaatgtctagttgaaaaagcattagagaaactctctgcacaagcaagtcgaattttagatttaggtacggggacaggggctattgccttagcgatagcttcggaacgttctgactgtcgtgtccttggtgttgattttcaaccagaagcggtagcattagcgatagaaaatgcacaacatttggcacttagcaacgtagaatttatggaaagttgctggtttagttcactctctggttatcaatttgatatgataatcagcaatcctccttatattgatgaagaagatgagcatctttatcaaggagacgttcgctttgagccattaaccgcattggtcgcggcagatcatggttttgctgatattgagcttattattacaaatgcccgtcagtttttagctaataacggttgggtattaatagagcatggttggcaacaaggtgaaagagtacgtaatatttttattgataagggttactgctgcgtggaaactttccgtgattacggcggtaatgagcgagtgacagtaggtcgttggaatgatgatagaaaccatagctga

SEQ ID NO: 295354 - DNA, 816 bp, Proteus mirabilis
atgatgatagaaaccatagctgattacgaatttaacaaagcccctttggttaagggtatgatccttatctctcaggcaattcgcccagattttccagtcacttcagttggctatcaattggcacagctggtggagcaagcagaagcggaaattccccaccaagccagtatacaagagagaattgatgcactgctgaagctattttataaacaatggcatttcagtggtgcaagtggcaaatattgtctttctgatacgttatggttagataaagtattggccactcatattggttcacctgtgtcattaggttccattttaatttatatcgcacaggcaataaatttaccgttagcgccagttatttttcctacacagttaattatcagaatagatattccgaatgaaaaaccacttttcttaaatcccattaatggtgaatatctttctcgtcatactttagacgtttggctaaaaggtaatgtaggcagtacatctgagctatcagcatccgatctagaagagtcagaacacagttctattattcgcaagttattagatacactcaaagtctctttaatggaagaaaagaagatggagcaggcacttaagaccagtgaaacggtgttattgtttgatccagaagatccctatgaaatacgtgatcgtgggctgatttatgctcaattagagtgtaatcatgtggcattgtctgaccttaactactttgttgaacagtgtccggaagatcccatttcagagatgattaaaattcaaattcattcaatagaacagcatcctgttgttttacattaa

SEQ ID NO: 295355 - DNA, 855 bp, Proteus mirabilis
atgcaacataaagtggtgagtattggtgatatcaaggtagcaaataatttaccctttgtgctctttggtggcatgaatgtattggaatcgcgcgatttagccatgcgtatttgtgagcattacgtcacggttactcaaaaattagatattccttatgtatttaaggcctcttttgataaagcaaaccgctcatctatccactcttatcgtggaccgggtcttgatgaaggaatgaaaattttccaagagctaaaagagacttttggggtaaaaattatcacggatgttcatgaaccttcacaagctcagcctgtatctgaagtcgttgatgttattcagctaccggcattcttagcgcgtcaaaccgatttggttgaggcaatggctaaaacgggtgctgtaattaacgtgaaaaagccacagtttgttagccctggtcaaatgggaaatatcgtcgagaaatttaaagaaggcggtaacgaccaagtgattttatgtgaccgtggtagtaattttggttacgataatttagtggtcgatatgctaggttttcatgtcatgatgcaagcctcagaaggggctccagtgatttttgatgttacccactcactacaatgccgtgatccattcggtgcggcttctggtggtcgtcgtggacaagtcgctgagttagctcgtgcaggtatggcagtgggtctggcagggttatttcttgaagctcatcccgatcctgatcatgcccgctgtgatggcccatcagctttaccattagctaaattagaacctttcttagctcaaattaaagcgattgactctctggtaaaaagcttccctgagttagataccagtaaataa

SEQ ID NO: 295356 - DNA, 930 bp, Proteus mirabilis
atgcaactacacactgtagtgaatatgttcggcgctgatctccagcgccgttatcatgaaaaaatccacaaaataacccttcatggtggttttagttgtcctaatcgagatggcacattaggacgaggagggtgtacattttgcaatgtctcttcttttgctgatgagcaaacgcaatatcactctattgaagagcaaatcgcctaccaagctaagcatattacccgtgctcgccgttatttagcttattttcaagcctatactagtacctatgcagaagtagaacatctacgaaaaatgtatgaaagtgcattattacaagccaatatggttggattatgtgtgggaacacgccctgattgtgtgcccgtcagtgtgttagatctactgcaaggctattgcgaacaaggttatgaagtatggttagagttaggattacaaactgcacataataagacattaaagcatattaatcgtggtcatgattttcaatgttatcaagcaaccacaaaagaagcgcgtcgccgaggtttaaaggtgtgtacgcatcttattatcggtttacctcgtgaagatcatcagttaaatatgcaaaccttagagcaggtagtagaaaccggtgttgatggactaaaattacaccctttacacatagttgaggggagtacgatagccaaagcatggaaagcagggcgtattagtgcattaacacaacaacaatatgtttatactgctggtgaaataatccgtcatactcctgcagaagttatttatcatcgtgtttgtgccagtgccagaaaacctactttattagcccctgaatggtgtgaaaatcactggttgggtatgaatgcactctatcaatacttattagagaaaggcgtacaaggtagtgggataaataagccttttgtggctaattgtaaataa

SEQ ID NO: 295357 - DNA, 279 bp, Proteus mirabilis
atggctcaagcactagtagaaaacagtgaacgagtgtcaattcgtatcactacagaagataaatcactgctggttcgtgctgctagtttggaaaatacaaacttaacagagtttgtacttcgtaatattgtacctgtagctcggcaagttattgaaaataatgagcgtttaaaattatcagaaaaagacacattacgtgttatggaacttttagataatccaccaaagcctaatgctaaactacttgcagcggcttttgctctaccggacaatgcatga

SEQ ID NO: 295358 - DNA, 1701 bp, Proteus mirabilis
atgaaaacgcataaagttaaccgggttcgcccctttagtgcatttattgatgcatgtgtaaaagagccttactcttttgcccgtttattaaaagatattattgcagggatcaccgtcggcattatcgcaataccactagcaatggcattggctattggtagcggtgttcccccgcaatacggtctttataccgcagctattgccggtattattatcgctgtaacaggtggctctcgctacagtgtttcagggcctactgccgcctttgtggtgatactttatcctgtttcacaacaatttggtttaagtgggctattaattgccactttgatgtctgggattattttagtggttatggggttagctcgttttggtaagctcattgaatatattcccgtttctgtcacattaggatttacttcggggattgccatcactatcgccaccatgcagatcaaagatttctttggcttagaaatgtcgcatgtcccagaaacctatattgataaagtaattgctctaggtgccgctctaccgacaatccatcttggagatacattaataggcgtaaccactctcttagtattaatttattggcctaaattgaatttacgccttcccggccatttaccagcattaattgccggtactgctgttatggggatagttaatttatttggccatgatgttgccaccattggttcacaatttagctatctattgcctgatggttcaacaggacaaggtattccgccgatcctgccacaatttgtgctaccgtggaatttacccagtagtggtgagtctattgcattaaattggagcacggtcagtgcgttattacccgccgctttttcaatggcaattttaggtgcgattgaatcactcctctgtgctgtagtgcttgatggtatgacggggaaaaaacatcactctaatggtgagttagtcggtcaaggtattggtaatattgtagcgcctttctttggtgggatcaccgcaactgcggctattgcccgctcagcggcaaacgtacgtgccggtgcaacgtcccctgtatctgcgattgtgcactctttattagttttagtaactttactggtcttagcgccttttctctcttatttaccattagcagcaatgtctgcattgttattaattgttgcatggaatatgagtgaagctcgtaaagttatcgatcttattcgtcatgcaccaaaagacgatattatcgttttagtattatgtttatcacttaccgtgctgtttgatatggttattgcgatcactatcggcattgtattagcctctttattatttatgcgtcgtattgctaatatgacgaaaataacagaatcaacttatactgatgatgataaacaattattagttgtgcgtgttaatggtccgctattctttgctgccgccgagcgtatttttaatgaattacgtgaacgtagtaaaggatataaaactcttattatgcagtgggatgcagtacctgtattagatgctgggggattacatgcttttcaacactttgtggcggatgtgcaacatgatactcatattattgtttgtgatattcccttccagccattaaagacattagcaagagcacgagtaacgccaattgatggcacacttaatttttatccttcgctacaaaaagcgctggatgatatggaattaattcagtag

SEQ ID NO: 295359 - DNA, 942 bp, Proteus mirabilis
atgaatattattttttatcatcctttttttgatgcaaatacatggataagtggaatgaaagcacgacttcctgacgcgcatattcgtgtttgggagcatggtgatgataagcctgctgattatgcaatggtctggcttcctccctatgaaatgttagcaagccgtaaccaattaaaaggtatttttgcactaggtgcgggtgttgatgccattttaaagcaagagcaacaaaaaccaggcacattacccgctggggttccggtaatgcgcttagaagacacgggtatgggtttgcaaatgcaagagtatgccattgctaaagtgatgtattattttcgccgtatggatgattataaacgtcaacaatcacaacgcttatggaaacaactccccgcacatacttatgataattttgttattggtgttttgggtgctggtgcattaggcgcaagtgtagcgactaagcttgctgaacttggttttaacgtgcgttgctggagtcgtagtaaaaagcaaattaatcaggtagagagtttttatggtaacgatcaactgagcgattttgttaaagagtgtcagttgttaatcaatctattaccttatacaccacaaactcatggtattttaaatttctcgctttttgaacagcttaaaccttcttcttatttaattaatttggcaaggggagcacatcttgttgatcaagatctgctagaagctatcgatcaaggttatattgctgatgcctctttagatgtatttagccaagagccattaccgggtatgcatccgttttggactcatcctcgtatctctattacaccgcatattgctgcttttactattccagatattgcaatggatacaattgttgaaaatattcaacgtattgaaaagggcgaaacaccttttggtgttgtggatatgaaaagtggctattaa

SEQ ID NO: 295360 - DNA, 807 bp, Proteus mirabilis
atgaaatttgtctcattcaatattaatggattacgtgctcgccctcatcagctcgaagccattgtagaaaaacaccaacccgatgttattggactgcaagaaacaaaagttcatgatgatatgtttccattagaaactgtcagtgccttgggctaccacgttttttatcatggacagaaaggccattatggtgtggctttgttaactaaggcgaaacctgtcgcggtacgtaaaggattccctggtgatggtgaagaagctcagcgtcgtatgatcatggcggacattgaaacccccgctggattattaacggtaatgaatggttatttccctcaaggtgaaagtcgtgatcatgagacaaaattccctgctaaagcaaaattctatgctgatctacagcagtatctgaccaccagcttaacgccttcctctcccgtactgattatgggggatttaaatattagcccaaccgataaagatatcggtatcggcgaaaataatatgaaacgttggctaaaaatgggtaaatgttcatttttaccggaagagcgagagtggttagcaacgcttatgggttggggattaaccgatacttaccgcgcccaacatcctgaagtcgaagaccaattttcttggtttgattatcgctcaaaaggctttgatgataaccgaggcttacgtatcgatttactgctagcaagtcgttgcttagcagataattgtatttcaaccggcattgactacgatattcgtgcgatggaaaaaccttccgatcacgcacctgtttgggccgagtttaagctttaa

SEQ ID NO: 295361 - DNA, 1968 bp, Proteus mirabilis
atgagattatttattgcagaaaaacccagccttgctcgagctattgctgatgtattaccaaaaccgcataaacgtggtgatggttttattgtttgtggtgataaccagtatgtgacgtggtgtgttggtcatttacttgagcaggctgagccggatgcatatgatccgcgctatgcgcgttggtcgttagatgatttgcccattattccgaataaatggcaactcaaaccgcgcgctgatgtgaaaaaacagctagatacgatcaacacattactaaaacaagccgatgaagtgatccacgcaggagaccccgatcgcgaagggcaactgttagtagatgaagtacttaattaccttaatattagtgatgctcaaaggaaacaggcacgccgctgcctgattaacgatttaaaccccgccgcggtatctcgagcaattgataagctccgctacaatcatgaatttattccattatgtgtttctgccttagcaagagcgagggcggattggctatatggcattaacatgacacgcgcttacacgttattaggacagcgcaatggttaccaaggcgtactttctgttgggcgagtacaaaccccggtgctaggtttagtcgtacgccgtgatgaagaaattgaaaactttgtaccgaaagatttttttgaagtcaaagcgcatatcgttactcctgcagatgagcgatttaccgctatttggcagccgagtgaacactgtgagccttggcaagatgaagaagggcgtttattacatcgcaaattagcagagcatgttgttgatagaatagctggcaagcctgctaatgttaccgattatcaagataaacaagagtctgaaatagcacctttgcctttttcattatctgctttacaaattgaagcggcgaaacgctttggtttaagtgctcaacaagtattagacacatgtcaacgcttatatgaaacgcataaacttattacttatccacgctccgatagtcgctatctgcctgatgaacactttgctgggcgtcatgcggtgatgaatgccattagtgtgcatgataatagtcttttaccacaagaaacattagatattgataaaaagaaccgttgctgggatgacaagaaagtagatgcgcaccatgccattattcctactgcgaaaacaggtaatatttcattaagtgaaaatgaaaagaatatttactatttgattgcccgacaatatctaatgcaatttatgccagatgcggtgtaccgcaaatgtgtgattgaactcgatattgagaatggaaagtttattgctaaggcacgatttttagcacaagccggctggcgtaccttattaggtagtaaagagcaagatgcggaaaatgatggtagcgccttacctattgtggctaaaggtgatgagttactttgtgaaaaaggcgagattgttgccaagcagacccaaccaccaagaccttttacagatgctacgctactttcggctatgaccggtattgcacgttttgtgcaagacaaagagctaaagaaaatcctaagagcgacggatgggctaggtactgaagcgactagggctggtattattgaattactgtttaaacgcggctttctgcaaaagaaagggcgagctatcaactcgacaccagcaggaagagcattaattcatgttttgccagatatggcgacattacccgatatgaccgctcattgggaatcaatattaacgcaaattagtgagaagcaatttaagtatcaagattttatgatgccattaagtaacacactatttgaattaattactcaagcaaaacgtcgtcctaatattcaagcgtttagaaacctgcctgcgcctgcgcagaataaaaaacgtaaaggtgcgacgaaaaaaagtgcacaagggaaaagtcgttcagcgcagtctcaatctacgaatcgcaatataaagagtgatgcttag

SEQ ID NO: 295362 - DNA, 1044 bp, Proteus mirabilis
atgtctgaagcaattcgtttaacacaatacagtcatggtgccggatgtggctgcaaaatttcaccaaaagttttggaaacgattttacatagtgaacaggctaagtttcacgatccccatttattggttggtaatgaaacgaaagatgatgccgctgtttatgatttaggtaatggcactggaattatcagtaccactgatttttttatgccaattgttgataacccctatgactttgggcgtattgcggcgactaatgcgattagtgatattttcgctatggggggtaaacctattatggcaatagcaattttaggttggccaattgataaacttgcgcctgaaattgctcgtgaagttatcgaaggtgggcgagccgcctgtcaagaagcggggatttcccttgctggtgggcattcgattgatgcccctgagcctatttttggtttagcggtaacgggcgttgtaccggtgagtaaaattaagaaaaacagtgctgctaaagcaggatgccaactttttttaactaaacctttaggtattggggtattaactaccgcagagaaaaaaggcttattaaaacctgagcatcagggcctagctactgaaattatgtgccgtatgaataaagcgggtactgatttttctgatattgaaggggtcacggcaatgaccgatgtgacaggttttggtctattaggtcaccttagcgagatttgtgaaggctctggattacaagccactattcacttttcacaagtaccacgattacctgaagtagaagcgtatatagagcaaggatgtgtaccgggcggtactggacgtaattttgaaagttatggccatttgattggtaatatcagcgaaatgcaacgtaaattattatgtgatccacaaacttcaggtggcttattactggcagtacagccagaagccgttgagcaagtaaaagaagttgctaaacgctttaatattgatttgacctcgatcggtgaattaacagagccgaaagcaggaagagcgttaatcgaagtgacaaactaa

SEQ ID NO: 295363 - DNA, 552 bp, Proteus mirabilis
atggatgcattaacactgcttttaaatcgacgttcagcgtctcgactgactactccagccccaaataaccaacagcttgaagctattttacaagcaggtatgagagcccccgatcatggcgcccttaaaccttggcactttgtcgtgatgaaagaggatggtattgagcgttttagtcaattattacataaagcggcggtggtgagtcaactaggtgctgaggtagaagaaaaagcaaaaaacgcaccttttcgtgcacctttaattattaccgtgattgccaaagttaaagcgcatcctaaagttcctgaatgggagcaaattgttgcggcaggctgttgtgttcaggcgatgcaaatggctgcagtggcacaaggttatagtggtatttggcgttcaggctcttggactcatgatccagtggtaagagcgggattaggttgtggagagcacgaccatattgttggtttcttatatcttggtactcccgcattgaaagcacctacaacggtttctcctgctgatttaactgattttgtgacttatttttaa

SEQ ID NO: 295364 - DNA, 1857 bp, Proteus mirabilis
atgagtaaaattatggagttaatcggcactatttttcgatttagttggcaggcgattaactttatcaggaaactaatcttaaacgttattttcttctttctactttttatgggtgtgggactctatttcatcgtccaagaaacgcaaaaacctaccgattatcaaggtgcattactggttgatttaaaaggcgttattgttgaccaaacagctaaccaaaatcctttagggcaaatgagccgagagcttttgggtgtttcgggtagccagttacaagaaaattcgttattcgaagtcgttgataccttacgcaaagcagcgactgaccccaaaattaaaggaatggtactaaaacttgacgaatttgctggggcagaccaaccttcactcaattatgttggtaaagcgctgactgaatttaaaaaaacaggtaaacctatctatgcgattagtggttattatagccaaccgcaatattacttagcctcttatgcagataaaatttatttagcatcacaaggtgctgtgggtatttatggtttaggttttagtaatctctattacaaatcgctattagaaaaacttaaagttaatacccatatattccgtgtgggaacctataaatcagctgttgaaccgctgatgcgcgataatatgtctgatgaagcccgagccgcatctagtcgattagtttccgtactctggtctaattatttaacgcaagttgcagaaaatcgtagtattaccaaggaagatgttttccctggtgcaaaagagatgatagttgagctgcgtaaagccgatggcgataatgctacttatgcacttaatcgcaaattggtcgatactgttagctcttatgcccaatttgaagcggatatgaaagagacctttcaatgggatcatgaagctaagcagtttaacaatattagtatttatgattatgctgataacctcaccgcattcgccccagaaaacgaagacggcaatattgcggttgtggtcgttcaaggcgcaattattgatggtgaaagcattcctggctccgcaggtggttcaaccattgctaatcaaatccgtcaagcgcgtttaaatcctaatattagagcattagtattacgagttaatagccccggtggtagtgtgtctgcatctgagcagatccgcagtgaaatagccgcctttaaacaagagaaaaaacatgtcgtggtttcaatgggcggaatggctgcatcagggggatattggatctctacacctgcgagtaaaattatcgctagcccttcaacattaacaggctctattggtatatttggtgtcatcaatacctttgaaaatagcttagaatcaataggtgtgcatagtgatggcgtgagtacatcacctcttgcagggctttcggtaaccaataaattaccagaagatttttcagagctattccaacttaatattgaaagtggctataaaacattcctgaaattagtagctgaatcacgtaataaaacaccggcacaagttgatcgtattgcgcaaggtcgtgtttgggttggcgttgatgctaaacaagtaggattagttgatgaatttggtgatttcgatgatgctattaatgcagcagcaaccatggcaaaaatcaaacaaccagtcattgattggatgaaaccggaattaagcttatcagagcaaatattaatgagcttatcggccaatgcaaaagccattattcctgatccattacaagcctatttacctgcaccggtatttaaagaagttaaaacacaaactgagttttatcgtaatatgaacgatccgcaaaaccgctatgcgtattgtttatcttgtggtgatattcaataa

SEQ ID NO: 295365 - DNA, 1023 bp, Proteus mirabilis
atgcaaaaaaaatccatttacgttgtgtatactggtggaactatcggtatgcaacattctgatcacggctatatacctgtatcaggacatttacaacgccaattagctaagatgcccgaattccatcgtgaagagatgcccaatttcacaatcaaagagcaccttcctttaattgattcatcaaatattacccccgaagattggcaatctatcgctgatgatattagcgagaattattgccactatgatggttttgtcatcttgcatggtaccgataccatggcatttaccgcttctgcactttcctttatgtttgaggggctggcaaaaccggttatcgtcaccggctctcaaattccattagaagctttacgctcagatggacaaactaacctattaaatgctctctatattgctgcacatcatccgattaatgaagttgcactgtttttcaacaatactctgtatcgtggtaatcgtgcgataaaagcacatgcagatggcttcaatgcttttgcttctcctaatagtgcacctttattagaagcaggcattaatattaaaacgtttaaaataaacccattacctaagccaaaaggtgagtttattgctcatcatattacccctcaaccaattggtgtggtaacaatatatccgggactttctgatgaggtggtgaaaaatatcttaatgcaacccgttaaggcacttattttgcgctcttatggtgtgggtaatgccccttctcatcccgccttgttatcaacgctacgcgaagcaactgagcgcggtattgtcgtcgttaacctaacacaatgtatttctggtcgtgtcaatatggggggttatgcaacaggacaagcactcgccgatgttggggtgatcagtggttatgatatgacttttgaagcagcgttaactaaactccactatctacttagtcaacaatatagctatactgagatctgccgtttaatgcaacaaaatctccgtggtgaaatgacattaaacgatgacgactag

SEQ ID NO: 295366 - DNA, 642 bp, Proteus mirabilis
gtgaaaaattcagcgttattattagttgatctacaaaatgatttctgtaccggtggcgcattggctgttaaggaaagtgatactgtcatagatacggcaaatcggcttattgattattttcaacgccatcagcgtcctattattgcgagcaaagattggcatcccgcagatcatctcagctttgcaaaaaattcaggtactgttgttggcgaaattggccaattaaatggccgtccacaagtttggtggccagtgcattgtgtacaaaatagccatggcgctgattttcatcccttattaagggatgatttaattagtcatattatttataaaggccaaaatcgacttatcgatagttatagtgctttttttgataatgaccatgaatatcaaacaggattgcatactcttttacaaagcatgcagatcgagcatctcaccattttagggatagcaactgattattgcgttaaatttaccgtgttagatgcattacaattgggttatcaagtatcagtggttatggatggttgtcgaggtgtcaatattcaaccagatgatagccagctcgcatttaatcaaatgcaacaacatggggcagttttagttgattcagtaacaatgcttaaaagtgacaaataa

SEQ ID NO: 295367 - DNA, 282 bp, Proteus mirabilis
atggaagttaatgatttaatttcaatggtcacacctgagatttatcaacgtctttctaccgcagttgagctaggtaaatggccagacggcgttgcactcactgcagagcaaaaagagcattgcatgcaaattgttctcttatggcaagcacagaataaccataatccggaacatatgacggttggcacaaacggacaaattacgatgaaaagcaaacaagagctaaaagcgcaatttcaagctgaacgtttagccacattaacaccaatggatgatgattaa

SEQ ID NO: 295368 - DNA, 438 bp, Proteus mirabilis
atgagcaataatgaaaaaaaagtgcatatttcaagtgataacaatcacattgatttatcaaacctcaatgaaatgcagcattatgtgacgcaacagcggggtactgaaccgccgtttagtggtaaattattacataatagagaaacaggtatttatcattgcttatgttgttctgcgcctttgttttattcggaaactaaatttgatgcaggatgtggctggccaagtttttatcaacctgtaagtgatgatgcaattctttatcttgatgatttttcgcataatatgaaaagaacagagatccgctgtcatcaatgtggtgctcatttagggcatgtatttaatgatggcccagcaccgacaggacaacgttattgtgttaattctgcctctttggcatttagcaatacagaaacaggtgaagtgcaaaagggctaa

SEQ ID NO: 295369 - DNA, 996 bp, Proteus mirabilis
atgactatcaaagtaggtattaatggttttggtcgtatcggccgcatcgttttccgtgctgcacaagaacgttcagatatcgaaatcgtaggtattaacgatctgttagacgcagaatacatggcatacatgctgaaatacgattcaactcatggtcgtttcaacggtactgttgaagtaaaagatggccacctcgttgttaatggtaaaaccatccgcgtaacatcagaaagagatccagcaaacctgaaatggaacgaaattggtgttgatgttgttgctgaagcaactggtctgttcttaactgacgaaactgcacgtaaacacatccaagctggtgcgaaaaaagttgttctgactggtccttcaaaagacagcacacctatgttcgttatgggtgtaaaccacaaatcatatgcaggtcaagatatcgtttctaacgcatcttgtacaactaactgcttagcgcctttagcaaaagttatcaacgacaaattcggtatcgttgaaggtctgatgacaactgttcacgcaacaactgcaactcaacgtactgttgatggtccttcaatgaaagactggcgtggtggtcgtggtgcttctcaaaacatcatcccttcatcaactggtgctgctaaagcagtaggtaaagttattcctgaactgaacggcaaactgactggtatgtctttccgtgttcctactcctaacgtttctgttgttgacttaactgcacgtctggaaaaaccagcaacttatgctcaaatctgtgaagcaatcaaagaagctgccgaaggcgaactgaaaggcgttctgggttacactgaagatgcagttgtttcaactgacttcaacggtgaagtattaacttcagtattcgatgctaaagcaggtatcgcgctgaatgacaactttgttaaattagtttcttggtacgataacgaagttggttattcaaacaaagttctagatctgatttctcatatctctaaataa

SEQ ID NO: 295370 - DNA, 885 bp, Proteus mirabilis
atgaatgagaaaattttttctttgccggttattgaacaaatatcaccttacttaagtcgacgccaattaggtgaactccctattctggtgatctctcaccccaaagtacgtgcggctattagtcttcaaggtgcccatcttatcgcatggcaacccgcacaaacgcatcccgttttgtggctcagtgaagatgccttatttactcccggtgttgctattcgtggtggtatccctatttgttggccttggtttgcctcagcgggaaccccaagccatggatttgcacgtatcttaccttgggaatttagtgctcattctgaacaagaagacggagtgcttatcaccatgacactcaaagaaagtgcacaaactcaaaagtattggcctcatgaatttactgttattgctcgatttaaattaggtgatacctgtgaaattgaattagagtcatacggtgactatgaagccactgcggcgctacactcctattttaatgtcagtgatatcgataaagtttccattacaggccttggtggtcactatattgacacagtggcggataaagaagtttataccgacgaaacagccctacgctttaacggccgtactgacagactttatactgaacctgaagattttaatcttattcatgatgatggttgggatcgtactattgaggttcaccattatcatcacagtgatgtcgtttgttggaatccgggtgcagaactcgccagttcaatgaaagatatgagctcaggtggttaccgtaaaatggcatgtgttgaaacagctcgtattcatcgtccacttaaaccggataatgttcatcctggacgtttatctgctgtaatacgcgtacgcaaaaatattgctgaaaaatag

SEQ ID NO: 295371 - DNA, 753 bp, Proteus mirabilis
gtgagtaaaaagaaaattgttatttctttagccataatcgctggattgagtacaccgacagccttcgcgggagaatggtcaatagggggttctgtattatcacaagtaacaccttataagggtgctaaatctaaagactatttattacctgtacctttggttaattatcaatctgaaaatttctattttgcgacattagccgcaggatattatttatggaattcaccgaaagatcagctgtctgtcgatgttcactattacccacaagcatttaaaccaagtgactctgatgatgagcagatgaaaaaacttaatcgtcgccgtgataccgtcatgggtggatttacctataaacatcatgagtcatggggaagtttacgaggaattatttctggtgatcttttaggtaaaagtaatggcattattgctgatgctgcttacctttatccttttgaattaggcaattggtcacttcaaccgggaattggtgctgtttgggaaaataaaaagcagaatcgttacgcatatgggattagtcagggagaatctcagcgtagtggtttagcagaatatcgaccaaatgatagctggagaccttatgtggaaatctcagctaactataagtttgctgaaaactgggatttcttcgcgatgggacgagtggatcgcttacccagcgaggttaaagatagcccgatggtaaataaatcggtaacggctattttatggacaggtgtcacttatactttctaa

SEQ ID NO: 295372 - DNA, 2301 bp, Proteus mirabilis
atgagtaacggcattacattgcgtgtgaaaggaaaggttcaaggtgttggctttcgcccttttgtttggcaattagcacatcattttggtttattagggcaggtgagtaatgatagcttaggagtattgatccacttaacgttatcaccgcaaaatcaacactttattaatgcattaacggctcaatgtcctcctcttgcacgcattgaacgtattgaacaaacaccttatcaatgggagcaactccccacggactttactattgtaaaaagtggtggcggagaaatggatacacaagttgtacctgatgcagcgacttgtcaggcttgtattgatgagttgtttgatccacaaaatcgtcgttatcactacccttttataaactgcacccattgcggcccccgttttactattataaaaaaaatgccttacgacaggccttttacctctatgtctgcgtttccattttgtccgatttgccaacatgaatatcaagatcccgcagatagacgttttcatgcacaacctaatgcctgtcctgtctgtggacctcatatttggttggcagatcatcaagggcaacaacttgcaataaaagagcgggcattaacgcaagcttgtcaggcgctattagcgggaaaaattgttgctgtaaaaggcattggtggctttcatttagtctgtgacgcacgcaatagtgaaagtgttgcgcgtttaagagcgcgtaaacatcgtccagccaaaccacttgcggtgatcttaaccgggattgagcagctccaaaaaccggacgataatgccgagttttactcaaaagtgatagaaacattaaccagtaccgcagcacctatcgtacttattcctaaagaaatcgcccctatttcattaagtgaactgattgcacctggattaacagaagtgggtgttatgttaccagctaatcctttacaacatcttctcgcacatgaaacgcaaattccattagtcatgacctctggtaatgcgacgggacacactcctgcattaaccaatgaagaggcgttaaatcagcttggtgatattgcagaattatttctaatgcataatagggagattatacaaagagcggacgattcattagtgcgtattgaagatgatcagtgtgtgatgatccgccgttcacggggttatgtaccagatgctatcgcattgccaaccacttttgatgcacaacctgcaattttggctttaggaggggatctgaaaaatgtgttttgtctcttaaaagagcaccaagctattatggggccgcatttaggtgatttagatgatttaagtgtgaggcaacaattactgaaatcactcacgctgtttcaacagatctatcgttttacgcccaaagcgattgccattgatgctcatcctaattatatcagccatcaaataggtaaacagctagctgaacagcaacatattcctgttatagaagttccccatcaccatgcacatattgtctcttgtttagcagagcatggacatacacagcaacaaggcgcagtaattggtatagcccttgatggtttagggtatggacaagatggctctttatggggaggcgagtgtttgctggtggattataaaaaatcccaacgtattggcgggctacctgcggttgctatgccgggaggaaatttagcttcaatacagccttggcgaaattggttcgcacatttagctacttttacaaaagattggcaaggtagtgttatcacccaagcaattccgctcactgagttacagattttgagtaaggcagtggctcgtggtttaaattcaccgctagcatcatcttgtggacgattatttgacgcagttgcttgctctttgggattatcacctaaacaaataagctgggaaggcgaagcggcatgctacttacaaagtgctgcgttacagtgtcacgtagatcggtatgctgatatcatcaagcaatatggacatttaatgcctgtaaaagataagcatgttgatttgtccattttctggtcacaatgggaaagcatcacattgaataccagtgagaaggcttggttatttcactatttattagccgaaagtttgggtgatattgctctgcaagctgcgcaagaacatcagattgatactattgttttaacaggaggggtattcaataatatcttacttaaggatctgtttaagcaaaaattaaacaataaaaaggtattaacccctatgatattgccatctggtgatggtggaattgcattaggacaagcacttattgccagtcattttatgtaa

SEQ ID NO: 295373 - DNA, 882 bp, Proteus mirabilis
ttgcttgaaggttttttcaaaccagatgatgtgtatttattagagcgttattcattaacgacggttgtgcatgctgattggcaatttgaagccattgagcaagcgcaattagagcggcctatcaatatttatctgaaactcaatagtggcatgaatcggttaggttaccgaccagaagactatcagcaagccatacaaagagcaaaacgcataactaatattggctctattgtacaaatgtcccattttgccaatgctgatacagggctgaatatggcgacacaaaaacagattattgatagctcaatggtaaatgatttaccgcgctgtttagccaattctgcggctattttatttgaaccacaaacccatcattcatgggttcgtcccggtattattttatatggtgtatccccctcaggggggtggcaagatattgctgattttaatttgcaacctgtgatgacctttaacagtgaagtattagccattcagtcagtaaaaaaaggtgagcaaattggttatggtagccgatataccgcacaacgtgatatgagaattgctgttgtcgcttgtggttatgctgatggttatccaaggcatgccccagatggtactcccgttatcgttaaaggacataaaacacaattagttgggcgtatttcaatggatatgcttactattgatgtaaccgatttgccggatgttgaacatggaagccctgttgagttatggggaaatcaattaccggttgatgaagttgcactggcttgtggcactattggttatgaattactgtgcgctattgcaccgcgagtggcggttgaagtgacgataaatgtagcaaactctactttttctgatctaaatgaaagttgttaa

SEQ ID NO: 295374 - DNA, 1305 bp, Proteus mirabilis
atgaaagtgatcatcttaggtggcggcgttattggtgtaacaagtgcgtggtacttagtacaacaagggcatgaagtcattgttgtcgataggcaaagtagtgcggcagaagagacgagtgccggtaatgcagggcaaatatctccgggttatgcaacaccttggggtgccccgggtattccattaaaagcagtaaaatggatgtttcaaaaacatgcacctttagcgatccgacctgatggctcactgttccaattacgctggatgtggcaaatgctacgtaattgtgatgcttctcattatgcgatgaataagagtcgtatggtgcgtattgctgagtatagtcgtgattgtatccgtcaattacgccaagataccggtattgaatacgaaggacgccaagggggaacgttacagctatttcgtgatcaaaaacaatttgataatgccgctaatgatattgctgtattaaagcaagaaggtgtggcttatgaactgctaacagccgagcaactaaaatcagcagaacccgctttagagcatgtgagtcataaacttaccggaggattacgtcttcctaatgatgaaacgggtgattgccaaatctttactaagaagctggctaaaatggctgaagaggccggggttactttcttatttaataaagaaataaaacacctactttttgatggtgataaagtcaccggtgtgcaatgccatgatggtttattaaccgcagatcactatgttgtcgccatgggatcgtactcgactgaatttttgaaaaacaaaatcacaattccggtttatcctttaaaaggctattcattaaccatgcctattattgatgcaagcagagcaccaacatccactattttagatgaaacatataagattgcggtgactcgctttgataatcgtattcgtgtgggcggtatggcggaagtggtaggttttaatttgaatattttaaaatcacgttgtgaaacgctcaaaatggttgttcaagatctctatgagggtggtggtgatatcagtaaagcgacattctggacaggcttaaggccaatgacgccagatggtacaccgatagttgggccaaccgcatatcgtaatttatccctaaatacggggcatggtacattaggatggacgatggcatgtggctcaggacagctgttagctgatttaatatcaggtaataaaacggcaattgctgcagatgatctctccgtgttccgttatatcgatggatttaatactaaattgctccgtccagggcaaaaacttgacgctgtttattaa

SEQ ID NO: 295375 - DNA, 720 bp, Proteus mirabilis
atggttattaaggctcaaagccccgcaggttttgcggaagagtacattgttgaaagtatttggaacaaccgttttccaccaggttctattctgcccgcagaacgtgagctttccgaattaattggtgtgacaagaacgacattgagagaggttttacaacgtttagctcgtgatggttggttaactatccagcatggaaaaccaaccaaagtgaataacttttgggaaacgtcaggtcttaatattcttgaaactgtcgcgcgtcttgatcatgatcgcgtgccacaattaatcgataatttattagctgtaagaacgaatatctcagcaatttttattcgcacggcatttaaaaataatccagaaaaatccctagaagtgctgactcatcaactaacgactgaaaatagtgctgatgagtttagtgagttggactataacattttccgtggtttggcatttgccagcggtaatcctatttatggattgatcttaaacggacttaagggattatatacccgtgtagggcgttattatttctctaatgttcaggcgaaagagttggcgctatcattttataaaaaattggcgttgctatgtgaacaaaaagatactgagcacgttatggattgcgttcgccaatacggaaaagagagtggcattatttggcatgagcttcaatcgccactacctagtgacttagaagaagtaaaacgttaa

SEQ ID NO: 295376 - DNA, 1545 bp, Proteus mirabilis
atggatatgagtataagacaagcattactgaaaaatttcatggggaactcccctgattggtataagcttgctattattacttttttaatcatcaacccactgatttttttctttgttgaccctttcattgctggctggctactcgttgttgagtttatcttcactttagccatggcattaaaatgttatccgctacaaccagggggattacttgctattgaggccgtcattattggtatgacaacgccgaaacaaataggtcatgaaatagccaacaaccttgaagtcattttattactggtctttatggttgcgggtatttattttatgaagcaattacttctatttgcttttacaaaattactcctctctattcgatctaaacgcttattatcattagcattctgttttgctagtgcctttttatctgcttttttagacgctttaaccgtgattgccgtggtgatcagtgtttctttaggcttctattccatctaccataactttgcttctaaccaggctgatgcagagttaagcaatgatggctttattgatagcacagagaaaaaacagaccttagaacaatttcgtgctttcttacgtagcttaatgatgcatgccggtgttggtacagcattaggtggtgtgatgacgatggttggtgagccacaaaacttgatcattgcaaaacacttagaatgggattttgtcaccttctttatcaggatgtcacccgttactattcccgttttctttgctggacttgcagtatgttatttggttgagcgctttaagctgtttggttatggtgccgagctacctgaattagtgcgtaaagttctcactgactacgataaaaagaacagtgaaaaacgaactcaacaagaaaaagcccagttattaatccaagcattaattggtatttggttaattgttgcactggccttacaccttgctgaggttggtattattggtctttctgttattatcttagccaccactttctgtggtatcactgaagagcacgctttaggtaaagcttttgaagaagcactgcctttcaccgcattacttacggtattcttctccgttgttgccgtgattattgatcaacagctatttggtcctattattcaatttgttctacaggcatcagaatcttcacaactgtcactcttttatctctttaatggcctactttctgccatttcagataatgtatttgtgggtacggtctatatcagtgaagcattaagcgcattgcaagaaggattaattagccaatctcaatatgaacatattggtgtcgcaattaatactgggactaacttaccgtcagtggcaacgccaaacggacaagcggctttcttattcttattaacttctgcattatccccgctgatccgcttatcttatggacgtatggtgatgatggcacttccttataccatcgttatgacactgttaggattactggctgtagaattctggctcgtgcctatgacacattggttatatgaaattggcttaatcgctattccataa

SEQ ID NO: 295377 - DNA, 525 bp, Proteus mirabilis
atgttgagtgctcttcgtcactggtcacaaagtcgtttttcatggttactgctggcattaacggcaattggtcttgaaggtgcggcattgtattttcagtacggaatggaattaatgccttgtgtgatgtgtgtttatcagcgcattgctgtattagggatcttagttgccgcattaattggtttttcttcgccaaaactgacactaatgcgcatggcgggtagttttttatggctttatgcctcataccgcggtattgagctagcttgggaacatacgcaacttattcttaatccatcaccttttgcaacttgtgatttctttgttaccttgccttcttggtttgcattgcaagattggttccctgccgtattccaagcatcaggggattgttctgttagccaatggcggttcttgtcattagaaatgccacaatggatgttaattatcttttctgcttattttattgttggtttattagtattaatcagccaagtcacctcttctttttccaaaaaagactaa

SEQ ID NO: 295378 - DNA, 306 bp, Proteus mirabilis
atgcaaagaaaaatgaaagcaacgtattttttgttgatgttgaccagctttgcgttgcttactggttgtagtcaatctaaacaagcacaaaataccaccgctcaagtgattaatagcaataaaacgatagcgaccacaccttctattcctttagaggaaccagcaaaagagacctgtatattttctggtggagtgcctgcgttaacttatgaattacacggcggtcaaacacccgtttgtcaatttgctaatggtaaacgttgtagtgaacaagcgttgattgatggtgcctgtattccaggttaa

SEQ ID NO: 295379 - DNA, 1227 bp, Proteus mirabilis
atgaatatcaccacacccaatagcgttaatgaagtaagccgtaaaacggcgtggatcagggtaattattctatcatttgctgctttcgtatttaatacgacagagtttgtacctgttgcattgttaagtaatatttctgaaagttttgccatggtgccggctcaaacagggttgatgatcactatttatgcttgggttgttgccctaatgtctttgccattaatgataatgaccagcaaagtagagcgacgtaagctactgattattttgtttattgtatttattctaagccatgtcttatctggcgtggcatgggattttaattcgctaattgtaggtcgggttggagtcgcctttgctcatgctgttttttggtcgattactgcctcattagcaataagaatggcaccccatggtaaaaaagcacaagcattaagtttattagcaaccggtgttgcactagctaccgtgctgggtttacctctgggaagggtggttggacaatggttaggatggcgagctacctttttgggtataggtgtactggcgctgataaccatgcttgctttaatgcgctatttacctttattacctagtgaacattccggctcgttaaaaagtgttccaatattgctaaaacgagcaccattagtgggtattttcttactaacggtgatcgcagtaaccgctcattttactgcttatagttatattgagccttttgttattgatattgcaaaattagatgaaaattttgccactattgtattactgatttttggcggtgcaggaattttggggagtgtgttatttagtcgctatagtaccaaaatgccaacctcattcttattctttgcacttattctcttaaccgtatgcttaagtacgctgatgatgagtagccaacatacactcacatttattgccttaatcatcttttgggggataggctttatgtgtattgcgttaggattgcaagttaaagtgattgacttagcacctgatgcaacagatatcgccatgtcgatctactcaggtatctttaatatcggtattggggcaggggctttgttaggtaatcaagtaatattgcacgcgggaatgccaaatatcggctatgcaggaacagccttaagtattattgcactagcgtggtgtggctttatttttacccgttatcgtgttgcgatgggaggcaaacctcgcgaaaaaaaccggctccattaa

SEQ ID NO: 295380 - DNA, 657 bp, Proteus mirabilis
atgagtgctaacgcacttggaatgatcatcttcgcctatttgtgcggctcaatctccagcgcgattttgatttgccgactggcaagactccctgatccaagaaaatttggctctggtaatcctggcgccaccaatgtgctacgtattggtggtaaacttgcagcggcatctgtgcttatctgtgacgtcctaaaagggatgatccccgtttggctcgcctattacctaaatgtgcctcccttttatctcggtattgtcgcaatagcggcttgtctaggccatatttaccctgtttttttccactttaaaggcggaaaaggggttgctactgcatttggctctatcgctgctattggttgggatcttagcggactgattgcgggaacatggctactaactgttttactcagtggctattcctcactgggtgctattatcagtgcattgcttgccccattttatgtctggtggtttaaacccgaattcacttatcccgttgcactattatcatgcttagtactttaccgtcatcatgacaatattcaacgtttatggcgaggacaagagagtcgcatttggcataagctgaaaaaaaagacagagaaaacagataaagagataatccaagaagccaaagagcaagaaaaagaagattaa

SEQ ID NO: 295381 - DNA, 351 bp, Proteus mirabilis
atggatatcgtatttattgaacaattatcagtaataaccacaatcggtgtttatgattgggaaaaaaccattaagcaaaagttagtgttcgatatcgaaatggagtgggataataaacgcgcatcccaaactgatgatgttgctcactgtttagattatgccagtgtcagtcacgccataatagagtatgtggaaaagcgacgttttgaattagtcgagcgtgttgctgaagaagtggcacagctactgataactcagttttctgtaccacgagtcaaaataaaattagctaaaccaggggcgatagcacaagccgccaacgtcggggtgattattgagcgttacgcttaa

SEQ ID NO: 295382 - DNA, 1224 bp, Proteus mirabilis
gtgaaaatctaccttgttggtggtgctgtgcgcgaccaactattaaatttaccggtaaaagacagagattgggtagtggttggcgcaacgccagagacactattacaacaaggctaccaacaagtgggtaaagattttccggtttttcttcaccctgatactcacgaggagtacgctttagcgcgtaccgaacgaaaatcaggctcaggttacacgggatttacctgctatgcagcccctgatgtgaccttagaagatgatttgcaacggcgtgatttaaccattaacgccattgcttactctgctaaaggtgaatatatcgatccctatcatggtattgatgatattcatgccaaattactgcgccatgtttctgatgcatttagtgaagatccattaagggtactacgtgtcgctcgttttgcggctcgttttgcccctttaggttttacaatagcgccggagacgatgtcattgatgcaagagatgacaaacagcggtgaattaaatgccctcacggctgaacgagtgtggaaagaaacggaaaaagcacttcacagccaagccccacaagtctattttgagatcttacatcaatgtggcgctctaaaaatacttttccctgaaattaatgcgctctttggcgttcctgcccctaaaaagtggcatcctgagattgatacgggtatccataccatgatggtattagctatggtcagccggttgactgacgatatcgcggtacgttttagcgcgctttgtcatgatcttggtaaaggtgttaccccggtagaaaattggcctcaccatcacggacatggccctacgggtgttcctttagttgaggctctgtgccaacgttatcgtattcctaaccagatacgtgatctcgccaaactggcagccaaatatcacgatcatctccaccgcatagaaagaatgcgcccctcaaaaataattcgacttttcgatgcgattgatgcttggcgcaaaccagaacgcatcgatcaactcgctataattagcgaggccgatgcaaggggacgccaaggatcagaaaatttgccttatccccaaggagtattttttcgtcaagcctttaagattgccaatcaagttgatgttaaatcaattgtcagtcgtggtttaaaaggcagtgccatacgagaagcattaactaaacaaagagaagtcgcgataatagaatggaaatcgcgactttaa

SEQ ID NO: 295383 - DNA, 759 bp, Proteus mirabilis
atgaataaaaggcagattacccctatattctatcagttaagactgttctcattctggtttactatttgcttacgcaaactttactctttagtatcagtaaaaatattctcttatatagataaaaaagttgaaaacataatgcgaaaattacctttactttttctttccttacttggcttaggcgtttctctgagctcacacgcagaaactcgttatgtttccgatgaattatccacctatgttcacagtggccctggtaatcaataccgtattgttggctcattaagttcaggggcaacagttacggtactttctcgtaatgccgctacaggttatgtgcaaatcaaagacgataaagatcggacagtttggttaccagaaaatcaattaagtacacaaccgagtatgcgcactcgcattccggctatggaaaaagagatccaaaccctacgcgataaattagcgaatatcgaccaaagctggaaccagcgcacaattgacatgcaaaataaagtgtcaaacagcgatgaaattatcaatggtttgaaaaaagaaaatgagcagatgagaacaaaattagcggttgctgagaaaaaactcgattttgctaatcaacaattagatgataggcagcgtgatatcatcctacagtggtttatgtatggtggtggtgttgccggtgctggtcttattttgggtttaatattgccacatattattcctcgtcgccgtaagcgtaatgaccgttggatgaattaa

SEQ ID NO: 295384 - DNA, 924 bp, Proteus mirabilis
atgagccaattagaaaccgaactcaaacttagtgcgatacctgccgctattcctcagattattcagcgcattctgactttgccataccagcatacatcaccgcataaattgactaatctttactttgaaacctccgataatcagatgcgtaattggggcatggggctacgtatccgtggcattgactctcattatgaaatgacaattaaaacagcgggtaaagtggttgcggggttacatcaacgcccagaatataatgtgacattaaatgagccaaccctagatttaacccgttttcccgcagaaatttggccggataagaccgatttaacggcattacaagcacaattaaaggttctttttcataccgattttcatcgtgaaatttggctggtggattatttagagagtcaaattgaagtggtgctagataaaggcactattcgtacagcgcaatatgaattacctattgaagagtttgaactggagctaaaaaaaggccaagtggcggatgtgattgctttggcgacttttttaggtgaacaagggggattacgacttgcttcacgcagtaaagctgcccgtggttattatcttgctaaagataagcccgcattatcgttaagtgtggtcaatcttgcacctaatgacacaatagcggaacaactgactaagtggttagcggctattcaagcgttagaagaagctatttttgctaatccgacgccaccaacactcactatgcccgctatgttagcactgttttctgattggtgtaaaaagcagcctcagttacctgaatcaatgcagcaagcactcgataatctttcgttgttatcctttacccgcgcaacggattattatcatgtgttatggctgaattttaaattatctgcaatggcgtggttgctggctatcgcttaa

SEQ ID NO: 295385 - DNA, 2835 bp, Proteus mirabilis
atgtctgctaacagtgtgtttcaacaattatgggataaagcacaatgcacgttttctacaaagctcaacgagcttgccccttttagtgagcgagagcagcaattttttgcctttagcccctttgcaaccgagcatttacgtgtcaatcctcactggttaacggaaatcagacaaacaccacctgttagtgatgagtggcaaaattactcatctcaattaaagcaacaactcactcatgttgataatgaagatgacttgatggccattttacgacagttccgtcatcaacaattagtgcgtattgcctggtcacaatttttccaactctgtgatacaccctgtacactcaagcaattgagtgtactcgcggaaaccttgattagtgtcgccaaagataagctatatcagcaatgttgccaacagtggggaacgccttgtgatagagagggaaaacctcagccattacttattttgggaatgggcaagttaggtggacttgaactgaatttctcttctgatatcgatcttatttttgcctatcctgaaaatggtgtgactcaaggtgggcgacgtgaattagataatgctcagttttttacccgattagggcaaaaactgattaaagtgttagatcaacatacaatggatggttttgtttatcgtgtagatatgcgtttacgtccttttggcgaaagtggccctttagtgatgagctttgccgcgcttgaagattattatcaagagcaaggacgtgattgggagcgctatgcaatggtaaaagcgcgtgttttgggggcagaaaaaaaagagtattgccaaatcttacgccaaatgttgcgccctttcgtttatcgtcgctatatcgattttagtgtgatccaatctcttcgtaatatgaaatcgatgataagtcgtgaagtacgtcgtcgagggatgattgataatataaagcttggggcgggggggatacgtgaaattgaatttattactcaggtttttcaattaattcgtggcggtagagagcctgagctacaaagtcattcactattaacagtgcttaatgtcattactaaattggaattactctctgcacaagaaacatcacagttagcagatagctatcttttcttacgtcgattagaaaatcttcttcaatctattgcggatcaacaaacacaaacgttacctgacaatcttgaagataaggcacgactggcgtttgcgatgggatttgacgattggcaaatgctctatcaacaaattaaccaaaaaatgcaggctgtttccgttatttttacgcaattgattggcgaagatgatgaaaatgaagatgaagaagatgtcagcgaatttaagcgattatggttattagggcgtttacctgatagcgcaacgctttttcatcaagggctaacggcagaagataggcaagctatttgtcaaacactgcaactgtttcgccaagatatcagtaaacgtactatagggcctagagggcgtgacgtgcttgatgcgctaatgcctaaattattggctaaagtgtgtcttcaaccacaagcgttggtgatcttacagcgtatcaccccgttgttattgggcattgtaagtcgaaccacttatctagagttaatgcaagagtctgatgaggtattaacccacgtagtgcgcttatgtgctgcatcaccgatgattgctgaacaattaacacgacatccattattattggatgaattactcgatcctcattccctctatgaaccattaccattaaatgcctatcaggacgaattacgtcaatatttattgcgtgtgccagaagaagatgaagagcaacgtttagaagcattacgccaatttaaacaagcccagctattgcgtattgccgcagaggatattgcaggagtattaccggtgatgaaagtcagcgatcacctaacctatttagcggaagccattatccatgccgttgttcaccaagcatggtcctatatggtgaaacgctatggggaacctgcgcatttagcgcaacgagacggtttaggttttgcggtcgttgggtatggcaaattagggggctgggaattagggtatagttctgatttagatttggtttttttattagattgcccaatgaatattctgacaacgggggcaaaacagattgatgctcgccaattctatttacgtttagcgcagcgtattattcatctatttagcaccagaacctcttccggcgtgttatatgaagtagatgcacgcttacgtccttccggtgaatcaagtatgttggtaagtactattcaagcctttgatgagtatcagaaaaatgaagcttggacttgggagcatcaagcattaattcgtgcaagaatgatttatggcgatgaccaattacagcagatgtttgcacgtactcgccatgaaacattatgtttagcacgtaacgcaactgtactgcagcaggaagtgcgtgagatgcgccaaaaaatggtacagcatttggcacccactcaaagcaatacatttgatttaaaagcctcatcaggggggatcactgatattgagtttatcgcacaatatttggtattgcgcttttcacatcaatatccggctttgacccgttggtctgataatgtgcgaattttggaattaatggcaaaataccaagtgatgagtgaacaagaggctcagttattaactcaagcttatgtcaccttacgtaatgagcttcatcatcttgcattacaaacattacctgcggttgttgatgaacattgttttatcacagaacggcaatgggtattgagtagtaaacaaaaatggttagatgaataa

SEQ ID NO: 295386 - DNA, 1425 bp, Proteus mirabilis
atgaaagtaacgctgccggattttaataaagccaatgtgctggttgtcggtgacgtcatgttagaccgttattggtatggtcctacaagtcggatctcaccagaagcacctgtgcctgtggtaaaagtagataccatagaagagcgtccgggtggtgcagctaacgttgcaatgaatattgcttctttaggggctaattctcgtttggtggggttaaccggcatcgatgaagcggcaaaagcattaagcaatacattaagtcaggttaatgtgcgttgtgatttcgtctctattgcgacacatccaactattactaaattacgtgtcctatcacgtaaccaacaacttatccgccttgattttgaagagggatttagcaatgtctctccagagccaatttatgagcgtattcaacaagcattaccctcaatgggtgccttaattttatcggattatgctaaaggtgcactttctcacgtacagcaaatgatccaattagctaaaaaagcaggtgtgccggtactaatcgatcctaaaggcagtgattttgaacgctaccgtggtgctacactattaacaccgaatatgtcagagtttgagcaagtggtgggcgtttgtcatacagatgatgagctagtagaaaagggcactcaactagtaaaagatttagcacttgatgcactattgatcactcgttcagagcggggcatgagtttattacaagccaatgaagcgccattgcatttacccactcaagcacaagaagtttatgatgtgacaggggcgggagatacggttatcggtgtgcttgccactgcgttagctgcaggcaaaccattagcggaagcgtgctttcttgccaacgctgcggctggtgtggttgtggggaaactgggaacgtcaacggtttctcctattgagcttgaaaatgctattcgcgggcgtgctgataacggctttggtattatggaagagtcacaactcaaacaagcggttgctttagcgcgtcaacgtggtgagcgcatagtgatgacaaatggttgttttgatattcttcatgctgggcatgttagttatttagctaatgcacgtaaattgggtgatcgcctgattgttgcggtaaatagtgatgcatcaactaaacgattaaaaggtgaaagtcgcccagtcaacccattagagcaacgaatgaccgtattaggcgcgttaggggcagttgattgggttgtcgcgtttgaagaagataccccacagcgtttaattgcatcagtattgcctgatattttagtaaaaggtggcgattataaacccgaagacattgctggcagtaaagaggtgtgggctgcgggtggtgaagtgaaagtacttaattttgaagatggtatttccacaactaatattattaatgccattaaaaagaaataa

SEQ ID NO: 295387 - DNA, 309 bp, Proteus mirabilis
atgctggacccaaaaaaaattgaacaagtcgctcgccaaatccaaaatgtactaccacaaggtatcaaagatttaggtgatgatattgataagaaaatccgtgcaatacttcaatctcaattaaacaaattagatttggttaatcgcgaagaatttgatgtgcaaacacaagtgctgttacgtactcgcgaaaaattggctcgtttagagcaacgtttaaatgagttggaagcaggacaacaaactgaagtagcccaagttgaaataactgaaactattgtagaagcaaaaactgacgataaagcataa

SEQ ID NO: 295388 - DNA, 654 bp, Proteus mirabilis
atgaatcagacgctactttccgaatttggctctccattagagcgtgttgagcgtgcgcttgaagcccttcgtgccggtaaaggtgtgatggtgcttgatgatgagaaccgtgaaaatgaaggcgatatggtatttgtcgcagaaaccatgaccacagaacaaatggcgatgtctattcgtcatggcagtggtattgtgtgtgtctgtattaccgaagagcgccgtcaacaactcgatttacctatgatggtagaaaataacaccagtcattttcataccgcatttacggtaactattgaagcggcccaaggggtgactacgggagtttcagcagcagaccgtttaacgacagtacgtgcagctgctgctgataatgcaaaaccaagtgatttaaatcggccaggtcacgtattcccattacgagcacaacctggtggtgtattaacacgtggtggacatactgaagcttctattgatttagcaacgttagcgggttttaaacctgttgccgtgttatgtgaattaaccaatgacgatggcaccatggccagagcgccagaagttgtcacttttgctaaacagcatgatatgccagtgttaacgattgaagatttagtggcttatcgtcttcgcgaggagaagaaagcgggctga

SEQ ID NO: 295389 - DNA, 786 bp, Proteus mirabilis
atggacagaaaattgatgccagcgctatttattggacatggcagtccaatgaatgtattggaagataataaatatactcgcctctggacgacgttaggagagacactgcctaagcctaaagcaatattagtcatctcagcgcattggtatacgcaagggacttatattacagcgatgactcatcctaaaacaattcatgatttttatggatttccaccagagttataccaaatagaatatcctgcaaaaggctccattggtctcgttgcattaattgaagatctgattgatccgatgaaattaaaactggatatggagcaatggggattcgatcacggtagttggggaatattagagaagatgtaccctaatgctaatattcctgttgttcagttaagtattgatgctaaccaatcgccacagtggcactatcagtttggaaaaaaactggttgaactacgtagagaaggtgtattagtgattggcagtggaaatatcgttcataatttaagaatgatggattggcaaaatgaccaagcagagccttactcttgggcattatcttttagtgaaacagtagagcgctgtttacaaagtgataaagtgcctgaagcgctttttaccattttatcaacgcaagaagggcaactcgcacacccaacagcagaacattttttacctgcattatatctactcggtttaaaacagccggatgaaaaagtaactttattaaataatgatattattaataaatcacttagcatgatgacctttcaaattgggtaa

SEQ ID NO: 295390 - DNA, 1164 bp, Proteus mirabilis
atgaaacgcgaacaaattattgaacgtcctgattggcgcgaaaaagcgactgaatatggttttaacttccataccatgtatggcgagccttactggtgtgaagatgcttattatcaattttcaatggaagaagtggaaacattagaagaaaccacggaagagcttcatcagatgtgcttacaagtcgctgataaagtggctaatagtgaagagctattgactcgttttcaaattcctcgccattgctgggattttgtccgtgagtcatggaaaacctcgcaaccatcgctttattcacgtcttgatttagcttatgacggtaaggggccggcaaaattactcgaaaataatgccgacacaccaacttcattgtatgagtctgcttttttccagtggatctggcttgaagatcaaatcaatgcgggtcgtttgccacaaaatgccgatcaatttaatagtatccaagaaaaattgatcgacagattcgctcaattgcgtgatcaatatggtatgcgttatctgcacatgtcatgttgccaagatacgcaagaagatcgcggtaccgtacaatatttacaagattgtgcagaagaagcagaagtcactaccgattttgtttttattgaagatattggtttaggtgaacggggtgagctgaccgatctacaagaccagatcatcagcaatatgtttaaactctatccttgggagtttatgttccgtgaagatttctcgaccaaacttgctgatgcagggatccgttggttagagccagcttggaaaagtattatttccaacaaagcgttactgccaatgctgtgggaaatgttccctaatcatcctaatttattaccggcttatttttatgacggtaaagcgccagattcattatcacgctatgtcatcaaaccgctcttttcacgagaaggggcgaatattcgtatcgttgaaaatggtaaagatatcgctgttgctgatggcccttacggtgaagaaggctttattgttcaggacttccatccactgccaaaatttggtgatagctatacattaattggtagctggctagttaacgaccaatctgcaggtatttgtattagagaagataaagagcttatcacgcaagatctgtctcgtttctatccacatattattttagattaa

SEQ ID NO: 295391 - DNA, 729 bp, Proteus mirabilis
atgacaatgaaacgtaccaaatcgattaatcgcgatgcttttcgtaaagcatttcgcccttatcgtctggcgcctgttgccatcgccatcaccgcggtattcgccctttcagggtgtgaagagagtgatgagacggtttcactgtatatgaatgcacaagaatgtgcgcaagcgaatccatcacaagcagcacaatgtgaagattcttaccgcacggcattacaagaagcgcaacgtactgcacctaaatacgcaacaatggaagattgtgttgctgaatttggtgatgcgcaatgtacacaaactgcctcaattgatggtaaccccgttaacaccgaaaacgccaataacctcaaccctgatagttcacaaatggcacaagctaactctggtggtagcttctttatgccactgatggcaggttatatgatggggcgtttaatggggggtggcgcaccagcacagcctttatttagctcacgtaatccaagcagcccagctaatggtaagtttgttgatgcaacgggtcgtaactatggtccagctgtcggtggtcgtcaaatgaacgtccctaaaacagccatgacaccaaaaccatctacaacatcaaccattacgcgtggtggctttggtaataccgtttcacgacaagcggcagctcaacgtgcaagcgcgacaaataacaaccgtagctcaacaggctcctcttcatatcgtgcaggtggttaa

SEQ ID NO: 295392 - DNA, 1398 bp, Proteus mirabilis
atgaaaaaactgctctctcttttagtcacgatgagtttggcaggattcagcactgcaagtcaggctgaggatctgctacaagtttatcaaaaagcaaaggacagtaacccagaattacgtaagtcattagctgaacgcaatcaagcttttgagaaaatcaatgaggcacgtagcccattattaccacaattaggattaggcgcttctattgattataaaagtggctatcgtgatgctaaaaataccgagtctaactctcttggtgcgaatttaacgctgacccagactatttttgatatgtctttatggcgtcaattgaccatgcaagaaaaaacggcgggtatgagtgatgttacctatcaaacaagccaacaacagcttattttagataccgcaacagcttattttaatgttctgcgtgccattgactccttatcatttattgaagcacaaaaagagcaggtttatcgccaattagatcaaactacacagcgttttaatgtagggcttgttgcgattactgacgtacaaaatgcgcgtgcaaactacgacagcgtgttggcacaagaagtggctggacgtaatgaactggataacgcattagaaaaactgcgccaagtcagcggtgtgtattatattaatctggcttcacttaatatcgcacgtttttccaccactccaccagacgccattgataaactgttaaaagacgcagaagagcgtaacttaagtctactcagtgctcgtttaggtcaagatttagcacgtgaaaatattcgtttagcgcaatcaggccatttgccaaccgtaaatttaaatgcttcaacgggtgtctcaaacagtcataatcatggtagtgctttaccaccagaaacacctgctaacagccgtaatagctataatggtcaaagcagcatcggactctctttaagcattccattatatacaggtggtagaacgagctcacaagtagaacaagctcaatatggctttaccagtgccagtgagcagttagagtcggtataccgctctatcgtacaaattgcacgttcttcttataacaatatttcagcttccatcagtagcattaaggcctatcaacaagtggttgtatccgcgcaaagctctttagatgcaactgaagctggctaccaagtgggtactcgtactattgttgatgtcttaaatgcgaccacaacgctttatgatgctaaacaaaaattatcaagtgcacgttacgactatttgattaaccaattaaatattcaatatgcacgtggtaccttaaacgaaaatgacttaattcagttaaataatgcgttgggtgaagagatttccacttcccctgacaacattattcgtccattaacaagtcccgtactgaatacgacaaattaa

SEQ ID NO: 295393 - DNA, 630 bp, Proteus mirabilis
atgaacaaaaaggaaaatacaccatttttatatacacgtaatgatgttgagctgataagtaaaaaaacacgctataaaggctttttccgtatgaacgagtatcgtttcaaacaccgtttatttaagggaggatggagtgccgaagttaagcgagaagtgttcgaacgtggtcatgcgggtgttttattggcttatgatcctaaacgagacgaagttgtattaatcgaacaaattcgtattccagcttatgaaacaagtcaaacaccttggttattagaagtgattgccggcatggtggaagaaggagaaagccctgaagaggtggtaagacgggaagccacagaagaagcggggatcacaataggtcgttgtaagcccattgtaagttacctttcaagccccggaggaaccagtgagcggatgtatgtctatgtaggggaagtggatgccacaacagcaacaggcatacatgggctagcttgtgaaaatgaagatattcgtgttcatgtcgtcagccgagagcaggcttatcaatgggttgaagaagggataattgataatgctgcttctgtcatcgcacttcagtggttacaacttcatcatgtcaccttaagaaaagattggttgtga

SEQ ID NO: 295394 - DNA, 840 bp, Proteus mirabilis
ttggaaagccagcttgaattgtcggtggatcaacaacacaccgttagaatattacaaatcacagatacccacctttttgctaatgtggatgataccttgttgggaattaatacctatcgtagctatcatgcggtattggacgcgattaaacagcaagggttatcgattgatttgattgttgctactggggatttagttcaagatcaatcctttgcagcttatcagcattttgctgatgggattgcaagattaccttcaccttgtgtgtggttacccggtaatcatgattatcaaccagcaatgattgatgctttaaatcaggcaggcattctgtcggcaaaacaagtgttaattggtgaacattggcaattgttattattagatagccaaattcaaggtgttccccatggcgagttatctgactgtcagttagattggctaacacgctgtctagaaagccacaaagaaagagatactgtgatcttattgcatcatcatccgatgccttctggctgtacttggttagatcaacatagtttaagaaactctcaccagttagctgagcgtgttaaagatcaccctcaaataaaaatgatgttatgtggtcatattcatcaagaaatggatgaaatgtggaatggtattcgcttattagcaacaccctctacctgtattcagtttcgcccgcattgtactaatttttctttagataccgtttcgccaggttggcgctatttggagttatcattatctgcacagggtaagaggaatattgatactcaagtacatcgtctagcgggtaaagatttttgtccagatcttgacgcggatggctattaa

SEQ ID NO: 295395 - DNA, 591 bp, Proteus mirabilis
atgtctcgtatcctctatttacatggttttaatagctcgcctcaatcagccaaggcgcaagggtttaaacaatggttatcagtcactcatcctgatattgagctacttgtaccccaattacccccttatcctcagcaagccgctcaattaattgaaaaattagtaaaagataatgccaatgataagttaggattaattggctcgtcgctggggggctatcttgctatttggttatcacaacgttttcatttacctgcagtggtggtgaatcccgcggttcgcccgtttgatttactacaggattttttaggcgataatgaaaatccttatactcatcaaaagtatagattagcacctcaccatatggatgagttacttgccttacgtattcctacgataacttcccccgatcttatttggttgcttcaacaaactggagatgaaatacttgattatcgtcaagcggtttcatatcttggcgcttgtaagcaaacagtagagcagggaggaaaccatgcttttgttaattttgaacgttttttcccggaaattgttcagtttttgaaaataacatcgttttcgactcattaa

SEQ ID NO: 295396 - DNA, 1896 bp, Proteus mirabilis
atgactcaatcaagttataatgcaaaggatattgaggttcttaatggtctagagcctgtacgtcggcgtcctggtatgtataccgataccactagaccgaaccatttggcacaggaagtgatagataatagcgtggacgaggcgcttgcggggcatgcaaccaaggtcgaagttatcttatatgcagaccaatctattgaggttatcgacaatgggcgaggaatgccggttgatatccatccagaactgaaagtctctgctattgagctgatccttgcccatcttcatgccggaggaaaattctccaataaaaactaccaatactctggtggcttgcatggtgtcgggatctcagtggttaatgcgttatcaaagcgtattgaagtcaccgtgcgccgagaaggcaaaatatatcaaattgcttttgagaacggtgataaagttgaagagctacatcaaataggtacgtgtgctaaacgagatacaggaaccagtgttcatttctggccggatagcacttactttgatattcctcgtttctcatcaaaaagcttatctcatgtattaaaagccaaagcggtgttgtgcccaggcgtcaatgtctcttttaccgataaagtcaataatacccaagaaacgtggtgttacgctgatggtttaacagactatttaagtgaagctgtcgctgaatttgttcgcttgcctgaagagccatttacagggaaatttgaaggtgataacgaagccgttgaatggtcaatgctttggttgccagaaggaggcgatttactcacagaaagttatgtgaacctcattccaaccgtacaaggtggtacacacgttaatggtttgcgccaaggtgtattagatgccatgcgcgagttttgtgaattccataatttattgccaagaggcattaaattaaccgcagatgatacatgggagcgttgtgcttatgtgttatcagtaaaaatgcaagatcctcaatttgcaggacaaaccaaagagcgtctatcgtcacgtcaaaccagtgcctttgttgctagtgcagtaaaaaatgcatttagtttatggttaaaccaaaacgttcaagtcggtgaattactcgctgaaatggctattagtagtgcgcaacgacgtatgcgtgcggctaaaaaagtggtgagaaaaaaactgacttcggggcctgcattgccgggtaaattagcagattgtacttcgcaagatttacgttataccgaactcttcttagttgaaggggactctgcggggggctctgctaaacaagctcgcgatcgtgaatatcaagcgattatgcctctacgtggtaaaattcttaatacttgggaagtctcttctgatgaagtattagcgtcacaagaagtgcatgatatttctgtggcgatcgggatggatcctgatagtgatgatttaagccaattacgttacggaaaaatttgtatccttgcggatgcggactccgatggtttacatatcgccactttgctttgtgctttatttgttcgtcatttcccggcattagtaaagcaaggtcatgtctatatggctatgccacctctttatcgtatcgatttaggtaaagaagtgagttatgcccttgatgaagcagaaaagaacgctattttgcaacgccttagccgtaaaaaaggtaagccaaatgtgcaacgctttaaaggcttaggtgagatgaatccactgcaattacgtgagacaacgcttgatcctaatacacgtcgtttagtgcaattggtgattgatgatgaaaattatcaagaaacgttgggcatgatggatatgttacttgccaaaaaacgttctgaagatcgccgtaactggttgcaagaaaaaggcgacgaagttgacatcgaagtgtaa

SEQ ID NO: 295397 - DNA, 2847 bp, Proteus mirabilis
atgagtgaactgactcatgatggtgtagagcgccaaccgctccacttatttacggaaaatgcctatctcaattattcaatgtacgtgattatggatcgtgcattgccttttattggcgatgggttaaagccagtacagcgtcgtatcgtctatgcgatgtctgaattaggtttaaacagcagtgctaaatttaaaaaatcagcacgaacagtgggggatgtattaggtaaatatcatccccacggtgatagcgcctgttatgaagccatggtattgatggcgcaacccttctcttatcgttatccattaattgatgggcaaggtaactggggggctccggatgatccaaaatctttcgcagctatgcgttataccgagtctcgcttatctaaatattcacagatcctgctaagcgaattgggacatggtactgttgattggatccccaattttgatggcaccctgcaagagccaaaaatgttgcctgctcgtttacctaatattttattaaatgggacaacggggattgctgtcggtatggcaacggatattccgccacataatgcgcgggaaatcggccaagcattaaccatgctattagataatcctgatgctgggttatctgatgttatgcaatatgtacaaggacctgattatccaacagaagcggaagtgatcaccgctcctgaggatatcaaaaagatttataaaacaggacgtggttctattagaatgcgtgctgtttggcaaaaagaagagggttgtgcggtgataacagctctccctcatcaagtctctggtgctaaggtacttgaacaaattgctgcattaatgcgagcgaaaaaattgcctttagttgatgatttacgtgatgagtcagatcatgaaaatcctactcgattggtgattgttcctcgtagtaatcgcgtcgatttagaacaagtcatgtattacttatttgtaaatacagacttagagaaaagttatcgcgttaacctcaatatgattgggttagataaccgtcctgctgtgaaagggctattaaccattttaaatgagtggttagtttatcgccgtcaaaccgtaaccaatcgtttaaaccatcgcttagaaaaagtattacgccgtttagaaattctaaaaggtttattaatcgcttatctcaatattgatgaagtgattgagatcatccgttatgaagatgagccaaaagccgaattaatgcgtcgttttgcattatcagatattcaagcagaagcgattttagagttacgtttacgtcacttagctaagcttgaagagataaaactgcaagctgaaagtgatgaactggaaaaagagcgcgacagtattgaaaaactgttaaattctcctcgccgtctcaatacgttattgaaaaaagagatagaggcagacgctaaagagtttggtgatgaacgacgttctcctattcgacctcaagaagaggcgaaagtggttaatgaacaagatatgttgccatcagagcctgtgactattgtgctttctgaaatgggatgggtgcgtagtgcgaaaggccacgaaattgatcctagtaccatgagttatcgtgccggagacagttatcatagtgcggtacggggtatgagcaaccagccagtattgttccttgattcaacgggtagaagctatagtttaagtcccaatgacatgccatcaggccgtagccaaggtgagcctttaaccggtaaattgaccttcccccctgacgccagcgtaaaatatatgttagcgggagccgctaaacaggagtatttactggcaacaaaagagggttatggctccgtactcagttatgaagagatggagacaaaaaataaaaccggtaaagggttgttaacggtttcagatgaaacagaattgctagcgcctttcttagtcgatgcagaaaagaaaaacaatcaacattggttagttattatcaccgataaaacacgtattctggcgatatctgcagaacatctaaatgagatgaataagaaaggtcgaggcactcgcttagttgcattaggcaaagagcaaagtgatgttatcgaacaaatcgtgttaatagcaaaaaatgaagccctcacatttactgttgatggtcaacaacaaacattaaaagcagaagagattagctattttagtggtgatgttggcgatgagcctatcccattaaaacatcttcaccctgaagcggttaccgtgatcatgtccgaaaaagggcttatccgttgccaaaaaggccataacattgatgcgaaatcagtgggctttaaaacaggggatgattattttgatgcagttgaagggatgagcaatcaagcggtacatctgattgataccacgggtcaaagttatactgttgatgttgatgcattaccatcaggccgtagtaaaggtgatgatttaactggacgattaaaagtccaaaaaggggctcaattacgtcatgtagtgatgggggaaagtagcgataagatcttaatggcatccgacgctggttatgggtttatctgtagtattgatgacttaacctctaaaaatagagctggtaaatcattattaacattacctgaaaatgcattaccattaccacctcaacgcttaaatgatgaattgagtgatttgatcatgatcattactcagggtgggcgaatgctgatttttgaagcctctgagttgccaactatggtaaaaggaaaaggtaaccaaatggtttctattcctgcttcacaggctgttaaagccaaacgtggtcgtcgtggaacctcgctccctcgtggtgcacaaagtatcgatcatatagatatcgaaactgattaa

SEQ ID NO: 295398 - DNA, 750 bp, Proteus mirabilis
atgctagccattattcgaggcattattgtcattctgtacaccattattgtggtgacttttgggatgatctattgcatgttttctcccagaaatccgaaacacgtaatgacttatggacgtttattcggcaaattatcacatatctttgggatcaaattagttgagcgttttcctaaagaagctaaaagttatggacccagtatctatattggtaaccatcaaaataactttgatatggtgacaatgtcgaatgcggtacaacctaataccgtgacggtgggcaaaaaaagcttggtgtttattcctttctttggacagctttattggatcactggcaatattttgattgatagaggtaatcgctctaaagcccatagcaccatcactcaggttgcagagcaaatcaaagcgaaaaaaatctctgtatggatgtttcctgaaggaactcgtagccgaggacgtggtttattaccttttaaaacaggggcttttcacgcggcgatgcaagcgggggtgcctattgtgcctgtttgtgtctctaccacacaaggtaagataaaattaaatcgctggaataatggctacgtgattgttgaaatgttgcctcccattgatgtatcaaaatataacaaagatcaggtgagagaattagctgaagattgtcgtcagatcatgaaggctaaaattgaagagcttgataaagaagtggaagaaatgaataaacgcgattttgcaggtaagttaaattaa

SEQ ID NO: 295399 - DNA, 1074 bp, Proteus mirabilis
atgaaaaatcaaaaaacgaatcgtttttttgtttacggcattattattgttgcaattattgcagcaggtattttttggtggaaaacacaagcaccagcactccctgatgggtttgctcaaagtaatgggagaattgaagctactgaaattgatatttcaaccaaaacaccaggaagaattgacactattttagttaaagagggggattttgttaaagcgggtgaagtgttggcaacaatggatactcgtaccttaaaagagcaacttcatgaagttcaagcccaactagagcaagccaaaagtagcgttatgacggcagagtcggcactttctcaacgtcaaagtgagcaagttgcagcgcaggcggttgttcgtcagcgtattgcagagcttgacgcatcagtaaaacgccttaatcgctctcgggcattagttaaaacaaaagcaatttccattcaacaactggatgatgatatagcaagaaccgaaggggctcgtgctgctgttgaagctgcaaaagcacaagtgactgcaactattgcggcaattgattcggcaaagtctggaattattcaagcaaaaaccaaagttgatgcagcaacagctaccgaacgacgtattatggctgagttggatgatagtatcttaaaagctcctcgtaatggccgtgtacaatatcgtgttgcggaacccggtgaagtgctaggcgctggcggtcgagtgttaaatatggtcgatcttagtgatgtgtatatgacattctttttgccaactgaagccgctggcaaaacagccttaggcagtgatgtccatattattttggacgcagccccacatattgtgatccctgcgaaaacgacttatgttgccagtgttgcacagtttacccctaaaacggttgaaactgacaatgaacgtttgaaactgatgtttcgtgtaagagcgaggatctcccctgaattactagagaaacaccttgaatatgtcaaaacaggtttaccgggacgtgcctatattcgcttagataatagccaaccttggccgactgatttagaggtgaaattaccacaatga

SEQ ID NO: 295400 - DNA, 2757 bp, Proteus mirabilis
atgagaacgcaaagtcattctcatatcattgaattgactcatgtatcccaacattatggtgataccaaagcacttgatgatgtgacattgactattcctgccggaaaaatggtcggcttaataggcccggatggtgtcggaaaatcgagtttaatttctcttatttcaggagccagagaaattcagcaagggcaagtgatagtacttaatggtgatatgaatgatgttaatcaccggcgagctgtttgccccaaaattgcctatatgccacaagggttaggtaaaaatctttatcacacactttctgtttttgaaaacgtcgatttctttggtcgcttatttggtcaatccaaacaagagcgagaagagcgcatcaatgatttacttgaaagtacggggttagcgccttttaaggatagacctgcgggtaaactatctggtggtatgaagcaaaaactggggctttgctgtgcattaattcatgatccacaattgctgatcctcgatgaacccaccacaggggttgacccattatcacgggcgcaattttgggagttaattaatcgtatccgtaaacgtcaaaccaatatgagcgtattggttgcgacggcttatatggaagaggctgagcgttttgattggctggttgcaatggatgcaggtaaggttttagccacaggtcatgcggaagaattaaaggcgcaaacggcgacagatgaattagaagctgcttttattgagcttttaccggaagaaaaacgcaaaaaccatcaaaaagtgattattcctccacgggataaaagtgatgacgatattatcgccattgaggccaaagaattaacaatgcgctttggtcagtttgttgctgttgatcatgtcagttttcgtattcctaaaggcgaaatttttggttttctaggctcgaatggttgtggtaaatccaccaccatgaaaatgcttacaggtttacttgaggcaagtgaagggcgcgcttggttatttgggcaagaggttgatccaaaagatatcgaaacccgtaaacgcgttggttatatgtcgcaagcattctcactgtatagcgaattaacggttcgacaaaatttagagctacatgccaaactctttcatatcccagaacaggatattcctcaacgtatcaaagaaatgagtgagcgttttaatttgaccgatgtggaagatatgatgcctgacggtttacctttaggtattcgacaacgcttatcgttagcggtggcagtgatccacaaaccagaaatgctgatccttgatgaacccacctctggggttgaccctatcgctcgagatatgttctggaagctgatggttgatctctcaagacgtgacggtgtcactatttttatctctacccactttatgaatgaagcggcgcgctgtgacagaatgtctctgatgcatgccggaaaagtgctagtgacagatactccggctaatttagtgaaaaatagtcaatttgatacactagaagaagtatttattgattatttgaaaaaagcatccggtgaaacagaaacgcccgatattgaagataaacagctacaattgcctgcctctagtgaagaaagtgcggaaaaagcgttaaaacaacgatttagtttacgccgtttatttagttatagcattcgtgaagggatggaattacgccgtgacccagtacgccttaccttagcattactaggcacggtaatattgatgtttattatgggttacggcatcagtatggatgttgaaaacctacgctttgccattatggatagagatcaaacagggctaagtcaggcttatagtcaaaatctatcaggctctcgctattttattgaaaaagcgccgattaccgattataaccaacttgagcgtcgtctccgcagtggtgatattactgttgcgattgaaattccgcctaattttgctcgagatgttgctaaaggacataaagtaaaaataggggtttggattgatggcgcgatgccaaatcgtgcagaaactgtccgtgggtatattcaggcaatgcatctaacttggatgttagatatggccatgcgtcaacctaccaatatggttgatcaattttcccccattgatatcgaaacccgttatcgttataaccctgatgtaaaaagtttacccgccatagtacctgcggttattccgttgttgttgatgatgatccccgcgatgttaagcgccttgagtgtggtacgtgaaaaagagctaggctctattattaatttatacgttactccggtcactaaagccgagtttttattaggcaaacagatcccctatattttattgggaatgtttaacttttttatgctctgtgcgctttcggtatttgtttttggtgtcagttttaaaggaagcatgttaacactctcattaggggcgttgctttatatcactattgctacgggaatgggattactgatttcttgttttatgaaaagtcagattgcggctatttttggtacttcaattattaccttaattcctgctacgcaattctccggcatgattgacccagtatcatcattagaaggtattggtaaatggatagggcatatttatccgacttctcactttcttactatcactcgaggaacgttttcaaaaggacttaacttatttgatttgccttggtcttttattccgttacttatcacgatccccattgtgattgggctgagtgtctttttcttgaaaaagcaggaggcttaa

SEQ ID NO: 295401 - DNA, 1128 bp, Proteus mirabilis
atgtggcatacagtacaaaatatttttaatttaggaataaaagagttacgaagtttatcccgtgataaggcgatgctggcattaattgtgtttgcctttaccgtatcaatatactcatcggctactgtaacaccgggctcattacaccatgcgccgatagcggtggctgatcaggataaatctcaactttcggcccgtattgtcaatagcttttatatgccttactttttaccccctgcagatattacacccgagcagattgatggtttattagatagaggaacttatacttttgcgttagatattccgcctaattttcaacgcgatctactcgcaggacgtaagccagaaattcaagtcaatattgatgcaacacggatgagtcaagctttcttaggaaatagctatattcaaaatatcgttatgggagaagcgaaaacttttcttgctaaagagcgcactaacgatccactgcctgtggatttagaagttagaatgagctttaacccaaacttaacacaatcttggtttggctctgttatggcgataatcaataacattaccatgctatctattgtattaaccggggcggcactaatacgagagcgagagcatggcactattgagcatttattagttatgcctgtcacaccatttgagatcatgctgtctaaaatatggtcaatgggattggttgtattgttagcgtcggccatgtctttagtgctagtggttaaatcactgctacatgtgccgatcgaaggctctgttttgttatttatgtgtggggtggcgttaagtttatttgcaacgacatctattggtattttcttaggcacaatggcgcgctcaatgccacaatttggtttattgatgattatggtattgttgccattaaatatgttgtctggagggatgacctcaagagagagtatgcctcagtttgtacaagatgtgatgcaaactatgccaactacacattttgtcagccttgcacaagcgatattgtatagaggcgcagatttctcgattgtttggcctcaatttatcgttttaattattattggctcagtcttttttgcattggcactgttacgttttagaaaaacgatatctgcaatggcttag

SEQ ID NO: 295402 - DNA, 684 bp, Proteus mirabilis
gtgacgccatataacatattgattgttgaagatgaaaaagagatcttacgattcgttcgccttgcattagagaacgaaggttttcgtgtttatgacgcctcagaatgtcaacgaggattaatagaagcagcatcaagaaaacctgatttagtcattcttgatctgggattacctgataaagatgggctttgctttattcaagatttccgccaatggagtagcacgccgattattgtgttatccgccagagattctgaacaagataaagttgatgctttagacgctggagctgatgattatttaactaaacccttcggtatgagtgaattactagctcgggttcgtgcttcattacgtcgctttgtcaaacaagaaacagaaacgactcaatttacatttggtgatatcactattgattgggttaaaagaatagtcactcgccaaggcgtacccattcactttactccgaccgagtttcgtctactcagtgaacttgtcaacaatagtggaaaagtattaactcaacgtcatttaatgcagcatgtttgggggcctaactttgtagagcatagccattatttgcgaatttatatggggcatctacgtcagaaaatagaaaccgatcccacctgtccagtgcacttaattactgaaacggggatcggttatcgttttatgccttaa

SEQ ID NO: 295403 - DNA, 2703 bp, Proteus mirabilis
atggaacaagctccgcagtggcaacgcccttctcctgatgatttgctggcattaacgcgagcaccccatcgaggacgattaaagatcttttttggtgcctgtgccggcgtaggtaaaacctacgccatgttacaagaagctcaacgtttacatcagcaaggtattgatgtcttagctggggttgtagaaacccatcagcgccaagaaacggcacaacaacttgagggattaccgttattaccgccattaaaattacattatcgtggtagaaagctctctgcctttaatttagatgcggccttagcaagacatcctgcggtgatcttaatggatgaattggcttttagtaatccacataaatgtcgccatccaaaacgttggcaagatgttgaagagttacttgatgcgggcatcgatgttttaaccaccattaatgtacaacatattgaaagtcttaatgatattgttggtagtattactggcattcgcgttcaagagacgattcctgattatatctttgataatgccgatgaagtagttatggtcgacttaccaccagacgacctacaacagcgcttaaatgaaggcaaagtttatctggcaggacaagcagagcgtgcaatagagcatttttttcgtaaaggtaatttgattgcattacgagagcttgccctaagacgaatggcagatcgcgttgattcccaagtaaaagaattccgtgatagccaaggtggtacgcctgtttggcatactaccgatagtttaatggtttgtcttggtgctcatggaagaaatgataaattagtgcgtactgccgctcgttatgctgctgcttttggttgccaatggcatgctatttatgttgaaacaccaaagctacatcagataggtgagcataaacgccgtgctattttacattccctcaagttagcacaacacctaggggcaagaacggcgatcctttctgataaccaagcggaaaaagcggtgatccgctatgccagagagcataatttaggcaaggtgattatcggtcaacgcccctatcaaaagtggcaatggttaaaacgttgggtccgtatgcgtttcgcagaaaggttagcgcgttatgcacctgacttacatgttatcagtgtcgctttaaatgaagaagagccgcgttataaaacaaaaacatttgtgccacaaaatgataaatggcgtcaaaatcttaaaggctatctaacagctattggtttatgtctagctattacgcttttttcacgtacttttttgttagcgttagataaggcaaatttagttactctttatttattaggcgttgttcttatcgcgctattttttggtcgtcgcccttctatttttgctgctttaatcaatgtgataagttttgatttgttctttgtacaaccgcatttttcactggctgtattagatatgcagtatttagtgactttttccgtaatgctcattgttgggttagtggtgggtaatttaactgcgggaatgcgttatcaaacccgggttgctcgttatagagaacaacgcactcgtcatttatttgaaatgacccgagagctgagtcgggcactgactttagaagaagtggtacgtactagttatcattttttatcaagtgcttttgatgccaaagtttgtttattaatgcctaatcatcatggtgaattaacgccatacaatgctgaaggtatgggacaacttcccattgatagtggtattgcccgttggtgttgggataaagatcaaatcgcaggagcaggaacggataccctacctagtgtcccttatcagttgcaccctattagcgcatctcaacaagtattagcgattttagcgattgagccaaataatctacgccaagtacttattcctgaacaacagcaactcctacagacatttaatggcctaattgccaatgctcttgaacggttacagcaggcggaaatggccgaacaatctcgtattaatatagaacgagaacaattaagaaatgcgctcttagccgccctttctcatgatctaaaaacaccacttaccgtcctgtttggccagtctgaaattcttcttctagacttaagtgctgaaggctctgctcatactgaacaagtcagtcagatccgccaacaaattttgacgacctctcgcttagtcaacaatttactggatatggcacgtattcaatcagggggtatccaagtcaacctgcagtggaatttactgcaagaaattgctggaagtgcagtacgttcactctcttatttacttgataaacatccattacaaattgatattccagctgatttattactctattgcgatagtctgttaattgagcgcgtgttaactaatttgttagaaaatgcagtcaaatataccgcatcacaaactaaattaggcataaaagctacggttgaagaggatcaaattcatgttgaagtttgggatgaaggcgcaggtattcccactgaacaattgcagcttatttttaataaattttcacgtgcagtaaaagagtccgccattccgggggttgggctgggtcttgctatttgcagtgctattatccacttacatgaaggtaaaatttgggctgaaaataataaaaaaggtggagccagttttcactttgttttacctttaaaatcactaccgaatattgatgagattgaaataaaacagtga

SEQ ID NO: 295404 - DNA, 594 bp, Proteus mirabilis
atgcatctttttcgttcatctttagtgatgttagtattactgacacttatcactggattagcctatcctttatttataaccggattagctcaattgtttttcccttggcaagcaaatggttcactggtttatcaggacgataaactgattggctctgaattgattggacagtcatttaatcgagccgattactttcaaggtcgcccctcaatgacaagtgaaatgccttacaatagtatggcttccggcgctagccaacttgctacatcaaatccactcttaagcgagaaagtggctgcaggtgttcgtttatggcaaaaaagggttgataatcatcaagtcgttcctgttgatttagtgaccgcttccgccagtgggcttgatcctcatatttcattggctgccgcttattaccaagcaccgcatattgcgttattacgtcaattcacaataaatgaaataaaacaattaattacagaaaatacgacatcgccattaataccatttttaggtgaacctgtggtgaatgtctttaaactcaatcaggcacttgatagattgagtgcagaaaaaaacaataaagtgagcgggtaa

SEQ ID NO: 295405 - DNA, 2058 bp, Proteus mirabilis
atgaaaaaaacacctctttttaatagaaaaacaatgatgtcggctttcttggatgctatcaaaaaatgcacccctcaagcccaatggcataatccggtgatgtttattgtttatgttggtgcactactcactacgggtatttggtttgccgttttactggggtatctaccaccagataatcattttacttttcaagtcatgctttggttatggataaccctactatttgccaattttgctgaatctttagcagaaagtcgtagtaaagcacaggcggcaagcttacgaggtgcgaaacaacaatctaaagcggtgcgcttacagcatgctgatcttcacgctccccaagaaatcattgattcacttttattacataaaggcgatattgttttggtcaatgctggcgaggtaattccttgtgatggtgaagtgattgaaggcggcgcttctgttgatgaaagtgcgatcaccggtgaatcagctcccgttattcgtgagtcaggtggcgatttttcttctgttactggagggactcgtgtgttatctgactggttgattattcgttgtagtgctgaagcgggtaactctttcctcgatcgtatgattggtatggtggaaggtgctaaacgcagaaaaacgccgaatgaaattgcattaactattttattaacggccctaacgctgatctttttattcgcttgtaccacactctatccttttagtgtgtttgccgtgcaattccaagagcatggtgaggttatttctgttgtaacgttaatcgcattattagtttgtctgatccctacaaccatcggcggactactctcttctattggtgtggcaggtatgagccggatgttagacgctaatgtgattgcgactagtgggcgtgcagtagaagccgcaggagacgttgatgttttattactcgataaaacagggacaattactttaggtaatcgccaagcttctcgttttattcctctatcaggaataactgaaaaacaattggcagatgcggcgcaattaagctctttagcagatgaaacacctgagggtcgtagcatcgttatattagccaaacagcgctttaatttacgtgaacgagatttaacttcgatgggggcctcttttgttccattctcagcgatgaccagaatgagtggcgtaaatattggcgagcgtattatacgtaaaggctcggttgatgctattcgtcgccatatcgaagttagtcatagtcattttcccgatgaagtcaacaccatagtcgagcaagtcgcaagagctggtgctacgccattagtcgtcgttgaaaatcaaaatatccttggtgtagttgaacttaaagatatcgtcaaagggggtatcaaagagcgctttgctcaacttcgccaaatgggcattaaaaccgtgatgatcaccggtgataaccatcttactgcggcggccattgctgccgagtccggtgtagatgattttcttgcgcaagccactccagaggctaaactggcgttgatccgtcaatatcaatcagaaggccgacttgtcgctatgaccggagatggtactaatgatgcgccggctttagcgcaagccgatgttgctgtggctatgaattcaggaacgcaagccgctaaagaagcaggcaatatggttgatttggactcaaatcccaccaaattaattgaagtcgttcatattggtaaacaaatgcttatgacccgtggcgccctaaccacctttagtattgccaatgatatcgcaaaatattttgccattattcccgcagcttttgcggtgacatatccacaattgaatatgctcaatattatgggattacactccccagcatccgcgatgttatcagccgttatttttaatgctttgatcatcgtctttttgatccctttagcgttgaaaggtgtgcattatcgtcctgtttctgctcattcattattacgccgtaatctctctttatacggaataagtgggttaattgttccttttttaggcattaaactcatcgatatgattttagctattattgggctttaa

SEQ ID NO: 295406 - DNA, 1500 bp, Proteus mirabilis
atgttcgccctgttaatttttaactcaatgggagcacttttattattggtaattttacttaatcaaggttatttacctttaaatccacagtttgcacctaatatgagttgggatttagcattaaataccaccattagttttattactaataccaattggcaggcctatagcggtgaaacagccgtcagctatttaagccaaatgatggggcttacagtacaaaatttcttatcagcaacaacggggatcgctgttgcctttgtattgatcagagcattaacacaatcttcttgccattccattggtaatgcttgggtagatatcggtcgtattaccctatatctgttactacctttagccattatttggtcactgttatttgttagccaaggcgtgatccaaaatttccatcccgcgctattaagccaaggacttgaaaatcagcaatggttaccaatgggccccgttgcttctcaagaggcaattaaactgttaggaaccaatggaggaggctattttgcagcaaactctgctcatccttatgaaaacccaacctctttcagtaactttttgcaaatacttgccatattcctgttacctaccgcgctatgcttcgcctttggccgactgagtggcacacaacggcaaggctataccttactttgggtaatgacattgatttttattgttgcggttagcgtgattgtttgggctgaatggcgaggtaacccacaatttactttaatgggtgcggatagttcattaaatatggaaggtaaagagagtcgctttggtttaataggcagtgcgttatttgttgccgtcactacagccgcttcttgtggtgcagtaaatgccatgcatgattcattaactgcattaggaggtatggttcctatgtggttaatgcaaactggagaagtcatcttcggcggtgttggttctggtttttatggcatgatcttgtatgttttgttagctgtttttatcgctggattaatggtgggtcgagcacctgaatatctcggcaaaaaaattggtgtagcagaaatgaaatgggttgctgtcgctattttaatatcaccagcaatcaccttattaggtacaacacttgccctctttagcgaagtaggtcgcgaagcgattttaaatcctggtcctcatggttttagtgaagttttatacgcttttacttcagctgccaataacaatggcagtgctttcgccggactgaatgctaattctgttttttataatctgttattaggtatcactatgcttgtcggacgttttggtgtcatgttgcctgtcttagctatcgccggtagtttggcaataaaaaaacgccaagctgaaagtttagccacattgtccactacttcaccgctatttatttttctattgttcctcacagtaataatgattggtgcgctcacctttgttccggcattagcactaggccctattgctgagcatttacagttgttatgggctaaataa

SEQ ID NO: 295407 - DNA, 1245 bp, Proteus mirabilis
atgttttcagaagaaagacgacaggaaatctatagcattattagggaacagaaaaaagttaaagtggctcagctagcggaaagattcaacgtcacattagaaacgatccgcagtgatttgaaatacctcgaaaatgaagggttgatcaaacgttgtcatggtggcgccatactagggaaacaagaaataaaaaagatcagtaaatttagtgatagttttgatatctcatgcttactacatgatttattgatcgtcaaagaacataaaaagaaaacaccagaaggtaaagtgtgtgtattaggctcttttgtggtggacattattgctaatgttgatgcatttcctcgtgtaggggaattggtaaattcaaaaggaaactcaataggtccgggtggaaaagggacgaatcaagccatttctgccagtttttctgatgcaaaagtgcatttaattaccaaagtcggtgaagatcattttagtaagtacgcttataaatatttgcaagagagcggtattgattcatttactatttttcaaacagaaatagagccgacaggtagctcaattagctatttagcagataaaacccaaaataatattacggctacctatttaggcgcaaataacacttttaccctgcaagaggtcgatatctcactgccttatattagtgaagctgacgtgttattactgcaaggggaaattaatattgatgctaatgtgaaagccgcttcttttgctcattctattaataaaaccgtcatacttaatgtcgctccgtatagcgatgatttaaaacaactttatttatatgtagattttattacgttaaacgcttaccaagcttcagattggtcaggtattgaaattaatacgattaatgatgccaagcaagccgtagagattattgccggtaacgaaaagaaaaaagtgattatctacatagatgaattaggcgtggtgtattttgatgggaggaatacttttcatattccgccactaccttctctacgtgttgatacgatggcagcaacagatgcttttaatggtgcatttgcctcaaaaatagccgcaggaggcacaatgccagaaagtgttttatttgctagtgctttcttgtctgcatttatagaacaaaaaggggtgacttcaatgccttcactgtcacaagtacaagcacgtcttaaattaagaattgaagatattcgaccacaagtaatctgcaatgagaaaaggtgcatataa

SEQ ID NO: 295408 - DNA, 945 bp, Proteus mirabilis
atgaaaaaaactctcttagctctgaccctatgcagttctgtttttactgttcctgcttttgcacaatggcctgaaaaacctattacgattattgttccttgggctgctggtggcaataccgataccgttgctcgtttagcagcaaaaggattacaagaagaattaggtgtgacggttaatgtcgttaataagaccggaggaagtggcgttgttggacatgatgctattaaaaatgccaagccagatggttacacattaggtattgccacggttgaaattgcgatgatgcatcatcaggggatgactaatttaacctatcaagattataccccgatcacacgtttagcggtaatctacggtggattacaagttgcaaaatcatcgccttttaataatgcacaagaaattatcgattatgccaaagccaacccaggaaaattaaaagcgtcagggagtggattaaactctatctggcatcttaataatattggcatgttacgtgcagcaggtttacctgataacgcaatccgctttattccttcccaaggagctagtgctgcattacaagagttagcttcagggggcgttgatattgtaacgtcttcattaggtgaggctgacagtatggtcaaagccggattagtcaaacatatggccattatgtctaatgaaaaatcggcattttatcctgatgttcctctctttaaagaagcaacaggttatgattgggatttacaagcatggaatatgttagttgcccctaaagggcttgataaagaagcacaagataagcttaccgcagcaatgaagaaagtttatgcttcaggtgaattagctgaatttgctaataaacaaggatttgaagtcattgaattgtatggtgatgatgcgacacaatttatggccaatgaagataaaaagtttggcgaaattataaaaaaataa

SEQ ID NO: 295409 - DNA, 435 bp, Proteus mirabilis
atgcctatgctaaatcgtcatatattatcatttatattttgcctatttggattatttcttattatttatagcgcctattcattaggtgattttagtgaatatggtgcggcttttatgccttcactaattggtggaggaatgattgttttttcattattagatatttttgcaaaaaagcagcaaatggatacacctttggtgacatggcatgaaataaaatttgtgttattaattattggtatcattctattttatgtgttttttgctgaataccttggttttattgttacgggatttattgttattgcaccattaatgatgaaatacgcaaaagtaaaaccgatatttagttttattatttctgctggaattgtattaggcgtttactatttatttaccgctgtactgttagtaccgctacctcaattattttaa

SEQ ID NO: 295410 - DNA, 1488 bp, Proteus mirabilis
atggatatatttattagcgcattagcttatattgattacacgacaatacttgttgtcataggcgcttgcttatttggtttatttgttggagcaattccgggattaacatcaaccatggcaattgctttaatggtgccttttactttctttcttgatccaattcctgcattagcactgatgatctccgtaggtgcatcctcgatatttgccggcgatattccaggggcattattaaatattcccggaacacccgcctctgcagcttatactaacgatgcccatacattggttaaagaaggtaaaactaatcgtgtattagggatgtcattaacaagctccgttattggtggggtgatcggcacaattattttagcgtcaaccgctccgttgttagccgagtttgcacttaaatttagctcttacgaatatatgtggcttactttaattggattaagctgcgccactattgtttctggcgctcaaattagaaaaagtttgctagcactgtttttcggtattgctttagccactattggctacgatgaatttacaggacaagcccgttttacctttggtgaagtctctttaatgcaaggtgttagttttattcccgccatgatagggctatttgctatctctggtgcgattaaatattacgtcgatcgctggaaagaaaagcaaattaaattagcagttaatacagataatagctcatataatatttttaaaggggtgggaaaggttgtttgccaacgtaaagggggcattttccgtagtggtattattggtacattgataggtgctttacccggtgctggtgccgatatcgctgcgtggatctcttatgcagtatctaaaaaattatcaaaaaaaccgcaaaagtatgggcaaggctcagaagaaggtattgttgatgcatcagcaagtaataatgctagtttagcaggaagttggataccttcattggtttttggtattcccggtgattctgcggcagctattatcattggtgtattgtatatgaaagatatgcaacctggaccaactctctttttatttaatccagataaactgtacgccgtttttatcattttctttattgcgaatttaatcttattacctatagcttttattgttgttaattttttaaagaaaattgttgctattgataatgcaattctttatccagcaattattttatttagtattgtcggttcatttgctattactaatacgatgtcatccattgtggttatgatggtgatgggagttatcggctattttcttcaacagcgtaactttccaatctcaccgattatattagggatgattttaggaccgatgctagagaagaatttactttcttcgttgatgaaatcggacggagagctaattaattttgttaatagacctatttcaattgtattagccagtgttttcctattaattgtcgctatgcaaattaggagcgcatttaaaaccaaataa

SEQ ID NO: 295411 - DNA, 996 bp, Proteus mirabilis
atgaaaaagatattaaataaaccagaaaattatgttgatgaaacattagctggcttatgccttgcacataatgatatttatcgtcaaccacaaccacgtttaattacgcgagctaacagctcagataaagctaaagtgggaattgttactggcggaggatcagggcaccttcccgttttcaccggatatgtaggtgaaggtttattagatgccgccgcagtcggtgatgtatttgcctcaccgtcagcagatctaatggctgatgcgatacgcgctgcggataatgggcagggggtattactgctctatggtaattatggtggcgatattatgaattttgatatggcttctgaaacggtagattttgaagataatattcgatgtacaacggtgttagcgacagatgatattgcttctgcaacaccagaagaagcgcataaacgtcgtggtgtggctggaatgatttatggttttaaaatggcaggggccaaagctcaagaaggggcaactcttgatgaggtgacccgcattgctcaaaaaaccatggaaaacacgcgaacaataggctgtgccttaacatcttgcaccttacccgctgttggacatcctacctttgaaatagctgacgatgaaatggaaatgggaatggggatccacggtgaaccaggaatttggcgcgataaattacgtagtgcagatgatattgctgaagaaatgtttcaacgtttacaagccgaattatcactaaaaaagggtgataaagtctcagtattagtcaactcgttaggtgcaacgcctttagaagaactctatattttatataataaagttgttcaacttattgataatacaggggcgactatcattcatccattagtcggacgttatgcaacatcaatggaaatgaccggtgctagcttaactttttgtaaacttgatgatgagcttgaagctttattgaatgcacctgctcactgtgcattttggagagtgtga

SEQ ID NO: 295412 - DNA, 612 bp, Proteus mirabilis
atgatgactaatattacactcgataatataaaacttgctgtacaacgtatcgcgattgcctgtgaacagtctcaaaatagactatgtgaagcagatagccaacttggtgacggtgatttaggggtaaccatgcaaaaaggatggcgacaaattgctaacgatgcccaagattggcctgatgatttaagtaaagcgctttttcaatgcagcaaatcattacaaaaagcctgtgcgtcttcttttggtactttgcaagcaacggcttttatggcaatggccaaatattgcaaagaaaaccacctgcaagaaatagcgcttgccgatatttccccactattgacggtcgcataccaaagcatgatggcgagaggaaaaggggaattagggcaaaagtcagtattagatattctttatcatttatctgaagatctagcgtcgatctcatctctgactgaactaaaacccactgctttaaaaagtattaataatacgctaaatgaatttcgccctaagcctaatttattgggacgtgcccgtatgttcccagaaaaatcgataggattagacgatcccggtatgttagcgattaacgttattgttgaagcaatttga

SEQ ID NO: 295413 - DNA, 912 bp, Proteus mirabilis
atgaaaaaattatttggcgttacagtggcgatggttactccgtttgattcaaatgatcatgtggacatcaacgcgttgtctgcattaactaatatgttgatcactaaaggtgttgattgcctttatccttgtggcacgaccggagaaatgttgcgtttatccgcatcagagcgtaaaagtgtggcgcaaaccgtagtagagacggcaaataaacgtttacctgtttttattcatgttggcgcaatgacggtaacagaaaccattgaactcgccaaacatgctgtagaaattggtgccgatggtattggtgtagtgacgccacaattttttgctgccacagacagagaattagagcactattttgtgactatcgccaatagcgtaccagagaatttcccaatctatctttataacattccacaatgtgcggctaataatatcaagcctgaattagcggctaaaattcagcaacaatgcaaaaatgtgattggtataaaatacagttttgccgataacaatacgacacttggctatttagcggttgcagataatttttcagtacttcatggctacgataaattattccttggtttattagatgcaggctgtgatggcactgtttcaggatgtgcctgtgttttccctgagccatttgtgaatatgtatcaagcctatattacgggtcattatcaagaagcgaagtactggcaacaattttgtgtgaaatttagtgatgctttgaaatcaggcgcgaacatggcgatatttaagtcagcattaactatgcgtggcttaaatggtggtcatatgcgtttacctcaacttgatttattacctgaagaaaaccaacaattgaaagaagatctaacgcaattatgcaaagaagcggggatcgctttttcaattaattaa

SEQ ID NO: 295414 - DNA, 648 bp, Proteus mirabilis
atgcaaaaaccaatcctttcttgtcttttgattatgggttttttaggtagtgctatgtctgttttggcacatggacatcatcatgaaaaagtacgcacacaagcacaaatagatgctgcgaatgggatttttgaggacaaggacgttctcaatcgctcattaagcgattgggatggcgtatggcaatctgttgaaccctatctgcgtagtggcgaattagatatcgttttgcaaaagaaagcggagacgaagcaagataaaacagtagaacaatatcgagcttactatacacaaggctataaaaccgatgttgatatgattggtattgagaataatatcgtagagtttcatcgtggtgataaagtcgatagctgtgaatatcactatgatggttatcgtattttacattatcaatcgggtaaaaaaggtgttcgctatctgtttagatgtgatgatgccaacagccaagctccacggtttattcagtttagcgatcatattatcgcaccagaaaaagcacagcattttcatctatatatgggaaatagttcacaagatgaattacttaaagagctaactaattggccaacctattacccttattcaatgaaaggggaagatattgttcatgaaatgctttatcactaa

SEQ ID NO: 295415 - DNA, 126 bp, Proteus mirabilis
atgcaagtattaagttcattaaagagtgcgaagctgcgccaccctgattgtaaagtggtacgccgtcgtggacgtctgtatgtaatttgcaaatcaaatccacgttttaaagccgttcaggggtaa

SEQ ID NO: 295416 - DNA, 249 bp, Proteus mirabilis
atgaaagaaaatattcatccacaatatcgtactgtcattttccatgacactagcgtagatgcttattttaaagtgggatcaaccattcaaactgataaaactattgagtatgaggggcaacgctatccttatgtcactttagatgtctcttctcagtctcatccattttataccggtaaacaaaaaacacattctcaagaaggtaatgtggcacgctttaataagcgttttggccgatttgttaattag

SEQ ID NO: 295417 - DNA, 660 bp, Proteus mirabilis
atggttcgtgctagtatggcaacaagaaataaaaaagaggttacaattagtgatagtgattcacagttcaatcatgaggtgaatatgggcaaattcccaggcttacatcgtcgagcaatcgttgttattgccattattttgttagtcgtttttttctggccaacaagtgaaaataccaccccacctcaaccctcatcttcgacacaagatcttcctgtgcctgtagcaccttctgtctcaaatgaaacacaaaatgtccctaatacactaccaccagcacaagatagtctaaatgctgagcaagagacagaagacttaccagaagaaggtgaagccaataataccaatgacaatacgccagtaaacacaacgcctcaaacaccgtcaaccgcgactgaaaattggcaaacttataccattaaagaggggcaaacccttgcacaactatttagagataatcagttgcttgtcaatgatgcgtttactatggcgaaatcagaaggcccacaaaagccgttaagccagttacgcgccggacaaaccattcgtttacaacgaggttcacaaggtgaagtgagtatgcttgaagtgactgacaataccggtactgttattaccttcactcggctaagtgatggtagttattatcgtacgccatag

SEQ ID NO: 295418 - DNA, 450 bp, Proteus mirabilis
atgcaaattattctgcttgataaagtagcgaatctgggtagcctgggtgatcaggttaacgtaaaatcgggctatgctcgtaactatttaatcccacagggtaaagctgtttctgcgactaagaaaaacatcgagtttttcgaagcgcgtcgtgctgagttagaagctaaattagctgaaactttagcagcagctgaagctcgtgcagcgaaaatcactgcgctgggttctgtcactatcagctctaaagcgggtgacgaaggtaaactgtttggttcaatcggtacacgtgacatcgctgatgcagtaactgcagctggcgttgaaatttgtaagagcgaagttcgcctgccaaacggcgttctgcgtacaactggtgaccacgaagttcacttccaagttcacagtgacgtattcgctgaactgaatgtaatcatcgttgctgaataa

SEQ ID NO: 295419 - DNA, 228 bp, Proteus mirabilis
atggcacgttatttccgtcgtcgtaagttctgccgtttcacagcggaaggcgtacaagagattgattataaagacatcgctacgctgaaaaactatatcactgaaagtggtaaaattgtaccaagccgtatcaccggtactcgtgcaaaataccagcgtcagctggctcgtgctatcaagcgcgcgcgctacctgtctttattaccttatactgatcgtcatcagtaa

SEQ ID NO: 295420 - DNA, 318 bp, Proteus mirabilis
gtgacggctaatcgattagtgctaacaggcactgtgtgcaaagcattgatacgaaaagttagccctgctgggatcccgcattgccaatttgtgattgaacatcgttcaacacaagaagaagcgggattaaaaagacaatcatggtgcagaatgcccattattgccagtgggaaagcgttacaaactgatactcacagtataacggtcggtagcaaagttaccgtttcaggattcattagtagccatcaggcgagaaatggattgtttaaactggtattgcatgccgaacagattgaattgatagattctggagactag

SEQ ID NO: 295421 - DNA, 396 bp, Proteus mirabilis
atgcgtcattacgaaatcgtttttatggttcacccagaccagagcgaacaagttcctggtatgatcgaacgttataaaaccgctatcactaatgctaatggtcagatccaccgtctcgaagactggggtcgtcgtcaactggcttatccaatcaacaaactgcacaaagcacactacgttctgatgaacgttgaagctccgcaagaagtgattgatgaactggaaactactttccgcttcaatgatgccgtgctccgcaacatgatcatgcgtactaaacacgcagtgactgaagcttcaccaatggttaaagcaaaagacgaacgtcgtcgcgatgttgctgaagatcttgatgaagaagaagttgatgatgtagcagaggattctgaagagtaa

SEQ ID NO: 295422 - DNA, 744 bp, Proteus mirabilis
atgagcgaagatattatttatggtattcacgcagtaaaagcactgcttgagcgtgatccgacacgttttaaagaagtttatgtgttaaaaggacgcgaagatcgtcgtttaatgccggtgatccatgcgttggaagaacaagggattttagttcaagttgctaatcgccaatggttagataatcaaactgaaggtgcggttcaccaagggataattgctaaggtaaaacctagtcgtcagtaccaagaacaagatttaccggacttattagctgaagtaggtacaccttttctattagtgttagatggtgtgactgatccacacaacttaggggcatgcttacgtagtgctgatgcggctggtgttcacgcagtcattgtaccaaaagatcgctcagctcaattaaatgccacggcgaaaaaagtcgcttgtggtgctgcagaaagcgtacctttgatccgtgtaaccaatctggcacgtactttacgcttattacaagaagagaacatctggattgttggcaccgcgggggaagcggatcatacattatatcaaagcaaactcacagggcctttagctttggttatgggggctgaaggtgaaggaatgcgccgtttaacccgcgaacattgtgatgagttaatcagtattcctatggcaggctcagtctcttcattaaatgtctccgtggcaaccggagtttgtttatttgaagcaatgcgtcagcgtatttctgtaaaataa

SEQ ID NO: 295423 - DNA, 2490 bp, Proteus mirabilis
atgtccaaagatccttttcaggatagagaagccgaaaaatacgcctctccaattgctagtcgtgaatttattttagaagaaatgaagaaacgcccggccccgatgagccgtgaagatatcgcgcaggcattgaaaatttcaggtgaagaaaatctggaagcattacgtcgtcgtttacgggctatggaacgagatggtcagttagtttttactcgacgtcagtgttatgccttacctgaacgcctcgatctttggaaaggtaaagttatcggtcaccgtgacggctatggttttttacgtgcggaaggccaaaaggatgatctctatctttcacaagatgaaatgaaaaaaaccatgcatggtgatgtgattttagcacaacccctaggcatggatagaaaagggcgtcgagaaggtcgcgtcgttcgtgttcttgaacccagaaacagccaaattgttgggcgctattttattgagtcaggtatgggatttgtggtacctgacgatagccgtttaagttttgatattcttatccctaaagaagatatcatgggcgcacgtatggggaatgtggtggtggttgaagttaccacaagaccaacacggcgtactcaagcggtaggacgcattgttgaaattttaggtgaaactatggggacgggaattgcggtagaaattgcactacgcacccatgaaattcctcatacttggccacctaaagtagaaaaagaaatcgctgatttaaaagaggatgtgccagagtcagcgaaacaaggtcgcgttgatttgcgtgatctccctttaattaccattgatggtgaagatgcgcgagactttgatgatgccgtttattgccagcgtaaaaaaggcgggggctggcgtttatgggtagcaattgcagatgtgagctattatgtacgccctcaaactgcattagacacagaagcgcgtagccgaggcaattcggtctatttcccatctcaagttgtccctatgctgccagaagtactgtcgaatggattatgttcattaaatccacaagtcgaccgtttatgtatggtttgtgaaatgaccgtttctgagcaggggcgcctttcatcttataaattctatgaagccgtaatgagctctcacgcgcgaatgacttacaccaaagtatggaaaatcattcaaggtgatgaagagttacgtgagcactaccaaccgatcgtaaaagatattgagcacctttatgagctatatcaagccctcgataaggcccgtgaacagcgtggtgccattggttttgaatcggaagaagcgaaatttattttcaatgcagaacgtcgtatcgatcgtatcgaaccggttgtacgtaatgatgcacataaattaattgaagagtgcatgattttagccaatattgcggcggcgcgttttgttgagaaaaatgaagagcctgcgttatatcgtgtgcatgataaacccaaagaagagagcgtaatgaatttacgttcggtatttaatgaactgggtttaacgttaccgggaggattaacaccggagccaggcgattatgcgcgagtcatgaaagaagtcgaagagcgtccagatcacgaaatgctacaaaccatggtattgcgctccatgaaacaggcgatttacgatcctgaaaatcgaggtcactttggtttagcattaaaatcttatgctcacttcacttcacccatccgtcgttatcctgacttagcgctacatcgtgctattaaataccagatagcgaaacagcaaggccatggctcacagcgctggacaccaacaggtggctatcatagtgatatggataccatgcttcagttaggggaacactgctctttaactgaacgtcgggcggatgaagcaacccgtgatgtggctgattggctgaaatgtgatttcatgcttgatcaaattggtcagcaatttaccggtattattaccagtgtcactggtttcggtttctttgtgcgcttaaacgatctatttattgatggtcttgttcatgtatccacattaaataatgattactatcaatttgataatgttggacagcgtttaattggtgagtcatccggtcaggtgtatcgtctgggtgatgaagttgaagtgaaagttgaagcggtcagtatggatgaacgtactattgacttctcattgatttcaacaacacgtaaagcacgtaaccccgggaaaacagcacgtgttcgtgcgttaaaagggggaaaagacaagaaaaatgcgagcagtagtaagtctcgtcgtcgtgatgccagcaaagacaaaaactttgaacctgatagtgcctttagaaaaggtaaatcaagtaaagaaaaacagagtaaagataaagtcattaaagagaaaattgcgaaggacaaggcgagtactaaacgcaaaaaagcctctgcacaaaccaaaaagatagaggcgaaattaaaagccaaacgtgcggcgaaacgcactaaagcgtag

SEQ ID NO: 295424 - DNA, 429 bp, Proteus mirabilis
gtgcaattaaccagttttacagattatggattgcgggcgttgatatatatggcttcattgccagaaggcaaaatgacgagcatcaccgaagtgacgcaggtctatggtgtgtcacgtaatcatatggttaagattattaatcagctaagtcatatgggatttgtcgaagcgatacgtggaaaaaatggtggtatacgcttaggtaaacctgccgctgatattattgtcggcgaggtcgttcgtgctttagagccgctttcactggttaactgtagtgctgagttttgtcatatcaccccagcttgtcgattaaaacttgtattaaatcaagcgatagaacagtttttgaaagagctagaccgtcatacactggctgaattggtagaaaacaacagccccttatataaattgttattagaagatgtttga

SEQ ID NO: 295425 - DNA, 1299 bp, Proteus mirabilis
atgagtaataacgttgtcgtattaggcacccaatggggtgacgaaggcaaaggcaagatcgtcgacttgctgacagaacgcgctaagtatgttgttcgttaccaaggcggacataacgcaggtcacaccctagtcattgacggtgaaaaaaccgttctccacttaatcccatcaggcattcttcgtgaaaatgttgtcagcatcatcgcaaacggtgtcgtattatcgccagaagcactgatgaaagaaatgacacagctcgaagagcgtggtattcctgttcgttcacgtctactgctgtcagaagcttgcccattaattctgccttatcacattgcattagataacgcccgtgaaaaggcgcgtggtgagaaagcgattggtactacgggtcgtggtattggtcctgcttatgaagataaagtcgcacgccgtggtttacgtgttggtgatctatttgataaaaaagcattcgctcagaagcttaaagagatcatcgaataccataatttccaactggttaattattacaaagttgagcctgttgattaccaaaaaaccttagacgatatcatggcgatcgctgatatcttaactgggatggttgttgacgtttctgacttactttacaaagcaacacaaaaaggtgagttagtgatgtttgaaggggcgcaaggtactctattagatatcgatcacggtacttatccgtatgtcacctcttcaaataccaccgcaggtggtgttgcaacaggttcaggcttaggtcctcgttatgttggttatgtattaggtatcattaaagcctattctacccgtgttggtgcaggtccattccctacagaattatttgacgaaaccggcgatttcctgcgtgaaaaaggccaagagttcggtgcaacaacaggtcgtagtcgccgtactggttggttagatattattgctatccgccgtgctgttcaaatcaactcattgtcaggcttctgcatgaccaaacttgatgtcttagatggtctgaaagaagttaaagtgtgtgtaggttatcgcttaccaaatggcgaagtgattgaaactacaccattagcagcagatgattgggaaggtattgagcctatttatgaatctatgcctggctggaacgaaagcactttcggcgtaaaagataaagcacagttaccacaagccgcgttaaattatattaaacgcgttgaagagttaactggtgtgcctgttgatatcgtttctacaggtccagatcgttcagaaacgattattctccgtcatccatttgatgcataa

SEQ ID NO: 295426 - DNA, 1005 bp, Proteus mirabilis
atgcgtaaagttatcgctgttgttgcagttattattttagcgttgttgtactcctcagtatttgtcgtgcaacaatatgaacgcggtattattttacgtttctcgaaagtggtacgtgatggtgaaaataaaccggtcgtttatgaaccgggtattcactttaaaattccatttattgagaatgtgaaaaaactggatgcgcgtatccaaacgatgaatatccagcaagatcgcttcttatcaggtgagaacaaagacttgttagttgactcttatctgaaatggcgtatcagtgattttagtacttactacctagctactggtggtggtaatacgatgcaagcagaaaccttattgcgtcgtaaatttagtgaccgtttacgctctgaaattggtcgtatgagtgtaaaccaaattatcactgattcacgtggtcgtttaaccattgatgtacgtaatgcgttgaatgaaggtacaccttctcgcgataaaagcgatgcagatgatgctattgctattgctgcgaagaaagtggcagaagagaccaaaggtaaagcccctgctatcaatatgaacagtatggcggcattaggtattgaagtgattgatgttcgtatcaaacaaatcaacttaccaatggaagtttctgaagccatttatcaacgtatgcgtgcagagcgtgaagcggttgctcgtcgtcaccgttcacaaggtcaagaagaagcggtgaaaatccgtgctgcggcagataaaacagtgacagaaaccttagctgaatcggagcgtgaatcgttacgtattcgaggtgaaggggatgcgcaagcaactaaactatttgctgatgcattcagtcaagatcctgacttctatgcgtttatccgtagcttacgtgcttatgagaatagctttaataaagacggtaatgacgtcatggtgttaagtccagatagcgatttcttacgctatatgaaagcaccaactaaagcgagagcgattgaagagtaa

SEQ ID NO: 295427 - DNA, 1275 bp, Proteus mirabilis
atggcgtggaatcagcccggtaacaacggacaagaccgcgacccgtgggggaaccgaaacggcggtaataataacggcgacgggaactctaacggtaatcaaggaggtcgggatcgtaaagcatcagatctcgatgatttgttccggaaactgagtgcaaaacttggcggtttcggtggtaaaaaaggaggaaactcctcttctgggcaaaatggcggacctcgtggtaatgctggaaacgtattagtttctcttgcattaggtgctgtggttgtcgtttgggctgccagtggtttttataccattaaagaagccgaacaaggtgttgtgactcgtttcggtaaattttaccaaatcgtcgagcctggtttaaactggaaaccgactttcattgatgaagttcagcctgtcaacgtaaaaaccatccgtgatttaactacgggtggcatgatgttgacatcagatgaaaacatggttcaagttgagataaacgttcaatatgttgtctcagatccagaagcatttctctttaatgtcacaacgccaatgaatagcctaggacaagcgacagacagtgccgtccgtggtgtaattggtcgttcagaaatggaaaagatcctgacatcgaaccgttcagaaattcgtgatcaaacccgtcaagaattagaagagacgatccgcccttataaaatggggatctccattgtggacgtcaacttccaagttgctcgcccaccagaagcggtaaaagcggcattcgatgacgtaattgcggcacgagaagaagagcagaaaaccattcgtcaggctgaggcttataaaaacgaagtgttaccattagcgaaaggtaacgcacaacgtatgattgaagaagcaaccgcttataaaacgagtgtggtgatgaaagcagaaggtgaggtggcgagtttcgccaaaatcttacctgaatatcgcgcagcaccggaaattactcgtgagcgtctgtatattgaaacaatggaaaaagtgttgtcgaaaacacgtaaagtcattgccaatgacaaaggtaacagtatgttggttctgcctttagagcaaatgttacgccagcaaccaaaagcgccaacgtcatttaatagtgtcacagaggcacctgcgcgtatttcaacccctacgccaagtaccaacacaacacctactcagaaaccagcaacaacttatggtaacggtggatatggtagcaataatagtggtggttatggtcagccttatggctctaatcaaggaggacaataa

SEQ ID NO: 295428 - DNA, 1284 bp, Proteus mirabilis
ttgtttgatcgttatgaaggtggcgaattagccgttttagtgcacgttttcttttcgcaagaaaaggatattgatgacttgcaagagtttgaatctttggtgacatctgccggtgtaaaaccagttcaaattattacagggagccgtagagcgcctcactccaaatattatgtgggagaaggtaaagcggaagaaatcgcagaagcagtaaaagcgagtggtgcagatgtggtgttatttaatcacgcactctcaccggcacaagaacgaaatctggaaagactttgtgaatgtcgtgtagttgatcgcacgggagttatcctcgatatttttgctcaacgagcaagaactcacgaaggaaagctacaggtagaactcgctcagttacgtcatttatcaacccgtttagttcgagggtggacacacttagaacgacaaaaaggggggattggattacgtggccctggcgaaacacagcttgaaacggaccgacgtttgctcagaggcaaaattagtcaaattctaatgcgtctaggcaaagttgaacgtcagcgtgaacaaggacgacaagcgcgaagtaaagctgatattccaacgttatctctggtgggttacaccaatgcgggtaagtcgagtttattcaattgtataacctgtgctgatgtatatgctgctgatcagttgtttgcgacactggatcctaccttaagacgaattcaggtcgatgatgttggtaccgtggtgttagctgatacggttggttttatccgacatctacctcatgatctggtggcggcatttaaggcaacgctacaagaaacacgtgaagcgacattgcttcttcatgttattgatgccgctgatagccgttttgaagagaacattcatgcagttgaaaatgtattagaagagattgatgctcacgagataccgacactgtatgtgatgaataaaattgatcttcttgaggacttcaccccaagaattgatcgaaatgaagataatttacctgttagggtttgggtttctgcacaaacaggtgaaggtattcctctgttatatcaggcgttgacagagcgcctttcaggtgagatcgcacacgttgaattgcgtttaccgccagaagaagcagggcgattacgtagccgtttttatcaattacaggctattgagcgtgaatggattgaaaaagacggtaaagttgggctaatcacccgaatgcctatggtagactggcatcgactttgcaagcaggagcctactttattggattacgtggtctga

SEQ ID NO: 295429 - DNA, 291 bp, Proteus mirabilis
atggctaaggggcaatctttgcaagatccttttctgaacgcattacgtcgtgaaagggtccctgtttcaatctatttggtaaacggcattaaattacagggtcagatcgaatcttttgaccaatttgttattctgctgaaaaacactgttagtcagatggtatacaaacatgctatctctaccgtagtaccttctcgtcctgtttctcatcatagcaatacaggtaccaaccaagcgggtacaaattacagtggcggtaacgcgactcagcaggatgatgttgcagaataa

SEQ ID NO: 295430 - DNA, 942 bp, Proteus mirabilis
atgagcgaagtaaaaacgcaaataaaacctaaagcaatctttctgatggggccaacagcctctggtaaaaccgcattagccattgcgctaagacaaaaactgcccgttgatcttattagtgttgattctgctcttatttatcgtggtatggatattggtactgcaaaaccggatgagacagagcagtcgcttgcaccacatcgtttaattgatattctagatcccgcattaccttattctgccgcagactttcgtaaagatgcgttaaaagcaatggaagaaattacggctgcaggacgaattccactattagtgggcgggactatgctatattttaaagcgttattagaaggcttatcgcctttgcccagtgctaatccagaaattcgtgctgaaatcgaaaaaaaagcagccgaacaagggtgggaggcaattcatcacgagctagcatccgtcgatccagttgcggccaaacggatccatcctaatgatcctcaacgcctttctcgtgcactggaagtttacctgatttcaggtaaatcgatgacagaattaactcaaatatcaggcgaagcattgccttatgatgtttatcagtttgcgattgctccgaaagatagaaatgtacttcatcaacgcattgaagcacgttttaaacagatgttaacgtgtggctttgaagatgaagtaaaatcattataccaacggggcgatctgcatgaagatttaccttctatacgttgtgtcggctatcgccagatgtggtcatatttatccggcgaaatcgactatgatgagatggtttatcgagggatctgcgctacccggcaattagcgaagcgacaaatcacttggttaagaggttggcatgatgttcattggttagatagtgaagattttgaacagtctcttaacactgttttgcaggtagttagtgcatag

SEQ ID NO: 295431 - DNA, 2010 bp, Proteus mirabilis
atggcgattaatttattacctcctcagttagcaaatcagattgcagcaggggaagtcgttgaaagacccgcttctgttgttaaagagttacttgaaaacagcttagacgcgggtgcgacaacaattgatatcgatatcgataaaggtggcgctaagctaattcgtatccgcgataatggatgcggcatttctcgtgatgatttgaagttagcacttgctcgccatgcaacaagcaaaatatcgacactggatgaccttgaagccattatgagcatggggtttcgtggtgaagccttagccagtattagctctgtatcacgtttaaccttaacatctcgtaccgcatctcaggaggaggcttggcaagcctacgccgaagggcgtgatatgacagtggcagtcaagccagcagcacatccggtggggagcacagttgaagtgctcgatcttttttataacactcctgcaagacgtaaatttttacgtaccgaaaaaacagagtttggtcatatagatgaagtagtacgtcgtatagccttatcccgctttgatgtgtcaattaatttaacccacaacggtaagcgggtgcgtcaatatcgcgctgcgaaagaaactcatcagcatcatcgtcgtttaagtgctatctgtggtaatcattttgttgatcaagcaatgcaactgacgtgggagcatggtgatctggcaataaaaggctgggtagagcatcctttagctccagtgcaaagcagtgaaatacagtactgttatgtcaatgggcgcatgatgcgcgatagattgattaaccatgctattcgtcaagcatatgaaggttatttgcaaggtgagcagcaaccttcttatgtgctttatttaaccgtcgaccctcatcaagtggatgtcaatgtacatcctgccaaacatgaagtgcgttttcacgaatcgcgcttagtacacgattttatctatcaagctgtcttgagtgtgttaaggcaggttacagaagatacgttatctttagatgaagaggataatggggctttaactgccacaacatttcctgaaaatcgtcaagttgcgggagaaaatgttttttcgcagccttatcaagcaccagtaacctcatctacgcaaaaaaagagcacgggagcttaccaaggaagtgcaggaaaagggttaacagatacgcaaaagagtccccaaaaaacgctagatacacgtcagtttggtgagagttatcaacgtacgcaaggcatgctttatcaaaaaatgatgcaagaaagtgcgagcgatgttgaaaataaagaaaaaatacctctatttccccctcgtcccccattgaatttggttgatgttggtcatacaactaataacaatgaaacaaatgtaatttcagtggtgcctcgttctgttaatgccagcgcagcgcaaacagattatacttttggccgggtattggcgatttatcagcagaaatatgcgttaattgaatcttcgcaaggtctagggctgttagcattggaagaagctgattttctgttaaaatgtgcccagttattgccagaaaatgaaaatctgaaaccccaacctttgctagtgcctttaaaagtcacactcagtaaagatgaaattaatacatttaagcagtttcaggcgttaatcagtgattttgggattgttatcgacatctctcatggtaaagcgacgatccacgcggtctcgttgccgttgcgacagcaaaatttacctgtattactgacaaagctattagcttatttggcaacagaaaaattatgctctaaacaacaaattgggcattggttagcaaaacagttaagtcatgagtcgggtgtttggtcacaggctcaggcagtaggattattggctgatattgaacgattatgtccacaatatgtcagacagccgtccaaaaacttattacaattaatagaattacaacctgtggtagcggcactgaataatgagcgaagtaaaaacgcaaataaaacctaa

SEQ ID NO: 295432 - DNA, 1317 bp, Proteus mirabilis
atgtcgagtctcatcactattgtgagccaatgtcagcgttatattgccacctttttgttggttgttctgtcactttttgtggtgcaaatagcacaagccgctacggtaacagaagtgaaggccgaaaatggggatgtggctacaacacttacattttcgtttagtggtgggaaaccaagctatagatattattcactgaaaaatccagataggttagtgatggattttaagcaaggtagccaaataacgggtttacctgtgacattaaatcgtcagcaattagcacaaaaaattcgcacgacacaatcaaaagatagccaatatcaaagtatggtggtagagcttgccaaaccagtggtggtgacggagcgcttgttaaatagcaatggtgaatataagttagtacttactatcaaacctattaatgctcgacaaaataacaatacatcaacgacggtcagtgtagtggcgttatcagcaaacaaagccacaaatacggtggctaatcaacagatggcgcctttagtgagtacacctaagcaacccgttgcacctgtagtaccagtaaagcctcgcacaacctcgaataagcccgcatcgagcgatcggcaaataattattgcgattgacgcagggcatgggggccaagatcccggcgctattgggcaaaaaggtaatcgtgaaaaagatgttaccttaagagtggcaaaaaaattagaagcgattttgcgtaatgatcctatgttcaaacccgttttaacccgcaatggcgactattttatttctgttgctggacgctctgaagtggcccgtaagcaaggtgccaatatgttagtgtctattcatgccgattctgcacctaatcgcagtgcgcgcggggcatctgtttgggtattgtcaaatcgtcgcgcgaatagtgaattaggtaaatggcttgaacaaagcgaaaaacaatcagagcttctcggtggcgccggtgatgcactcgcagaaggggttgatccctatttaagccaagcagtattagatttacaatttggtaattcacagcgtgtaggctatgacgttgcggtagcggtgttatctgaacttagaaaagtaggatcattacataaaaaaacaccagagcacgccagcttaggggttttacgttcacctgatattccgtctattttagtcgaaacaggttttattagtcatgccgctgaggaacaattgctgatttcagatgcttaccaagagaaattagccgcttcaatctatgccggattaaaaaattactttctcgctcatcccttacagaatgggccaaaataa

SEQ ID NO: 295433 - DNA, 474 bp, Proteus mirabilis
atgaatatgaaagaatgggttgttacattagaagatgaagctgcaacagtaaaactagggcattcagtcgcaatggcgacaaataaccaagggcttattatttatttatttggtgatctaggggcagggaaaaccacctttagccgcggatttttacaagctttaggtcatcaaggtcatgttaaaagtccaacatataccttggtagagccttatatgctgacaccacgcccagtctatcatttcgatctttatcgcttagcttcagcggaagagttagaatttatggggatacgtgactattttgcacaagatccactgtgtctcattgaatggccttctcaaggggaagggtttatacctaatgcggatttagagcttcatttaagctatgaaaatgaaggtcgtaaagcccattttattgccctttcacagagagggaatgctgttttatcccgtattcagtctgcataa

SEQ ID NO: 295434 - DNA, 1155 bp, Proteus mirabilis
atgtcatcactcgatcttcatcaccttgctcaaaatataaaacgttggggaactgaactaggattccaacaaacaggaatttgcgatactgatttatcgctcgaagagcctcgtttacaagcttggctagataaacagtatcatggtgaaatggcatggatggctaaatatggcatgactcgagcaagaccccatgaattggtgccgggtacattgcgagtgatcagcgtcagaatgaactatttgccaacagatgccgcttttgctcgtacccttaataatccagagcaaggctatattagccgttatgcattgggtagagattatcacaaagtattaagacaacgccttaaaaaattaggtgaaaaaattacgcaatattgccaacagtttgaatatcaaggtattgttaattttcgtccttttgttgattcagcgccgataatggaacgaccattggccgtgaaagctggtcttgggtgggttggtaaacactcacttgttatcaataatcaggccggctcttggttttttctcggtgaattattaattaatttacctttgcctattgattttcccgttgaagagcaatgcggtaaatgtgtagcttgcatgaccacttgcccaacaggcgccatcgtagagccttacaccattgatgctcgtcgctgtatttcttacctaacgattgaacttgaaggcgctattcctgaagaatttcgccctttgatgggcaatcgtatctatggttgtgatgattgccaattaatttgcccatggaatcgtttttcttcgctcacagaggaagatgatttttctccgcgccgtgccttacatacaccagaattgctggatctattccaatggagtgaagaaaaatttctgcgtattacagaaggttcaccgatccgacgaattggctatttacgttggctaagaaatattagtgttgcgttaggcaattccccttatcaggacaaaattgtactggccttgcaagagcgctttggtttaggggaggttttagatgaacatttgcactgggctatcgcccaacagaaagccaaaagagaagaaaaaacactaaaaatacagacttcacaacaaaaacgtctagtaagggcaataactaagggcctacctcgtgatgcttag

SEQ ID NO: 295435 - DNA, 270 bp, Proteus mirabilis
atgcgttactcagaacaaatcaaaccaattagttatttaaaagctaatgtcgccgaagtgatgactaaactcactgaatctggtgcaccgatgattattactcaaaatggcgaagcaaaagcggttattcaggatattaccttttatgaagagacacaggaaacattagccttacttaaaatattggcgttaggtcagcaacaagttgaagcaggtgaagtaaaagatataaaaagcgttgttcagcgtttaaaaagtaaaaggaaataa

SEQ ID NO: 295436 - DNA, 327 bp, Proteus mirabilis
atggcgtcctataaagtggtaatgacgaaagatgccgaaacagacttagaggacatcaataactatattgccgaccacgacagcatagataatgcagattatgtattagatgagctgcttaaggtcactaatacacaggctaactttcctatgaaaggcagtattccaaaggaattacaaagtttaggtattcgtgaatatcagcaaatcttttttaaaccttatcgtgtcatctatcacacaatagcaaaacaagtggttatctttattattgcggatggcagacgagacatgcaagccctgcttactcggcgacttttagggtaa

SEQ ID NO: 295437 - DNA, 1125 bp, Proteus mirabilis
atgaattcagaaagcccaattaagcatgtccgctgggcaatcatgtgttcggtaatcggatttgcattaacaggctgtgccgacacgccttatcgtcctgcaccgataacctctgtcaatgatagttcgtcaaatcgtaccgtttctacatcacctgttacaactaacagtaatgcaggagtggcaacacctattgaaagaggttcaactccgttacaaacaacgcctcctccttctattagagtgaatagcacaaccgcgcagcctcaaagccagcctcgtacgcaaaatgttacccctcaaaatgtcaatacggatggtagcggacgcattgtgtataaccgtaattatgacaatatccctaaagggaattacagcggtaacacttatacggttaaacgtggcgatacaatgttttatattgcgtggatcacggatagtgatgtaaaagatttggcctcaatgaacaatattccagagccatatagcttaaatgttggacaagtacttaagattggtaaccgtcaagttaataccggtaccaataccaatgtaaatacttcagtaattaataaaccaagtagtgaaggcgttcagacggcacaaactaagccgtcaaataataatagctcaatggggccgttgatcacgaaatcaacaacaacgacaccgccaaagacaacgacttcgacaccaacaacttcggcaacaaccagtaataacacaacggcaacctctaaacctgcagccgcaacaggtaaatgggtatggccagcacaaggtaaaattattgagagctactcaaatgcgcctggtggtaataaaggtattgatattagtggtacacgaggttcacccattgtggcaacagccgcaggtaaagtggtttatgcagggagcgcattacgaggttatggtaatttagttatcattaaacataatgatgaatatctcagtgcttatgctcataacgatacaatcttggtacgtgaacagcaaaatgtaaatgcaggacagcaaattgcgaccatgggaagtactggtactagttctgttcgattacactttgagatccgttataaagaaaaatcacttaacccaatgagctatttacctaaaagataa

SEQ ID NO: 295438 - DNA, 627 bp, Proteus mirabilis
atgttaagtcggtcaatgaaagacttactgacaatgttaaaacaacacggcatcaatgatgagcgtctgttggaagctatgagcaaagtaccccgagagctatttattgatgaagcgctctcccataaggcttatgaaaatacggctttacctattggtaatggtcaaactatttcacagccttatattgttgctaaaatgacatcactgcttgaattacaagcaacggattctgtgttagagattggcacaggctctggttatcaaactgcagtattagcaaacttagtgcatcatgtcagttcagttgaacggataaaaatattgcagtggcaggcaaaacgacgctttaaacaccttgatttacataatatatcgactcgtcatggcgatggttgggaaggttgggtatcaaaaggcccctttaatgctattattgttactgcctgtgcaacagaagtaccgcaacgactcttgatgcaattagctgatggtggcaggatgatcattcctgtcggtgaacagcagcagatgcttaagtttattcgtcgtttaggtaatgattttcactatcaatctatcgaggctgtacgctttgtccccctaattgcgggtgagttagcataa

SEQ ID NO: 295439 - DNA, 765 bp, Proteus mirabilis
atgctgaaaatattagtgagtaatgacgatggtgttatggcaaaagggatacagacactcgcaaaagccttacgccagcgttatgatgtacaaattgtcgcaccggatcgcaatcgtagtgcagcatccaattcattaactattgatagaccgttacgtaaacagcgacatgaaaatggtgatattgcgatagttgaaggtacacccacggattgtgtctatctcggtgttaatcatctcgtcagaccgcgtccagatattgtggtgtctggcattaatcatggccctaatttaggggatgatgtgctttactcaggtacggttgctgccgctactgagggccggttcttaggtttacctgcgattgcggtatcacttgatggcgaaacgcattttgacaccgcagcccaagtgacttgtgatgttttagctatgctacaacgagtacctttaagagctgggaatattttaaatattaatgtgcctgatattccgttagcggagatcaaaggttttcgtataacacgttgtggaagtcgtcatgcttcacaacatgtttatacacaaacagatccaaaaggaaataccctttattggatcgggcctcctggcgaaaaaaatgatgtggggccggatacagattttgcagcggttgatgcaggttatgtttccatcacaccattacatgttgattcaacagcgtataaagcgcttgagttattaaaagattggttaaataaagcagaggtcgaaaaaacatgttaa

SEQ ID NO: 295440 - DNA, 1053 bp, Proteus mirabilis
atgagtgatttaccagaacttcattggctacatggcaaaccgacagcgacagggcgattaaaatcgacaccagaagattttaaggtcagcgaagatctcggctttaccttagatggtgaaggcgaacacgtgatggttagggtcagaaaaacaggttgtaatacggcttttgtggctgaaaagttagctaaatttgccggtattcatcctcgagatgctagttatgctgggctcaaagacagaaatgcggttacggaacaatggttttgtttgcgtatgccgggtaaagagatgcccgactttagtcaatttacgttagaaggttgcgaaatattaacaaccacccgccagcaacgtaagctacgaattggtacattaaaagggaaccatttcaccttagtattacgtgatatctccgatgtgacatcggtggaaactcgtctagtagagatacaaaaacaaggggttcctaactattttggtgtgcaacgctttggtcgtaatggcgacaatttacgccaagcatggcgttgggcaaccaatgaaattcgggtaaaagagcgtagcaaacgtagcttttatctctctgctgcacgtagtgcgatgtttaatcatctggtgagccaacgacttgagcgtcatatttatactcaagtgctttgtggtgatgcgatgcaattgcacggtaaaagaagttggtttgtggcagaagaagcggaacttgcccaaacacaaacacgctatgaagagcatgatatacatattaccgctccattgccgggtaaaggtgacttaggtacacaagctcaagcactgatatttgaaaccgacaacttagctgactacgaagcattatggtcattagcacaacaagagcgagttgataccactcgccgtgcgattaatttgctaccagaaaatatgtcatggcattggctagatgatactacggtttctttatcgttctttttgccagcaggaagttttgccactagcgttgtccgtgaattgatattattagggaatattgatgctgaaaatattagtgagtaa

SEQ ID NO: 295441 - DNA, 486 bp, Proteus mirabilis
atgagaattggacacggttatgatgtacataaatttggcggagaaggcccaattattattggtggtgtgagaattccttatgaacaaggtctactagcccattcagatggcgatgttgtactacatgcggtgacagatgccattttaggtgctgttgcgatgggcgatattggtacattatttcctgatacagatccggcttataaaggtgcggatagccgagtattattgcgcgaagccttttcaagagtgatggctaaaggttaccgtattggtaatcttgatgtcactattattgctcaggcacctaaaatgctacctcatactccacaaatgcgtgtcaatattgctgaagatctccattgtcatgtcgatgatatcaatgttaaagcgaccactactgagaaattaggttttgtaggacgcaaagaaggtatcgcttgtgaagcggtggtgttattaatcaaagagtctttatctcaatga

SEQ ID NO: 295442 - DNA, 747 bp, Proteus mirabilis
atgaatataccaaactcaacttttcctattgtggcggttattcccgctgccggcataggtagtcgaatgcaagcaacctgcccgaagcaataccttaaaattggcagattgactatccttgaacatactattaatgcgctattaaaacatccacgcatttcgcaaattattgtcgcaattaacccagaagatgactatttttatcacctagcccttgctaaagataaacgaattattgtcgttaaaggagggggacaacgtgctgattcggtattatcagggcttcgctatattacagaacatcttgcgcaaaatacatgggcgctagttcatgatgcggcaagaccttgcctgtcctttagtgatttggataatcttattcaaatcattgatgataaccatcttgatcctcaattttgtggtgggatcttagcctctcctgtgcgtgatacgatgaaacgtagtcatcaacaagataaccatattgaaaaaacagtggcaagagacacgctatggcatgctttaacgccacaatttttcccagcggccttgttaaaacaaaatcttgaaaacgcattggcacaaaacgtacccattactgatgaagcatctgcgatggaatttggtggatatgaacccttattagttaaaggccgtgcggataatataaaagtcacacaaccagaagacttggctcttgcagaatttttcctctctcgacaaattaccagcataaggaacacataa

SEQ ID NO: 295443 - DNA, 321 bp, Proteus mirabilis
atgattagcccattcattttgggggtggtaatggggaaattaacagtcttacttctgatcttacttggttttctacaatattcattgtggttaggtaaaaatggtattcatgattacaacaaagtaagtcaagaagttgaatctgcattagcgcaaaacgcacaattaaagtcgcgtaatgatcgcttatttgcggagattgatgacctcaatggcgggcaagaagcattagatgagcgtgctcgtagtgaactaggcatgataaagcctaatgaaagcttttatcgtattgttaatgataaatcccaaccacgtcgttaa

SEQ ID NO: 295444 - DNA, 615 bp, Proteus mirabilis
gtgacgatacatcaagatattgtctggcatcctcatcaaatagggttaaaagagcgtgaagcacaacaggtacacaaaggatgtgtactttggtttactgggttatctgggtcaggtaaatcaacactggctgatgcgctagagcaaaccttatatcagtactcgacactccatgcgcctatccgcacctatttattagatggtgataatctacgccatggtttatgccatgatcttgggtttagtgaacaagataggcatgaaaatattcgccgtgtaggggaagtggctaaactaatggttgatgccggattaattgtcttaacagcatttatttctccttatcagcaagatagacaacgagtaagagaaaggtttgctcaagggcgatttattgagatctttgttgatacacctttagccctttgtgaagcacgtgatcctaaaggcctctatcaaaaagcgcgacgaggcgagatcaaacagttttccggcattgattcaccttatgaaccacccactgcgccagaaattcatttagacggctcactcgcgattaatgagcttacacaacaaatcctcgcttatttacagcaacaacaaatttaccgctaa

SEQ ID NO: 295445 - DNA, 1458 bp, Proteus mirabilis
atgggacttgcagccatcaaaaccaaccaactgatcgccggtgaaatagcacaatcaggtggtgtagaaaattatttaaaaacacaacagaacaaagggttattacgttttttaacctgtggcaatgttgatgacggaaaaagcaccttaattggtcgcttacttcatgatacgcggcagatctacgaagatcagctctccaccttacaaaacgaaagtaaaaagattggtactcaaggtgaaaaattagatctcgctttgctggtggacggtttagcggctgaacgagagcaagggatcactattgatgtagcttatcgctatttttcaacagccaaacgaaaatttattattgccgatacgccgggacatgcacaatatacccgcaatatggcgacaggagcatcaacgagtacgctttctattctgctgatcgatgctcgaaaaggggtacaagagcaaactcgccgccatagttttattagcacactccttgggatccgtcacttagtggtcgcgattaataaaatggatctacttgattatcaacaagagatctttgagtcgatccaacaagattacctgcactttgcacaacaattaccgcgcgatcttactatcgaatttgtgcctatctctgcactggagggagataatgtagtatctccttcattaaatatgccttggtatacaggaaaaacactgttggcattacttgaagatgcgccggttaaatttaaattaggggctaaatctcaaagattgcgttttcctgtacagtatgtgaatcgccctgatttagattttagaggctacagtggcacagtttcatcaggctctctttatcaaggacaacaaatcaaagtattaccctcaggacagcgttcaaccattaaacgtattgtgacttttgatggcgatctgactcaggcgcaagtgggtcaagcgattacactgctgttagcggatgaaatcgatattagtcgtggcgacattattgttgatgctaacgataccactgctaatgttagcaatcatgcgttggtggatatcgtatggatgtcagaacaaccgttagtacaggggcaaacccttgatatcaaagtagcgggcaaaaaaagtcgtgccaaaatagagaatattcactatcaagttgatgtggataagctcactcaacaagtgaccgaaagtttagcgctaaatgccattgggcatgttgaagtgttatttgaagagccattggtgctggataactatcaacttaatgcacaaacaggggggcttatttttattgatagattaagcaatgtcacggtgggtgctggtcttattcgagaaattcgcgacaacgtgcaacccacaacttcccaatacgatgcatttgaaattgaactcaatcagttgatccgccgccattttccgcattggggcgcaagagacttactgggaggaaaatag

SEQ ID NO: 295446 - DNA, 909 bp, Proteus mirabilis
atgaatgaaacacaattaacccatcttcagcaattagaagcagaaagcatttatatactgcgtgaagttgtcgctgaatttgaaaatcccgtcatgctgtactcaataggcaaagattcttcggtgatgttacatctagcgcgtaaggctttttatccggcgaaattaccttttcctcttttacatgttgatacgggttggaaatttcgcgagatgtatgagtttcgcgataaaacggccaaagagtatggttttgatctcaaagtttatcgtaatccccaaggggcacaattggggatcaatccctttattcatggtagcgccaagcatacagatatcatgaaaacagaaggtcttaagcaagctctggataaatatggttttgatgccgcatttggtggggcgcgtcgtgatgaagaaaaatcgcgtgctaaagagcgtatttactcatttagagatagatctcatcgttgggatccgaaaaatcaacgtccagaattatggcaaaactacaacggccaaattaataaaggggaaagtattcgcgtttttccattatcaaattggacggagctagatatttggcaatatatctatttagaaaacatcgatattgtgccgctctatttcgctaaacaccgtccagttattgagcgggatggtaccttgattatggttgacgatgatcgaatcgacctaaaagctggagaggtgatcacacaacaaaaagtacgctttagaacattaggctgctggccattaacgggcgctattccttcacaagcagacacattacccgccattattgaagagatgttaatttccaccagtagcgagcgacaagggcgtttaattgacagtgatcagtctgcttcaatggaacttaaaaaacgtcagggttatttttaa

SEQ ID NO: 295447 - DNA, 1422 bp, Proteus mirabilis
atggattacctacccttatttgtggaattaaaacagcgcccagtattactggttggcggtgggcatgtcgctgcgcgtaaagccgtactgttattaaaagcgggcgctcggttacgtgttatcgcgccacagttatgtgatgaattgcatcttgcttatcagcaaaatcaaattgagtggattgctgggcaatatcaggcagagcatttacttggcatgatgttggtgatcgtggcaacagacgataaggtattaaatcaacaagtgtatctagatgcgcaagcacgccacatttttgtcaatgtcgtcgactctcaaccccaatgctcttttatctttcctgccattatcgatagaaatccgatattaattgccatttcatcagcgggcaaagcccctgttttagttcgtatgatacgggaaaagctagaggcattattgcctacctcattagggactatggcgactattgcggggaaatggcgcaataaagtgaaacaaaaactgactggttttcaagcacgttgccgtttctgggagcaagcgtttagcggcaaatttgcctcattagtggcaagtggtcaattaatacaagcgcaagcacagctcgaacaacaactgtctcatccagatagcccacaaggtgagcttgctttagtgggagctgggccgggtgatgccgggttattaaccttacgaggtttgcaaattatccagcaggccgaggtggtactttatgacagtttagtcagtgcagacatcttagaactggtacgccgtgatgctgatagaatttgtgtgggtaaaagagcggggcaacacagtacgttgcaagaagaaatcaatcaattgatcgtgaaatatactcagcttggtaaacgagttgtcagactaaaagggggcgatccttttatttttggacgcggaggagaagagcttgaaattgcggtacaacatggcattccttttcaagttgttcccggtgttaccgcagctagtggggccagtgcttatgcgggtattccattaactcatcgtaactatgcgcaaagtgtcacttttatgactgggcattgccaatcaggggggatagagccagattggcaagctttagcgcaagctaatcatacgttagcaatttatatgggaacgacgaaagcagaacttattagccagcgtttaatagagcaaggtcgttcaccactcacccctattgccgtcattagttgcgctacacgccatgatcaacagatcttaacgggaaatttaacacaattagcgcaattagctaagcaagctcccaccccggcattattaatcgttggagaagttgctgcattacatcaccaacttgcgtggtttggtgatagacaaactcaacatacctctgccatccactcatctttggttcattttgcctaa

SEQ ID NO: 295448 - DNA, 732 bp, Proteus mirabilis
atgagtcgattatcactttctcagttggtgttgctatcgattgaagagcagcgactggcgcttgatgaaatcaaccaacaattagagcaaaaaacggcgatagagcgggtgatttgggctttagaacatcttcctaaccagtttgttttaagctcaagttttggtattcaagcggcagtttgtttgcatttgcttaccagacaatatcccgatatacctgtaattttgacagacacaggttatctctttcccgaaacatatcaatttattgatgaattaacctcttcactacaacttaatttaaaagtatatcgcgctgaaatatcttcatcttggcaagaagcacgctacggcaaactttggttgcaagggattgaaggtatcgaacgttataaccaaataaataaagttgcgccaatggaaaaggcattaaaggagttacaggcgaagacatggtttgcagggctacgacgccagcaatcaaaaagtcgagagcatttacctgttttatccatagcgaaaggtatttttaagttactaccgatagtcgattgggataataaacaaatttatcaatatcttaaacagcataatttaccttaccatccattatgggaacaaggttatctgtctgtgggtgatacgcatacgacacgcaaatggcaagagggaatgagtgaagaagagacgcgattctttggcttaaaacgtgagtgtggattacacgaataa

SEQ ID NO: 295449 - DNA, 1731 bp, Proteus mirabilis
atgaaatcacaaactcaagcgcccttagtggttgaaggaaaactatctgatagtgaacgtatgaaaaaagagagtaatttcttacgaggcactattagtgatgatctacaaaatggtctaaccggtggttttgagggcgataattttttattaattcgttttcacggtatgtaccaacaagatgatagagatattcgtgccgagcgtgcccaacagctattagagcctcgtcatgccatgatgttacgttgtcgtttaccgggcggtgtcatcacaccaaagcagtggctaagtatcgataagtttgctagtgaaaatacgctctatggcagtattcgtattactaatcgtcaaacttttcaatttcatggcattttaaaaggtcatgttaaaccggctcaccaaatgctagcgtcaacaggccttgatgctcttgcaaccgccaatgatgttaatcgaaatgtgctatgtacctcaaaccctgaacaatcttcattgcatcaagaagcttatgaatgggccaaaaaactatccgaacatttattgccacgcacccatgcctatgcagaaatttggttagataaagagaaagtggcgacaacggatgaggagcctattttaggtgaaacctatttacctcggaaatttaaaacatcggtggtgatccccccttataacgatgttgacttgcatgccaatgacatgaattttattgccatcgcagaaaatgggcatttggttggttttaatgtgctagtcggtggcggccttgcgatgacccatggtgataaaaaaacctttccgcgtttagctagtgaatttggttatattcctattgataaaacattagcagtcgctgaagcgattgtgacgacgcaacgagattggggcaatcgtactgaacgtaaaaatgccaaaaccaaatacaccttagagcgtgttggtattgaaacatttaaacaggaagttgaacgtcgctcaggcgttatgtttgatatgatccgaccgtatcaatttactcaccgtggtgatcaaattggttggttaaaaggggttgataacaaatggtatctaaccttatttattgaaagtggtcgattaatcgataaacctaatgcgccgttaaaaacgggggttgctgaaattgccaaagtgcatcttggtgactttcgtttaacagctaatcaaaatttgattgttgctggtgtaccagaggcacagaaagagcagattgaggcgatagcgcgtcaatatggtttaattaatgatgaggttacaccgctgcgtaaacatgccatggcgtgtgtttcatttccaacctgcccattagccatggcagaagcggagcgtttccttcccgcatttaccgatacccttgataatatcatggctaaatacggagtcagtgatgagcatattgttgtacgtgtaacagggtgtcctaacggttgtggtcgtgcgatgttggcggaagtcggactggtgggtaaagcccccgatcgctataacttacatctaggaggaaaccgcatggggactcgcattcctagaatgtatcgtgaaaatatttcatcacaagaaatcattgaaattcttgatactttaattggtcagtgggctatttcacgtgaattaaatgaaggttttggtgattttcttattcgtactgatgttatcaaacccgttgttaattcagccattgatttttatgaagtgcaggaggtgatatga

SEQ ID NO: 295450 - DNA, 1815 bp, Proteus mirabilis
atgagcaatcaacccccattattatcaatgcttccattaacacaggagcaattgaataaattacaggatgtgacgaaagacttaactccagcccaatttgcttggctttctggctatttttgggggcaattcaatcagcattcatccactaaagatgaactggtaagtgtacaaagtcaggttccccaacaagaaaccatcaccgtgatatcagcatcacaaactggcaatgcacgtcgtttagctgaacaattacgcgataaattggttggtaatcaacttaatgttgagctctatagtgcgagtgaatataaatttaagcagatccacaaaacgacaaccttaattattattacctcaacacagggggaaggtgaacctcctgaagaagccatcgcattttataaatatttgcactctaaaaaagccgcgccaatgaagcaaacggcttatgctgtactgagtctcggcgatagtagctatgaacatttttgccaagcaggtaaagattttgatcatcaactggcgcaacttggcgcgaccagtctattagaaagattagatgcagatgttgattatcaagctgacgctgataaatggataactcagctgactgatattttaaaaatacgtgtacctgagcaaaacactcaagtattgcaacaaacacaatcaggaacaaccgacagtgtcgataccgcacgctaccatcgtgatgcaccttttagtgccactttattaactaatcagaagatcaccggtcgacattcagataaagatatccgtcatattgaaatcagtctagcaggctctgaattgcaatatcttcccggagatgcactaggagtatggtttaagaattcggaagaaaaagtggatgagcttattaccctattatggttaacgggggatgagcaggtaaatgttaaatcacaaacattaacgttaaaagaagcattattgcatcatgttgaattaactcaaaatagtgcaccaattattaaagcgtatgcccaattatcccgccacgaagagttattatcgctggtggctgataaaagcaaacttcagcaatatgcgcaaacctacccaattaatgaaatggtacgtcaatatagtgcgcaacctaatgctcaagagtttattgatatattgcgcccattaactccacgtctttactccatcgcttcatcacaacaagaagttgatgatgaagttcatcttaccttaggtgttgttcgttataacgtcgatcagcgtgcttatacaggaggtgcctcagggttcttagctgatcaacttcaagaaggcgatacagtaaacgtttttattgaacgtaatgatcattttcgtttacctgaagataatcaagtccctgtgattatgattggcccggggacggggattgcgccttttagagggtttatgcaacaacgtgaaagtgaaggtgcgacggggaaaaactggctcttttttggtaatcctcactttgtagaagatttcctttatcaagtggaatggcaacgttatgtcaaaagcgggttgttaacacgtattgatttagcatggtcgcgtgatcaagccgataaaatttatgtgcaagataaattacgggagcaaggtcaggaaatttggcaatggttacagcaaggtgcttatctctacgtttgtggtgatgcatcaagaatggctaaagatgttgaacaaacattgttagaaatagtaatgacccatggcaataaaaatattgaacaagcagatgattatttaagtgagctacgtttagcacgtcgttatcagagggatgtttattaa

SEQ ID NO: 295451 - DNA, 363 bp, Proteus mirabilis
atgataaccaccatctttaaagattttcagtttgaagctgcgcaccacttaccccatgttcccaaaggccataaatgtggacgtttacatgggcattcatttttagtgagattagaaatcactggtgaagtagatgcgcagtcaggttggctaattgattttgctgatgtgaaagccgcatttaaaccgactcttgataggctcgaccactattatcttaatgacattgaaggtttagaaaatccaaccagcgaagtactggcaaaatggatttggcaacaagttaaaccatcactccccctgttatccgccgtgatggttaaagagacatgtaccgcaggatgtatttatcgtggtgagtaa

SEQ ID NO: 295452 - DNA, 672 bp, Proteus mirabilis
atgcaataccccattaatgaagtgtttcaaaccttgcaaggtgaaggtgtttttactggcgttcctgcgctttttgttcgattacagggatgccctgtaggatgtagttggtgtgataccaaacatacttgggaaaaagaagagagcaagaaagtccctcttggagatattcccattaaaacacaagaaagtgatacttggggtatagccactgtcgaagatattttatcacttttccggcaacaacgttatagcgcaaagcatgtggtgataacgggaggggaaccctgcctttatgacttacggcctttgacggaaggcttagaaaaagcaggttttgattgccaaatagaaaccagtggcacacatgacatcctctgtagtgaagcaacatgggtaacactttcgccgaaagtcggtatgcgaggtggattgagtgttttatctagtgcgattaatcgtgccaatgaaattaaacaccctgttgctcgtgaaaaagatatcgaagcactggatgatttactgcgattaagaactcaacaacctatggcgatcgttgccttacaaccaatcagttgtaaagagagtgcaacagcgttatgtattaaaacctgtattgagcgtaattggcgtttttcaatgcaaacacataaatatttaaatatcgcctag

SEQ ID NO: 295453 - DNA, 1368 bp, Proteus mirabilis
atgcaaaaagagaataaactttcacgaggactatcagggcggcatattcgtttcatggcgctaggctctgctattgggacagggcttttttatggttcagccgcggcgattgaaaaagcaggccccgctgtacttcttgcttatcttattggtggtgccgcagtatttatggttatgcgcgcattaggggaaatggcggtccatcatccagtggcgggttctttttcacaatatgctagccattatatgggaccattagccggatttttaactggctggaactacgtttttgaaatgcttatcgtttgtcttgccgacgtaaccgcatttggtttttatatgaaactttggtttcccgatgtcgaccaatggatatgggtattaggcatagtctgttttattggtgccttaaatttatgtcatgtgaagatatttggtgaaatggaattttggctctctatcgttaaagtgactgcgattattgccatgattatcggtggtgtagccataatgatctacggctttggtcagcaaacagaacatccaattggtatttctaacctatgggagtttggtggctttatgccaaatggtatagaaggcattattgcctcactcgccattgtgatgtttgcctttggtggtattgaggttattggtattaccgccagtgaagctaaagatccagaaaaaacgatccctaaagctatcaatgcggtgccatttcgtatcttactattctatgtactgaccatttttattttaatgtgcatcttcccatggcaacaaattggccataacggtagtccatttgtacaaattttttccaatctgggtatcaattcagccgctaacattcttaatcttgtggtgatcaccgccgctatctctgcgataaacagtgatattttcggtgctggtcgcatgatgtacggcatggcacaagaagggcaagcacctaaatcctttatgaaactgacgcgtaacggtgtaccttggatgaccgtattagtgatgtcagtagtgctattattaggggttgtgcttaactatcttatcccagaaaaaatcttcgtacttattgcctctatcgcgacatttgccactgtatgggtctggttaatgatcttactttctcaagtggctatgcgtcgccaaatgagtgctgaagaggcgaaaaaactaaaattccctgtaccattttggccaatagcacccgccattaccattatttttatggcatttgtgatagcaattttaggctactttgaatcaacccgaatggcattaatcgttgggttagtatgggtggctattttaactgttggttactatattggtatcaaaccaagaataacgcagaaataa

SEQ ID NO: 295454 - DNA, 1182 bp, Proteus mirabilis
atgacgcaaagtaataagtgttttaatactcaagcaatacattatggctactctccgttagattatcagggggcattggtgcctcctgtttttcaaacgtccacttttgcatttcccacggctcaatatggtgctgattgttttgctgggaaagaaaaagggcatttttatactcgtatatctaaccctacattggatttattagaaaaacgattagctcagttagagcaaggagacgcttctgttgttttttcttccggtatgggagctatcacttcaacatgttggtcattattgcagccaggagatgaactcattgctgatatgaccgtttatggttgtacttttactttctttaatcatgggctggctaaatttggtatcactatcaaacatgttgatttaaccgatcctgaaaaattagccgaagcaattacagatagaacaaagcttattttctttgaaacaccggctaatcctaatatgcgggttagtgatattgaaaagatcgctaatattgcgcaccaacatgatgttttagtcatggttgatagtacttactgttcaccttatttacaaaagccactaaccttaggcgcggatattgtcgtacattctatgactaaatatttatcaggtcatggtgatgtgatggcgggcgcaattatcactaattatcaattagcagataaaattcgcgttgagggcttaaaagatatgacgggggcttgtttatcacctcatgatgcagcactcgtcttaagagggataaaaacgcttagcattagaatggaaaaaatttgccagaatgcgcagcgtattgcgcaatttcttgaaaatcatcctaaggtggcaacgatttcatatcccggattaaattcttttcctcaatatgaacttgccaaaaagcagatggcgttacctggtggcatgataagtatggagttgaatggtggaataaaagctggcagagaatttcttaatcgcttaatgctttttactcgagcggtgagtttaggtgattgtgaatcattggctcagcatcctgcgactatgactcatgcgacatacagtgcacaagagcgtcaacgccatggtattagtgatggattaattcgtttatcaatcggtcttgaagacgttgatgatttaattgctgatttaacccaagcgctcgcttaa

SEQ ID NO: 295455 - DNA, 399 bp, Proteus mirabilis
atgagtgaaaataatttaagcccaaatgaaaaaccgttgttatctaatgaagataaaattcatttagaacatttactagaaaaaataaggcctttattagcattaaagcgcctagataatattgttgatttattatctttagcctcagataccgtcgatattatggataacgcaacggtagaaaaattggcggttgcttttgaagaaacattaattccggtttgggaattaactacggcctttaatatggctaaaaaagaatctctttatcaggataaaaaatataccttaggtgcgactttttcattattaaaaaatcctgacaccttaaaaggattaactattgtattaaggacattacaaattattggggaaaataatcagaaaatagaagtttaa

SEQ ID NO: 295456 - DNA, 1194 bp, Proteus mirabilis
atggcaacaaaaaatatagttattattggcggtggtacggggggtactattctcgctaatatcttagctaaaaaattaaatgatgaaatattttcaaaaaaaataaaaattacgcttatttcagataatccataccattattacaaacctgcatttatgtatattgcatttaaccttttcttaaaagaagagttaatgcgatcacaaagaagtttattaagaccagaaattgaatttgttatagataaagctgaaagtttcgattttaataataaaacagtttattgttgttctaagaaaaaatatcactatgattttctggtattagccacaggatgtgttcctcgtcttgatagaattgaaggtttagctgaagctggaaatcatttttatcaatatgaagctgcacgaaaattagcagataaaattgctaccattgaaaaagggcgtgtatttatcacggtaactttccctgaaacgccaaatgtacctcaccaatgtggtattgcaccaatggaaacaaccttgatgctggatgaatttttacgtcagcgacgggtaagaagtaatatagaaattgtttatacctatcctaccgtagctcaactattaagaaattgtctttttatgcagcaagaagtttgtgaagtacttcctgcggtcttttctgaacgagatatcaaagcaaagcgtggttttacattaagtcatgttgatcctgataagaaaatcgcctattcgaaagaaggagaagcagagccttttgatatcttaatgagcacacctcctataacagcggtagaagccattcgtaatacaggattaagtgaatataacaatggtgaaggctggctaccgaccgaccctgaaacattacaggtatatgggttaaatcaagtttatgtgttaggtgatacggttgatttgcctattagtaaggccggtggtagctgtcataaccaagcgggtgttatagctaataatatttgtggtgaactgcgttatggttatccggctgcaatttatgatggtcgagtacaagctgttgcccaaatgggattatcagcgggtatgccattacagtatgactataaacatgatgttattccaacacctccaacaaaactcggtggcatgttacgtaacggttataaccggggcttatattgggcaacggtcagaggattattgtag

SEQ ID NO: 295457 - DNA, 786 bp, Proteus mirabilis
atggcgaaaaaaccgacttattcagtacgttttgtagcaggtcaacctgtagaaaggattgaacctagtctacctttaggccaaatagaagagatgctaccgattgggatgccactatatacagaaggcactttaaaaattgctgtttggaatatttacaaacagcaacgggtcaattggcgtagtatgctggaaacgcttgccaccgatactcaactattacttttacaagaagcgcaaacaacacctgaattagttcgttttgcgggtaaaaaccatttaattgctgatcaagttcctgctttagcctttcaacagcaccctgcgggtgttatgaccttatcaagttctcatcctatctattgttgcccattaagagaaaaagagccttttttaaggcttgctaaatctgcattaattacggtttatccacttattactggtgagcatttaatggtgataaatgtacacgcgatcaattttagtttcggtgttgatgtttatcaaagacaattaaacagcttatcgactcatatcatcgatcataaagggcctgttattttggcgggggattttaacgcttggagtcgtccaagagttaatgtgttaaagcgttttgctagaagattaaaacttaaagaagtgatctttgaaaaggatttacgcactcgcgcttttggtaagccacttgattatatattttatcgtggattatcactaaataaagcggaaatcttaatcacagatgcatctgatcataatcctttggtggtaacattttcttaa

SEQ ID NO: 295458 - DNA, 216 bp, Proteus mirabilis
atgattgctcctattctagatgaagttgcaacagaatacgcgggtaaattaacagttgcgaagctaaatatcgatgaaaaccctgcgacagcaccaaaatacggtattcgtggtatccctacactgattttattcaaaaatggtgcagttgctgcgactaaagttggtgcattgtcaaaaactcaattaaaagagttcttagacgaaaacatctaa

SEQ ID NO: 295459 - DNA, 1260 bp, Proteus mirabilis
atgaatcttaccgaattaaaaaatacgccggtatcagaactgatagcacttggcgaaaatatggggctagagaacctagctcgaatgagaaaacaagacatcattttctctatcttgaagcaacatgccaaaagtggagaagatattttcggtgatggagtgctggaaatactacaggatggctttggcttcctacgttcctcagacagttcctaccttgctggcccagatgatatctatgtttctccaagtcaaatccgtcgttttaaccttcgcactggtgataccatagcagggaaaattcgcccacctaaagaaggtgaacgctattttgccctccttaaagtgaatgaagttaactttgacaaaccagaaaacgcccgcagtaaaatcctctttgaaaacttaacaccattacatgctaataaccgcttacgtatggaacgtggtaatggttctaccgaagatttaactgcccgtgtactcgacttggctgcacctattggtcgtggacaacgtggtttaatcgttgccccaccaaaagcgggtaaaacaatgttgctacaaaatattgcggccaacattgctcataactatcctgattgcgtattaatggtacttcttattgatgaacgtcctgaagaagtcacagagatgcaacgtttagttaaaggtgaagttattgcctctacctttgatgagccagcatctcgtcatgtgcaagtagcggaaatggttattgagaaagccaagcgtttagtagaacataaaaaagacgttatcattttattagactctattactcgtttagcccgtgcttataacaccgtagtaccttcttcaggaaaagtattaaccggtggtgtggatgcgaacgcgctacatcgtccaaaacgtttcttcggggctgctcgtaatgtagaagaaggtggtagtttaaccattattgcgactgcattggttgatactggctctaagatggatgaagttatctacgaagagtttaaaggtacaggtaatatggaattacacctgtcgcgtaagattgcagaaaaacgagtattcccagcaattgattacaaccgttcaggaacacgtaaagaagaattactgacatcgcaagatgagttacaaaaaatgtggatcctgcgtaaaattatccatccaatgggtgagattgatgcaatggaattcctcattaataaattagcgatgacaaaaacaaatgaagaattcttcgactttatgaaacgctcataa

SEQ ID NO: 295460 - DNA, 1077 bp, Proteus mirabilis
atgagcacaaatgttttttacgtgttcctattttctttcgctttcctatttgtagctcgtaaggtggcaaagaagattggactcgtagataaacctaactatcgtaaacgacatcatgggttgatcccccttgtaggtgggatttcagtctattttggtattgttttcgctttttatgtttcagatatctacattcctcacaaagagctgtatttgatttgtgcggggatacttgtttttatcggtgcgcttgatgatcgttatgatatcagtgtcaaaatcagggcaactatccaagcgttagtgggtattgctatgatggtattcggtggtttaaaacttgaatcacttggtcatgcttttgggccttgggatatgcatttagggccttttggttatatcgtcacgctatttgctgtttgggctgcaatcaatgcctttaatatggtggatggtattgatggtttattaggcggtctttcttgcgtttcgtttggtgcgctgggtattttactttaccaaagtggaagctctgcacttgcgttttggtgcttctcatttattgccgcgattttaccttatatcatgttaaaccttggtgtttgtggtaaaaaatttaaagtctttatgggcgatgcgggaagtacgctaataggctttactattatttggctattaatttcctctactcaagttgatcctcatccaatcaatgcggttactgcattatggatcattgctattcctcttatggatatggtggcaattatgtaccgccgtttacgtaaaggaatgagtcctttttcaccagaccgtcaacatatccaccatttaattatgcgagcaggttttacccctcgccaagcttttgttttgatcacgcttgcagccgcggtgttggccgctattggtattattggtgaaaacttatcttttgtaccagaatgggtaatgttggcattgtttttgcttgcttttgttatgtacggttattgcattaaacgcgcgtggcgagtcgctcgttttattaaacgatataaacgtcgcctacgtaaagcgacacaacttaagcattaa

SEQ ID NO: 295461 - DNA, 1059 bp, Proteus mirabilis
atgaactcggaaaataacgtctcccgacaggggttttcacccgataatgaactcgatattcgaggtctttgttgtgcactatggtcaggaaaacgctggataatagggttcgcgctgctttttgcgctgattgcattaggggcatcttacttgatgcaacctaaatggagcgctattgcgatgacagagagacctactgtgaataatttaggtagttattattctcagtctcagttcttacgtaatcttgatacgcaaattaatccgtctgtaactgtttctcagttaagtatccctgatgaagcttatcaagagtttgtaacacagatttcagcttttgatacacgacgtgagttttggctgcaaacggattattacaaacaacgtaaagaaaatgatgcgcaagcagacgcggcattattagatgagctcatcaataatattcaatttacaccggctgatgagaagaaattggttaatgatcaattgaaactcattgctgaaacggccaacgattcgagtcaactgctcaatgaatatatcgcttttgcgaataaacgtgccgcagagcatctaaatgaagaagtgattgccgcatgggcaactcgaacacaatcgatgaaagccttagtgaaacgccaagaaatggccgctcaagctgcttatcaacgacaaattaatttactcaaacaatcgattaaagttgctgagaaacaaggtatttctcaaaaacagacctcgattgcgatagatgaattaccggattcgaagctgtttctactcggcgtgcctttattgcaatcacagttagaaacattaatggcaacaggaccagattttgatagtgattatgatcaaaatacggcaatgttatccaccctcgcggtaggtgctaaattacaagataacttccaaacttaccgtttcttacgtacacctgaagatcctgtgaaacgagatagtcctcgccgtgcctttatgatggtgctttggggcgctattggtgttttagtgggcgcgggtgtggcattagtcagacgtagttcattaaaaaaataa

SEQ ID NO: 295462 - DNA, 1131 bp, Proteus mirabilis
gtgaaagtgttgactgtttttggcacacgccctgaagcgatcaaaatggcacctttagtgcacgctttagcaaatgatgattcgtttgaggcgaaagtttgtgttacggcccaacatcgagaaatgcttgatcaggtattaaatcttttcgagatcaaaccagattatgatctcaatattatgaaaccaggacaagatttaacagatataacctgtcgcattttagaaggtttaaaacctgttctagcgtcatttcaacctgatgttgtgttagtacatggtgatacaaccaccaccatggcggcaagccttgctgctttttatcaacaaatccccgtcggtcatgttgaagcgggattacgtaccggtaatctctattctccttggccagaagaagcgaatcggacaattgccggccatttggcgatgtaccattttgctcccactgaaactgcaaagttaaatctggtgcgagaagcggttgcggataaaaatatttttgttaccggcaataccgttattgatgcgctattttgggttagcgagcgagtgatgggaaatcaaaccctgctcgatgaacttgctgtgcaatatccctttattcagccagaaagaaagatgatcttagttacgggacatcgcagagaaagctttgggggtggttttgagcgcatttgccaagcattagcagagattgcattggctcaccccgatgttgaagttgtctatcctgttcacttgaatcctaatgtaagtgaacccgtaaagcgtattctgcatggaattaataatattaaattaattcaaccgcaagattatctgccttttgtttatttaatgaaccacgcttaccttattttaactgattcaggtggtattcaagaagaggcgccttcattaggtaaacctgttcttgttatgcgcgatacaacagagcgccctgaagcagttgaagccggttctgtgcgtttagtaggtacagatactaaacgtattgttagcgaagtaacctctttattgacagacgaaaacgcatatcaccaaatgagtaaagcaacaaatccttatggtgatggtcatgcctgccaacgtattcttgaagcattgaaaaataatcaggtgacattatga

SEQ ID NO: 295463 - DNA, 1263 bp, Proteus mirabilis
atgagttttgaaactatttctgttatcggcctcggctacattggattaccaacagcggcagcttttgcctctcgtaaaaaaagtgttattggtgtggatgttaaccaacacgctgttgataccattaataaaggtcaaattcacatcgttgaacctgatctggataaagtggtaaaacaagccgttgaagaagggcatttaaaagcctatacgacaccacaacccgcagacgcttaccttattgcagttccaaccccctttaaaggcgagcatgaacctgatctggcttatgttgaagccgctgcgcgttcaatagcacctgtacttaagaaaggtgatttgattattttagaatcaacctcacccgttggaacaacagaacaaatgtcacagtggcttgcgcaggcacgtgaggatttaactttcccacatcaacaaggtgaaaatgccgatattgatatcgcttattgccctgagcgtgtattgccaggacaagtgatggttgaacttatccgcaatgaccgtgttgtggggggcatgaaccgtaaatcatcagagcgtgccagcgagttatacaaaattttccttgaaggtgaatgtgttatcactaatgcccgtactgcagagatgtgtaagctaacagaaaatagcttccgtgatgtgaatattgcatttgctaatgagttatccctgatctgtgccgaccaagatattaatgtgtgggagctaattagtttggctaatcgtcatcctcgcgtgaatattttacagccgggtcctggtgtcggtggacactgtattgccgttgatccttggtttatcgtgtctcaaaatcctaaacaatcacgcttaattcatactgcccgtttggtcaatgatggcaaacctgtatgggttatcgatcaagttaaagccgctgtggcggattgtttaactgaaaccggtaaacgtgctaacgagatcaaaattgcctgctttggtttagcctttaaacctaatattgacgatttacgtgaaagtccagcaatgaatatcacccaacaagttgctaactggcatagtgggaaaacatttgccgtagagccaaatattcatgaattaccgactaaattaaaaggtatcactgaattagtctctacagagcaggcattaaaagaggcggatattgttttaatgttagtcgaccatcaacagtttaaagcgatacctggtagccaagttacccaaaaatggattgtcgatacaaaaggagtatggcgttga

SEQ ID NO: 295464 - DNA, 1068 bp, Proteus mirabilis
ttgagacgtattttagtcacaggtggcgccggttttatcggctccgcggttgttagacatattattgataacaccaatgacagtgtcgtcgtggtagataaactgacttatgcgggaaatttagagtcacttgccccagtggcaaacagtgaacgttacgcgtttgaacaggttgatatttgcgatcgcgctgcacttgatagtctatttgcgcaatatcaaccagatatcgtgatgcatttagccgcggaaagccatgttgaccgctctattgatgggcctgcagcttttattgaaactaatattgttggtacttacaccttattagaagctgcacgtcatttctggtcagtattacctgaagataaaaaagcggcatttcgtttccaccatatttcaactgatgaagtgtatggcgatttagaaggaacggatgatttctttactgaaacgacaccttatgcaccaagtagcccttattcagcttctaaagcatccagtgaccaccttgtacgagcatggttgcgtacttatggcttgccaacattgatcaccaattgttcaaataattatggcccttatcattttcctgagaaattaatcccgctgattattttgaatgcaatttcaggaaaaccactgcctgtttatggcaaaggtgaacaaattcgcgattggctctatgttgaagatcatgcccgtgcattgtatttagtggcaacaacggctcaaccgggtaaaacatataatattggtggtcataatgaacgccgtaatattgatgtagtgacaactatttgtgaattgctcgaagagttgcatcctaataaacctgctggtgtggcgaaatatgttgatttaattacccatgtaaaagacagaccgggtcacgatctacgctatgctattgatgccgctaaaattgcagcagagttaggttggaaaccacaagagacctttgagtcaggtattcgtaagacggtattgtggtatttaaataaccaaacttggtggcaacgagtactagatggctcttatgcaggagagcgtttaggactgggtgattga

SEQ ID NO: 295465 - DNA, 882 bp, Proteus mirabilis
atgaaaggtattattttagcgggtggctctggtacacgcttacatccgataacgaaaggggtatcgaaacagctgttacctatctatgataaacccatgatctattatccgctctcagtacttatgttagcgggaattcgtgatattttgattatcaccactcctgatgatcttacctcatttcaacgtttattgggtgatggctctgcatttggtgtccatctgcaatataaagttcagccatctcctgatggcttagctcaagcctttattttaggggatgagtttattggtgatgagcactgttgtttagtcttaggcgataatatctattttggtcaagggtttagccccaaactaaaacaagttgctcaacgtcagcggggcgcaacagtatttggttatcaagtgatggatccggagcgcttcggtgttgttgaatttgatgatgatttcaaagtgctgtcaatagaagaaaaacctcaacagcctaaatcgaattgggcggtcactgggctttatttctatgataaccgcgtggttgattttgcgaaaaaggtgaaaccttctgttcgtggtgagcttgagataacctcgattaatcagatgtaccttgagtgtggtgagcttaatgtggagctattgggacgcggttttgcttggttagatacggggactcacgatagtttaattgaagccagtacttttgtacaaaccgttgaaaaacgtcaaggttttaaagtggcgtgtctggaagagatcgcttggcgtaatggttggttaactgacgaacaagtcagagaaagcgcaaaatcactcgccaaaacaggttatggccgctatctattggatttattacatgtccgtcctcgccaatattaa

SEQ ID NO: 295466 - DNA, 714 bp, Proteus mirabilis
atgtccgtcctcgccaatattaattatcttgagtgggagagcgattttttctccctcaatacaggccgtcttgagtttagtgctcaagcgcctgttttaacacaagataggcttgagcaatttacggttgttcatgccaaagttgcttcctatgatcttctactgattgataacttaacgcaattaggatttcaattcgctgaaggtgaaatagatttcaaattgccaattggcacagaaaatgcttgtggaaatattgctgaaatacattttcgcacagccaatgaaactgatatcccattattaatgacaacggcttctgcggcttttgtacaaagtcgctttcgagcgccatggtatcaagaaggtgatagcagccgtttttatgcattatgggtaaaaaaagcggttttaggcactttcgatgatagctgtttattgacgatggatcgcgaaaataaggttacagggtttgtaacattacgtcggatttctgagagtgaagcaagagtgggattacttgctgtaatgcccaatagaacaggacaaggcattggtaagcaactgatgtcggtggcgaagtattggtgtcaacagcaaggtttatcaaccctctatgttgcaacacaaattagcaatattgcagcttcgcgtttatatacacaaagcggtgctttaattgatagcactacttattggttatacaggggataa

SEQ ID NO: 295467 - DNA, 1131 bp, Proteus mirabilis
atgattccgtttaataaaccacccgttgttggcacagaattagagtatatgaaacaggcgatggaaagtggcaagctctgtggtgatggcaacttcacaaaaaaatgtgaaaagtggttagaagaacaatttcattgtcataagacgctgttaacaccttcttgtacagcatcgttagaaatggcggctatccttctggatatcaaacccggcgatgaagtgattatgccgagtttcacttttgtttcgacttcgaacgcctttgttttacgtggtgcaactattgtgtttgtcgatattcgtccagacaccatgaaccttgatgaaacaaaaattgaagcggcgattacggagaaaacgcgtgcgatagtgcccgttcattacgcaggtgttgcctgtgaaatggataccattatggcgatcgccaaaaagcataacctgtttgtcgttgaagatgctgcgcaaggggtaatgtcgacttataaaggtaaagccttaggaactatcggtcatattggttgctatagctttcatgagacgaaaaactattcatcaggtggtgaaggtggggcaacactgattaacgatccggctttaattaatcgtgcggaagtgatccgtgaaaaaggcaccaatcgtagtcaatttttccgtgggcaagttgataaatacacttggcgtgatattggctctagctatttgctgtctgatttgcaagccgcttatctttgggcgcaactcgaacaagccgataaaattaatgaacgtcgtttagcattctggcaaatctattacgatgcattaacgccgttagccgaacaaggtttgttaacattgcctgttgtaccagacggtttagagcataatgcccatatgttctatattaaacttaatgatatagagcagcgtacggcttttaatgagtatatgaaagcacagggcgtcttaacggtattccactatgtatcactgcatacgagtcctgccggaatgaagtttggtcgttttgatggtaaagatattttcactacacaagagagtgaacgcttggtgcgcttaccgatgttctacaacatgactgaagaagagcagcaaaccgttattcatcatattcgtcatttctttgcttga

SEQ ID NO: 295468 - DNA, 1257 bp, Proteus mirabilis
atgtcgttagctaaagcttcaatttggacagctgggtcaaccttgataaagatcggggctggcctgttggtcgtaaagttattggcggtctcctttggtccctccggagtgggacttgcgggtaacttccgccaattaattaccgttcttggtgtgctgtcaggggcgggtatttttaatggtgtaacaaaattgattgcgcaatatcaagatgatgcagtacaacgcaaaaatgtgttgggtacatcatcatcaatgatattgctgttttctacactacttgccattttatttcttatttttaccacaccaattagtcgcgttttatttggtgatgactatctgcaatatctagatattgtcagaatggttgcctttattcagatggggattgcctatgccaactattttctggcgatattaaaaggttatcgagatgcatctggaaacgctttagcgattattgcgggaagtttaattggtgttattgcctattatctctgttatctcgttgcaggttatcatggtgcattaattggcttagctttagtacctgcactgattttattgccagcgatggttatcttaataaaacgtaagcgttttgctctgagtgaattaaaaccaagttgggataaggctatcgccagtcatcttggtaaatttaccattatggcgttactgacttctatcactttacccgtcgcttatatcatgatgcgtaacttgttagcagaacattatagctgggatgatgttggcatttggcaaggggttagcagtatatcggatgcttatctacaatttattacagcatcattttctgtttacttattacccacactttcacgattaacgcaaaaaagtgagatagccaaagagataaccaagtcactgaaattcgtcttgccagcggtggcagtggctagttttatggtttggttattgcgagattttgccatttggttgctattttctgaaaaatttatcgctatgcgagagttatttgcttggcaactggttggtgatgtgttgaaagtaggggcttatgtttttggctatctggtgattgcaaaggctgctttgcgtttttatattctgacagaagtgagccaatttgccttattaacgcttttttcacgctggcttattcctgaacatggtgctttaggtgcagctcaagcctatatggcaacctatattatttacttccttctctgtagttctgttttcgtgatttattgcaggcgcaaatga

SEQ ID NO: 295469 - DNA, 1086 bp, Proteus mirabilis
atgacaactttgatttacgtactaggttcagacattgtgcatcataacaacacaatgttacgcttttttaacgaccacctcgtgactgaggcggcattaacgtataaacctcgttttatcgttgccagtaaagataactcgttatcatcactttatcctcatttagagattgagtgtttagcggataaaaaacaagtcgcgcagagagtggtagcattagctaaagcagatagaaaacaacgttttctatttctggggcaatttaatgcgcctatttggcttgctttattgatgggcaaaattaaacgtcatcaattctggtggcatatttggggtgctgatctttatcaggatgctaagcaattaaaatttagactgttttatctgttacgtaaacttgcgcaaaaacgggttggacgtgtgtttggtacacggggtgatctaaattattttgctcaatcaaatgttaatatccccgcgaatttgctctatttcccaacaagaatggatccggcgctgacgcttacagaaaagaaggccgttgatcctcagcatattactattgtattaggtaactcaggcgataaatctaaccgccatatcgatgctttaaatgcgattgctgaacaatttggtcataaagcaaaagtgatcattcctatgggatatcccgctaataacgaggattatattcagcaagtatctgatgcagcgacaaacttatttccaacagaacacgttgagatattacgacataatcttgcctttgatgattatctcgcactcttaaaaacctgtgatttaggttattttattttccaacgtcagcagggtattggtacgttatgcctgttgatccaatttgggatcccttttgtgattagccgtcaaaatccattttggcaagacttaacagagcaaagtgttcccgttttcttctctggtgataaacttgatgtggcgttaattgaagaagcgcaacgtcaattattgctactggataggaagaatatcaccttctttgcacctaactttatccaaggttggaagcaattgattgagatgagcacaggagacacccaatga

SEQ ID NO: 295470 - DNA, 1365 bp, Proteus mirabilis
atgacattggcgcaattggggggattaacccttgtctactttatctcgttggggtttattttattactgacctaccaagagtttcgtcgggtacgctttaattttaatgtcttcttttccatgctttatttgctgacattctattttggctttccattaacttgtttattagtctttcagtttgatgtggcagttgttcctgtcgatgccttattacacgctctattagccgctactagcttttatgcgatttattatgtcacttataaggtaagattaagaaaagcctctagcgagccttctaggccgttatttacgatgaatcgggtagagaccaacctaacttggatactgttagcgttaattgctatcgtcactgtgggcatatttttcttacaaaatggcttcttactctttaagttgaaaacatatagccaaattttttcaagccaagtatcaggtgtggcgctaaaacgctttttctatttttttattcctgcaatgctggtggtctatttcttaaagcccacacaacaacgttggctttttttcctttgtgcgacggtcggctttggcattttgacctatgttatcgtcgggggaacacgcgcaaatatcattattgcgtttgcactatttttatttattggcatcgtacgtggttggataaccttatggatgttaatcgctgcaggtgtgatgagcattgtcggtatgttttggttagcactaaaacgttacgggcttgatgtcagtggtgccgaagctttttatacctttttatatctgactcgcgataccttctctccttgggaaaatcttgcattattgttgaataattacgacaaaatcgagtttcaaggactcgcacctattattcgcgatttttatgtgtttatcccttcatgggtttggccacaaagaccagatgtcgtactaaattcagcaaactattttacttgggaagtgcttaattatcatgcaggacttgccatttcaccaacgttaattggctccttggtggtgatggggggcgttgtatttatccccttaggcgcggtggttgttgggcttattattaagtggtttgattggctctatcagcaggggttaaatgaacacaatcgctacaaatctgccattcttcaagcattttgctttggtgctatttttaacatgattgttttagcgcgtgagggcgttgattcgtttgtgtctcgcgtggtctttttctgtttagtatttggtgcctgtttaattgcagccaaactcctgtattggttatttgaaagtgcaggattagttcgtcactatgttattaatcaagtgcgcaataaacctcgtttagaacaaaaggaaaagtaa

SEQ ID NO: 295471 - DNA, 738 bp, Proteus mirabilis
atggatacaaattcaattccgaagtattccatccgtgggcacaatatctggggatttaaagatatggcgcattttttggattatctttatcaaggtgcgcaaattaaaagtggctctttaattgcgattaatgcagaaaaaatcttaaccgcagaaacagataaaggcctaaatcagttattagatgaagcggattatttgtacgccgatggcattagtgttgttcgcggcattcgacgtaaatatcctgatgcacaagtgtctcgtattgcgggagccgatttatgggaagctttaatggagcgtgccgggaaagaaggcacaccggtctttttggttggtggcaaacctcaggtattggcgcagacggaaagtaaattaaaggcacaatggaatgtgaatattgtcggtagccaagatggttactttacgccacaagatagagatgcactttttgaacgtatcaaagcttctggggcaaagattgtgaccattgccatgggctcacctaagcaagagctatttattcgtgcttgtcggcaagtacacccagacgcgttatatatgggcgtaggtggcacttacgatgtttttacaggacatgttaagcgtgcgccaaaagcgtggcaaaatttaggcctagagtggttatatcgtttactgtcacaacctagccggatcaagcgccaatttaagttattaaaatttgttggttattactattccaataaattgtaa

SEQ ID NO: 295472 - DNA, 318 bp, Proteus mirabilis
atgataaataaccaaaaagcgtatcttgcgcaagaaaggctctttttgatagataagtttggcccattattgttttttttgatcccgctgatcatgctgattatcggtggaaaatcatgggcgaagtatgtcgcttttctgtgtcaggggatcgcactgatttatatcgtggtgttttaccaagcaagaaaatattatttgtcatttcaacatgaaaataacaaagggataccttatcgtttttatcgtatcgcttgggtctatttatttttaattttgtgtcttgaagtagtactactggttcaacacgctttttaa

SEQ ID NO: 295473 - DNA, 1230 bp, Proteus mirabilis
atgttcaagatcttactcctgtttgtggtattgattgcagggataatcttcggccctgtattagcgggtcatcaaggttatgtctttatacaaaccgataattgggatattgaaactagcgttaccagtcttgtgatcatgtttgtcctactgcaactgatattgctcttgcttggctggtgttatcgtcgttttattggtacaggctctaaagcctatagttggttctctttgcgcaaacgcagccgagcacgtaaacaaacacggttagcattaatgaaacttgcggaaggtgatttcaaacaagtagaaaagctgatgagccgcaatgccgattatgcggaacaacctgtagtaaactatttactagcagcagaagcagcacaacaacggggtgatgagtttagagtacagcaacatctggagcgtgcttctgaacttgctgataccaatcagttacccgttgatattacccgagtgcgtattttactggcgcaaaatgaaaaccatgctgctcgtactggggttgatgaattactcaatcaagtgcctcgtcatccggaagtattacgcttagcagaaactgcgtatatacgtacagaagcttggcaagcactacttgatatcatcccttcaatgcagaaaatagccctacatacagatgatgaattagagcaattacgtcaacaagcctatattgggctgatgggacagaagatgtccgaaaatggttgtgatggactgaaaaattggtggaaggcacagcctcgtaagatccaacatgataacggactacgatttgtattagcagaacaccttattgagtgcaacgatccgcaaactgcgcagacgatcattttagatgggatcaaacgtcactatgatgaacgcctgatcttattgttaccgcgcttaaaaaacagcgatccagactcaatattaaaagtgcttaactcactaattaaacaacatggtccgacaccattactcaatagcaccgtcggtcaaattgccatgcaacaagggcaatgggcacaagcagaaacagcatttcgcaatgcattaaaacagcgtccagatgttcatgattttgcgtggttggctgatgtgctagataaacagaataaatcagttgagtcagccaaagtacgcaaagatgcgctattaatgacgttaaaaaaagactctgttatttttgacgagcctaaaacaaataaagcactgcaataa

SEQ ID NO: 295474 - DNA, 1251 bp, Proteus mirabilis
atgacggaacagaaaaatacgaatgaaaatgacttgcagaatggtacatcaaaggctgatgacgatatccgctatcaagaagtaaaacctgtaaacaataagcgttcaggtttgatagggagtgccgttgcgatcctcgttattctggcaatcggtggtggtctttattattacaccactcaacaagcgactaaactaagtacagaaaaccaatcgctaaaatcacaattggcacaattacaacaattgcaagatacttatcaacaacgttttgacaatattgacagtcagtttaactcacaaaaactcactattgataaactgcaaaatgaacgccaagttactgagcgtcaaatccaaaatttacaaacgcaatttgctgctatctcaagtgcagatgtaaagagctggctattagcgcaagctgattttatggtaaaaatggcgggccgcaaattatggaatgaccaagatgtcgtcacagcggtaagtttattaaaaggtgcagatagtagcttagcagaaatgaatgacccaagcttattggccatccgccgcgccattaatgaagatattggcaacttagccgcgctgagcaaaattgataatgatggtactattttacaattaaatcagttagctaatcaggttgataacctacgcttatctggatttgagcgtgatggctcaccgatggataaaaatgatgaagccatttcaggctcgctttctgactggaagcaaaacctcagtaaaagctggaaaagctttatggatgactttattactatccgtcgtcgagacagtaccgctattccactattagctccaaaccaagatatttatctgcgagaaaatatccgctctcgtttattaattgcatctcaagcggtgcctcgccatcaaacagagatttatcaacaatcattagaagcggtatctacttgggtacgcgcctattttgataccaccgatccgaatacaacggctttcttagacagtattaatgagcttgaaaagcagcctattactcttgcaatgccaacagaattaaaaagcctctctctgttagaaaaacgagtagaaaagcagatccgtaatttgctgacccaaaacgagacatcacagccagaagcggttgaagccaaagatgccgaagctacacaagccccttatgcggttgatgcagcacaagatagtgcaacatcaggaacaacgacatcaacaaccgtagcaccacaaggagaataa

SEQ ID NO: 295475 - DNA, 738 bp, Proteus mirabilis
atgagtattttaatcactcgtcctagcccagcaggagaacaacttacgcaacgcttaattgatgcgggaaagcatgcttttcatgcacctttaatagaaatagccgcgggtaaagagctttccatattagaaaacaaattaaataagctaagtacgggtgattacctttttttactttctaaaaatgcggtgtggtacgcaaactggcaactaaatcaattacaacaatcatggccagatacgctattctattatggaataggtcaaagcaccgctgaagagtttcagcaattaacaggacattctatacgttatccagaatttggagaaaccagtgaagacctactggccttgtcttcacttcaacaaatagaaaacaagcgagtactactactaagaggcaatggtggtcgcgaactacttgccacaacattacgtcaacgcggtgcaattgttgatgaatgtgaatgttatcagcgtctatttattgattatgtatctgaagagtttgcgctaaagtggaaaaatgcccaagtggatacctttgtggtcaccagtggcgaaatgttgcaacaactcttttatctagtcgctggatctgaaaaagcatggctgttaaacagtcatttagtggtggtcagtaaacgattagcaacaatagctagcacattaggctttaaaaaaataaccgttgctgaaagtgccaataatgatgctttatttcatgcattaatatag

SEQ ID NO: 295476 - DNA, 942 bp, Proteus mirabilis
atgccaaaaagtaccatccgtattgctacacgccaaagccctcttgctatgtggcaagcgctttatgttaaagaacaactacaaatcgctcatccgagcttagtcgttgaattagtaccgatggtcacgaaaggcgacatcatcttagataccccattagcgaaagtgggtggtaaagggttatttgtcaaagagctagaacttgcactactcagctctcgtgctgatattgccgtacattcaatgaaagatgtccccattgattttcctgaaggtctgggattggtgacgatttgtgagcgagaagatccccgtgatgcctttgtctctaatcattatgattcattagaacaactgccagccggaagtgtcgttggtacctcaagcctacgtcgccaatgccaattaaaagcactgcgccccgatttaattattcgtgatttacgcggtaatgtaggaacccgtttaagtaaactcgataatggcgactatgatgctattattcttgctgtcgcgggcttaaaacgtcttaaattaactgagcgtattcgttcttctttgtctgcggaacaatctcttcctgcggtaggacaaggtgccgttggcattgagtgtcgcttagatgatcatgatactcaagccttattagccgcccttaaccacgcagatactgcaacttgtgtaaaagcagaacgcgcgatgaacactcgccttgaggggggttgccaagtacctattggtagttatgctatttggcaaaacggcaaaatttggctacgagcattagttggctcccctgatggtgaaactattttacgtggcgaacgcttagtatcacctgaagatgcagagcaagctggtatttctcttgccgaagagctactagataaaggagctagagagattttaaccgctgtatatcaaagtaatacagcgatatga

SEQ ID NO: 295477 - DNA, 486 bp, Proteus mirabilis
atgtggtatacaggtaattttgtactcgaggctattaaattagccgaagcgtggggctttaaagtgcgcacaatgaaagcttttacttgggttaagtttaatcctttagcatggcaacgaattgataaagctattcaaaacagcgagttatttgattatcacgacctatttgaactattagatgctgaaacaaaaatgaatgggggaaactacaccagagccaatagtgaagatgttttaatcgctactcgaggcaatggattacagcgcattagtgctagcgttaagcaaatcgtatttagttgtttaggtgaacatagcgaaaaaccttgggaagtaaaaaaccgtcttgaacagttgtacggtgatgtaaatcgcattgagctattcgctcgtgacatgtcacaaggttgggatgcatggggcaatcaatgtcctaacaacagtatcgaacttatcaactctcattttatttgtaaggaataa

SEQ ID NO: 295478 - DNA, 198 bp, Proteus mirabilis
atgcctgatatcgcagatgatgctaatgacttaacggctctacaaatcaacaccgcattagcaaacagagagccaccagcaaaaagcttaacagggttttgtatctggtgtcgtgaagagcccgtaacagagaacagtgcttactgctccaaggagtgtggtgatgatcatgctcagtacaaaaggaaaaacggctaa

SEQ ID NO: 295479 - DNA, 189 bp, Proteus mirabilis
atgattattttactcacattattagccgtgtacttatggcttgctgggtatctgttttcagagtctaagcacgaaagcgacaatataaaagatattgtggccagactgttttactctacaatctggcctgttgttggtgtgctttacctatcgtcactacttgcttataaaacacttggcgaagaatga

SEQ ID NO: 295480 - DNA, 1197 bp, Proteus mirabilis
atgctgaccgatacaaaactaagaagtttaaagccacaagacaagctttataaagtgtctgatcgagatggtttatacgttgcagtgacaaaaagtggtgttatttcatttagatatgattatcgttttaatggaaggagagaaacagttacttttggtcgatatagtgctgacggtattacacttgcagaagcaagagccgaattaattgaagcaaaaaggctgctaaacgtaggcatatcgccagcttcaaagaagcgtgacggtattgaaagtaaaaagatagggacggtattcaaagactataccgtcaatttccttaatgatgctcaatatgccgactctacaagggccatgaaagaagcaattattgaaaaagaaatctatcctgtattcggcaagcttcaactagaagagatcaccacaccacggcttagagctttgtgtgaaaagataaaagatagaggcgcaaaagcgaccgcattacaagtacgtgagattgttggatccgtttttacttatgccatagatagaggttatgaaattagtaacccagcagatgcaataaaggcatcttcgatagggacttttcaagcgcgcgaaagggcaatgtcgccgaaagaaattggtatcttatttcgtgaactagaaaactatagttgttatccaaccttaaaattggccgttaaatttgtcttgctgacattagttagaaagtctgagtttattcacgctacatgggatgaaatagactttaaaaataggcaatgggtgatccctaaagggcgaatgaaggggagaaaagagcatgttatttatctctctgaccaagcaatggatatcctcactggtatgaaagtctgcgcgatgggaagcaattacttaatgcctggtcgatatgatattaaaaaaccactttctaatgctgcattgaataacgtgattgatggaaccgtaaaacgtatcaatgaaaaaggcattgaattcgaaccggttactgttcacgatttacgacgcacagcaagcacgctattgcacgaagcaggttataactcagattggatagagaaatgtttagcacacgttcaaaatggcgttagagccgtttacaacaaagctgaatatgctgaacagcgcaggaagatgttacaagagtgggctgatatggtagatgaatggataaaagagaaagattaa

SEQ ID NO: 295481 - DNA, 1578 bp, Proteus mirabilis
atgacagcaaatatccataatcatcgcattcttatccttgatttcggttcgcaatatacacaacttattgctcgccgtattcgcgaaatcggcgtttattgtgaactctgggcatgggatgttacagaagaacaaattcgtcaatttaaccccaatggtattattctgtctggtggccctgaaagtactacagaagacaatagcccacgcgctccggaatacgtctttaatgcgggagtgccggtattaggtatctgctatggcatgcaaactatgtctatgcaattaggcggtgatgttgaagtctcaggtgagcgtgaatttggttattcacaagttgagatccgcgaaacctgcgaactgttccgtgatattcaagactccgtaagtgaagatggcaaacctttattagatgtatggatgagccacggtgataaagttacggctattcccgctgattttgtcactattgctagcactgaaacttgcccatttgcgattatggcaaatgaagagaagcgtttctatggtgtacagttccacccagaagttacccatacccatcaaggtttagccattttaaaacgctttgtgttagatatctgtggttgtgacgcattatggacatccgcggcgattattgaagatactgttgctcgtttaaaacaacaaattggcgacgatcacgttattctcgcgctatcgggtggtgtagactcttctgttaccgcattattattaaatcgtgccattggtaaacgcttaacctgtgtatttgttgataatggcttattacgccttaacgaagccgaacaagttatggcgatgtttaaaggcaaatttgacctcaatattatccatgttgaagctgaagatcgtttcttaactgcgttaaaaggtgaaaacgatccggagaaaaaacgcaaaattatcggtcataccttcattgaaatctttgatgaagaagcggttaaattaccgcaagtcaaatggctagcacaaggcacaatctatcctgatgtgattgaatcagccgcatctgcaacaggtaaagcgcatgtgatcaaatcacaccataacgtaggtggcttacctgaagatatgaagttaggtttagtggagccattaaaagaactatttaaagatgaagtgcgtaaaatcggacttgagttaggtttaccttacgacatgctataccgtcatccattcccaggaccaggtttaggggtgcgcgtattgggtgaaatcaagaaagagtattgtgatttactacgtcgtgctgacgctatctttattgaagagctacataaagccgatttatacaataaagtcagccaagcatttacagtattcctacctgtccgttcagtgggtgttatgggcgatggccgtaaatacgactgggtagtttcattacgtgctgtagaaaccgtagactttatgactgcacattgggcacacctaccttacgatttcttaggccgtgtttctaatcgcattatcaatgaagtaaatggtatttctcgcgtggtttatgatatcagcggaaaaccaccagcaacgattgagtgggaataa

SEQ ID NO: 295482 - DNA, 1467 bp, Proteus mirabilis
atgttacgaattaaaaaagaagcacttacatttgatgatgttttgttagttcctgcacactcgactgtccttcctaatactgctgatttatctactcaactgactgaaacaattcgcttaaatgtgcctatgctttctgctgcaatggatactgtgactgaagcatctttagctattgcattagctcaagaaggtggaattggttttatccacaaaaacatgcctatcgaacgccaagctgaagaagttcgtcgtgttaaaaaacatgaaagcggtgttgtgacggatcctatcacggtaacaccagaaacttctttacgcgaagtccaagcaatgacagagcgtaatggttttgctggctatccggtagtgactaaagacaatgaattagtgggtattattactggtcgtgatgttcgctttgtcactgatttagaccaacctgtcactgcggtaatgacgccaaaagagcgtttagttaccgttaaagaaggtgaagcgcgtgatgttgttatgcaaaaaatgcatgagaagcgcgtagaaaaagccttagtagtcgatgatcatttccacttaaaaggcatgatcaccgttaaagatttcaaaaaagcagagcgtaagcctaatgcatgtaaagatgagcatggtcgtttacgtgtaggtgctgcggttggcgctggcgcaggtaacgaagagcgtatcgccgcattagtggcagctggtgttgatgttcttcttatcgactcctcacatggtcattccgaaggggtattacagcgtattcgtgaaactcgcgctttatatccaaatttacctattattgggggtaatgtggcaaccgcagaaggggctttagcgctggcggatgcaggtgtgagtgctgttaaagtgggtattggccctggctctatttgtaccactcgtatcgtaacaggtgttggggttccacaaatcactgcgattgctgatgctgttgaagcactgaaagatcgcaacatcccggtgattgccgatggtggtattcgtttctctggtgatattgctaaagcattagccgctggagcagcatgtgtaatggttggctctatgtttgcaggtacagaagaatctccgggtgaaatcgagctattccaaggtcgctcttataaatcttaccgtggtatgggctctttaggcgcaatgtctaaaggttcatctgatcgttatttccaaactgataatgcagcagacaaattagtaccagaaggtattgaaggtcgtgtggcatataaaggcttactgaaaaatatcgttcaccaacaaatgggtggcttacgttcatgtatgggcttaacaggctgtgcaaccatcaaagaattaaataccaaagctgaatttgttcgcatcagtggtgcgggtattcaggaaagccatgttcatgatgtgactatcacgaaagaatcgcctaactatcgtttaggtatgtaa

SEQ ID NO: 295483 - DNA, 1389 bp, Proteus mirabilis
atgactctaccgataaacaataatatttttactgttagccgtctaaataagaccgttcgccagttattagaaatggaaatgggtcgcatttggatcagtgctgaaatttccaattttactcaacctgcttctggtcattggtatttcacgttaaaagatacccatgctcaaattagagcggcgatgtttcgcggtcaaaacacaaaagtcacttttcgccctcaacatggtcagcaagtattagtacgtgcgactatcacactgtacgaaccccgtggtgattaccaactgattgtcgaaagcatgcaaccggcgggtgatggattattacagcagcaatttgagcttttaaaacaaaaactaagcgctgaaggtttatttgatgctcttcataaaaaaccactaccaacacctgctaaacaaattggggtgatcacctcctcaactggcgcagccttacacgatattttaaatattctacgtcgtcgtgatccctcattacctattattatttatcccacagccgttcaaggtgcggaagcaccaatgcagatagtccatgccattgaactggctaaccgtcgtaaagaatgtgatgtgctaattgtcggccgaggcggtggctcattggaagatctctgggcatttaacgatgagcgcgtagcccgtgctatttttgctagtgatattcctattgtcagtgccgtgggtcatgaaactgatgtgactattgctgattttattgccgatcttagagcgccaaccccttctgccgccgcagagttaattagccgcaacaaactcgagctattacgccaattgcagtcacagcaacaacgtcttgaaatggcgatggattattatctagcaaaaaaattacgcgcactaacacaacttcatcatcgcttacaacaacagcatccacacttacgccttgctcgccaacaaaatgtattggctgcaactaaacagcgtttagtgaccagttttcagcgcctcctacaaacaaaacagaatcaacacactcagctacaaaaacgccttaattaccaagagccaagccctcaaatacaagcactactgcgccaacaacaacagttaatttatcgtatgagagaaagtatttcacaacagcttgctcgtcaacgtgaacaatttgcaattagctgttcacgtttagaaagtgtgagtcctctcgcaaccctttctcgcggttacagcattagtgaagttgcttcaggtgacgtactgaaaaatacgaaacaagttaaaaaaggtgatacgctaaaaacgcgtgttgaagatggctggatcaccagtgaagtgataaatacacaaaaaatatctgttaaacgtaaaccatcccccaagagtaagtcatccatttaa

SEQ ID NO: 295484 - DNA, 2250 bp, Proteus mirabilis
atgaaaactcaattaacaaggaacatacttggctcttgtattctattttctggtattcattctctggtgtttgcggctgaaacggaaaaaacagttcaatttagtagtttaaaagtctcatcggcacaaaaacaaacaccagagcaaaaagcgttagctaagccgggggcttatagcgctattggtgaaatcaataatcttagctcggtagaacaagcattacgatctacaccgggaacttacacccaaatggatgccagtcagccgggtgttggggttaatatccggggattaagtggttttggtcgagtcaatatgatgattgatggggtgacacaaacgatgtatagcacgtcacctagccaatatgcgcatggtggacaaccatacaaccagtttaatagcatgatcgatcctaactttattgtgcaaattgatatttctcgtggtcaacaagatggtgaaaatagtattaatgcgttagcggggagtgctaattttaaaacaataggcattgatgatgttttattttctaatcatcgttggggaataagaagtaaagcggctcgagggactaatggattaggttataacggtatggttgcgatcgcaggaaaacagccgatatttaatcatgatggttatattggcgctatgtttgccataagtggacataatattgaatcttcttataaaaatggggcaggttttaatagtcatgagtttgcaaccactaaagactttaaccaaaagccacattctgaattagcaaaaatatcgtttaaacccaatgattctcatgaaatagaattaagtggtcggttttataataataaatttaatcgaagaaccatagagagccaagattattatgctaaatatcgttataccccgctaaacgatctttttgatagtgaaatattattgagtagaagccaagcttcacaaaaatttgccggtgactctttaatgtcattacgcaatggacatgcgaaaaatatttccaatgcacttgtcgctaaaaataccagtcgatttaattatcatgagctggatatggcactaacattaggtactaaactgatgtcgattgattataatcgagaagtgacagctccttcgagcgacccatggcaatcacaaaatatgattgaatacaatgtatttgctccgcaaggaaaaaacgacatcagcagtcttttttcacaaataaaatttgaatacgatatttataccctcgcattaaatttaaactatacggattatcatattaaaggatataaacccgcttgtgatcccaaagcagcgtgtttccctgaaggtgcgatgaatgttaatcgccacgaaaaagcgtgggagccgggagcactcttttctgcacaaattatccctgaatttgaaccatttatcagttatgcccatacgacaagggcaccaaacccacaggaaattttctttgctaatgaaggtggggcatcgatgaacccctttttaagaagcgagaaagcggatactttccaaataggttttaatagttatcgccctgatttaattgttgccggagacagctttcgcttaaaagcactttggtatcatactaaagttaaaaactatatttccagtgattcttataatgtttgtaaagggggtaaacgctgtaaaatcgatggcacttttactgacgatgactacagtggcatggaatacgatggaaatatctatttatacacaaatagccttgatcctgtcacgatgagaggttatgaactacaagtaaactatgatgctgatgtattctataccacactttcttatagcaatgagcgcacctcacaacccacttctcttgcgatgggggattttgggcaaagtcctgcatcagagcttcccaaatactacgcaacgattgatgctggtgtgaggttattcgatgaccgatctctcgaattaggcaccatcattcaaattaccggtaaaagtcgtaaagcttcagctgaagggtttgattttgatacaggcactattcccatggtcgaacaagaaaaaatccctaccgtgatcaacgcgtacgctaactatcaaatgaataaaaatgtgtcattaaaatttgcggtacataatctcatgaataaaaattattcaaatgcacttgatagaagtaattcagcgccagatatgtacgaacagggacaaaataaacaaacggctagaggcagaagtttcctgtttggtggagaaattcgtttttaa

SEQ ID NO: 295485 - DNA, 2169 bp, Proteus mirabilis
atgttatccgcgacaagaaaaacggtgacgcagggattaacaggtgccatgatggcaatcttgatcaccgcaacaccgacaatggctcaaacagagaaggacgttattatgatgccaccgaaagcgaataaaatcccccatgtgatgacagaacatggtgacactcgtactgataattattattggcttagggatgatgcacgcaaagataaacaagttattgactatcttaaggctgaaaatgcttatactgagtcagtaatggcagcgggcaaaacactagaaaatacgctctataatgagatggttgagcgtatggcacaaaatgatgcctcagtgccttatgactataatggctatacttaccaaaccatttaccaagaaggtaaagactttcctatttatcaacgtaaaccaataggaagtgatggagaatgggaaattcttgttgatggtaatgaacgagctaaaggacatgagttttatcaattaggtgatttagccattagtccagataacaaacgtattgctattgctgaagataaagaaggacgtcgcaactatacagttgcttataaagatctgacagataaaacatggcaagagaatgttttaaccaatatttcagcgaatttagtatgggcaaatgatagccaaacactgttctatgtagataaagatccgcaaactttattgccataccagatttatcgccatcaatacggtagtgatagaaaacaagacgtgaaaatctttgaagagaatgatgatcgtttttatacctggatggagaaaagcaaatcagaagattatattctagtcactattgcaagctctacaacttctgaatatcgtttaattgatgccaatgcaccagaaaaacccatggtggttttttctcctcgccaagaagggcgagaatattatatcgatcattttaaaggtgaattttatattcgctctaatcatgaaagtgagctatatggtctttataaaacggcctctatcgatgcaccttggcaaaccgtaattgctcctcagccagaagtagacttggaaagcttcgaactgtttaatcgttggttagtgcttgaagagcgcaaacaaggtttagtgtcattacgccaaattgattggaaaacaggacaatcaacaaatattatttttgatgatcctgtctatatggcatggctaagtgtcaatccacaagctgatagtgaagagttacgttttggttatacctcaatgaccacgccttcttctacctatcaatggaatatgcaaaccaaagaaaaacaattgcttaaacagcaggaagtgaaaggctttaagcatgatttgtatgaaagtgaacgtatttgggtaaaagcacaagatggtgtagaggtgcctgtatcgctggtttatcgtaaagacttatttaagaaaggcgaaaatccaatcttaatttacggttatggctcttacggcagcagtatcgacccctcgtttagctctgcccgtttaagtttattagatagaggttttgtatatgccattgtccatgttagaggtggtggtgaattaggcaaacgctggtataaccaagggaaaatggagcataaagtcaactcctttactgactttatcgacgccacaaaataccttattaaccaaggttatggtgcacccaaacatgtctacgcgatgggcggtagtgctggtggattacttatgggagccgttatcaatatggcacctgaactctaccgtggtgttgtggctcaggtaccatttgtagatgttttgacaaccatgctggatgcttctattccgctcacaacaggtgaatatgaagagtggggtgatcctgcggataaagacgtttatttccgcttaaaatcttatagcccttacgataatgttgaggctaaagcctatcctcatttattggtcactacaggtttacatgattctcaagttcaatattgggagccggcaaaatgggtggctaaattacgtgaattaaaaacagataataatttacttctgcttgaaacagatatgagtgcaggacatggaggtaaatccggtcgttttaatcgtctacgtgatactgcgagagaatatgcctttattttaatgttagagcagcctgatatttattttaagacacaaaatatcaagtaa

SEQ ID NO: 295486 - DNA, 810 bp, Proteus mirabilis
atgttgatctcttcttccgttaaccaaatggcgcaattacagccttgtcgatattcgggctttattttatcaatagtatttcattttactttagtcattagttatttctatatcacgcaacaacgcccggtgataatccatcaacctgcaccggctgttatgcttagcttaagtgaaaacgtccaagcggtgaataaagaaaaacagattgtcggtgttgatcagcaaatggctgtcgccagccaaaaaaaacagcaacaagagattgcggagaaacaacccaatcttattattaatgaaaatgcagatattttgcttgaaaagccgaaaaaagtgctacaaaaccagacttcagttaaggttgccccttcaattgcaccaaccaaaccttcacctattgtcagtgaaaatgtatcgagcctatccgcgccctcaacaagccattctgttgcgaaacaacaggctaacgatgtttctgcaaattatgatagtgatgcaaataaagaagcagatgccttggcattatggcaagctaaagccaaaggtcatttaaatcgttataaagcttatcctgaagaagcgaaaagaaaagggcgtacgggagcacctaaagtgcgttttattgttgatggacaaggttatgtcatagcctgcgaattgattaatagcagtggtgtccgctcactagataaagaggcacaaagtgttattaagcgtgctcagccattaccaaagcccccagaagaactgctttttaatggtcaaataacaattgaaatggcaattgaattttccacattgactttataa

SEQ ID NO: 295487 - DNA, 870 bp, Proteus mirabilis
atgtttttttcaatatctaaatggttcctgttattagcttcacttattactgtctgcgcatgtagtacagtagaaaaaaacaccgtacctagcacaactcccgctattattacatcagccaatattattgatacgcgtacaggaaaggcaatcacagctaatgcgctattaactcaattagccagccaatcgcgggtgattgttggcgaaaaacatgacaatcaatatcaccatgagattgagtattggttaatgacacaacttcccaataaacgtcctcaaggtgcggttttattagagatgttgacgccagatcagcaaaacttagttgataatacgaaaaaacgttactctagctcacaatatttacgtgatgaacgtttaatgtctgtacttaattggaataaaggctggtcttggaaagggtatggcaatctgattaaagaagggctacaagcagattatccattgttagctgctaatatcgatcgcagtgatattacaaatgcatataaaaatccacctaatattgaaggtgaatattcaacgcaacctgctgttcgtcagcttattagtaaaactattgagctttctcatggtggtgcacttgataaaacacaaattgaaaaaatgaccgtgatccaacaactgcgtgatcgtgcaatggcaaaaagtttattaaatgcccctatgcccgcactgttgattgccggctcatttcatgccactaaattaatgggtgtacctttacatattaaagatttagcccctaatgaaacagtcacggtacttattatggcagaagaaggtagcgatattacctttgaacatgccgattatttgtggataactcctgcagcccatccttga

SEQ ID NO: 295488 - DNA, 2283 bp, Proteus mirabilis
atggaagacaaactacaacaaagtgcattggattttcatgaattccctaatcctggcaaaatcacagtgacaccaactaaaccactaataacacaacgtgacttagcattagcttattcaccgggtgttgcggctccttgccttgaaattgcggctaatcctttagctgcgtatcgctttacagcgaaaggtaatttggttgccgttatctctaatggtacggctgttttaggactcggtaatattggcgccttagcaggtaaacctgtgatggaaggtaaaggcgtattatttaaaaaattctccggcattgatgtatttgatattgaagtgaatgaaaccgatcctgataaattggtggatattatcgcttcattagaaccgacttttggtgggatcaatttagaagatattaaagcaccggaatgcttctatattgaacaaaaactgcgtgagagaatgaatatccctgtctttcatgatgatcagcatggtacggcaattatttctacggccgctattatcaacgggttacgtattgttcgtaaaaatattgataaagttcgcttagtggtttcaggtgccggtgctgcttctatcgcgtgtatgaaccttcttgtcgctttagggttaaagcgtgaaaatattgttgtttgtgactcaaaaggggttatttatcaaggccgtgaagccaatatggcagaaactaaagcggcttatgcgattaaagataacggcagccgcacacttgatgatgtgatcaacgatgccgatattttcttagggtgctcagggccgggggtactgacccaagagatggtgaaaaaaatggcacgcgacccgctgatccttgcgctagcaaatccggagccagaaattttaccaccgttagtcaaagcggtacgatcagatgcgattatttgtaccggacgctctgattttcctaatcaggtcaataatgttctctgtttcccgttcattttccgtggtgcgctggatgtgggggcaaccgctatcaatgaagagatgaaacttgcctgtgtacatgcaattgctgaattggcactggcagaacaaaatgaagaggttgctagcgcatatggcgatcaagaactgtcatttggcccagaatacattattccaaaaccttttgatccacgtttaattgttaaaattgcgcctgccgttgcaaaagctgcaatggattcaggtgtggcaacccgtccaattgaagatttcgccgcttatatcgaacacctcaatgaattcgtttataaaacgaatttatttatgaaacctatctttgctcaagcgaaaaaagagaaaaaacgcattgtattggcggaaggggaagataaccgcgttctgcatgcgactcaagaattagtcactttaggacttgctgagccgatcctaattggtcgtcctagtgtgattgaaatgcgtattcagaaattaggcttacatattcaagcgggtagagattttgaagttgtaaacaatgaaaacgatccgcgttttaaagaatattggcaagaatattatcaaataatgaaacgtcgtggtgtttcgcaagaacaagctcgtcgagccgttattggtaatccaacactgattggcgcaattatggtacgtagaggggaagcagacggcttgatctgtggaaccgtgggaagttattcggaacattttgaaatatataaaaatgtttttggtttacgtgaaggatctaatactgcaggggcgatgaatgcactattactgccgagtggtaacacctttattactgatacctatgtaaatgaagatcctaccgctgagcaacttgctgatatcactataatggcggcagatactattcgtcgctttggtattgagccaaaagcagcattagtatcccgctcaagttttggctcttttgacagcccatcatccataaaattaagaaaagcgttagagcttattaaacaacgcgcaccagaattagaaattgatggtgaaatgcatgctgatgctgctttagttgagtcaattcgtcgcgatattatgccagacagcccactaaaaggttcagctaatctgttagtgatgccaacaatggaagcggcgcgcattagctataacttattacgtgtcactagctccgatggggtaacggtaggtccagtgttaatgggagttgctaagcctgcccatattttaacgccaattgcatctgttcgtcgcattgttaatatggtggcattagctgtggttgaagcacaaacacaatctcaacgctaa

SEQ ID NO: 295489 - DNA, 624 bp, Proteus mirabilis
atgcctagctactcaattatgatagtggatgatcaccctatcatgagatatggattacggctattgttagagcaagacaaggaatttattgtagtaagcgaaagtggcaatgctcaagaagcaatcaccacagcaaaacagttaaatcctgatcttattatgatggatttacaccttcaaggacgctctggtattgatattattcgttctctgcgtcgctgtggtttaacatcttatgtattggttttatcaatttcagattctcgcaatgatgtgtatgctgcattagatgctggtgctaacggttatttattgaaagagtgtgaacttgatatgttgctactcagtttacgtaaagcggtggttgggcgccccgtttacagtgaaaaagtttggcaatatatccaattaagacaaaactattctgatccgctatctgcgttaacaaaaagagaacttgatgtccttcaagaagtggcggtgggaatgaaaaataaacagattgccgaaaatctgtttatctcagaagaaaccgtcaaagtacatattcgtaatatcttaaagaaactacaagtgacatcacgtttagcggcgagccttatcttaattaagcatcagcactaa

SEQ ID NO: 295490 - DNA, 534 bp, Proteus mirabilis
ttgcttttactctctacttttagctgggctaatgaagatgaagacagcaaaaaggttgatgagtataaaacagccctacaggcattttttaacagtgattatttattgtgtttaggcgaagggaaatggcccgtttacagtaatgaaaatgatgctccatgggttttagagcgaatgaatgcattaatggatgctggtttaattgaacaaactgtcgatggtgacgagtgggtgttctctctaagcgagaagggacgaaaagcttggcaaccatatcaagatttttgttatggacacctttttattagccaaataaaagagatacaacctatcgattcagataaaagtactatctatttttattatggtgtcaaagatattcctgcttgggctagaaatagtgatgtacagtcagcatttagtgaactggatatagtgattaacggtatcaaccgagagctttatcagttaaaaattgaaaagttacccgataatcacttcaaagtattaagttatcctgtccctattgagtga

SEQ ID NO: 295491 - DNA, 372 bp, Proteus mirabilis
atgtctactactaacctgacatacacgatgtacggcataaaaaattgcgatacaatcaaaaaagcacgtaaatggctagatgataatcatattccttatgtttttcatgattaccgtaaagacggtttgaaggaagcattattactcacctttacagaaaatttagattggcagacattggtgaacaaaagaggaacaacttggcgtcaattatctgatgaagaaaaaaatgctatcactgatgtgaatgcagccattgcacttatgcttgataaacctgccattattaaacgtccaattttagtctcttctgataatcgttttatggtaggttttaatgctaatgattacctgacttttacaggagcctaa

SEQ ID NO: 295492 - DNA, 1131 bp, Proteus mirabilis
atgtcctgccctgttattgaacttgcacaacaacttatttctcgaccttccgtaagcccagatgaccaaggttgtcagcaactgatcatcgaaagattaacacctttgggctttaccattgaaaaaatgccttttggtcagaccgaaaatctttgggcatgtcgtggtggtgagggagaaaccctcgcatttgcaggacataccgatgttgttcctcccggcgctaatgcattatgggataacccgccttttgagccatctattcgtgatggaatgttatatggccgaggtgccgccgatatgaaaggctctctcgcagccatggttgtcgcggctgaacgatttgtgcatgcttatccgcaacatcgtggacgtcttgcttttttaattacctccgatgaagaagccgatgcgcatgatggtaccgttaaagtggtcgagtcattaatatctcgaggagagcgacttgattattgcttagtgggtgaaccatcaagtcagcatcaactcggcgatatgataaaaaatggccgacggggttcaataacagcaaatgtcactatttatggtacgcagggccacgttgcttaccctcaccttgcacaaaaccctattcatatggcgtcaccttttattcacgagttagtgaatacagtatgggataatggcaatgagtattttcccgccactaccatgcaaattgccaatattcatagtggaacaggcagtaataatgtgatcccaggtgagttatttatacagtttaactttcgttttagcaccgctattacagatgaagaaattcgtcaacgtactgaagcattactacaaaaatatcagttgcgttatcacatttcttggtctttatctgggcaaccttttatcactggtgaaggaaaattactggatgcggtacgttattcagtaaaacactacaccaatatagagccaacgctttcaactagcggaggcacctccgatggacgatttatcgcccaaatgggtgcacaagttgttgaattagggcctattaatgccaccattcataaagtaaatgagtgtgtcagtgctgctgatttacaacaacttagtcgcatctatcagcggatcatggagcagattattttatga

SEQ ID NO: 295493 - DNA, 669 bp, Proteus mirabilis
atgataacccctttaatgttaacgggtcgttctacagatcatttagtgactttatcagagcgacatcatttacagtttaatgcaacaaaagcctttttagcgttacaacaacaagcggccaaagcgggatttaaattaatgcctgccagttcatttagaagttttgaacgtcagttagcgatatggaatggcaaatttgaaggcactcgccctgtattagatgctgaaagtcaacctattgatattcagacattatcagaaggccaacgctgtgaggcgattttaaaatggtctgcattacccggagcaagtcgccaccattggggcaccgaaattgatttttacgatcctttccgtttacctaatgggcaatcattgcaattagaaccttgggagtatgaacaagggggctattttgcacaacttaatgactggctgactgaaaatatgtcagcttacgatttttatcgcccttttaccgataaagagagttatattgcctatgagccttggcatatcagttatttgcctctctcttatgaagcttcgcaggcctatactatcgatatccttcgcgctgttttagaagaagagccgattttaggtaaacaatggctattagataacttagaaacggtttatcaacgctatattgtgctaccagaataa

SEQ ID NO: 295494 - DNA, 897 bp, Proteus mirabilis
atgtctcatgcacaaagcggtattttagtcgcacatagtaaattcggtctatttattgaagcaatggtggtgggggaaattgatcaactacgtcaaggctgccaacaatttatgcaatcccttagcgaattacaaaaacagtatcctgatgcttcattaggtgccgtagtagcttttggttcagatctttggaaaaaattatcagataataatagtgcgccagagttaaagccatttcgtccattaggtaaagggttagctcctgcgactcagcgcgatatgcttatccatatccaatccatgcgtcatgatgtgaatttctcattagcgcaagctgcaatagctgcttttggtaacgtgctccaaatagaagaagagatccacggtttccgctggattgaagagcgtgatcttagtggttttattgacggctcagaaaatccagttggtgacgagcgctatggtgttgctttaattaatgaaggtattgatgctggtggtagctatgttttagttcaacgctatgagcataacctaaaaaaatgggcgcgttttagtgaatcagatcaagaaaaaatgattggtcgtactaaaaaagagagcattgagttggatgaatcagaacgcaatattacctctcatgtatcccgtgttgccattgaagaaaatggtgaagagttagcgattttgcgtcatagcttaccttatggaactgctagtggtaaacatggtctctatttcttagcttactgtggtcgtttatataatattgaacagcaattactcagtatgtttggtgaagttgatggtaaatacgatgatttactgcgtatgagtaaacctgtgacaggtagctactatttcgctccttcttatgaagtattagccgctctgtaa

SEQ ID NO: 295495 - DNA, 1032 bp, Proteus mirabilis
atgggtactataatgaagaacaaaacaatccgaacttttgcattacaggcaaccgttgcattgtctttggttgcgagtagttatgcaaatgcagctcaattacttaatagctcttacgatattgctcgcgagttatttacacagcttaatagtgattttaaaactcaatgggatgctcaacatcctgatgacaaagtcactatcaaacagtcccatgctggctcttctaaacaagcattagccatattacaaggtttacctgcggatgttgtcacttataaccaggtgacggatgtacaaattttgcatgataaaggcaagcttattcctgctgattggcaacaacgtctacctaataatagctcaccttattattccacaatggcctatttggttcgtaaaggaaatcctaaaaatatcacttcttggcaagatttgacccgtgaagatgtcaaagtggttttccctaacccaaaaacatcaggtaacggtcgttatacctatttagccgcatggggagcgtttgaaaaagcttatggaaatgaagcgcaaacccgtgatgctatgacaaagttacttaaaaatgttgcggtatttgataccgggggacggggggcaacgacctcatttattgaacgtggacttggtgatgttttaattagttttgagtctgaagtaaataatattcgccagcaatatggtgaagatgattatcaagttattgtccctcctgtagatattttagcggagtttcctgtggcatggattgataaaaatgtgcaacgcaataaaacagaaaccctcgccaaagcttacctaaattatttatatagcccgagagctcaggagatcatcacacaatttaactatcgcgtaaatgataaagcggtgatggcgaaaaaagcagatcaatttccagccacttcattatttaccattgaagatgtgtttggtgattggaaccaagtgatgaaaacgcattttgctacagatggcacgctagataaattattattagaaggacgccaataa

SEQ ID NO: 295496 - DNA, 834 bp, Proteus mirabilis
atgtttgccacagctagcaagcgagtattacccggatttgggcttagtttaggtagtacgcttttttatacttgtttgatcttattgctacctatgagtgcgctggttgtgcagttatctgaaatgagttgggcacaatattgggcggtgataacccaccctcaaattgtggcagcgtataaagtcactttgttgtcagccggtgttgcaagtatttttaatgctatttttggcatgttattagcgtggatcattacgcgctatcgtttccccggcagaaagtttcttgatggattaatggatttaccttttgccttacctacagcggtagcgggattaaccttagcaacgttgttttctacacaaggatggtatggcttggtgttagataagtttgatatcaaggtgatcaatacatggattggtattgctgtggcgatgtcttttactagtttgccgtttgtggtcagaacagtgcaacctgttttagaagagttaggccctgaatatgaagaagcggctgaaacattaggggcaaaccgttggcaaacgttccgtaaagttgtgttacctgaattgtctccggcgttattagccggtactgcgctctcttttacgcgtagtttaggggaatttggtgctgttatttttattgctggcaatattgcatggcagaccgaagtggtttctttgatgatatttattcgattacaggagtttgattatcctgcagccagcgcggtcgcttctgttattttattggtttcattagtcttactgttttcaattaatggattacaaagtcgctttggcaagcgattaagggggcactaa

SEQ ID NO: 295497 - DNA, 843 bp, Proteus mirabilis
atgtcggatatagcgcaacaacgctctctttatcgtcgccaaattgattgggtaaaatggggattgatccttacaggcgttgtgttatccattttatttttagtggtgcctattgcgtggatctttatgactgcgttttcaaaaggcatagaaatatttaccgacaacttgctagatagcgatatgttacatgctgtttggcttacgctacttatcgctttaattactgtaccgataaatatgttgtttggtattagtatggcatggcttgttacgcgttttcgttttccgggtcgtcagtggttaatgacgctgattgatatcccatttgcggtatctcctgtcgttgcgggactgctctatctgcttttttatggtagcaatggttgggcagggcagtggttggaacaattcgatattcagttaatgttctcttggcccggtatggtattagtgacggtatttgtcacttgtccttttgtcgtgagagagcttgtcccagtgatgatgagccaaggaagccaagaggatgaagctgctgtattattaggtgccagtagttggaaaatgttttggcgagtgacattacctaatattcgttgggcattgctctacggtgtggttttaacaaatgcacgtgctataggggaatttggtgccgtctctgttgtttcgggtgctattcgtggtgaaacctattcactgcctttacaggtcgaacttttgcaccaagactacaacactgtgggggcttttacggcagcagcattacttgccatgatggcaattattacattaatggttaaaagtgcgttgcaatggcatttagaacgtcagcaataa

SEQ ID NO: 295498 - DNA, 1089 bp, Proteus mirabilis
atgagtattgaaattaatcatgtcacaaaatattttgatcgcactgaagtgttgcatgacgtgaatttaacggtcaattccggtgagatgatggcgctattggggccatcaggctcaggtaaaaccacactattacgtatcattgcaggacttgagcatcaaacggaaggtaaaatctgttttgcagggcaagatgtcagtcgtttacatgcccgcgagcgcaaagttgggtttgttttccaacactatgcactgtttcgccatatgacggtatttgaaaatattgcctttggcttaaccgtattaccacgtcgcgaacgtcctaacaaagccgcgattgataaaaaagtcacgcaattattagagatgatccaactgcctcatttagcacagcgttatcctgcacaactttcaggagggcaaaaacagcgcgtagctttagcgagagcattggctgtagagccacaaattttattactcgatgagcctttcggtgcgttagatgccaaagtgagaactgaattacgcagttggctacgggaattacatagtgagcttaaatttaccagtgtttttgtcacccatgatcaacaagaagcaatggaagtcgctgatcgcatcgttattatgggaaatggcaaaatcgaacaagtgggtacaccgcaacaagtttggcacacgcctgaaagtcgctttgttttagaatttctcggtgatgttaatcatctccaaggtgaaattaatggtgcgcaattacaaattgctggctatcacttacctttatcggttacgccgctctatcaaggcaaagttgatgtttttttgcgcccttgggaaatttcacttaacccgcatagtgatagcttatgtaaacttcccgtcaaagtaatagaagtgactcctaaaggacactattggcaattggttttacagcctattgagtggggaaatacgccaattagcgcggtatggaatgatatgacatcaataccccataaaggtgatatttactatatgggcggtgcaaaagcgcggttatatgcacaagagcgtcccttaacaacagtttcactggcatacacagcttaa

SEQ ID NO: 295499 - DNA, 882 bp, Proteus mirabilis
gtggcaggcttagaacaatttattggtaatacaccattggtcaaattacaacgactttcacaaggattagatgcagaaatatgggttaagcttgaaggtaataatccggcgggttctgtgaaagatagagccgcgttatcgatgattgagcaagctgaattacgcggtgaaattaaacctggcgatacattaattgaggcaaccagtggtaatacagggattgctttagcgatgatagcggcagtaaaaggttatcgactaaaattattaatgccagaaaatatgagtaaagagcgtcaagcatccatgcaagcgtatggcgccgagcttattttggttagccgcgaaattggtatggaaggggcgagagatttagcgcaagaaatggagcgtaaaggtgaaggcaaggtattagatcagtttaataaccccgataaccctcgagcgcattttacttcaactggccctgaaatttggcaacagactcaagggcgtattacccattttgtttctagcatgggaacaacaggtacgataactggggtggggagttacctaaaaacacaatcggacacagtaaaaattgtcggtttacaaccggaagaaaaaagtcaaattccgggtattcgtcgttggtctccagcctatttacccggtatttttcgaaaagagttggttgatagtgttatagatatgttccaaacagaagcagaacaaaccatgcgcctattagcgagtaaagaaggtatattctgtggcgttagttctgggggagccgtagctggtgcaatacgcgttgctaaagagaacccaggggctgtgattgtggcgattatttgtgatagaggcgatcgctatttatcaactggggtgtttggttga

SEQ ID NO: 295500 - DNA, 510 bp, Proteus mirabilis
atgggtctgtttgataaattaaaatcactggtttcagaggaaaagaaaggcagtggcacgattgatattgttgcaccactttctggtgaaatcgtcaatatcgaagatgttcctgatgttgttttcgctgaaaaaattgtaggtgacggtattgctatcaaacctgctggtcataaaattgttgcaccagttgatggtactatcggtaaaattttcgagactaaccatgctttctctattgagtctgacaacggtatcgaattatttgtccacttcggtatcgacacagttgaactaaaaggtgaaggatttaaacgtatcgctgaagaaggtcaacaagttaaagtcggtgatactgttttagaatttgatttagctgttttagaagaaaaagcaaaatcggtattaacaccggttgtaatttctaatatggatgaaatccaaggtttaactaaaatgacaggcccagtaactgttggtgaaaccgttgtaatgcagatcaaaaaataa

SEQ ID NO: 295501 - DNA, 1728 bp, Proteus mirabilis
atgatttcaggaattttagcttcaccgggtatcgcatttggtcaagctcttctacttaaagaagaacctattattattagccaacgtaaaatccaaagtgacgaagttgacacccaaatcgaacgttttaaagatggtcgtaataaatcagcgcaacaactagaaatcattaaagcccgtgctgaaaaaaatcttggtgccgataaagctgagatttttgaaggccatattatgttattagaagatgaggaactcgaacaagagatcatatccctcatcaaaagtgacaagaaaaccgcagaagcagcggttcaatctgttattgaagatcaggcaaccgcattagaagccttagatgatgagtacttaaaagagcgtgcggctgacgttcgtgatattggtaagcgcttaatgcgtaatatcttagagatgccaattatcgatttaagtgctatttctgaaaaagtgattttagttgctacagatttaacgccatcagaaacagcgcagcttagcttagacaatgtgttaggctttatcactgacttagggggtagaacatcacacacctctatcatggcacgctctttagagatcccagcgattgttggcacatctaatgcaacagaaaccattaaaaaagaagattatctggttcttgatgcgattaacaataaaatcattattaatccttctgatgaagagctcgaagcattaaaggctatcaaagaagagtacctacatgaaaaagaagagctggcaaaactaaaagatttaccagcaattacccttgatgggcatcaagttgaagtttgcgctaatataggtactgtacgtgatgtcgcaggtgctgagcgtaatggtgcggaaggtgttggactctatcgtactgaattcctatttatggatagagattccttaccaacagaagaagagcaattccaagcttataaagctgtggctgaagcggtaggcagtcctgcggtcattatccgtactatggatattggtggcgataaagacttaccttacatgaatttaccgaaagaagagaatccattcttaggttggcgtgcaattcgtatttgtcttgaccgcaaagagatccttcatccacaattacgtgctatcttaagagcgtctgcttttggtaaactacgtattatgtttccaatgattatctctgttgaagagatccgagcattgaaagcggaacttgaaatactgaaaagccagcttcgtgaagaaaataagccttttgatgaatctatcgaagtcggtgttatggttgaaacgccagcagcggctgttatggctcgccatatggcaaaagaagttgactttttcagtattgggactaacgatctaacacaatatactctggctgtagaccgtggaaatgagctgatatctcatctatataatccaatgtcacctgctgtacttaatctgattaaacaggtgattgatgcatcacacgctgaaggtaaatggactggaatgtgtggtgagcttgccggggatgaacgggcaacaatgttgcttctgggcatgggattagatgagtttagtatgagtgctatatcaattcctcgcatcaaaaaaattattcgtaacgcaaattttgatgatgcaaaagcactggcagagcaagcacttgctcagccgactgcaaaggaattaatggacttagtagaaacttttactaaagaaaaaacactgtgctaa

SEQ ID NO: 295502 - DNA, 258 bp, Proteus mirabilis
atgtaccagcaagaagttactattacagcaccaaacggcttacatactcgtcctgcagcacagttagtaaaagaggctaaaactttctcttctgatattagtcttatttctggtggtaaatcagccagcgcgaagagcttattcaaattacaaactttaggattaacccaaggtactgtagtcactatttctgctgaaggcgaagatgaaaaacaagcagtagaacatttagttaagttaatggctgagttagagtaa

SEQ ID NO: 295503 - DNA, 954 bp, Proteus mirabilis
atgagcaaaattttcgaagataactcgcaaactattggccatacccccctagttcgtttaaaacatttcggtaatggcaatatcttagctaaagtagaatctcgtaatccaagctttagtgtaaaatgccgtatcggtgcaaatatgatttgggatgcagaaaaaaaaggtatcctgaaacccggcgtagagctagttgagccaaccagtggtaatactgggattgccttggcttatgtagctgctgcacgtggctataagctgacactgactatgcctgataccatgagtattgagcgccgtaaattattaaaagcattaggtgctaaccttgtgttaactgagggcgctaaaggtatgaagggagcgattgataaagcgaacgaaattcgtgatagcgatcctagccgttaccttctactacaacaatttagtaatccagcaaacccagaaattcatgagaaaaccacaggccctgaaatttggaatgacactgatggcaaagttgatgtagttatcgcaggtgtcggaacgggtggtaccatcacgggtattggtcgctatttgaaaaatactcaaggtaaagctgtcaccatggttgcggtagaacctaaagattctcctgttattagccaagcattagcaggtgaagaaattaagcctggtccacataaaatccaaggtattggtgcaggttttatccctgaaaacttagagttatcactattagatcgcgtgatccaaattactaacgaagaagcatttgaaacagctcgtgacgttatgaccaaagaaggtattttagcgggtatttcatccggtgcggcaattgcggctgcagtgaaattagctaaagagccagaatttgctaataaagaaatcgtagtgattttaccttcttcaggtgaacgttatctcagcaccccactttttgctgatatctctgacagctaa

SEQ ID NO: 295504 - DNA, 771 bp, Proteus mirabilis
atgacaaatttgacagaatcgaccaaaaatttaaatggatttcactattttgcacttgggtggcgattaattactcgcccgggtctaaaacgttttgttattttacccttacttgccaatattattattctcggtagtgccttttggtggttatatggccagattggtgaaatggtcaattggatgatggaaaaagtccctgattggctacagtggttaagctatgttatctggccactgtcagttatttttattttgctggtctttacctatttctttagcaccatagccaatattatcgcttcgccttttaatggattattagcggaaaaattagaaggccaaataacgggtattaatcctccggataccggcttattaggtattacaaaagatattccacgtattttaaaacgagaaatcatcaaggtcgtttattatttgccaagagccattgtattgttattgctctattttgttcccgttgttggacaaactatcgccccaattctttggtttatatttggtgcttggatgatggcaatccaatataacgactttccattcgataaccataaagtctctttcgccaatatgaaatcaacgctgaaaaaagacaaatggaacaatttacaatttggtatggtaattaatatcttcactatgatcccaatcttaaacctagtcattatgccggttgcaatttgtggtgccactgccatgtggtgtgatcgatatcgtcatcaacatgtacaagcaggccagtggtaa

SEQ ID NO: 295505 - DNA, 1056 bp, Proteus mirabilis
atgatgcagcaaaatttgcgtctgatattaatcgttgttggtgcgattttaatcatagctttgttattacacggcttatggattggtcgaaaagagcgttctaagcttttccgtaatcgcccagtaaaacgtcagaaacagaattatcagtcagatgagaacgatgatgaaccccagtatactgaggcaaatcatcagatgtcgtctttaacttcaacgcaggaggctcaaagtgtgccaccggttaaatcggagccaacacttgcgccacaatcctcagttgcagataaagatccacttatgtctggaacaccagcacagggacattctaacgatacttcattacaacgagagcctagtcttggtgtttttgatgttattgaacaaaataatgactctgcgcctcagcaaaaacaaccgatacccgaggtagaggtaaaccatgctgatgtaaaagaaggtgatattagtgagacaaaacttgccgatgtagagccgataccagaatcgtcgaactctgttgctagtgatgaaatacataccactgatacagataggccattggatgctgaaacctcatctgatgtgaaacaagctgagcaagctttatctggatcagaagagccaaaagcagaggaagagctggtattagtattaaatgtcagcgctcatcatggtcaaatgcttgacggtgaggtgttaatgcagagcattattcaagcgggtttccagtttggtgcgatgaatattttccatcgacatcttaacccgacgggtaatggccctgtattgtttagtcttgccaatatggtaaaaccgggtactttcaatattgatacgatggctgaattaaccacgcctggcgtatccatgtttatgatggtgccatcttatggtgatgctaatcaaaactttaaattgatgttgcaagcagctcagcgtattgcctctgatgtgggcggtgttgtgcttgatgaagagcgcaaactgttaacaccacaaaaaattgaactttataaatctagaattcgtagaacactagatttacatcaatag

SEQ ID NO: 295506 - DNA, 2028 bp, Proteus mirabilis
atgaatcaaaatattcaacaacaaattgatgaacttcgcgttacactacgtcaccatgaatatctctatcatgtcatggacgcacctgaaattcctgatgctgaatacgatcgcttaatgaataagctaaaagcattagaagccgaacatcctgaactcattaccccagattctcctactcaacgggtaggggcattacctttaacggcttttgagcaagttagacatgaaattccaatgctctctttagataatgcttttgatgaaacaacctatttagcatttgataaacgtttacgtgaacgtctgaaaaataatgaagagatcactttttgttgtgaattaaaattagatggacttgcggtaagtctactgtatgaaaatggtcgcttagtacaagctgcaacccgtggtgatggtaccactggagaaaatattactgagaatgtcagaaccattaaagccattcctttgcgtttatatggcgataatatccccgcacgaattgaaattcgtggagaagtctttatgactgaaaaagggtttgagcatttaaatgaagaagctcgacgcacgggaggaaaagtatttgctaatcctcgtaatgcagcagcgggttcattacgtcagttagatcctcgtattacagccaagcgccctttgactttcttctgttatggtgttggcgtgcttgaaggcggtgaattaccgacaagccattatgcacgtttacagcaatttaaaaaatggggattacctgttagtgatgctattaaattatgtaccggaactaaagctgtacttgatttttaccatcatgtagcagaaattcgccctaatctaggctttgatattgatggtgtggttatcaaagtagatgatatagctctacaagaagagttgggatttgtgtctcgtgctccccgttgggcgattgcttacaaattccaagcccaagagcagatgacggtgattaaagatgttgaatttcaagtggggcgtacaggggcgattacacctgtcgctcgtttagatcccgtacaagtggcaggggtaatagtcagtaatgccacacttcataatgctgatgaaattgaacgtttaggattacgtattggtgatacggtggttattcgccgtgcaggcgatgttattcctcaggttgtgagtgtgattgaagaaaaacgccctgagaatgcacaagaaattgtttttccaacccaatgccctatttgtcaatctgatattgagcgtatagaaggtgaggctgttgcccgctgcacggggggattaatttgtgcagcgcaacgtaaagaggcgcttaaacatttcgtttctcgtcgtgcgatggatgttgacggcatgggagataaaattatcgaccaattggttgaaaaagagtatgtcaaaacaccggctgatttattccgtttagatgaaaagatcttatctggtttagaacgtatgggggagaaatcagccaaaaaactgcttaatgcattagaaaaagcaaaatcaaccacttttgcccgttttatctatgcccttggtattcgtgaagtaggagaagcaacggccaatggattaaccgctcattttgtttcattagaggcattacgtgaagcaaatattgaagccttaaaggcagttcctgatgtgggtgatattgttgcaaagcatgtggttaattttttccaagaagaacataataaaaatgtgattgatcaacttgttaatgacattggcattacttggccggcaccggttgtggctactcatgaagcaggtgataatccttttgctggtaaaacagtcgtgctgacaggctctctttctcaattaacgcgagatgaagcaaaagatagattagttgcacttggtgcaaaagtgagtggtagtgtttcgaaaaagacagatatggtcattgctggtgaagcggcgggttctaaattagccaaagcaaatgaattaggtattactgttattgatgaagacgaaatgatccgcttgcttgaacaatctaaataa

SEQ ID NO: 295507 - DNA, 1185 bp, Proteus mirabilis
atgtcttctatcattcactttgttttggctctcgcagttattggtgcattagcatttattgcaagtaataaccgcaaagggatccgtctgcgttatattgtgcagttattaattattgaaatcgcattggcatggttcttcctcaattctgatattggtgaaggctttgtccgtggtttcgctgggctatttgatcacttattaggttatgccgcacaaggtactgagttcgtcttcggtggtatgatgaaaggtggtctagcattcttcttcttgaatgtattatgtcctatcatctttatttctgcattaattggtattttgcaacatatcaaagtattgcctttcgtgatccgcattatcggtacagtgctgtccaaagtgaacggtatggggaaactagaatcgtttaatgcggttagctccttagtacttggccaatctgagaactttatcgcttataaagatgtattgggcaaaatgtctcagcgccgtatgtacactatggcggcgacagcgatgtctacggtatcaatgtcaattgttggtgcttatatgactatgcttgatcctaaatacgttgttgctgcactggttctgaatatgttcagtactttcgttatcctatcagtgattaacccatattctgttgaaaatgaagaagatatccagatggggaatctgcatgaaggtcaaagcttcttcgaaatgttaggtgaatatatcttagctggtttcaaagttgctttaatcgttgcggcaatgttgattggttttatcgcattaattgctgcggtaaacgctatctttagtatgattttcggtattagtttccaagattgcttaggttatgtgttctatccattagcatgggtgattggtatacctgagcaagatgcattacgtgtaggtagtgtgatggcaactaaattagtctctaatgaattcgtcgcgatgggaagcttgcaagatctggctgctgaattaacaccacgctctgttgggatcttatctgtcttcttagtctcatttgctaacttctcttctatcggtattgttgcaggggctattaaaggtctgaacgaaatgcaaggtaatgtggtttctcgttttggtcttaaattactatttggttctacgctagttagcttcttatctgctgctatcacaggcctgtttgtttaa

SEQ ID NO: 295508 - DNA, 222 bp, Proteus mirabilis
atgctagaaaaacagcatcttatagatatagccaacacacaaatgccatttggtaaatataaagggcgaatgctggtggatttacctgaagagtatttattgtggtttgccaagaaaggcaccttccctgaaggaaagctagggcaactaatggaaatgaccctagcaattaaaattgatggcttagaagggttactaaaaccattaaagcagtcgcgttaa

SEQ ID NO: 295509 - DNA, 441 bp, Proteus mirabilis
atggagcaacttgagctagaaaatgccctatcgcttttacagtgtactctggttgcacaacgcacccgttatacaccagagcaagtaacttggggacaatatgatattttagaattattgcgtttacgcggtgatttaacgccctctcaactttgtgaaattttagctatctcacgccaaaatttatctaagtttatgcgaggattaaaatcattaggttttattgctcaggatcgttctaagaaagataaacgtgaattaattacgcatttaacagatgaaggtaaagcttttttagcaagagccgctttaggccgaaaacagaacgcacagaagctacaagcgcaattaacacctacagaacaagctatgtttattgaattgagtcataaagttattaacgcactaatagcggataagttacctacagagcctgattaa

SEQ ID NO: 295510 - DNA, 753 bp, Proteus mirabilis
atgagttattttgaaggcaaaacggtgttagtcactggggctgcaacaggagtaggggaaggcgttgcccaacgattatatcaagcgggtgcaacagtctttataagtggacgacaattagaacaggtgaaaaaaaccgcttacacaatcgatcctacaggtgaaaaagtcatagcattacaagcagatatgacatcacctgagcaagttaaaagcatgtttgaaacaatattagcacaaacaggcgcattacatggattagtgaataatgcaggtattacaggtccgcataatacatcgattgttgattataatattgatgattggaaagcggttatggataccgatattaacggcgtattttacggattgaaatatggtattccggccttactaagaagtggtggagggagtatcgttaatttatcttcgacaaatggtattgtcggtattgccggaatttctgcttatactgcagccaaacatgctgtgttagggatcacccgttcagctgccttggaatttgcacagcaaggtatacgtgtgaatgcaatagggcctgggtatgtagacacaccgcgaatgcaacagttaccggatgaagttcgtcaatggatggcatcaacacatccgatgaagagaatggcaacgcgaaaagaagtggctaatatggtggcttttttactttcagatgagagtagtttttcaacaggcgctttttatgcggtagatgggggatatactgcgcagtag

SEQ ID NO: 295511 - DNA, 165 bp, Proteus mirabilis
atgctatcgaatatctcagccaccgaatattttaacggtgcaaaaacattacgatgccaatggtatgcatcaccaccttcttctgcagcacttgccgctgaatctaactcacttgccacaattgacagctgcatcgacaagcgtagtgatgaaaactcacgttga

SEQ ID NO: 295512 - DNA, 774 bp, Proteus mirabilis
atgtcagaccgtaattttgacgatattgctgataaattctctcgcaatatctatggcacaacaaaaggaaaaatccgccaagcggtgatttgggatgatttacaacaattattaactcaactccctgatcgtccgttgcgtattttagatgcggggggtggtgaaggttatttttccagacaactggcaaaattagggcaccagataattttatgtgatctatcacaagagatgcttaaccgcgcacaagaagcggctattgatgaaggtgttgtcaatcaaatgacgtttatttgttgtgcagcacaagagataaaccagcatctagatgatggtgttgacttaattctattccatgccgtattagagtggatcacagatcagaaaaacgccataaatgtacttaccgatatgctacttcctaatggtatcctatcgttaatgttttacaatgcgaatggtattgtcatgagaaatgctattttgggaaattttcatttggcaaatccggaaataccacgcagaagaaaacgctcattatccccacaaaatccgctacaacctgaggatgtttatcaatggttagcgtcattttcaatgacgattttaggaaaaacgggagtgcgtgtttttcatgactatttgcaaagtcgtcagttgcaaaataaagattttccagcgttgcttgccttagagcaacgctattgtcggcaagagccctatatcagtctggggcgttacattcatgtcatggcacaaaagtgtgtaaattaa

SEQ ID NO: 295513 - DNA, 831 bp, Proteus mirabilis
atgctgtttttgctcaaaaaatatcttggtagcctaatcatgccactaccgctgttattaataattgctttttttgcgcttattttactgtggtttactcgttggcaaaaaacaggaaaaagcgtactcactatcgtgattgtgttacttacgctgttaggcatgcaacctgtcgcagatactctattgatgccgagtgaaaaagcgtatcaagcacgttatgaattacgcgaaaactcaccacaagatgttaactacattgtcgttttagggggcggttttacttataatcctgaatgggctcctagtgctaacctgctaaataatagcttatttcgtgttgctgaaggcgtaaggctttattatcgttatcctaatgccagcttaatttttaccggtggtgccggcgtcaataaaataagtagcgccgaagtggctgcacaagttgcacaatcattaggtgttccagcagaaaaaacgatcgccctttctcaacctaaagataccgaagaagaagcgtatgaagtggataaacttatcggtaaacaaccttttttattggtgacctcagcaaaccatttagcgcgagcagaacgtttctttttagctagaggtatgcaccctattgttgcacctgctaatcagctagccattactacccctctgcatccttgggaaaaatataccccttccgcgtattattttcagcatagtgagcgagcatggtatgaatttatcggctcgatttggcaaaccataaaacctagcgaaccatctagtgtagaggcggttgttgagaataaaaatgaagctgacaatggcataaaatag

SEQ ID NO: 295514 - DNA, 762 bp, Proteus mirabilis
atgtttacggtcattatcccaggtcgatatgcgtcgactcggttacccggtaagccacttgctgatattcatggcaaaccgatgattgttcgtgttatggaacaagcaaagcgttcaggtgctaaacgtgtcattgttgcaactgataacttagatgtggttcgcgctgttgaacaagcgggtggagaagcgtgtatgacccgtgaagaccaccattcaggtacagagcgtttagctgaggttatcgaaaaatatcaattcgcagatgatgagataatcgttaatgtacaaggcgatgaaccactcattccacccgcaattattacgcaagtggcagaaaatttagctaattgtggtgcaggtatggcaactcttgctgtgcctatcgtcgattcaaaagaagcctttaatcctaacgctgtaaaagtggttatggatgcgaaaggttttgcactgtacttttctcgagccactattccttgggaaagagatcgttttaatctctctcatgatgaaataggcgagcattacttacgtcatatcggtatttacgcttatcgtgcaggctttattcgtcgttatattacttgggagccaagcccattggagtctatcgaaatgttagagcagctgcgtgtattgtggtatggcgagaaaatccatgtagcaaaagcgcttgaagtaccgggtgtcggggttgatactcaagatgacttaattgccgcgagagccgcttttcgggcactaaaccaagagttctaa

SEQ ID NO: 295515 - DNA, 180 bp, Proteus mirabilis
atggatcaccgcttactcgaaattattgcttgcccagtttgccatggcaaacttatctttgataaagaaaattcagagcttatctgcaaaattgatcatctcgcttatcctgttcgtgacaatattccggttctactagagaatgaagccagagagttgtcattagaagaggaaaaataa

SEQ ID NO: 295516 - DNA, 216 bp, Proteus mirabilis
atgacattacaattaagaatgggtcgcgtaaaatggtttgacaataataaaggatatggtcttattgttgcaaaagatcttgaacaagatatttacgtcaataaaaaagcgattgccaatacaaaaaataaagcactaaccgaaggccaagacgttgagttttctgttatcaaaacagcagcaggtctagaagccgctgatgttatcgggttctaa

SEQ ID NO: 295517 - DNA, 1002 bp, Proteus mirabilis
atgattgagcggatttggtctggtaaatcgtggtgttaccttcttttattgcctttttcatggctctatggggcgatcagcctttttaggcgttttgcctataaacaaggctggttatcctcatggaaatcccccgtacctgttgttgttgtgggtaacttaacggcgggaggtaatggtaaaacaccagtggtgatttggcttgttgagcaattaaaagcacaaggctttaaacctgcggttgtttctcgtggttatggcgggaaatcagaccaatatcctttattattgtcgccagaaacacagccggccgtcgcaggagatgaaccggttttaatttatcatcgcactggcgtacctgttgccgttgcaccttctcgcagtgatgcagtcaaagcgctattagcgcaatatgatcttgatattattattactgatgatggattacagcattatgccctacagcgagattatgaaatcgttgttattgatggacaacggcgttttggtaatggctggtggttgcccgcagggccgatgagagagcgcgctcatcgtcttgattctgttaatgcggttattgtcaatggtggtgattgtcaagcgaatgaaatagcgatgagtttagagggagaaatcgcggtaaatctaaagacaggtgagaaaaaagccattactgagctgggtaatgcagttgctatggccgggattggtcatcctcctcgtttttttaattccttgcaagataaaggagttaggttaattgcgactaaagcctttaatgatcatagtgaatataccctacaagagttacaaatactgacgcctcaccaagagccgctgattatgacagaaaaagacgcagttaaatgccagcattttgcgcaaaacaactggtggtatttgcctgtcagtgcggtattgaaagatctatctgtgctaaatcaagtcagccaattagtgacaacgcgaaaaaaacttgtatatgatctgaaacaatga

SEQ ID NO: 295518 - DNA, 1746 bp, Proteus mirabilis
atgaatgatatagacctatcaacgtggcaaacattccgacgcttatggccgatgattcggatctttaaagcggggttgtttgctgcagcaggcgcattaatcataaatgcgggtgttgatgcatttatgatctctttattgaaacctctgcttgatgaaggcttcggtaaagcaagtaatgatgtattaaaatggatgcctttagccgttattggcctgatagttctgcgtggtatatctaactttatttctagttactgcctttcttgggtatcaggaaaagtcgtgatgaatatgcgccgtcggctgttttctcatattatgggaatgccggtgagcttttttgatcagcaatctacaggtacgttattatcacgtattacctatgattcagaacaggtcgcttcatcttcatcaggggctttgatcactgttgtccgtgaaggggcttatatcatcggcttatttggcttgatgttctactatagctggcagttatcacttatcttgattgtgatcgcacctattgtggcggtggtgatcagaatggtatcaacacgctttagaaccatcagtaagcgtatccaaaatagtatggggcaggtgacaacaagtgctgaacaaatgcttaaaggccataaagaagtcttaatttttaatggtcaagaagttgagaataagcgctttaatcatgttagtaaccatattcgtcgccaaggtatgcgtatggtggtggcatcttctatatcagatcccattatccagcttattgcttcttttgctttagcctttgttttatatgcagccagttttcctgagattatggataccctgacagcagggacaattacggtggtcttctcttcaatggtcgctttaatgcgcccattaaaatcattaactaacgttaatgctcaattccaacgaggcatggctgcttgccaaacattatttgctatccttgatatggaacaagagaaagataccggcacccttgagctgaaaaaaccaacaggtgatattgagttccgtaatgtcactttccaatatatcaccaaagatacacctgctttgaaaaatctgtccttcactattcctgaagggaaaacagtggcactagtagggcgttcaggctcaggtaaatctactattgcaaacctcctcactcgtttttatgacgttaacgaaggggagattttgatcaatggtcacgatattcgtgattacacattaagatcactacgtaatcaggttgcgttagtttcacaaaatgtgcatctgtttaatgaaacggtagcaaacaatattgtttatgcttgtgaagaccaatatacccgtgaggatatcgagaaagcggctaaaatggcccatgctatggactttatccaaaaattagataatggtctcgatactgaaattggtgaaaatggcgtgttgttatcaggtggtcagcgtcaacgtattgccattgcaagggcactattgcgtgatgcgcctattcttatcttagatgaggcaacttcagcattagatactgaatcagagcgggcaattcaagctgcacttgatgaactgcaaaaaaatagaacatcattagtgattgctcatcgtctatcaaccattgaaaaagcagatgaaattttagtgattgaagatggggaaattgttgaacgtggtgctcatcttgatttaattgagcgaaaaggcgtttatgctcagctacacaggatgcaatttggcaaatga

SEQ ID NO: 295519 - DNA, 2370 bp, Proteus mirabilis
atgattttattagccaagataaaatatatttatagaaataaaatagcattaataaaatggcattatctttatgctaaatatattacaatgctagggctaaaacctcttaatatagattatcttgccactatcattatattaagttgcttacctttacttattcaacgtgaaacactgagtttatccctgagttatacactgattatcgtagggatattgttatatttaattcctttttcatacttacgttttttgttgctattactctttttttggtgctatgcaaacagtactgcctcctctttaatggtcaaaacctctcaacttgctgacaccattgccacaatagaaagcgcaattctagaatatcgtcgcttgccggatagcaatataatgattaaagttgctattcctaaacagcatctcttttctgctaaactctatgccaatatatattggcgtcatccacctaaaaatgtcgtagtcgggcaaacatggctgtttaaaattcactttcgtgcagtacatagttatttaaatgagggaggatttgatagccaaaaatatgcagtttcagtaagagaaacattgtcaggaaaaatattatcagccacattaacgaattctcaccttcctatttatactcaatttattcactatctttcatcttattggcaagccacaaaaaatagtggtgaaatcacagcattagtgttaggtgataaaagaggtatttctgccaaaaataaaatactttatatgaaaacaggtatttcgcaccttattgtgatttcagggctgcatattggccttgctgctctgtttggttggctgatagcgagaggagtacaatatcttttcccaacgcaatggattaacccacaatttcctttggttattagtttaggttgtggtgttttttatgcggctttatcaggatgggggatccccgcaaccagagcgataataggcctaactatttgggttttactccattggcgtagtgggctttttttaccttggcagtgggcgatttggagtgcggcagtgattttattgcttgatccgctcgccatattatccgctagtttttggttatccttttctgcggtatttgccatcattgtttggtattggctctatccattaaataaaagatttagccagcaaaaacgttggtttgttattagactcattcatttgcaactaggactattgatcatcttattaccctttcaatactacttatttggtggtggtaatctttttagcttgcttgttaatttatgggctgtgcctattatttcgtttattaccgtaccacttattatgtgtgggctatttactgcctttttacctgttctacaacctattatttggtcatgggttgatcagtctatcaattgggcatttttctgtgcgccttattttcttgcgtattggcaaccctgtggcgctgtcccttggttatttgcattaagcggtattataactcttttagttatcaaaatgagctggtggcgtcatcatgtgattattttgatcactattgctacttttttatattgtgaactgtctttctctaaacgttatgattggcgaataaccatgttagatgttggacatggtttagctattattattgaaaaagagggagaagcggttatctatgacacagggatacgctggaaaagtggtggctctattgctaaaaatgtcattattccctatctaacgcatcatcgattacaacctgttgccatgataattagccatgatcaccttgatcataccggtggtattgacgacttattacgtgcttatcccaagttaactatccgtagtagctttgacaatccccaacatttaccgtgtttacaagggggagtatggcaatggaaagaccttactttcaacgcgctctggccgctgacattatctcgctcacctaaaaataatgattcttgtgtgatttcattaacggatggtaacagtgttattttattaacaggtgatctggaaaaagagggggaagcgcaactactgagaaggaaaaaagcctatttaaaagcggatattttacaagttcctcatcatggtagccaaacatcatctacattggcgtttattcaagcaatatcaccaaaatatgcactagtttctgctgcacgttatagcccttggcgtttaccttctgataaagtacataaccgttataaaaaagaggccattgattggctaacaacatcgataaatgggcaaatttctatcgagtttaaacacggaaagattgatgtattcacctatagacgagatattttacctcgttggtatcatcagtggtttggtgttttgacgtttcccgagtag

SEQ ID NO: 295520 - DNA, 288 bp, Proteus mirabilis
atgaccaagtctgagttaatcgagagacttgcaggcctacaatctcatctttcggctaagacggttgaagaagctgtaaaagaaatgcttgatcatatggctgatactttggctgatggtgagcgtatcgaagtccgcggattcggcagtttttctctacactaccgtgcgccgcgtacgggtcgtaacccgaaaactggtgataaggtagagctggaaggtaaatacgttccacactttaagccaggtaaagagttacgtgaccgtgtaaatatttatacggaataa

SEQ ID NO: 295521 - DNA, 1674 bp, Proteus mirabilis
atgacagaatcttttgctcaactctttgaagaatccctaaaaacaatcgaaactcgtccaggtgcaatcgttcgtggcgttgttgttgctatcgataaagacgttgttctggttgatgcaggtctgaaatcagaatctgcgattcctgtagaacaattcaaaaacgcgcaaggcgaattagaaatccaagtgggtgacgaaattgacgttgctctggacgcggttgaagatggcttcggtgaaaccgttctgtctcgtgagaaagctaaacgtcacgaagcgtggctgatgctggaaaaagcttacgaagaaaacgaaactgttgttggtatcatcaacggtaaagttaaaggtggtttcactgttgaactgaacggcattcgtgcgttcttaccgggttcactggtagacgttcgcccagttcgcgatacaactcatctggaaaacaaagagcttgagttcaaagtcatcaaattagaccaaaaacgtaacaacgttgttgtgtctcgtcgtgcggttatcgaatctgagaacagcgcagaacgtgatcaactgttagaaaacctgcaagaaggcatggaagttaaaggtatcgttaagaaccttactgactacggtgcattcgttgatctgggcggtgttgacggcttactgcacatcactgatatggcttggaaacgtgttaaacacccaagcgaaattgtcaatgttggcgacgaaatcactgttaaagtcctgaaattcgaccgtgagcgtactcgcgtatcattaggtctgaaacaactgggcgaagatccatgggtagctatcgctaaacgttatccagaaggtactaaactgactggtcgtgtaactaacctgactgactatggttgcttcgtagaaatcgaagaaggcgttgaaggtctggtacacgtttctgaaatggattggactaacaaaaacattcacccatctaaagttgttaacgttggtgatgttgttgaagttatggttcttgacatcgatgaagaacgtcgtcgtatttcactgggtctgaaacagtgtaaagcaaatccatggcagcaattcgcagaaactcacaacaaaaacgaccgtgttgaaggtaaaatcaagtctatcactgacttcggtatcttcatcggcttagacggtggtattgacggtctggttcacttatctgacatttcttggaatgttgcaggtgaagaagctgttcgtgagtacaaaaaaggcgacgaaatcgctgcagtagtactgcaagttgacgctgagcgtgagcgtatctctctgggcgttaaacaattatcagaagatccattcaataattacctgtctgctcacaaaaaaggtgctattgtttctggtaaagtaactgctgttgatgctaaaggcgcaactgtagaattagctgacggcgttgaaggttacctacgtgcttcagaagcttcacgtgaccgcgttgaagatgcaactctggttctgaatgttggcgatgctgtagaagctaaatacactggtgttgaccgtaaaaaccgcgttatcaacctgtctgttcgtgctaaagacgaagcagatgagaaagacgctatcgcttctgtaaacaacaaagaagaagctggtttttcaaacaacgctatggctgaagctttcaaagcagctaaaggcgaataa

SEQ ID NO: 295522 - DNA, 678 bp, Proteus mirabilis
atggcggttatcgtccctgtaattactgttgatgggcctagcggagcaggtaaaggaacattgtgtcaagcattagcaaaagcctttggttggcatttacttgattccggtgctatttaccgtgtattagcattagcagcattacatcatcatgtggacattacatcagaagatgcattagtgcctttagcggcgaatttggatgtgcgctttattcctaatgaaaatggattaagtgttattctggaaggtgaagatgtttcaaccgaaattcgtactgaaaccgttggcaacacagcgtcacaagcagcaacgtttcctcgcgtaagagaagcattattacgccgtcagcgtgcatttcgtactgcaccgggattaattgctgatggccgagatatgggcacaatcgtttttcctgatgcgcaagtaaaaatatttcttgatgccagtgcgcaagagcgtgcacgtcgtcgcatgttacagttgcaggagaaaggctttaatgttaactttgaacgccttttatccgagataaaagagcgtgattatcgtgatagaaatcgcgcagtagcgcctttggttgcggcaaaagatgcattaattctcgattcaacaagcttatctattgatgaagttattgaaaaatcgttagcttatgcgaaaaaaatctgcaattaa

SEQ ID NO: 295523 - DNA, 1287 bp, Proteus mirabilis
atggaatcgttgacattacaacctatcgtacatattgaaggcactatcaatttacccggatcaaaaagtgtctctaaccgtgcacttttattggcggccttagccaagggaaaaacgcgtttaactaatttattagatagtgatgatattcgtcatatgctcaatgcgctaaccgccttaggggtacaatatcaattatcaaataataatacggtatgtgatattgaagggttagcaggttcttttcatccccagcagccacttgagctttttttaggcaatgcaggaacagcgatgcgcccattggcggcagctttaagcctcggagagcacgatattgttcttacaggtgagcctcgtatgaaagagcgtcctattggtcatttagtggatgcgttacgtcaagggggagcaaagattgattaccttgaacaaacggactatccgccactacgtgtttgtgggggattttcggggggaagcgttgatgttgatggcaccgtttccagccaatttctgaccgcattactaatgatggcgcctttagctcagcaagacaccactattaccattaaaggtgaattagtctctaaaccttatattgatatcacgttagccttgattaacacttttggtggagaaattgaaaatcaaaactatcagcgttttatgattaaaggtggtcaacaatatcaatctccgggtaaatatttggttgaaggcgatgcatcttctgcctcttattttttggcggcagccgccattaaaggagggatcgtgcgagtaaccggcattggtaaaaatagcttgcaaggtgatatccattttgcgtctgtgcttgaaaaaatgggggctacaatacgttggggtgacgattatatagagtgtgaacgtggcaagttaaaagggatagatatggatatgaatactattcctgatgcggcaatgacgattgctacgacagcgctttttgctgagggtgaaacgactatccgtaatatctataactggcgggtaaaagagactgaccgtctatctgccatggcgacagaattacgtaaagttggtgcgatggttgatgaaggtcgcgactacttaactgtgataccgcctaaacagttaacgacggctgaaataaaaacctataatgatcaccggatagctatgtgtttttcacttgtggcattgtctaacacgccgattactattcttgatcctggctgtacggcaaaaacattccctgactattttgaaaaactagcaagtatttctcatgcaaaagtttaa

SEQ ID NO: 295524 - DNA, 1089 bp, Proteus mirabilis
atgagtcaggtatataactttagtgcaggtccggccatgttaccggcagaagttcttcgtcgtgcagaattagaattatgcaactggcacggattagggcgttctgttatggagatcagccaccgcagtaaagaatttttggaggttgcccatcaggcagagcaagatctacgggatctactcaatgtaccagaaaattataaaattctgttctgtcatggtggcgctcgtggtcattttgcggcattaccgcttaatttattaggtgagaaaaccaccgctgattatatcgatggaggatattgggctaaaagtgctgccgatgaagcggaaaaatattgttcacctaatatcattaaaataaagacagaaattgacggtaaaatcgcggttaaaccaatgaaagagtggcaattaagtgataatgcagcctatgtgcattattgcccaaatgagactatcgatgggattgctatccacgaagagccggattttgatgataaaaaaattgttattgccgactactcttccgctattttatctcagccacttgatgttagccgttttggcatgatttacgctggagcacaaaaaaatattggtcctgcggggttaacattggtaattattcgcgaagatttactgggtaaagcacgtaaagaaaccccttcagtatttgattacacagtactggctgaaaatgactccatgtttaatacaccgccgacttttgcttggtacttatcaggcatggtgtttaaatggttaaaagagcaaggtggcttgcaagagatagcaaaacgcaattatgagaaagcgacactgctttatagtgcgattgataacagtgatttctatattaaccgtattgccacagaaaaccgctctttgatgaacgtacctttccaaatgtcttctcctgctttagatgcggttttcttaaaagaagctgaagagcaaggattagttgcgctgaaagggcaccgtgtttcaggcggtatgcgtgcatctatttataacgcaatgccttttgctggtgtacaagcattagttgattttatggctgattttgagcgtcgccacgcttaa

SEQ ID NO: 295525 - DNA, 1431 bp, Proteus mirabilis
atgtcggggagtcagtataaaaaggaagatgcgagctggggaatgctacttaaaggacgaaatagtctaaaatcactcgctttagcagggggagtggcattacatgctattaatgtctatatcaccattaccaccctaccttctattgttcgtgatatcggggggcttaatttatatgcatggaataccaccgtttttattttggcatccattctctcttcggcgctaacttctcgtttattaattttgctcgcgccacgtaatagctacttatttgccacactctgctttttagtcggctctattatctgtgctaccgccccttcaatgccaatcttgttggttggccgatttattcaaggtgcggggggcggaatgttactggctttagcttattcattggtcagggtgatgtttccgcaaccattatggtctcgagctatggcgttaatgtccagtatgtggggaatatcaacgttgctgggtcccgcattaggaggaatatttgcagaatataatatttggcggggtgctttttggtctattctttgtgtaggcattccttatgctattctactgtttactatccttcctaaggaaaacagtgctgatattgctaacaaaaaaacatcacttccctacctacaacttaccttattaatattagcagtgttatctatctcaatcggtagcttgtatcacgttacgctatatcatattttatcttttctattagcaattatttttatcttattattaatttatatcgataagagatctcatgatgggctttttcctaaaggaacattctctttctcagccccactatcccctatttatctgactatggcattgctaggaataagtgttcagacagaagtgtttgtgccctattttttacaaatgatccatggcattactccgttactttccggttatttagctgctttagtcggtgctggttggtctttttcggctattatctcttcatctcaaccaagcggtattgctcagcgtcttatgcgtatcggccctgccattaactttactgccataattgttcttggcttattaatttcaaattatctccttttaccttatgggcaagtgattattatttgtctagccctcttttttacaggtgcaggaattggcatggcttggcctcattatctcactcgtgtattacaggtttctcaaggggaagaagcgcaaaaagcggcgacgtcaatcaccactattcagctattttcaaccgctgtaggtgctgccatttcaggtactgttgtaaatatggcaggattaaccaaccccggaggtattgctggcgcacaaaatgcagcccattggttatttattgtattttctattaccccactgattgcatttattactgcaaaaatcgttgtttccaatataagaaaacattaa

SEQ ID NO: 295526 - DNA, 963 bp, Proteus mirabilis
atgaagcgggtactgattgttaaaacctcttccatgggggatgtactgcataccctaccggcattaactgatgcaagagcagcatatcctgagatctgttttgattgggccgttgaagaaggttttgcgcaaattccaagctggcacccagctgttgataccgttattcctgtcgcaatacgtcgttggcgtaaaaactggtttagtgcgcctattcgcgctgaacgtgtacaatttcgtcacgcgatacaagcacatcattatgatgcggtgattgatgcccaaggtttactaaaaagcgcttttttagttacacgctatgcgaaaggcgccaaacacggctattctcgtcaaagtgctagagagcctttagcgagttttttctatgatattcgccacaatgtcagtaaaaaaatgcatgcggtagagcgtatccgccagctatttgcccttagccttaattacccactccccaccactcaaggggactatggtatagcacagcattttctctcattacccgctattgataaacgcccttatttagtcttcttacacgccactacccgtgatgagaaacattggcccgaagcccattggcgagagttaattgcattattggcgaattccggtttacgtatcaaactaccttggggtgcagagcatgaacatcagcgtgcaatacgccttgctcaaggttttgactatgttgatgtattacccaaaatgtcactcgcagaagtggctcaagtgattgccggagcgcaaagtgtcgtttctgtcgataccggattaagccatttaaccgcagccttagataagccgaatattaccctctttggccctaccgatccgggattaatcggcggttatggtaaggcacaaaggtcgttaaaagcagcaggtggggatattggtgagattcaggcactagatgtgctaaaatctttcactcatgtgtaa

SEQ ID NO: 295527 - DNA, 1053 bp, Proteus mirabilis
atgaaaatttttgtggtagggccttcttgggttggggatatgatgatgtcccaaagcctatatcgtacattaaaagcgttacatcccgcggcaactattgatgtgatggcacccgcttggtgtcgtccattattagagaaaatgcccgaggtcgataatgccattgctatgcctttaggtcacggtgccttagcaattggtgagcgtcgccgcttaggtaaacaactaaaagccaaaggttatactcatgcttatgttttacctaactcatttaaatctgctttagtgcctttctttgccgctattcctaaacgtactggctggcgaggagaaatgcgttatggattattaaatgatttacgcccgttggataaagctgcatttcccttaatggtagagcgttatgtcgcgctagcttacgataaacagcaggtacattcagccgctgagttaccaaagccgttattatggccaaaactggctgtctctgacaaagatatcactaccacacttaagcacttttcattatctacacagcgtcctgctatcggtttttgtccgggggcggaatttggtcctgctaaacgctggcctcattaccactacgcgacattggcacagaaacttattagcgaatatggctatcagattttcttattcggttcacaaaaagataggccggcaggggaagagatcaaacacggcttaacccccgatgcccaagcagcttgtattaatctggccggtgatacttctcttgagcaagccgttaacctcattgctgcttgtaaggccgtggtcagtaacgattctggcttaatgcatgtcgccgcagcattagagcgtccattagttgcactttatggcccaagtagtcccgactttacccccccgttatccgataaagcccgtgttattcgtttaattactggctatcacaaagtgcgtaaaggcgatgctgaacaaggttatcaccaaagcttaatcgacattcaaccggaacaggtctttagcgaactcgagcaattactcgctacggagccatcgctatga

SEQ ID NO: 295528 - DNA, 939 bp, Proteus mirabilis
atgattatcgtcactggcggtgcaggttttatcggcagcaatattgttaaagcattaaatgatgaaggttataccgatattttagtggttgataacctaaaagatggcacaaaatttgtgaatcttgtcgatcttaatatcgctgactatatggataaagaagactttattgccagtattgtagccggtgatgattttggtgatattgatgccgtattccatgaaggggcatgctcttctactaccgaatgggatggtaaatatatgatggataataactatcaatattctaaagagttactgcattattgcctcgatcgccaaattcctttcttatatgcctcttctgctgccacttatggtggccgtactgatcattttattgaagaaagaaaatatgaagccccacttaatgtgtatggctactctaaattcttgtttgatgaatatgtgcgccagattttacctgaagcacaatctatggtgtgtggtttccgttattttaatgtgtatggcccccgtgaaggacataaaggcagtatggccagtgttgccttccatttaaatacacaagtcaatgacggacaaaatcccaaattatttgaaggtagtgaaaccttccaacgtgactttatttatgtgggtgatgtggctgcggttaatttatggttctggcgcaacaatgtctccggtatttataattgtggtaccggccgcgcagaatcgttccaagccgtggctgatgcagttatcgcttatcataacgataaagatctctctgttgagcatattgaattccctgagaaactcaaaggtcgttatcaagcctttacacaagctgatctgacaaatttacgcaaagcaggctacagcgccccttttaaaacggtcgcagaaggtgttgctctttatatgcaatggttaaatcaggataagtaa

SEQ ID NO: 295529 - DNA, 1200 bp, Proteus mirabilis
atgtctactcactctttctatcaacagattaatcaacaactcgaacaaacacgtcaagatggcttatttaaaaatgagcggatcatcacttcttcgcaaagtgccgatattgcggttgctgatggtagtcatgttattaacttttgtgccaataactacttaggtttagctaaccacccacaacttattgcagcggcgaaagcgggaatggatagccacggttttggtatggcgtcggtgcgttttatctgcggaacgcaagatctacataaaacattagaaaagaacattgctgaatttttgggtatggaagatgccattttgtactcctcttgttttgatgccaatggtgggttatttgaaacactgatgggatctgaagatgcaattatttctgatgcgctaaatcacgcatcgattattgatggtgttcgtttatgtaaagccaagcgttatcgctatgccaataacgatatggtggcgttacgtgcccaacttgaacaggccaaagcagataatgcccgccatattatgattgccaccgatggggtgttctctatggatggggtgattgctgatctaaaaagtatctgtgatttggctgacgaatatggcgcattagtgatggtggatgactcgcatgcggtgggttttgtcggcgcacaagggcgcggtactcatgagtattgtgatgtattagatcgcgtcgatatcatcacaggaacattaggtaaagctttaggtggcgcatcgggtggttataccgcagctcgtaaagaagtggtggagtggttacgtcaacgctctcgtccttatctattctcaaattctttagcccctgcaattgtgagcgcctctattgcagttttagatatgctgaaatcaggggatgaactgcgcgctcgtttatggcgtaacgcagcactttttcgtgaaaaaatgacggcagcaggttttactttggcgggggctgatcacgcgattattcctgtgatgttaggagatgccaaattagcgcaacaatttgcagctcgtttacttgatgaaggtatttatgtcaccggctttttctacccagtagtaccacaagggcaagcacgtattcgtacacaaatgtcagcggcacacaccccagaacaaattgaacgtgctgttgctgcatttattaaaatcggtaagcaacttaatgtgattgcataa

SEQ ID NO: 295530 - DNA, 1026 bp, Proteus mirabilis
atgaaagcattgtcaaaattaaaagcacaacccggtatctggatgaccgatgtacccgtacctgagcttggtcataacgacgtgatgatcaagatccgtaaaactgccatttgtggtacagatgttcatatttataactgggatgaatggtcacaaaaaaccataccggttcccatggtggttggccatgaatatattggtgagattgttgctattggccaagaggttaaaggttttaatattggtgatcgcgtctcgggggaagggcatattacttgcggtcattgtcgtaattgtcgtggtgggcgtacacacttatgccgtaataccattggtgttggcgtaaatcgtcctggttgttttgctgaatatctggttattcccgcttttaatgcatttaaaattcctgacaatattccggatgaactggcggctatttttgatccctttggtaacgcagtacacacggcgttatcttttgatttagtgggggaagatgtactggtttcaggtgcgggacccattggtattatggcggcagcaatctgtaaacatgtgggggcacgccatgtggtgatcaccgatgttaatgaatatcgccttgatctggctaaaaaaatgggtgttacccgtgcagtcaatgttagcaaagaaaatctaacagatgtgatgaaagaattaggtatgaccgaaggctttgatgttggattagaaatgtctggtgcgccaccggcttttcgtaccatgcttagtacgatgaatcatggtggtcgtattgctttactgggtattcctccctcagatatggctattgattggggacaagtcatttttaaaggattatttattaaaggtatttatggtcgtgagatgtttgaaacatggtataagatggcggcgctgatccagtcgggtcttgatctctcaccgattattactcatcaatttcctatcgatgaattccaaaaaggctttgatattatgcgttcaggtcaatcgggcaaagtaattttagattggcagtag

SEQ ID NO: 295531 - DNA, 966 bp, Proteus mirabilis
ttgcatttacttggcacattacaacgaaatatcgcgctaacacttagtttaatgttgctaagttttctattcagtgcacctgctttttcggcaaaattggctattgttattgatgattttggttatcgaaaaaaagaagataaccaaatcttacaactgccaacagccgtttctattgccatattacccaactcgccccatggtaaagagatggcgacgaaagcccatgcccaaggacgagaaattcttattcatatgccaatggcacccattagcaaacagccattagaaaaagataccttaaagccttccatggatcaggctgaaattaatcgtattattcaaaatgcaattaatcgtgtgccttatgctgtgggtatgaataatcatatggggagtgcgatgacatcggataggcaagcgatggatagagtgatcaaagcccttaatcattctgatctctattttcttgatagtgtcactataggcaatacgcaagcggccacggcagccaaagcggctggcgttccttctttacgccggcatgtatttttagataatgtgcaaacagaagcagaaacccgacaacagcttaatcgtgctattaatttagcgcgtaaaaatggttttgccattgccattggtcacccccacccttcaaccgtaagggcattacaacagcagttaccactactacctgccgatattcagctagtcgcacccagtggtttgttaaccccttcaccagacagcccaatggtgcaagagccacccgcggttataccgccaacagagcaatctaaagagccaaaacctgcaacatggttaaagccagcacaacaagccattatttcaatgaaaaaaagtactcttatgaaagtacttactaaaaaattaatgaccttcgaacaagataagcaattcccttcccagcatttagaaagcaacaaagataaagtcgaataa

SEQ ID NO: 295532 - DNA, 1293 bp, Proteus mirabilis
atggcagagaaaaaggatcttcagaacacaacacaccgtacttaccgtgtattttctttaccgttaatcacgctactgattagcacatctctgttttctgcaaccagcgcttttgccaatacattaacggataatcgtagtcagttaaaagatctacaaaccaccattgctgaaaaagaaaagcgcgttcaagagcaacaaaaacagcgcacggctttacttggacaactcaaatcacaagagacacaaatcgctaatgccagccgctctgtgcatgagacgcaaaaccgcttacaaaccttagctaaagagatcaaaaccatcaccgcaaatattgcccgattgcaaaagcaatataacgagcaacaagcactgttagcacgccaactcgatgcggcttaccgacaagggaaacatcaaggtattgagttactgtttcgcggtgaagaaggtcagcgagaagagcggatcttagcctattacagttatataaatgaagcacgtaaacagtcaatggagcaattggcgcaaacttctaaagagctacaggcagaaaaagacgcccaacaagcgaaacagaacgagcaaaagcaggtactcaccaaacagcaacaagagaaacaaaaactggataatacgctagctgcacgtcaaaaaacattaacgcaactagaatcaaccttaaaagaagatcaacgcaatttagccaccatgcgtgctaatgaaacacgcttaagaaataaaattgctcaagcagagcgtgaagccaaagcgcgagctgagcgtgaagcacgggaagctgctcgtattgccgccaagcaacgtgaagcgcaacagcgtggttcgacctataaacccaccgccgaagaacgctctttaatgtcccgtactggcggattgggtaaacctgcaggtcaggctatttggcctattagaggcagtttattacaccgctttggtgagtctatttccggctcgggtgaattacgttggaaaggaattgtgatccccgcagcacaaggcaccgaagtaaaagcgattgcggatggtcgggtgctgttagccgactggctacaaggatatggtttagtggtcgtcgtcgagcacggcaaaggggatatgagcctttatggctataaccaaagtgcgttagtcaatgttggtcagcaagtcaaagctggacaacctatcgccttggtaggaaacagtggtggacaagagcgttcagcgctctattttgaaattagacgccaaggaaaagcagtcaacccagttccttggcttgggaggtag

SEQ ID NO: 295533 - DNA, 1332 bp, Proteus mirabilis
atgtcgcaaacaaatcaagtgcctaaaattggattcgtttctttaggttgtcctaaaaatttagtggactctgaacgtatcctcaccgaactgcgtacagaaggttatcaagttgttcctacctatgatgatgctgatttagtcatcgtcaatacctgtggctttattgatagcgcagtacaagaatctcttgaagccattggcgaagcactcgatgaaaacggtaaagttatcgtcaccggttgtttaggtgccaaagaaaatcaaatccgtgaagttcacccaaaagtgctggagatcaccggccctcatagttatgaacaagtgttatcacatattcatcactatgttcccaaaccttcccataacccatttaccagcttggttcccgagcagggcgttaaattaacccctcgtcattacgcttatctaaaaatttctgaaggttgtaatcaccgttgtactttttgcattattccttcaatgcgaggtgatttagacagtcgcccaattggtgaagtgttaaatgaagcgaaaagattagtcaatgctggggtgaaagagttactggttatctcacaagatacttccgcttatggagttgataccaaacatcaaaccggtttttgggatggtatgcccgttaaaaccagtatggtcagtttatgtgaacaactggcaaaattagggatttgggtacgtttacattatgtttacccttatccacatgtggatgaggttattccattaatggcagaaggcaaaattttgccttatttagatattccgctacaacacgctagcccgaaagtgctgaaattaatgaagcgcccaggctctgttgagcgtactttagagcgtgtaaaacgttggcgagaaatttgtcctgaattaacgttacgttcaacctttattgtcggtttcccgggagaaacagaagaagatttccaaatgctattggatttcttaaccgaagctcgtttagatcgcgtgggttgttttaagtatagccccgttgaaggtgcgaaagcgaatgaattacctgatcaagttcctgaagaggtaaaagaagagcgttaccatcgttttatgcaactacagcaacaaatttccaccgagcgtctgcaagagaaaataggtaaagttttaccggttatcattgatgaagtggatgaagaaggtgctattggccgtagtatggcggatgcaccggaaattgatggtgctgtttaccttaatgagcagtttgatgtcgagccaggacagattgtacgtgtgctaattgagcatgccgatgaatatgatctgtggggtaccatcgtcgaacaataa

SEQ ID NO: 295534 - DNA, 438 bp, Proteus mirabilis
atgctgcaagaagtaatgcaattttttagccggcacaccctgttaagttttatctggattgcgctgctggtggcggtcattgtattgacctttaaaggccttttttctaaaacgaaaaatatttcccgtacagaagcgatttctttgataaacaaagagaatgcggtttgtgttgatatccgtagccgtgatgagttccgtaaaggacacatcatcgattctatcaatttaacgccttctgagatcaaaagtaacaatattgctgagctggagaaatataaatcacagccggtgattgtggtatcaccatcaggtattgagggtgcaaaacctgctgaaagccttatcaaattaggttttgaaaaagtctttattttaaaagatggtctttcaggttggagtggtgagaatttaccactggcaaaaggtaaaaagtaa

SEQ ID NO: 295535 - DNA, 474 bp, Proteus mirabilis
atgtcagaacagcaaaaccaagagatgacttttcaaattcaacgtatctacacaaaagatatctctttcgaagcgccaaatgccccacaagttttccaaaaagagtggcaaccagaagttaaattagatttagatacttcttctaatacgctagctgaaaatgtatatgaagttatcttacgtgtcactgttacggcaacaatggaagaagaaaccgctttcctgtgtgaagtacaacaagcaggtatctttactgttgaaggtatcgaaggtacacaattagcacattgcttaggtgcatactgcccgaacgtactattcccttatgcacgtgaatgtatcaccaacttagtaggtcgtggtactttcccacaattaaacttagcacctgttaactttgatgcgttgtttatgaactatttacagcaacaacagcaacaggatgcagcaaactcaggagttgaagaagcttaa

SEQ ID NO: 295536 - DNA, 1014 bp, Proteus mirabilis
atgaacgcttctatgacagttatcggtgccggttcatacggcaccgctttagcgattaccttagcgcgtaatgggcacgatgttgtgctgtgggggcatgatcccaagcacgttgcggcattagaacaagcgcgctgtaatcaagcctttctgcccgatgtttcctttcctgatagtttatatatggaagcttctttgcaaaaagcgattgaagcgagccgtaatattcttgtggtgatcccaagccatgtgtttggtgaagtactgcaacaaatcaaaccctttttacgtcaggatgcacgtgttgtttgggcgacaaaaggtcttgaagcacatactggtcgcttattacaagatgttgcccgtgaagtattaggtaatgaaatcccgctcgcagtattatctggccctacttttgctaaagagcttgccgcgggtttgcccaccgcgattgcagtggcctcgacggataatctctttttagagcagttacaacagctatttcattgtggtaaaagtttccgagtctataaaaaccctgattttatcggtgtgcaactgggtggcgctgttaaaaacgtgattgctattggtgcgggtatgtctgatggtatgggatttggcgctaatgcgcgtaccgcactgattacccgaggtctagccgaaatgagccgcttaggtaaagccttaggtgcagatgcggcaacttttatgggcatggctggtttgggtgatttggttttaacctgtacagacaatcaatcacgtaatcgtcgctttggtatgatgctaggtcaaggtttagatgttgatacagcccaagagaaaattggccaggtagtcgaaggttatcgtaacaccaaagaagttcgcgcattagccgaacaagtgggtgtagaaatgccaatcaccgaacagatttaccaaattttatatcaacataaagatgtaaaagaggctgcattggctttattagggcgagcaaccaaagatgagatagacagtagcctgtag

SEQ ID NO: 295537 - DNA, 822 bp, Proteus mirabilis
atgtcgctagaagaactaacaagagtctgggatcatattaaaagcgaagcgcgtgcattggcagattgtgagccaatgttagccagtttctttcatgcgacacttctcaaacacgaaaatttaggtagtgcattaagctatatgctggccaataagctggcaactcagactatgccagccattgcagttcgcgaaattgttgaagaggcttatagtcacgatagctcaatgattgagtcggccgcttgtgatctctccgcggtacgcctacgtgatcccgcggtggataaatattctaccccactgctctatttaaaagggtttcatgcactacaagcctaccgtattgcccattggctatggcaacaaaatcgccaagcgctagctatttatctacaaaaccaaatatcagtcacctttggggtggatatccacccagcggcacgtattggacacggtattatgctcgaccatgcgacaggtattgtgattggtgaaacggcggtggttgaaaatgatgtctctattttacaatctgtgaccttagggggaacaggtaaaacaggaggtgatcgtcacccgaaagtgcgtgaaggggtaatgattggcgcaggagctaaaatccttggtaatatcgaaattggtcgtggtgctaaaattggtgctggctcggtagtattacatgaagtaccagctcatactacggtggccggggtgcctgcccgcattgtcggtcgtcctgatagtgaaaaaccgtcattcgatatggatcaacactttaatggtgttgtacccggctttgagtgtggtgatggtatttaa

SEQ ID NO: 295538 - DNA, 555 bp, Proteus mirabilis
atgcatgctcaagctaaggttacccttgctgaactaaaagattgcttacaggctgaatatattggtgataaaaaaccctttagttggttaagactatttcatcgagtatttttctgccagcgttcccgttacctattttggtggcgggtagcacagtatttttatttctctccccatcgctttttacataaattaggtattcggatcggtgctagcaataatcgtaagtactgtaatgatatctcgttaaaaactcgtattggtaaaggcctttctttaccacacccgattggcattgtactgactaattactgccaactgggggaatatgtcactattatgcaaggggtgactattggcgtaaaagagaaagggggaaaagccaatatccaagtaggagatcatgtttatattggctgtaattcatccattattggtggtgagattaagattggtgataatgcgattattggcgcccatgcattagtattaaaggatgtgggggaagggtgtcggtatatcacgaaagtgattgccgatatcaggcgggtataa

SEQ ID NO: 295539 - DNA, 504 bp, Proteus mirabilis
atgctcaatatcgtcttatttgaacccgaaattccaccgaatacgggtaatattatccgcctgtgtgccaacacaggctttcatcttcatttgatccaaccattgggttttacttgggatgataaacggctacgtcgtgcagggcttgattatcgtgagtttgctgatatcaaacagcatcacgattattatgcttttttagaaagtgaaggattaagccctgataatgcacaatccccgacaggtgcgcggttgtttgcattaaccactaaaggtactcccgcccatagtaatgtaagttatcaagatggggattatctgctatttggccctgagacacgaggtttaccaccttatgtgttggataatatgccaacacaacaaaaaatccgtgtgccaatgttagcggatagccgcagtatgaatctttctaatacggttgccgtggttgtttttgaggcatggcgccaattaggctatccgggtgcgttattaagagattga

SEQ ID NO: 295540 - DNA, 1011 bp, Proteus mirabilis
atgaaatatttagtcacaggtgctgctggatttattggttttcatctaataaaaaaactgatccagcagggtgaaaccgttgttggtattgataaccttaatgattattatgatgttgctttaaaagaagctagacttaatcttttaaatcaactagataatttctctttttcttttattgatttagctgatagagaaaaaattgctcaattatttgagattgagaaatttgatagggttattcatttagctgcacaagctggtgttagatattcactaattaatccgttttcttacgctgatagtaatttaactggttttctaactattttagaagggtgccgacacaataacgttaagcatcttgtttatgcatcatcaagttcagtctatggcttaaatgatgaattgccattttctcctcatgatcaggctaatcatcctgtttctttatatgcagccactaaaaaagctaatgaattaatggcgcatagctattctcatttatatggtattccgactactggattacgttttttcacagtctatggcccttggggacgccccgatatggcattatttaaatttactaaagccattattaacaatcagcctatagatatctataaccatggtgaaatgaaacgtgatttcacttatgttgaagatattgtagaaggtgttacacgtattgctgatgtgatccctacagcccagcaagattggaaagtaagtacaggtactccagcagatagttctgcaccctataaggtttataatattggtaatggatctccggtaaatttaatggattacattagtgcattagaaatacatttaggtaaaaaagcagataaaaatatgttaccaatgcaacccggtgatgtgtacaccacatgggcagatactgaggatttatttaaagcaactggctataaacctcaaacaagcgttgatgaaggtgtaaaacagttcgttgattggtataaaaactattatcaagtaaaataa

SEQ ID NO: 295541 - DNA, 1167 bp, Proteus mirabilis
atgaaaatcaccatctcaggaaccggctatgtcggtctatctaatgggatacttctttcccaaaacaacaaagttgttgcattagatatcaataaagaaaaagtcgaactattaaacaaaaaaatctctcctatctctgataaagaaattgaagagtttttagccactaaagagctcgactttacagcaactttagataaagaattcgcttataaagatgctgaatttgttatcattgccactcctaccgattatgatcctaaaactaactactttaacacctcttctgtagagtcggttattcgtgatgttttagaatataatccaaacaccactatgattataaaatcaaccattccagttggttttactaaacagatgagagaaaaatatcataccgataatattatcttctctcctgagttcttacgtgaaggtcgtgccctttacgataacctttatccatctcgtattgtgattggtgagcaatctgcaagagcagagaaatttgctgagcttttacaacaaggggcattaaaaaaagatattgatgttctttttactgattctacagaagcagaagcaattaagttatttgctaatacttatctcgcactgcgtgttgcttattttaatgaactcgatagctacgcccaagcttacaatttaaatgcaagacaaattattgaaggtgtctgtttagatccgcgtattggtaatcactataacaatccatcatttggttatggtggctactgcttaccaaaagatacgaaacaactgttagcaaattacgaatccgtgcctaataatattattggcgccattgtggaagctaaccgcacccgtaaagactttattgctgattctattatcgctaaatcaccgaagattgttggtgtttaccgtttaattatgaaatcaggctctgataatttccgctcctcttcaattcaaggcattatgaagcgtattaaagcaaaaggcattgaagtagtgatttatgagccagaaatgaaagaagagactttctttaactcaaaattaattcataatttagatgagtttaaagccatgtctgatgtcattattaccaatagaatggcttcagcactaaacgatgttgaagaaaaagtttatactcgagacctctttggtaacgattaa

SEQ ID NO: 295542 - DNA, 1113 bp, Proteus mirabilis
atgaaagttatagctatcacatcaaataccagttggtacctatacaatttcagaaaaaatactattatttcattaataaaaaatggctatgaagtttatacaatatctccatttgatgcctattctaaagaactagaaaatttgggtgcagtacatataaatatcaaaattgattcagccagtaaaaatcctttgattgacctttatacattgatttcattttataaaatatttaaacaaattagatgtaatgctgtgctcaatttcactcctaaaaataatatttatggaacattagcagcaagattaaacaaaataaaagtcatcaataatattgcaggtttaggtacattatttgtaaatgatactattagttgtaaactagcaagaaatttatatcgctatagccaaaaatatgctgataaaatattttttcaaaataacgatgacctttcattatttttagaaaaaaaatatgtcgataaagtacaagttgatagattgcctggctcaggtgttgatttatctcgctttacattgtcattatcagaatataaacataaatttagatttctattagtggcaagaatgctttatgaaaaagggattactttttatgttgaagctgcacgtatcttaaaagaaagatatggcgataaagttgaattttgtcttttaggatttgttggtgtaaataatccttcagcaatcacacataaacaaatgaataactgggtagcagagggaattattaattatttaggtacatctgataccgtagaaaatgaattagcccaagcagattgtatagttctaccttctttttaccgagaaggagtgccaaaaacattactagaagctggagctatgggaaaacccataatcactactgataatgttggttgtcgagaaacagttactcatggttttaatggatatatatgtcaacctaagtctgtatcaagcttagttgatgccatggatagatttattaacttgccctatgaaaaaaaactaaaaatgggtcaaaatagtaggcaaaaaatcgaaactgaatttgatgaaagaatagtcataaaaaaatatttagatgcgttaaaagaaattatgtaa

SEQ ID NO: 295543 - DNA, 981 bp, Proteus mirabilis
atggctaatgttaatccgaatactgcagtgcctttattaaaagcggttaatcttgccaaatattacagcgttaaaggtggactttttacgaaggaaaaaaccgttaaggcactagatggcgtctcttttgagctcgagcgaggaaaaacgttagccgtggttggagagtctggctgtggtaagtctactttaggtcgattattaacgatgattgaagtaccaacctcaggagagctttcatatcaagggcaaaatttattagttaaagataaatcagcggaaaaattacggcgccaaaagatccaaattgtctttcaaaatccttatggatcattaaatccacgtaagaaagtggggcaaatattagaagagcctctattaattaataccacgttaagtgcacaagatcgtaaagaaaaagtactttctatgatggcgaaagtaggtttaaaggctgagcactatagtcgttacccgcatatgttttcaggaggacaacgccaacgtattgctatcgcccgtggtttaatgcttgaacctgatattgtggttgctgatgagcctgtatctgccctagacgtttctgtgcgagctcaggtgcttaatttaatgatggatctccagcaagagatgggactttcttatgtttttatttcccatgatctttccgttgttgaacatattgcagatgaagtggtggtgatgtatttagggcgctgtgttgaaaagggcactaaaacacagatatttgaaaacccacaacatccttacacccaagcgttattatcgacattaaggcgagagagaattaaattaacgggtgaattacctagtccgttaaatccaccaccaggatgtgcttttgctgctcgttgtcggcgcgcatttggaatgtgtacacaattacaaccgactttaaaagagtatcatgggcagttgattgcttgttttgccgtagagcaagatcacggcgagttttaa

SEQ ID NO: 295544 - DNA, 984 bp, Proteus mirabilis
atggcgttattaaatataaatcaattatcagttcactttggtgatgaagatactccgtttaaagcggtagaccggatcagttatcaagtagaagaaggtcaagtagtgggcattgttggcgagtcaggctcagggaaatcagtcagttcattagcgattatggggcttattgattttcccggtcgagtatcagcacaagccttgcaatttgatggacgtgatctgatgcaaatttctgaatctgaacgtcgtgatttggttggtgctgaggttgccatgatatttcaagatccgatgacaagccttaacccttgttttacggtcggttatcaaattatggaggccctcaaagttcatcaaggaggaagtcatcgtacgcgtaaacagcgggcgattgatctattaacgctggtgggtattcctgatcccgcatcacgtttaaatgtttatcctcatcaactgtcgggtggaatgagccaacgggtgatgattgcgatggcaattgcttgccaacctaaattattgattgctgatgagccaactactgctcttgatgtcaccattcaagcgcaaattatcgagctattacttgaattacaaaaacaagaaaatatggcgttagtgttaattactcatgatttggcattagtcgcagaagctgcagataccattattgtgatgtatgcagggcaagttgttgaatcaggcctcgcaacagaaattttcaaagcgcctcgccatccttatacgcaagctttattaaaagcattacctgaatttgcgagtgataaagctcggcttgagtcattaccgggcgtggttccgggacgttatgatagacctatggggtgcttacttaatcctcgttgcccctatgcacaggatacttgttttcagatagagcccgaattgaaagagataggtaaacatcgagtgaaatgtcatacaccattggatgatacagggagaccaacatatggctaa

SEQ ID NO: 295545 - DNA, 903 bp, Proteus mirabilis
atggctgaaaataacgtaacaccggtcattagtgcaccggtgccaatgaccccctttcaagagttttggcactatttcaaacaaaataaaggggcggttgttggcttaatttatattgtcattatgctgttgatagctgcccttgcaggcgttttagcgcctcatgcacctaatgagcagtttcgtgaatttcttctaacgccccctgtatggcaagaaggaggaagctggagttttattttaggtactgatgatgttgggcgggatattctctctcgcttaatgtatggtgcgcgcctttcattactcgttggttgcattgtcgttatactttcgctgattttaggcattattttaggtttaatggctggctattttggtggcatcgttgatatcgccattatgcgcgtagttgatattatgctggcattacccagtcttttattagcattagtgttagtggctatttttgggccttcgattattaatgcttcaatcgctttaacctttgttgccctacctcattatgttcgactgacgcgtgcggcagtgttaacagaaattaaccgtgattatgttgtggcgtctcgtgttgcgggagcaggctctatacgccaaatgtttatcaatatcttgcctaactgccttgctcctttaattgtgcaagcctctttaggtttttctaatgccatcttagatatggctgccttaggttttttgggaatgggcgcacagccaccgacaccagaatggggaaccatgttatctgatgtactgcaatttacccaaagtgcatggtgggtagtgacttttccggggttagctattttgttgacggttttagcctttaacttaatgggtgacggtctacgagatgcactcgatccaaaattaaagcagtaa

SEQ ID NO: 295546 - DNA, 1020 bp, Proteus mirabilis
atgctgcaatttatccttcagcgtttggggctcgtgatcccaacgtttatcggaattacgttattaacctttatttttgtccatcttattccgggtgatccggtcatgattatggcgggagagcgtggattatcaccagagcgtcacgcttatttaatggcggaattaggactagataaaccactatggcaacaatatttaaattaccttaacggcattatgcacggtgatttaggtatttcactaaaaagtcgtattcctgtctgggatgaatttttgccacgatttaaagcaaccttagagctaggtatttgtgccatgatttttgctgtttcagtgggcattcccgttggggtgcttgcggcagtaaaacgaggttctatttttgatcatacggcaatcagtgtgtcacttgcaggatattctatgcctatcttctggtgggggatcatgctgattatgctcgtttcagtgaagcttgatctaacacctgtatcaggccggttggcggatagtgtctttctagatgatagctatccactaacgggatttatgttgattgatacgctcttttggggggaagaaggtgattttcttgatgcgctacaccatattattttaccggccattgtgcttgggactattccattagcggttattgtgcgcatgacgcgttcggcaatgttggaagtattgggagaagattatattcgcactgccagagcaaaaggattaagtcgtgcacgagtgattttgatccatgcattacgtaacgcaatgttacctgttgtgacggtgattggtttacaagttggtacgatgctagccggagcgatactgacagaaactattttttcatggccggggttaggtcgctggttaattgatgctctacaacgtcgagactaccctgttgttcaagggggagtattgctcattgccactatgatcattttcgtgaatctattagtggatgtgctatatggcattgttaacccacgtatccgtcataagaaataa

SEQ ID NO: 295547 - DNA, 1608 bp, Proteus mirabilis
atgagaagctccaaaaaacagacagggttgctaaccgctacaatcggcttactcgctttggctatttcagcgggtgtgcaagcgaaaacattagtgtactgttcagaaggctcaccggaaggatttaacccccaactatttacctcaggtacgacttatgacgcaagctcagtaccgctttatgatcgcttagttgagtttaaactcggcaccactgaaattactcccggcttagctgaaagttgggaagtgagcgatgatggtaaggtgtatactttccatttacgtaaaggggttagttggcatagcaacaaagagtttaagcccactcgtgaatttaacgcagatgatgtgatatatacatttatgcgtcaaatggatccaaatcatccttatcataaagtctctggtggaagttatgaatatttcactgggatggatatgaataatatgatcgagaagatcgaaaaagtggatgacaatacggttcgctttgtacttacccgttcagaagcgcctttcttggctgatatggcaatggacttcgcatctattctttctgccgagtatgcagataatatgatgaaagcagggactcctgagaaagtggatctcaatcctattggtacgggacctttccaactgcaacaatatcaaaaagactcacgtattctttataaagcgaatgataaatattgggggaaaaaacctgatatagatcgtttagttttctctattacgccagatgcttcagttcgttatgccaaattacaaaagaacgaatgtcaggcaatgccttacccaaatcctgctgatatcgccaagatgaaacaaaataaagatatccagctacttgaacaacccggattaaacgtggggtatatctcttttaatgtggagaaaaaaccgctcgataaccaaaaagtacgccaagcattaagtatggcggtgaataaagacgccattattgaagctgtctatcaaggtgcaggtcagaaagcgaagaatcttattccaccgacaatgtggggttataacgatgatatcgtcgattatgaatataaccctgaaaaagccaaagcattgctaaaagaggccggccttgcagatggctttactatcgatttatgggcgatgccagtgcaacggccatataaccctaatgctcgccgtatggctgaaatggtacaagctgactgggaaaaaattggtgtgaaaaccaagatcgtcagttatgagtggggtgaatatctgaaacgtgctaaatcaggtgaacaccaagctgtgatgatgggctggacgggagataacggtgatcctgataacttttttgccacactgtttagttgcgctgcgaaagagcaaggctctaactactcgaaatggtgttataagccgtttgaagatctgatccagcctgcgcggatcacggcagatcacgataagcgtgttgagttatataagcaagctcaagtggtgatgcatgaccaagcgccagcactgattattgctcactccacggtatatgaaccaatcagtaaaaaagtagagaactatgtggtcgacccattaggtaaacaccactttaataatgtctctctaaaatag

SEQ ID NO: 295548 - DNA, 1683 bp, Proteus mirabilis
atgcgtattgagttgtctattttaatctattgtattttatggtgttgtgcttttttttctgtagcgaatgaaagtcatatcgatccccctgtaccagtagatttaccgacagaaacacaacttagagatcaattactacaacaaaatgacaatgtctctttagtgaacttagcaccacaaaataaaagggaatttatcacaccttctgtacattgtttttcaatcaaacaggtaaaactccatcatctcgatgagttttcttcctcatcactgcaacgccaagtggcaaaatggcaagctgaattagttgggcattgtcagtcacaggcattgttagaacaagatatcaatattctgaatgcgctgctttatgatgcaggttatgtgaccagtgaggtgggtaaagttgatctttatgcggatgacgaggtattggatatcacattaaatgtcgggagagtgcaagacattgtttccgaagccccgacagataaacgctatttgatttcacaggcagtgcctgtcaaaaaaggtgatgttttaaacgttaaagatattgaacagggggctgacaatttcagatcccgtcctaatagtaatgtcaaaattcagatagaaccctcgtcaaaagaacatgagtcaattatttctctttctcaagtggggaaaaggacaatggcaggctcggtatcgattgataataaggagcagaaaatttacggagatctatttggtactacaaggctaagctttggtaatctagcgcaacttaatgatactttaatggttattctttcaagtcaactcgataccttaaaatcaagaggcatcaaaaagcagatctttttatggcaagtaccttatcattattggcgtgcgacattatttggttatgatattggttcaaaaatgagagtctctgaagtgacaaaagagttacaaaaaacgcgtcaacagcttctttcttttgagatccagcgccaatttagaccttcaacacagcgtacggtgactttaagtggtggaatacaatattacacttatcgcaatgaagtgtcaggctatcgcttatcagtccatgagcgtcgcagtccttatattaatgcgggtattgagcaaaattatcgctttatgagagggggtttccttaatgctaaacttcattataagcagagtgtttttattcctggcgcaagactatcaccaatagattcccttaatggtgtacccatttttaatcttaattttgatgcattaattccttttaaaatcacttcacagcaatttttttatcaaccagaaatgatattccaactgactcgctcagatattgatggattgcttgataaagcaaccattggtggtctgtatagcgtgtatggttttgagtccggcaaaggttattctgatgccaatcagtttgtttcccgacataaagttacttggcttacacctttgaataaccaaatgctattttccgccatagattatggttccgtttcagacgatagaaaaaatattttttataataaaaataaatatttagttggtgcggcaataggattagaaggtagctttaagaaacttagttatcagttagtatggagcataccgttatcagccccttctagtcgagaagcaacaggatcgcagtttaattttaatacccaatttaacttctga

SEQ ID NO: 295549 - DNA, 303 bp, Proteus mirabilis
atgaaatcacgttggggcattagcacattacttttattcgtcaccacattttcagtccaagcgactacatcacaaacttgtcgggtttactttaaagaagccgataaattcttacaatatattgctacaagagatgacttaaaacagaacatgcctgaaataaaaggtaattttgaacaaaataaaaagttgatcagttcttccaccctaaaagagcaaaaagcaatttgtgaaaaaggaatgcaagagcttgataaccttaacaagatgtttggtccaaaagaagctacagcaaaaaaataa

SEQ ID NO: 295550 - DNA, 258 bp, Proteus mirabilis
atgacgcatgctggccctaataacgagctttattcaggaacaaaaaataacgttaatatgctttctgatgatgaaacagggtgggcaatgaaaccgttagttattcttgatcttccttttagtgcgttattagatactttattgcttccttatgattattatacacaacatgatgacaacagtgataattcacctaaagaaaggataaaaaaattaggtagcactaatgatacacttaatactggaaataaaacctaa

SEQ ID NO: 295551 - DNA, 1659 bp, Proteus mirabilis
atgagtgatattgcattaacaatggtgatgttgtcattagcaggcgccttaggactttggataggtaacgttaaaatctatcgggtcagtttaggaattggcggagtgctgtttggagggattattgtcggccatttagctcaacgttatggactggtgctcaacacacagatactccattttattcaagaattcggccttatcctctttgtatataccattggtatccaagtcggccccggttttttctcttctttacgtgtatctgggcttaagctcaatgcctttgccattttgattattttacttggttcactagtaacagcctttatttatcacttatttaatgtgccactacccattattcttggcattttttctggtgcggtaacgaacacgccttcattaggtgcagggcaacaaatcctcaccgaccttaatattgatccagccataatcagtcaaatgggaatgggatatgctatggcttaccccatgggaatttgtggcattcttttggtcatgtggtttattcgcgtgctgtttaaaatcaatatagagcgagaagcaaaacactttaaccatcagcaaaacagcactaaagagacactgcataccattaacattgccattcgcaatcccaatttagatggcttattaatgcaggatatcccactactcaatgaagatgcccttgtctgttcacgtttgaaacgtggcgacgatattatggttccgatgccttccactattattcagttaggagatttactgcatattgtcggctcaagagaagatctcaataaggttcgccttattttaggcgaagaagtagatgcttcactttctacctcaacccatcaattacaatctgtgcgcattgttgtcacgaatgactcagtattaagtaaacgattaaaagatctcgatttaaaaagaaaatatgatgttgttatcacacgattaaatcgagcaggaattgaattaattcctagtaataacagtatgctacagtttggcgatattttaaatgttgtgggtagacctggggccatagaagcaatcacggtacttttgggtaatgcacgacaaaaattagaacaagtacagatgttgcctgtttttattggcattggtttaggggttttattaggctctatccctatttttattccggggatccctgttgcactaaaattaggtcttgctggcgggccactgatcgtggccttgattttaggccgtattggtactttcgggaaactctattggtttatgcccccaagtgctaatcttgcactacgtgaactcgggatcgtcatgtttttagctgtggttggccttaattccggtggcgggtttattgataccttaatatatggacaagggttaagttggattggctatggtatcgcgatcacactactcccattattgatagtcggtataatggctcgtctcgtttttaagttaaattaccttaccctatgtggcgtacttgctggctcgatgactgatcctcccgctctagcattcgctaattctattcatcaaaatagcggtgctgccgcactttcttatgccacggtttatcctttagctatgtttttacgtatcatcacgccacaactaatggcactgattatttgggctttgtag

SEQ ID NO: 295552 - DNA, 1287 bp, Proteus mirabilis
atgaaaaacgacaaagaagatcctgcaaagatgactcaactatcacgatttgggcaaaaatttgctcgccactcaggtatttctcgcttgatgcaagacttaaatgaaggaatacgtacaccagaagcggtgatgttaggaggaggaaatcctgcccatattcctgagatggacagctattttcaccaattattacaagagatggtgaataatggctcattaagtgatgccgtatgtaattacgatgggccacaaggtaaagatgcgatgctcaacgccttggctatttgtttaaaagaaaaattaggatggaatatttccgctaaaaatattgcgcttactaacggcagtcaaagtgctttcttttatctttttaatttactcggtggccaatctgctgagggtaaaaagcgcaaaattctttttcccatcgctccggaatatattggatatgccgatgccggattagaagaagatttgtttgttgcgaataaacccactattgaaatgctacctgatggacaatttaaatatcatgtagattttgaacatttaacgataggtgatgatattggtgctatttgtgtttctagaccaacaaatccaacaggtaatgtgatcactgatgatgaagtaaaaaagctggatgccttagcgaaaaaacatgatatcccactgattattgataatgcttacggcgtgccctttccggggattattttttcccaagcaactccccactggaatgacaacaccattctttgtatgagcctctctaagctaggattaccgggggctcgttgtggcattattatcgctaatgaagagcttattactgcaatcacgaatgtgaatggcattattagtcttgcccctggaggtattggccctgcgatggcattagaaatgctcaaacgtgatgatttaatgcgattatcccaagagataattagatctttttatcatcaacgagtacttgaaactattgatattattcgtcgctatctacctaaagagcgttgccttatccataaaccggaaggggctattttcttgtggctttggtttaaagatttaccaatctcaagtgaagaactctatcggcgtttaaaaaaacgtggtgtattgatggttcctggtcactatttctttccaggcttagaagagtcgtggcaacatgcacatcaatgtatgcgaatgaattatgtaccagagcctgcattaattgaaaaaggaataaagatcctatcggaagagatagaacatgcttatcgccagaataaataa

SEQ ID NO: 295553 - DNA, 582 bp, Proteus mirabilis
atgaataaacaacgttgtgattgggtaactcaagatcctgaatatctcgcataccatgataatgaatggggaaaaccacagcgagataaatacaaactttttgagatgatctgccttgaaggacaacaggcaggtttgtcgtggtataccgtattaaagaaaagagcgggatttcgtcgttgcttttttgattttcgtcctgaaaaaatagcactaatgactgaaaaagatgtggaaacactactacaagatccgtctattattcgtcatcgtggcaaaattaacgccattatcaataatgcgcgtgcctttttagcgatggaagctcagggtgaagatttcagtgaatttatttggcaatttgttgatggaaaacccattgataaccagtggcagactatttcacaggttcctgcttttactgaaatttcagatgatatggctaaggcgttaaagaaaaaagggtttaaatttgttggtactaccacctgttatgcatttatgcaagcagtaggcatggttaacgatcatatactctgttgtttttgccggcaatctcagccggaaagtagtattaaatag

SEQ ID NO: 295554 - DNA, 906 bp, Proteus mirabilis
atgcaaaagtttgataccaaaacctttcaggggctgatcctgacattacaggattattgggctcgtcagggctgtaccattgttcaaccattagatatggaagtaggagcaggtacctcacacccaatgacctgtttacgagcattaggtccagagcctattgcagcggcttatgttcaaccatcacgccgtccaactgacggacgttacggtgaaaaccctaaccgtctacagcactattaccaattccaagttatcatcaagccatcaccggataacatccaagagctttatcttggctctttaagagaattaggattagatcctactatccatgatattcgttttgttgaagataactgggaaaacccaacattaggtgcttggggattaggctgggaagtttggctcaacggcatggaagtgacgcaatttacctatttccaacaagttggcggattagagtgtaaacccgtcactggcgaaattacttacggtttagagcgtctggcaatgtacattcaaggcgttgatagcgtttatgacttagtttggtgtgatggcccattaggtaaaaccacttacggcgatatttatcaccaaaatgaagtagaacaatcaacttataactttgaatatgcagatgttgacttcttattctcttgtttcgaacaatatgaaaaagaagctcgtgagttgttagagttagaaaaacctctgcctttacctgcttacgaacgtatcttaaaagcaggtcacacttttaacttattggatgcacgtaaagcgatttctgttacagagcgtcaacgctatattttacgtatccgtactttaaccaaagccgtcgctgaagcttactatgcttcccgtgaggcgcttggtttccctatgtgtaaaaagtaa

SEQ ID NO: 295555 - DNA, 243 bp, Proteus mirabilis
  misc_feature (227)..(236): n is a, c, g, or t
atgacaactgagactttccttgtggaaatcggcacagaagagttaccgccgaaagcgcttcgttctttagccgaatcttttgcgacccattttacggctgaactggataacgccaatattactcatggtgatgtatcttggtttgccgctcctcgtcgtttagccatcaaagtggcgaatatggcgaaatctcaagcagataggatcgttgaaaaacgaggccctgnnnnnnnnnngctatag

SEQ ID NO: 295556 - DNA, 1674 bp, Proteus mirabilis
atggtaagcaatgcactggcaaaactgcctatccctaaattaatgcgttggggtgataaagaaacgcattttgtgcgtccagtgcatactgttactttattattgggtgataccctcattgacggtgaaatcttaggtgtacaaagcgatcgtattattcgtggccaccgttttatgggtgaagctgaatttactatcgataatgcagaccagtaccctgaaatcctttatgaacgtggtaaggtcattgccgattacgaaaaccgtaaatccatcattcttcatgatgcacgtcttgcggctgaaaaactaggtggtgtcgctgatttaagtgacagcctagttgaagaagtcacttcattagttgaatggcctgtggtgttaacggcaaaatttgaggaaaaattccttgaagttccggctgaagcattggtttacaccatgaaaggcgatcagaaatattttcccgtttacgataaacaaggtgcgctattacctcactttattttcgtttctaacattgaatcctctgatcctcaacagataatcagtggtaacgaaaaagtggttcgccctcgtttagcggatgcggaattcttctttaaaactgaccgaaaacagcgtttagaagataacttaccacgccttgaaactgttcttttccaaaaagatttaggctctctacgcgacaaaacagaccgtattcaagctctcgccggttttattgctgagaaaatgggtgctgatgtcaataaagcaacacgtgctggtttattatcaaaatgtgacttaatgaccaatatggtgtttgaattcaccgatacccaaggggttatggggatgcattatgctcgccatgatggtgaagatgaagaagttgctgtcgcattaaaagagcaatatcaaccacgttttgcaggtgatgcactaccatctaacccagtagcaagtgctgtcgctatagctgaaaaaatggatacgctggcaggtatctttggtattggtcaacatcctaaaggggataaagatcctttcgctttacgtcgtgctgcccttggtgtgctacgtattattgttgaacaagatttaccattagatattgaagaattaacccaagaagcggctcgcctatatggtgacaaactgacgaaccaaaatgtcgtcagtgatgtcgtagagtttatgctaggtcgtttccgtgcttggtatcaagagctgggttatagtattgatactattcaagcggtattagcgcgccgcccaacacaacctgctgactttaacgctcgtgtaaaagccgttacttacttccgaaccttagaagaagcagctgcattagccgaagccaataaacgtgtttctaatatcttagcaaaatcagcagatgttaagctcaacgataaagtattagcctcggtgctaaaagcgcctgaagaagttcagctagcggctaatctttctgtgctacaagataagctagcccctctatttgctgaacgtaaataccaagaagcattagttgaactcgcctctttacgtgatgttgtgaataacttctttgataaagtgatggtaatggataaagacgaagaaattcgtatcaaccgtttaaccatgctacatgaattacgcgagttgttcttaaaagtcgctgatatttctgttttacaataa

SEQ ID NO: 295557 - DNA, 387 bp, Proteus mirabilis
atggttatttataaaacaaagatgttcaaaaatagtttcaaaaaaataacgcttacgaatgcagaactaatagctatcgctaccgaagtccttgcaggacaatttgaggcagatctaggtggtggtgttatcaagaaacgtgcctgtatccaaggaaaaggtaaaagtagcggaattagaacaattatattttataagcaagggaataatttattctttgctgatggttggaaaaaatcgagtttaagctctaaaaaaaccaaagagatcacagatgatgaacttgagtcctataaagatctagcaaaagatctcttcaatgcaaatcaaaataaaatagataaaatgattgcactaggccttttaacagaggttaaatatgactga

SEQ ID NO: 295558 - DNA, 888 bp, Proteus mirabilis
atggatacacgtttattaaatgcttttgtggtgttagctgatacagggcactttggtgaagcttccaaacagctttgtattagccaacccgcattaactaaacagattaaaacgttggaatcacaactggatatcgtgttgtttgagcgtggtcgccatggtgcaaagctcacgcaagaaggacaatatttactcaatcaagctcaagtagtattacgggaatcccatattttagaaaaacaagctcgtcaattagttgagccacaaaaagtctcactttatgcgggattcggtctgtcatcattaagttttattacttcactattggcgagatttaatcaaattgagccaaatattagcgtcaatattgatgatatgtcttctcataaaatggaagaaaaattattaatgggtgaacttgatgtggctttttctcgtttacccgttatgccccctttacaagggatagcgttgacacaagagcaactgatgttagctattgcaacacaacatattacggtgttggaggcagattataacccattacattatttcgactcattagggcttattttacttgctccagaaaaagggaaaaaactgtatcagcagatacatgcttttttacaacagcataaactagcaccgcgtttattacagcaatctcaagatattcagacccaattagcgctagtcgcggctggattagggatagcattagtgcctaaaagcgcgcaattaatttgtgataaacaaagagtcacattgttacctctatctgggttatacacacaatggaaaattggtgtaatttggaatagtaatattaaaaataaagaacgtgatctttttattaaaataattactgaaaaaattgatattaaataa

SEQ ID NO: 295559 - DNA, 972 bp, Proteus mirabilis
atgaacccattaacgacattacgtgttgcaagcgtacaactacaacataaggctaatgataaagattataatttagccaaaatacatcagtttattgagatggctgccagtgaaaaagtgaatcttctagtatttcctgaaatgtgtatcacgggatactggcatgtccctaaattaccggcgcaacaggtttatgcattaagtgaaaaactggctgatagcgcatcattaaaatccattaaacaaaaagcacaacagtatgcaatggctattggtgttggattaattgaacgggataacaataataatttgtataatacttgggttgtttgtatgcctgatggttcattacaaaaacatcgtaaattgcatgcatttgaacatccggttatttgtagcggagatcaatacaccgtatttgataccccatgggggattaaaatgggtattttaatttgctgggataataatttagttgagaacgcacgggcgacggcgttattaggggcagatattttattggctcctcatcaaactggcggaacccactctcgtagtccacacagcatgaaacctattccaatggcgttgtgggaaaatcgtcagcaagatccacaagcgttacaagctgcttttcaaggtgaacatggcaaaggatggctaatgcgctggttacctgctagagctcacgataatggtatgtttatcatctttagtaatggggttgggcgtgatgaagaagaggtgagaacgggtaatgcgatggttatcgatccttatggacgtattgtaaaagaaagctgtgcgatagaagacgatatggtcgttacggatattgatttaacgcttttgcctgaatcaacagggagacgctggttaacgggcagaagaccagagctatatcagatcctcaccactcgacaaggtaatgaacaagatccgatttccgttcgttttggtaacaaagactaa

SEQ ID NO: 295560 - DNA, 543 bp, Proteus mirabilis
atgttggctagagccttgtttatccctctttcattccctttactcgccttatcttgctattgttgggcaggaaatggtctggtggatagaacatggacagcttcaggaatggatagctatagttatcgccaagcgctaaggcaaccaacggttggctcacgttatactctttttaatattacacccgatatgccaacgccaggtggtacgagtcctgttggtactaaaggaattcgctatattgcgatgaaatatggcccttatgggcaacctgaacactataaaacctaccaagtgatgttctctcactattccaccaccaccacacgtaaagttcgttatttaggtgagttatataccgttgtaggtgatatttatttaatcgatcctgctgctaccaccaatgaatggcaacgcggtcgtagtcaaatagttgaagagtattatgagattttagatacacatggaaataggacaggcaaaggattgcgttttaaccgctgggatagacctataaatataacaaattggtctacatattaa

SEQ ID NO: 295561 - DNA, 876 bp, Proteus mirabilis
atgaaaattttagaatattatttcaaacaattacgcacgctcgcacagccagatcgtgtttatctaaaaaataaatttattcgtaacttaggttatcaacctaattttcgccaccccatgtcattgaatgaaaaaatcaatgcacgtatgttatttgatagagatcctatctatacacgcttagcagataaaatcagtgtcagggagtatgtaaaagaaaagataggcgaaaaatatctggtcaaaatccttaatacttatcgccatccaaatgaaatcgaacttaatacactacctaaccgtttcgtattaaaatgtaatcatgacagtggcagtactattatttgccttgataaatctcaatttgatttggagatggcaaaaaagaaacttaattttcatttaaagagaaatctctaccacgttactcgtgaatggcattataaaaatattagtgcgcaaattatctgtgaagagtatatcgacctttttgatactcaatgcccgatgatcccaaccacatgccgtatccactgttttcatggtcagcctcattatgcggaaattgatatttcggatacaaagggatgcgagtatatcaatgtttatgatacacaatggcaattacagccttttactttagaagatcccaataccccagaatatattgaaaaaccggtacaatttgacaatatgctcacattagccaacaaattagctaacggttttgcctattgtcgggtcgattttttaatgtcagaaaccacactactgtttagtgaaatgacctttacccccaatgcggggcgcattcccattaaaccaaaagagtgggactataaattaggtgaactatggacacctattgcttcatag

SEQ ID NO: 295562 - DNA, 831 bp, Proteus mirabilis
atggatgaaacaaaatcgacaaacttgttaactaaacgtgtaattgttggcatagatcaaacaactgtgcaacacaaaggctcccttaaccaagcagagcaggattatattgcactcgaagttccagttgcattagtgtacaacggaatatctcacgttgttatgatggcaagccctaaaaatttagagttatttgctgtcggattttccttatctgaaggcattataggatcttctaacgaaattcgcagtattgaaatcgttgaaagttgccatggtggcacagaagtacaaatagaattatcaagtcggcgctttatgcaattaaaagagcgacgtcgtagtatggcggggcgcaccggatgcggtatttgtggtacagaacaattagcagaaatttttcgccctatagcgccattaccttttacacaaacattttcactctctttgcttgataacgcactcgagcaactaaaaaccgtacaggaaattggcgagctaacaggatgtactcatgccgcagcttggctatctcctgaggggcaattacaaggcggttgcgaagatgtcgggcgccatgtagctcttgataagttgattggcttaaaaacacaacaaaagtggacagagggtgcaatattagtatcaagtcgtgcaagttatgaaatggtgcaaaaatcagcaatgtgtggtgccgaaattttatttgcggtttccgctgctacctcactcgccgttgaagtggcgaatcaatataatttgacgctggtgggtttttgtcgccgtggaagagcaactgtttttactcatccacaacgactcactgattaa

SEQ ID NO: 295563 - DNA, 588 bp, Proteus mirabilis
atgcaggtcagcagaagacagttctttaagatctgtgctggcggtatggcaggtactacagcggctgccttaggttttgcacccgctgttgcgttagcaggctcacgtcagtataaattactgcgtgcccgtgaaactcgcaatacctgtacgtactgttctgtcggttgtggactattaatgtatagtctgggcgatggcgcgaaaaacgcaaaagaaaccatattccatattgaaggtgatcctgaccacccagtaaaccgtggtgcactttgtcctaaaggtgctggtctcgttgattttatccatagtaaaggccgtttacaatatcctgaatatcgtgctcccggctcagataaatgggtaaaactttcatgggaagagacctttgatcgtatcgcacgcttaatgaaaaaagatcgcgatgccaacttcgaaaaattcaataaagaaggtgttgaagtaaaccgttggttatcaacggggatgctttgtgcctccgcagcaagtaacgaaacaggctttttgacccagaaattctcaagagcacttgggatgctggctgtcgacaaccaagcgcgtgtctga

SEQ ID NO: 295564 - DNA, 2412 bp, Proteus mirabilis
atgaccaaccactgggttgatatgaaaaatgccaaccttatcgtcgttatgggcggtaatgcggctgaagcacaccctgtcggtttccgctgggcaatggaagctaaaatccataataaagccaagttaattgtgattgatcctcgcttcacacgtactgcgtctgttgcggatttctatacgcctattcgttcaggtacagatatcaccttcttatcgggggttatcttatatctgctcgaaaataaaaaatatcaaaaagagtacgttgaggcttataccaatgccagcttgattgtgcgcgaagattaccattttgatgatggtctctttagtggttacgatcctgaaaaacgtcaatatgataaaaccacttggaattacgagatggatgaaaatggtttcgctaaacgcgacaccacgcttcaacatcctcgttgtgtctggaatctattaaaagaacacgttagtcgctacacacctgatgtggtcactcagatttgcggtacaccaaaagaagatttcttaaaagtctgtgaatatattgctgaaacagcagcgaaagataaaacagcctctttcctgtatgcattaggctggactcaacacactgttggtgcacaaaacattcgtactatggcgatgatccaattactgttaggtaatatgggtatggcaggtggcggtgttaatgctctacgtggtcactctaatattcaaggcttaacagatcttggtctgttatcacaaagcttaccaggttacctaaccttgccttctgaaaagcaaacatcgttagaaacctatttagcagccaatacgccaaaaccgaccgtccaagggcaggttaactactggggtaactatcctaaattcttcgtcagtatgatgaagacattttatggtgatcatgctcaacgtgataacgattggggattctcactattacctaaatgggataaaccttacgacgttctacaatatttcgaaatgatggataaaggtgaagtcaatggctatatctgccaaggctttaaccctgtagcttcattcccgaataagaacaaagtgatccgctcattatcaaaactgaaattccttatcaccatggatccgttaaatacagaaacatcttgtttctggcaaaaccacggtgaagagaatgatgtgaaaacagcagatatccaaactgaagttttccgtctacctacgacttgttttgctgaagagaacggctctattgttaactcaggacgctggttacaatggcactggaaaggtgctgatgccccaggaattgcactgcctgatggtgaaattctctcaggtattttccatcgtttacgccaactttataaagaagaaggtggcgcaatgcctgagcaggtgttgaatatgacttgggattactttgatcctaataatccaacatctgaagaagtggctcaagagagcaatggtaaagcccttgtcgacttaaaagacgctgatggcaatatcattttgaagaaaggtcagcaactaagctcatttgctcagttacgtgatgatggtacaacggcaagtggctgttggatcttcgcgggtagctggacagaaaaaggcaaccaaatggctaaccgtgataactcagacccatcaggtttgggtaacacattaggttgggcgtgggcatggcctttaaaccgtcgcattatttacaaccgtgcatcagcagatccacaaggtcaaccatgggatccaaaacgcaagttaatcgaatgggatggtagcaaatggacaggtattgatgtacctgactatagcaatgccgcaccaggctctgatgttggtccatttattatgcaacctgaaggtatggggcgtttattcgctatcgacaagatggcagaaggtccattccctgaacactatgagccaattgaaaccccattaggtaccaacccactgcatccaaatgttgtttcaaacccagcagcacgtgtgtttaaagatgactgggaagagatgggtaaagcagaagagttcccatatgtaggtacgacttaccgtctgactgagcatttccacttctggacaaaacatgcgctgttaaatgccattattcagcctcaacaatttatcgaaatcggtgaacggttagcggcagaaaaaggtatttctcaaggtgacaccgttaaagtcagttccaaacgtggttacattaaagcaaaagctgtagtgaccaaacgtattagaacacttgatgttgatggtcgcaaagtggataccattggtattccgatccactggggttttgaaggggttgcggttaaaggctttattgctaataccctaacgccattcgtcggtgatgcaaatacacaaacgccagaatttaaagcgttccttgttaatgtggaaaaggtgtaa

SEQ ID NO: 295565 - DNA, 939 bp, Proteus mirabilis
atgtcactgcaatcacaagacattattcgtcgctctgccaccaattcccttactcccgcaccacaagtgcgggattacaaggaagaagtggcaaaacttatcgacgttaccacctgtattggttgtaaagcctgtcaggttgcttgttctgaatggaacgatatccgcgataaaattggtactaacgtcggtgtttatgacaacccaacggacttaacggctaaatcatggacagtgatgcgtttctctgaagttgaagagaatggcaaattggaatggttgatccgtaaagatggttgtatgcattgtgctgatccgggctgtttaaaagcatgtcctgcggaaggcgctatcattcaatatgctaatggtattgtggacttccaatctgagcactgtatcggatgtggttactgtattgctggttgtccttttaacgtaccgcgtattaatgaagaagataaccgtgcttataaatgcaccttgtgtgtagaccgtgttgaagtgggtcaagagccggcttgtgttaaaacctgtccgactggtgctatccattttggctcaaaagagtcgatgattaatcttgccaatgaacgtgttacagagttacaaactcgtggctatgacaacgctggactctacgatccacaaggcgttggtggcacacacgttatgtacgtgcttcatcacgcggataaacccaacctgtaccatggtttaccagaaaacccagaaattagctcaacggttaaattctggaaaggtatttggaaaccattagcggcggttggttttgctgctacatttgcaggtgctatcttccactacttaggtgttggccctaaccgcaccaccgaagaagatgaagaagcggcacaaaaagagatggaagcatcttctaaaacacagacctctgtgaataaggaggagcaaaaatga

SEQ ID NO: 295566 - DNA, 657 bp, Proteus mirabilis
atgatgaagaagaaaggtgataaaattcttcgccataccgcatcagagcgaattaatcactgggttgttgtgattgtatttctattcacagccatcagtggtttgggtttcttcttcccatctctgaactggtttatgaacattttaggtacgcctcaactgtcacgtttacttcacccatttgtggggagtgcgatggccattttgtttatctttatgttcttcagatacctgaagtacaactttattgataaagatgacttagtttgggctaaaaatattcataaagtgctaaaaaatgaagaagcgggtgatattggtcactataacttaggtcagaaaggcatttactgggcattatctatcagtttgatcctgctgacggtcagtggcatcatcatttggcgtccttattttgctgaatatttctccattccggtaattcgtattgcattgctggtgcactcatttgccgcaatcttactgattattaccgttatcgttcacgcttatgcagcgttttgggtaaaaggctcaattcgtagcatggttgaaggttgggtgactcgcggttgggcgaaaaaacaccatcctcgctggtatcgtgaagtactggaagaagagaaaaaagaagccgaaaagcagtcacagaaataa

SEQ ID NO: 295567 - DNA, 921 bp, Proteus mirabilis
atgagtattcgcatcgttcctaaagagcaattaggtaaagagccatcagaaaaaagcatcagctttattccaccggtgttattccctaatttaaaaaacctctaccaacgtcgtgccgaacgttttcaagcattagccaaagacaatcctttcgctgattatcttgaatttgctgccgaaattgccttagcacaagaaaaagcattacatgataacccgcttgaattagatttaaccccgttactttctcaacaaacgggtatagcgccgttagataaaaagacctttaagcgtagtaagcattggcatacattactcgcctcaatcattgcggaattacaatccgttgtacctgaaagtgctaaaattgccttagaaaatctctctaaagcctctgaaaccgaattagaagagatggcaacagcactattaaacgatgaatactcaaaagtttccgctgataaatcagtatttatttgggcggcattatcactttactgggcgcaactggcggcaaacattcccggtaaagcgaaaacagaatatggcgaaaatcgccaattttgccccgtttgtaacagtatgcctgtatcgagtatggtacaaattggcaccactcaaggactgcgttatttacactgtaatttatgtgaaaccgaatggcacgtggtacgtataaaatgtactaattgtgaactaacgggcaaattaaattactggtctcttgatagtgaaaatgcgccagtcaaagcagaaagctgtggcgattgtggtagttatttaaaaattttataccaagaaaaagatgctaacgtcgatgctgtagctgacgatttagcctcccttattcttgatgcaaaaatggaagaagaaggttttgcacgcagtagtattaacccccttctattccccaatgaataa

SEQ ID NO: 295568 - DNA, 1392 bp, Proteus mirabilis
atgacacatgatacgcgttcactttacagtcaactgtcatcgatagacagtttgctccatcaggttgacattcaaactttagttgatggttatgggcagacctttatcgttgaacatttacgcaaactacaagaagaagcgcgtatcattattcgacaaaataatcagttaccgcaatggcatgataattgggcggaagaattaaaaaatcgtattgcattacaacgaaaagccgccataaaaccggtttttaatttaacagggacggtattacacaccaatttaggtcgtgcgttaatggcagagtcagcgattgaagcggtaagccaagtcatgcgctctccggcaacattagaatactcccttgatggtgcttctcgaggacatcgtgatcgagccattgccgatctgttatgtgaattaactggcgccgaagatgcttgtattgttaataataatgcagctgccgttttattaatgctggccaccgtcgcaccagataaagaagtggttgtttctcgtggcgaattagttgaaatcggcggtgcttttcgtattcctgatgtgatgtgccaagcgggatgtcgtttaaaagaggtgggaaccactaaccgtacccatctaaaagattaccgtaatgcgattaacgaaaatactgggttgctaatgaaagttcataccagcaactacagcattcaaggctttaccgctgaagttgaaggtgcacaacttgctgcgctgggtaaagagatgaatttacccaccgccatagacttaggcagtggctctatgaccaatttggctgcactgggtttacctagcgagcctatgccacaggactatttgcaacagggtatagatttagtcactttttcaggagataaactattaggtggcccacaagcaggaattattctaggtaaaaaagcgtggatagaagccatccaacatcaccctctaaaacgagcgttacgtgtcgataaaatgacattggcagcattagatgccaccttaagactttatcaacaacctgaaaaaatgatcaaggatatcccgacattacgtttactcactcgtacacaaaccgaaattcatgatatggcgcaacggttacttcctcattttcaggcatattatggcgataactaccatatcacaatatcctcatgtgcttcgcaaataggaagtggctcgttaccgattgaaagcttacccagtgcagcccttacctttgctgccaaagatgggaaaggaagtcaattagatgcccttgcggcacattggcgtaacctagaaaaacctattatcggccgtattacggatggtcgcttatggctcgacctacgttgtcttgaggatgaaaatgcattaatacaggctctatcactatga

SEQ ID NO: 295569 - DNA, 1863 bp, Proteus mirabilis
atgatttttgcgacagccggtcacgtagaccacggaaaaacaacattaatacaagcgatcaccggtgtagatacaactcacttacctgaagagaaaaaacgcggtatgaccatcgatttaggttatgcctattggccacaaaccgatggatcagtcattggttttgtcgatgtccccggtcatgaaaagtttctttctaatatgttggcaggtattgggggaatttctcacgccttattaattgtcgcttgtgatgacggtgtgatggcacaaactattgaacatacagctatcttacgtcttgccggttgtcctaacatcaccgtgatcctcaccaaagcagatcgtgtagagccgccacgtattgatgaagttaaacagcagataaccacacacttacttaatctaggttggtcagcaccacaaatctttgtcacttcagcctcaactggcgcgggtatcgcgccattacgggactatttagttactctacatcagcaagagcaacaacaccctcaatggcataagcgttttcgcttagcaattgatcgtgtatttagtattaaaggtgcgggtttggtggtcacaggtactgcacttgctgggcaaattgtgctaggtgatactttttggctaaccggtgcagacaaaccggtaagaattagggcattacatgcgcaaaatcagccagtagaacaagctggtgcaggtatgcgcattgcgataaatattagtggtgatgtcagtaaagaaacggtttctcgtggtgattggttactatcacaagcaccactttatccttcacacaaaatattagtcagtctaacagctgatgaatctattaaacattggcaaccggttcatattcatcatggtacacgccatattacaggacgtattgcactattaaataataccgatgaaacaccgctattagcagagcttattcttgatgaacccttgtggctggtggataacgatagactaattttacgcgatattagtgcacaacgaactttagcggcggccaaagtgctctgcttacactctcctcgtcggggtaaacgacaagctgagtttttatcttggctaagtgcacttgataaagccaacacggtgagtgataacctcgcactctatttacccaaaggtgaattgttattgacacaatttgcttgggcacagcaactgacggaaactgcacttgatacgctattaaccacctttgatgttatttctatttccggcgtcgtcatttcgaaagccaatgccgaacaggctaaagcaaaactattacacacactagaagaatatcaccagcaacataacgatcaaatgggagtgggtcgttcccgtttaaaacgtatggctcttcccacttatcacgatgagctggtttatcacttaattgatcagttacgccaagaaggcgctattaagcaaactcgaggctggctacatctaccaacacatgggttagccttctcagcagagcaagaggcactatggcagattgccaaaaactattttcaacaatcagagccttggtgggttcgtgatctcgcccatgaaatgaaacatgatgaaaaagtcatacgaggcttattacgcaaagctgctcaactaggtcttattatccccattattgccgatcgctattatactcatgattcgatagaaaaatttgccgctatcatcgtaaaatataacgaaaccaacggcagtgtgaccgcagccgattttcgtgatgaactggccgtaggtcgcaaacttgccgtacaaattcttgagtattttgaccgaacagggttcactcgacgtaaaaaagatcttcatatcttacgagataaagggttattctaa

SEQ ID NO: 295570 - DNA, 1650 bp, Proteus mirabilis
atgaaaaaattatcagggcgtatatatcttgcgcttgttcttattgcttcattatttattgtctttgagaaagcttctctaatttataccgcactactgtctgttagtgtttattttattatttttacgctgtgttttgttttatcgtcccgcgcgctattctcggcaatcacaacagggacactctttatcattatcaagtttatcaatcaacttaaagtccactattataaagagtcactgctattttcagattttaaccttgcttttgatagctcaaatttaggcaccttaacgcagtattgggaagccggtgtcgcgattattgccatggctatttggctaatcattaatatggttaccgcgtggcgtttctcccgtaaatcacctattgctacacgcctaagtagcttattactcattattattggccttacaactattcattttacagtcaataaatggcaatcggagtgggaaggtacgcttcccggtggtcgaggaactgtgactaatttaattatgtcgggttatcaaacggcttatcatcccccttactatgcacaaagtgcagactactttatcgagcaagccaaccgtgtggtcttaccggaaacacaaaccgaggtaaaacccgatattgttatattactacaagaatctaccgtaaacccaaccatttaccaatttgataaaaacgtggatttgcccgatctttttatgtttaaaaaagatgaaggtgtcagtgcccaaagcccattacgagtacaaacctttggtggaggaacttggctttctgagttctcagtattaaccggtctaaataccgatgattttggtgcgcgtaaaaactctgtgttctattttgtggttgataaactcaatgaaagtttattccgccaactcaaatctcaagggtattacaccgtactgctcactccctttaatcgtaacgcctatcacgcgggatatgcttatgaaaaattaggggtagatgagattatccagccacaagaattgggttatccgggaagtttagaagagaatttatggactatccctacccaagatatgattaattatctaaaagaaatcttaaaaacacatacagataagccattatttatcttttctttaactatgtatgagcatggcccttataaaggctcacatagtgatgattatcaattagctggtcagacagaaagcccagatgcaccgggtaaatttagccattatatggaaaaaattattgccagtgatccggctattgaagatttttctcactttgtcgcaaatagagagcgccccactctgtttctttattttggtgatcatcaacctaatattgacctaaaaaattatcaatcaccttttagtgatccagcacatattacccaattcaccttaagggataatttaacgcaaggtgcaaccctttctactggagaattaacggatattaatttcttagggggaatgttgttagagcgcgctcgtttacctttatcaccttactataaagccaatattcaaatgcgccatttatgccaaggcaaattaaatgattgtgaggatgaaaaattagttaatagttataagaactatatttatgacaaattaaacgttgccggtggcaaagataattaa

SEQ ID NO: 295571 - DNA, 1029 bp, Proteus mirabilis
atgtccataagacagttatctcgattgactcatcgacttggtattttgctaacactaagtgtgatgttaatgatatccccaatgacacaagcgacagaaacccaagcaggatggcaacaatttaaagcgcgttacattactcccgaggggcgtgtcattgacagtgctaatcaaaatatttcacactcagaaggtcaaggatatggcatgttaatggcggttatgagtgacgatcgccaaacctttgcacaattatggcactggacagcaatgtcgctgtatcgtggtgatcttggcttatttaaatggcgttatgaacccgaaaataaccaacatacacccgatcctaataatgcaacagatggtgatattttaattgcttgggcattattaaaggccggggaaaaatggcatgatgaaagctatctttcagcatcagattctattcagcatgcgatccttgaacacactttagtgaagtcagaaaactacagtgtactcttaccgggaattaatggttttaaaacccccgaagaaattatcattaacccctcctattttatctttccggcatggaaagatttctatcgagttagtcatgatagtcgctggaaaaatttaattaacgatagccaatccttattaagaaaaatgcgttttggtaaatataaattaccaagtgattgggtaagtttataccctgatggtcatcttgccccgagtgaaaaatggccagcacgatttagttttgatgctattcgcattcctctttatttagcatgggcacaagataaactcgcattacaaccttttgtgaattattggcaacaatttgatcgtgataagacgcctgcgtggatcagcattgatggtaaagagcgtgccgattataacttaacgccaggtatgatggcggtaagagatctgacaatgaaaacagcaattgaaaatgtcgatttaactaaggatacggattattactcttcagccttacatttattagccgcctttgcacagaataataactga

SEQ ID NO: 295572 - DNA, 963 bp, Proteus mirabilis
atgatgaaagctgttattcctgtcgctggattaggcacacgtatgttacctgcaactaaatccattccaaaagaaatgttaccgatagttgatcgtcctttaattcaatatattgttgaagagtgtgcacaagcgggcgttgaagaaattattttagtgacacattcatctaaaaattcaattgctgatcattttgataccagctttgaattagagaatatgttagagcaacgaataaaaaataaattattaaaagaagttcgctctatttgtcctgaaaatgtaaaaattatccaaattcgccaagggcaagcattaggattagggcatgccatttgttgtgctcaccctgtcattggtgataatccttttattgtgttactacccgatgtgctattaaattctcactactgtgatccttgccatgataacttatctgccatgatcaaacgcttccaaaaaacagagcgtagccaaattatggttgaacctgtcgcactcactcaagtacatcaatatggaattgttgattgccaaggtgttttttgtccacaaggtaactgggcgcctattcgtcgtattgtggaaaaacctaatccagaacaagcaccttctaatctttcagtggtggggcgctatgttttctctgcagaaatctggccgttactcgatgggttgcctgcgggggttggcggcgaaatccaattaacggatgctattgatctcttattgaaaaaagaggttgccgaagcttacaccttagttggtaaatctcatgattgtggtaataaactcggttatatgaaagcctttgttgagtatggtttacataatagcgaactgaaagaagagttcgctcattggatacaagagttatatgcaaaagatgtattatcccaaactatggccaataatcgcccaacactaaaagaagtcgataacagtgtgatgacaattttttga

SEQ ID NO: 295573 - DNA, 2022 bp, Proteus mirabilis
ttgcgtttatttttaccgattaaccctgtctttgctgtttacacctcagtggctaatgccaaacataccaaatggctcagtcgttatgcggatattgttcctttagatccggctaatccaatggcggttcgccaattagttaaagaggtcgataaaggccgtcctgttgttattttccctgaagggagaattacggtaactattggtttgatgaagatttatgaaggtgctgcgtttattgctgctaaatcaggggcaaaagttatccctgttagaatagaaggtgctgaatttagctacttttctcgagtgcgtaaaacgttaaatataaaagcaaagctctttcctaaaatcacaataaaagtgctacctgcggttgatttacctatgcctacagcggaaaaatcagcagagcgccgtcgcttatcgggagaaaagctccgtgatattatgatggatgctattatgcaagcacgtcctaatatcacgctctatgaggcatttttacaaggaatgtctcagtttggtcgtttcagtcctcttatttcagatattaatatgaaagaggatagttatcagggcctattgaaaaaaatattaggtgttagtcgtattattgaacgctataccgaacctaatgaacgaattggccttttacttcctaatactaccgttacggttgcggctttatttggggcgacaatgcgccaacgggttgtggcgatgcttaactatactgcgggtagcttaggtgtacaaaatgccatgaaagcggcatccattaaaacgatttttacctcacgccaatttttagagaaaggaaatttattacatattccagaacagactccggatgcaaactgggtttatcttgaagatctcaaagatagcattactagagaagataaacgctggattgcacagcacttactcactcctcataaagcgatgttagcgcaaaaatcgacggacgcagcagttatcttatttacttctggatctgaaggcacaccgaaaggtgttgttcatagccactccagtttattggcgaatgtagagcaaattcgcgctattgctgacttttcacccagagataaatttatggctgcattaccgttattccatgcttttggtttaacggtaagtgtattagctcctatctgcttaggggcacgagtattcctctacccaagcccactacattatcgtgtagtacctgaattagtgtatgaccaaaattgtacagtattgtttggcacttcaactttcttaggtaattatggcaaatttgctcatccttatgattttgctcgactaagatatgtggttgcaggggcggaaaaactgtccgaatcgacacgagtattatggcaggataaatttggtattcgtattttagaaggttatggggtcactgaatgtgctcctgttgtctccattaatgtaccaatgagtgctaagccatataccgtggggcgtttattaccaggcatggaagggcgtttaattcctataagtggtattacggatggtggaagattacaactgcgtggccctaatatcatgcttggctatttgcgcgttgagtccccttataaattagaacagcctacagcaataaatgccgaaggcatcgaagaagcgggttggtatgatacgggagatatcgttgctattgatagcgaaggtttttgcactattaaagggcgtgtaaaacgttttgcaaaaatagcaggagaaatggtttctcttgaaagtgtagagcaattagcgtctaaagcctcggaaggcaaccatgctgtggtggcggtaaatgatccacgtcgaggtgagtcattagtgctttttacaaccgataagcaacttgatcgcagtatattatcggcattagctaaatccactggtgtggcagaaattgcggtaccaaaagatattcgttttctcaaagaaattcctgttttaggaagtggcaaaacggattttgtctcgttaaagcaactcgctgaacaggaaaataattaa

SEQ ID NO: 295574 - DNA, 1203 bp, Proteus mirabilis
atgtcagagaatataagtcagcccccattactgagtaagggcatgaaagcagtattattatcacagtttctttctgcatttgcggataatgctttgttatttgccatactcgctcaatttaaatcagcactttatccagaatggagccagcctattttacaaatggtgtttgtgctggcttatattctcttagctccctttgttggacaaattgccgatcgccagcctaaaggtagggtgatgcttactggtaatgcgttaaaatttgccggtgcttttcttatttgtattggaaccgatccattcttaggttacgccttagtggggatcggcgccgccatttattcgcctgctaaatatggtattttaggtgagttaaccgatggcgagcgtttagtcaaagcaaatggcttaatggaagcatcaactattgcggcaattttattaggctctgtgattggtgggcttctttccgattggagcattatcttagcattagctgtctgtgcgacaatgtatgctttggctgtattggttaactttagcattcccaagttatcacctgctcaaataggccggggctggaatattaaaaaaatattcaatcaattcttagctgcttgtggctctttatggcgagataaagagagccgtttttctctggtaggaacaagtatgttttggggggccggcgtcacattgcgttttctattagtgcaatgggtgcctatagctttgggaatgactgataatacaacaccaacaatattaaatgcgatggtggcgattggtattgtgattggcgctggtttagccgctaagtttgtcacattaaaaacggtccgtcgttgtatgcctgcaggggttttaattggcttaggtgttgtttacttctcattacaaaccaccattattccagcctattttatcttagttgttattggcatttttggtggcttctttgttgtaccattaaatgctttgctacaagataaaggaaagcatagtgtgggagcgggtaatgccattgctgtacaaaatttaggtgagaataccgcaatgttactgatgctaggtttgttctcactagtcaccagtatgggtgtttccgttattacaattggtattggctttggtgctatctttgcgctagcaattggtggattatggttgtgggattgcacaagaaagagagctgaataa

SEQ ID NO: 295575 - DNA, 507 bp, Proteus mirabilis
atgataaataatgatgaaatgacccatctgagcattgaagtcggtcaggcactgctagagcgaaaaaaaacgttaactactgcagaatcatgtactggaggatggattgcaaaagtcattactgatatagcaggtagctcagattattatcatcgaggttttgtgacttacagtaatcaagctaaacatgacatgattggtgtagatgagcaaacattgtctgattttggtgccgtgagtgaacaagttgtctgtgagatggcaaaaggggcactgctaacagcaaatgcagactatgctgtatcggttagtggtattgcaggtcccggcggcggtagtgaagagaagcccgttggtttagtttggtttggctttgcaataaaaacctcagaggggcttcgagtggttgctaaacactgtatttttagtggatcacgagaggaggtgagagcccaatctgtgattttctctttaaaatcaattcttacagaaattattaataattaa

SEQ ID NO: 295576 - DNA, 1068 bp, Proteus mirabilis
atggctattgatgaaaacaaacaaaaagcattggccgcagcacttggtcaaattgaaaagcaatttggtaaaggttctatcatgcgtctgggcgaagaccgttccatgaacgtagaaactatctctacaggatctttatcattagacgttgctttaggtgcaggtggattgccacgtggccgtattgttgaaatctatggccctgaatcttctggtaaaacaaccttgactctacaagttattgcctctgctcagcgtgaaggaaaaatttgtgcatttattgatgctgaacatgcattagacccaatttatgctcaaaagctaggtgtcgatatcgataatctactctgctctcaacctgacacaggtgaacaagctctggaaatttgtgatgcattatctcgctctggtgcggtcgatgttattgtcgtggactccgtggcagcattaacaccaaaagctgaaattgaaggtgaaattggtgattcacacgttggtttagccgcacgtatgatgagccaagctatgcgtaaactagcgggtaaccttaaaaactctaatacactgctgattttcattaaccaaattcgtatgaaaatcggtgttatgtttggtaacccagaaaccacgactggtggtaatgcgcttaaattctatgcttctgttcgtttagacattcgtcgcattggctctgtcaaaaatggtgatgaagtcattggtagtgagactcgcgttaaagttgttaaaaataaagtggctgcaccgtttaaacaagctgaattccaaattatgtacggtgaaggtattaatacctatggcgaactgattgatttaggtgttaaacataagttagtagagaaagcaggtgcttggtatagctacaatggcgaaaaaattggtcaaggtaaagctaacgcaaccaattacttaaaagaacatcctgaaatgtacaatgagttaaacactaaattgcgtgaaatgttgttaaatcatgctggtgaattcacaagtgctgcggattttgcaggtgaagagtcagacagtgatgctgacgacacaaaagagtaa

SEQ ID NO: 295577 - DNA, 2628 bp, Proteus mirabilis
atgagcaaaagcaccgctgagatccgtcaggcgtttctcgacttttttcatactaaaggacatcaaatagtaccaagcagttctttggttccaaataatgatccaacattgctgtttacaaacgcagggatgaaccaatttaaagatgtatttcttggattggacaaccgaccttattcccgagcgacaaccgcgcaacgttgtgtgcgcgcgggtggtaaacataatgatttagaaaatgtgggttatacagcacgtcaccatacattttttgaaatgttaggtaactttagttttggtgactatttcaaacatgatgccattaactttgcctgggaattattaactggcaaagagtggtttaacttacctaaagagagactttgggtaaccgtttatgccactgatgatgaagcttatgatatctggaataaagaagtcggtgttccagctgagcgcattattcgtattggtgataataaaggcgcaccatttgcttctgataacttctggcaaatgggagatacggggccttgtggtccatgtactgagatattttacgatcatggtgatcatatttgggggggaccgccaggaacacctgaagaagacggtgatcgctatattgagatctggaatatcgtctttatgcagttcaaccgtaaatcagatggtacaatggatccattgccgaagccttctgttgatacgggaatgggattagagcgtattactgctgtactacagcatgttaattctaactatgatattgatttattccgcgcattaattaaatccgttgctgaagtgactaatgcgacagacttagcaaataaatcattacgtgtgattgccgaccatatccgttcttgttctttccttgtttgtgatggtgtcattccttctaatgaaggtcgtggctatgtgctacgtcgtattatccgtcgtgctgtacgtcatggttatatgttaggtgcgaaagatactttcttctataaactcgttgcaccacttattgatgtaatggctgaagccggtaaagagcttaagaatcaacaagaaatcgttgaaaaagtacttaaaacggaagaagagcagtttgcacgtactttagagcgcggtttacaattattagatgaagagctagaaaaattaaccggtgatactttagcgggtgaaacggctttccgtctttatgatacatacggtttcccattagatttaactgcggatgtttgccgtgaaagaaatatcaaagttgatgaagaaggctttgaattggcaatggaagagcaacgtaaacgtgctcgtgaatctagcggttttggtactgactataacgaactgattaaagtcgatagtcgcagtgatttctcaggttatgaccataatgagcaacaaggtactattaatgcaattttccataatggtcaaacagtcactgagcttaaagcaggtgaagaagggattatcttcttagataaaacggctttttatgctgagtctggtggccaagtaggtgataaaggtcttttgattggcaaagatagccagtttgaagttaccgacacgcaaaaatatggcaaggctattggtcatattggtaaagtcatttctggatcttttattgttaatcataagatcaatgcagtcattgatgtggctcgtcgtgatgctattcgcttaaatcactcagcaacgcatctattgcatgcggcattacgccaagtattaggtactcatgttacccagaaaggctctttagttaacgataaatatctgcgttttgacttctctcactttgaagcagtaaaaccagaacagttacgtgaaatcgaagacattgttaacgcgcaaatccgccttaactcgccggttgtcaccgagttaatggatcttgaagatgcgaagcaaaaaggtgcgatggcactctttggtgagaaatatgaagaacgtgttcgtgttttaaccatgggggatttctcaactgaactttgtggtggtactcacgcagccagaacgggtgatattggtctattccgcattatgagtgaatcagggactgcggccggtattcgccgaattgaagcgattacgggggctacagcgattgaaagtgttcatgagcaatcggatctgatttctcttgtggctcatgcacttaaaagtgatggtagtaatttagttgagaaaattaaaacggttcaagaaaaataccgttcattagaaaaagaacttcaacaactgaaagatcagcaagcagctcaagaaagctcctcgttaggaagccaagctaagaatgtgaaaggtatcaaacttttagttcgtgaactgaataatgttgaaccaaaaatgttaagaacaatggttgatgatttaaaaaatcaattaggttcagcaataattgtactttctactatttctgatggtaaagtgagcttaattgtcggtgtgactaaggatttgactgctaaaataaaagcaggtgagctaattagttttgtcgctcagcaaatcggtggtaaaggtggtggtcgccctgatatggcacaagctggtggtacagatgttgaagcgttacccgctgctttagcgagtgttgacgagtgggtagaatcgcatctttaa

SEQ ID NO: 295578 - DNA, 189 bp, Proteus mirabilis
atgcttattctaactcgtcgagttggtgaaacgcttatgataggcgatgatgtaaccgtaaccgttttaggagttaaaggtaatcaggtacgtattggcgtaaatgcccccaaagaagtatctgtccatcgtgaagagatctatcaacgaattcaggccgagaaaactcagcccacagataactactaa

SEQ ID NO: 295579 - DNA, 1581 bp, Proteus mirabilis
ttgatcccggacgtatctaaagcgctttcttggttggaagcccatcctaaagttttatgtggtatccaccgtggtatagagcgagaaaccttaagagttactcctgatggtcatttagcggctacaggacaccctgtcgagctaggtaagtcactcactcacaagtggatcacgacagattttgctgagtctctgttagagtttattactcctgttgacgataatattgatcacaccttacattttttaagtgatttgcatcgctatacggcacgtcatttaaccaatgagcgtatgtggccgatgagtatgccttgctttattgaagccgaagataaaataacattagcgcaatttggtacctctaatgttgggcgttttaagacgttatatcgtgaagggctgaaaaatcgttatggtgcgttaatgcaaactatttctggtgtgcattacaatttttcgttacctatcgaattttggcaagcgtgggcaaatatcaccgatgaagaaacaggtaaagaggcgatttcagacggttatttacgtttgatccgtaattactaccgttttggttggataattccttttttctttggtgcttcgccagctatttgtggttcattcttaaaaggtcgaaaaaccaatttaccctttgaaaatacccctaaaggcgcaaaatacttaccttatgcaacttcgttgcgcttaagtgatttaggctataccaataagtcacagagtgatttagatattacttttaatcatctagagacttatgtgaaaggtttgaaaaaggccattcataaaccgtcagaagaatttgctaaattaggtgtaaagaaagacggtaagtatattcaattaaatactaacgtattacaaattgaaaatgaattatatgcgcctattcgtcctaaacgcgtagtcaaaggggatgaatcaccttctgatgcattattacgtggtggtatcgaatatatcgaggttcgctcattagatatcaatccatttacacctatcggcgttgatgaaacacaaattcgtttcttagatttattcttgatttggtgtgtattagcggatgcaccagaaatgaatgcagaagaattggcctgctgtcgtgcaaattggaataacgttattctagaagggcgtaagccaggtcaagttattggcatgggttgtggtgaaagaaaagagccattagcacaagtggggaaagcgctttttgctgacttacagcgcgtagctaaggtattagatagctgttctggaactaaatatctagaagtttgccttaagttagaggaaatgtttgataatccgcaattaaccttctctggcagattattagaaaaaattaaagcacagggtattggtggttatggtctatctttagctgaagaatatcatcaacaattaatcaataccgcttatgaagtgttaacagatgatgcttttgaacatgagagaatttcatctattaaacgtcaggcagacttagaaaagagtgataccatttctttcgatgaatatttgaagctccatgctgggccaaataatgatggtgtggcttcttaa

SEQ ID NO: 295580 - DNA, 516 bp, Proteus mirabilis
atgccgttattggatagctttactgttgaccatacacgtatgtctgcacctgcggtacgcgttgctaaaacgatgaaaacaccctctggtgatactattaccgtttttgacttacgctttactgtcccaaataaaaaagccatgcctgagaaaggaattcatacgttagagcacttatttgcaggtttcatgcgtaatcacttaaatggtgaaggtgttgagatcatcgatatttcgccaatgggatgtcgtacaggcttttatatgagcttaattggtcagcctgatgagcaacgtgttgctaatgcatggaaggcagctatggaagatgtattgaaggttaaagatcaaaaccatattcctgagcttaatgtctaccaatgcggaacttatgaaatgcactcgctagctgaagctcaagatattgcacgagacattttatctcacactattggcattaatcataatgatgaattagcactaccagaagacaaactcaaagagttacaaatctag

SEQ ID NO: 295581 - DNA, 1275 bp, Proteus mirabilis
ttggagcatgtgtcgacaacaacgctcattatcatacttatcggtatgatctttgcctcagcctatttttcaggcactgaaactagcatgatgactatcaatcgttatcggctacgccacgcggccaagcaaggtaatcgctcagccaaaagagtagaaaaactattacagcgtcccgatagattgattagcttagtattaattggtaataacctgattaatattgtcgcctccgctctcgccactattgtaggaatgcgtttatatggtgatgcaggagtagctattgcaacaggtgtattaacctttgtcattcttatttttgctgaggtactaccaaaatctatcgcagcgctttatccagaacgtttcgcttatccaagtagcgttcttttgtcacctttacagaaaatcatgttgcccgttgtgtggttttttaaccaaattaccttagtgtttatgcgcattttcggtattaaatcccccgtaatacagggtaatgcggtatcaaaagaagaactacgcaccattgtgaatgaatcaaaatcgaaactgtcacagcgtaaccaaaatatgctgatttctattttggatttagaaaaagtgaccattggcgatattatggtaccaagaaatgaaatttttggtattgatgtcaatgatgagtggaaatccattgtcagacagttaactcactcccctcatgggcgtattgtcctttatcgtgataccctcgatgatgtcattggtatgctacgagtacgcgaagcttaccgtcttatgacagagaagaaagaatttactaaacaaattttgattaaagcggctgataaaatctattttatcccagaaagtacaccacttagcttacaactagttaattttcaacgtaataatgaaaaagccggtattgtcgtcgatgaatatggtgaaattcaaggattagtcactgttgaagatatcctagaagagattgtcggtgattttactacctcaatgtctccttctttagcagaagaagtgatcccacaaaaagatggttcactattagtggatggcacaactaatatccgagatatcaataaagcctttgcttgccatttaccagaaaatgaagcacgaacaattaatggggttattattgaagagttgggtgatttacccgtagtaggtgccaaaataacgattgatggttatgaatttgaagtgttggaagtgcaagacaatgtgattaagaaagccttgatccgccatcttacgccctctcgtcactag

SEQ ID NO: 295582 - DNA, 801 bp, Proteus mirabilis
atgcccgttatatcaatctctatcgttgctgtctgcgcttatttactcagtctggtgtttattctccccagtttgctgagaaaagagcaaaatggataccgtggattagcgctgctttttgcggtggtcgcccttgtgacccatgctatctcattaaaatttttgattttccgtccacatagcgggcaaaatctgtcactcaccaatttaggggcggtggtcagtttaatggtctgcgttatcatgaccattgttgcttcccgtggtagagcttggtttttgctgcctattgtttattgcttttccatagtcaatctcattattgccgccttgatgccaggtgagtttgtcacccaccttgaaagtagcacatcgctctttattcatattgggcttgctttattaagttacgccactttgttaattgctgctttatatgccttacaactcagctggctcgactatcaactaaaaaataagaaactaaaattttcaccacaaatgccaccattaatgtcaattgaacgtaaaatgtttcatattacccaagtgggggtagtattactgacattaaccttgtgtaccggcctgttatatatggataatatctttggtaaagaaaatatccataaatcaatattttctattattgcgtggtttgtctacatcattttattatggggacacttccgtgagggttggcgtgggaaaaaagtggttatttttaacctgatcggtgccattattttgacattagctttttttggtaatcgtttattgcaagagttaatgcttaattaa

SEQ ID NO: 295583 - DNA, 1362 bp, Proteus mirabilis
atgtttgagaatttaagtgacagattatcgcgcacattgcgcaatatcagcggcagaggccgactgaccgaagaaaacattaaagacacactgcgcgaagtgcgtatggctttattagaagctgatgtggctttgcccgtggttcgtgagtttattgcacgtgtcaaagagagtgcagtaggtcatgaagttaacaaaagtctgaccccaggtcaggaatttgtcaaaattgtacaaaatgagctggtaaatgcgatgggagaggtcaataacgatcttgacctttcagctcagccacctgccgtggtattaatggctggtttacagggggcgggtaaaacgacaagtgttgctaaacttggtaaatttttaaaagagaaaaagaagaagaaagtattagtagtttctgctgacgtctatcgtcccgcagcgattaaacaactggaaaccttagccgaaacggttggtattgactttttcccttcaacggtacaagaaaatcccgtcaccattgctagcaatgcgttaaaacatgctcagctccaattttatgatgtattgctggtggatactgcgggtcgtttacatgttgatgaaggcatgatggaggagatccaacttcttcataaagcaatcaatccagtagaaaccctattcgttgttgatgcaatgacagggcaagatgctgctaacaccgcaaaagcctttaatgaagcactccctttaacaggggtggtattaactaaagttgatggtgatgctcgtggtggtgccgcattatctattcgtcatatcacagggaaaccaattaaattcctcggtgttggtgaaaaaacagaagcattagaacctttccatcccgatcgtattgcctcacgtattttaggcatgggcgatgttctttcattaattgaagatatcgaaagtaaagttgaccgagcgcaagctgaaaagctggcaactaaactaaaaaaaggggacggttttgatttaaatgatttcttagatcagttaaagcaaatgaaaaacatggggggcatggcgagtatgctaagtaaaatgcccggcatgtctcaggtgcctgatgcggtgaaatcacaaatggacgactcaattttagtcaaaatggaagctattattagctcaatgacgaaaaaagagcgccaaaaacctgaaatcatcaaaggttctcgtaaacgtcgtattgcgatgggatcgggaacacaagtgcaagacgtcaaccgcttattaaagcagtttgatgatatgcaacgtatgatgaaaaagatgaagaagggcggcttggctaagatgatgcgtggcatgaaaggtatgatgccaccaggctttccaggtcgctaa

SEQ ID NO: 295584 - DNA, 249 bp, Proteus mirabilis
atggtaacaattcgtttagctcgtggcggcgcaaaaaagcgtccgttttaccaagtagtcgtgaccgatagccgcaatgcgcgtgatggtcgttttattgaacgtgtaggtttttataacccactggcaaccggtaatgcagaagaattacgtttagacgtagaccgtgttgaacattgggttgctcaaggcgcaactgtttcagaacgtgttgctggcctgatcaaatcagcgaagaaaagcgcttaa

SEQ ID NO: 295585 - DNA, 546 bp, Proteus mirabilis
atgagcgaacaaaaaacctttaaagagcctgtagaacctattgttatgggtaagttgggctcaccttacgggatccgtggttggctcagagttttttcttccaccgaacatgccgaaaacatttttgaatatcaaccgtggtttattcaacgacatggtcaatgggaatccattgagatagaaacttggaaacaccacaatcaagatattatcgtcaagctaaaaggtattgacgacagagatgctgcaaatattttgactaattttgaaattgtcgtaagtgctacacaacttcctgatctagacggtgagtattactggaaagatctgatgggttgtcaggtagaaactgacaagggctacgatttaggtgtcgttaacgacatgatggaaacgggctcaaatgacgtcatggtaatcaaagcaaatctgaaagatgcattcggtgtcagggagcggttagttccgtttcttgatgggcaggttatcaagaaagtcgatctctcagcgaaaaaaattatcgttgattgggatcctggtttttag

SEQ ID NO: 295586 - DNA, 753 bp, Proteus mirabilis
atgtggattggggtaattagcctatttcctgaaatgttccgcgctataaccgagtacggggtgactggtcgggcagtgaagcatggtctgctgaatgtggaatgttgggatccccgagatttcacttatgacagacatcatacagtagatgatcgcccttatggcggtggtcccggtatgttgatgatggtacaaccgttaagggaagctattcatcaagcaaaagctgcggcaggtgatggtgcaaaggtgatttatttatcacctcaagggcgcaaactcgatcaacaaggtgtttgcgaattggctacaaatgagaaattaattctggtttgcggtcgatacgaaggaatagatgagcgtgtcattcagaccgaaatcgatgaagagtggtctgttggtgattacgtattaagtggtggggaactccctgccatgataatgatagatgcagtagcacgttttgttcctggtgttcttggacatgcggcttcggcgaaagaagactcttttgcagaaggattactggatcatcctcactatactcgtccagaggtgttagatggtatggcggttccggcagtgttactgtctggtaatcacgctcatattaatcgctggcgtatgaaacaatcgctgggccggacctggctaagaagacctgagcttctggaaagcctagctctgactgacgagcaaagagtgctgttagcagaattccagcaggaacatttgcaaagaacagcagagtaa

SEQ ID NO: 295587 - DNA, 354 bp, Proteus mirabilis
atgagcaatattattaaacaaatcgaacaagaacaaatgaagcaagatgtaccttcatttcgtccaggcgataatgtagaagttaaggtatgggtcgttgaaggttctaaaaaacgtctgcaggcattcgagggcgtggttatcgctattcgtaaccgcggtctgcactctgcatttactgttcgtaaaatttctaatggcgaaggtgttgagcgtgtattccaaactcactccccagtcgtagatagcatcacagttaaacgtcgtggtgcggttcgtaaagctaaactgtactacctgcgtgagcgttcaggtaaggctgcacgtattaaagagcgtcttaacgctaaataa

SEQ ID NO: 295588 - DNA, 816 bp, Proteus mirabilis
atgaaaaaatggcttcttttgatcctgtgtagtttgatgacattcaccagcctcgctaaacaacgtattgtcactattggtggtgatattactgaaattgtttttgcattaggtgcaggtgatcaggtcattgctagagatagtacgagtttagtaccagagcaagttaaatcattacccgatgtgggttatatgcgcatgctcaatcctgaaggtattctttcggttaaaccgacgctgattattgctagcgaattagctcgcccttcttttgcattacgtcgtatcgaaaaagcaggtgtacctgttgaaactattacgggtacacgttcattagaagccattaatgaaaaaatcgatgccattgcaaccctcttacaaaaagaaacagagagtcagcaattaaaagaaaagctcactcaatctattaatcaaattgccacgacgcctattgataaaaaaattatttatatcatgagccatggtggtgttgcccctatggctgccggtcaaaatactgctgcggatactattatcacactggtaggcggaaaaaatgctatgcaaggttttagtagttaccgcttactgtcacaagaaggggttattgccagccagcctgatattttgttggtcactaaagagggaataaaaggtattggaggtatcgaaaaactgtgggacttgcccggcataaagtacacccccgcaggtaaaaataagcgctatatcgttgttgatgatatgggtttattaggctttaccttatcaacccccaaagttatgcaacaaattcgtcaagcattggagcaataa

SEQ ID NO: 295589 - DNA, 474 bp, Proteus mirabilis
atgactgacgttcatcaattctttaaaatcctgcaagaaaataatctcagtcgccagcaagcgttcaaagcggtcagtgatgatttagcttatcaagtagataatagtgccttaaaaacattattagcactggcgaaagaagtacaaaatgaaattatgattttcgtgggaaatcgaggttgtgtacagatctttaccggtaaaattgatcgtttagtgcctcatcaatttgaaaatagtgaacaagtatggattaacatttttaatcctgcgtttacactgcatttaattgagagcgaaattgtggaaagctggatcactcgtaagccaacccaagatggttttgtcacaagtcttgaactatttgatagcaaaggtcaacagattgctcagctctatggacaacgcactgagggaacaaaagaacaacaacaatggcgtgagcaactcaacgctcttgctaaaatagcttaa

SEQ ID NO: 295590 - DNA, 561 bp, Proteus mirabilis
gtgactaaacctctttatgagagctacctgcaagcaaaaaatgaaaaaaaagcatcttatgcgcgtgatttagcaacttaccttaatgtaagtgaagctgagcttactcacgcgcgtgttgggcacgatgctaaacgcttacatggtgatgttcgtgatattttaaccgctctcgcaaccgtaggcgaagtgaaagccattactcgtaatgaaattgcggttcatgaacatcttggtgaatataccaatgctcgttttaacgatcatgcaggattgatcttaaaccctcgagccctcgatttacgctttttcttctctcattgggcaagtatctttgcattaaccgaagagacggctcgtggcattcgtcatagtattcaattctttgatcttcatggtgattctctccataaagtgtataccactgataatactaatatggatgcatggaataccttaatcgatacttatttatcaccagaaaatcccgtattagagattacccccgctaaaccttttactgatgcaccggtaacaacagcaatggcgctcgatgactga

SEQ ID NO: 295591 - DNA, 2043 bp, Proteus mirabilis
atgtctcaatcatcgcgatgcataaaggtgagtgttttagttgttgcaacagcgattagcagtgcattcgctgaaaataaaaatcaaatctatggagaaaaaaatagcggggagagaaacacacaaataataacggtttatgcaacaggtaacgagcgagatagctttacattaccaatgatgtcgaccgtcataaaaaataacagtgcttggacagaaacggcaggaagtgccactgaattgttgcgtcatataccgggcatttcaatatcaggagctggccgcacaaacggtgaaactatcagtatgcgtggctacagtagtaacggtgttttgacactagtagatggcatacgccaaggtactgatacaggtcatattgacagtatttttgtcgatcctctactcattaaacaagttgaagtggttcgtggcccttcagcacttttatatggaagcggtgccctcggtggggttgtggcatatgataccgttgatgccagcgacttgcttgcaaaaaatgaacatggtggtgtgcgtgttacagcccttggtaatacggcacaacagagtcaaggatttggcattaccgcttttggtcaacaagacaatttcgatggattactcgccctctccgctcgtgataaaggtacaactcgctatggaggcggttatcgtgcgcaaaacgatgaaacaatcattaacttattatctaaaggacgttggtttattgatgatagcaatacgttaagtggccaattacgctattatcataacaacgcacaacagcctaaggatccacaactcgccaataacccaacaccggctaatgtagcgacaaatcgtactacaacacaaaaagatgcacagttaacctatcaatatcatcctagtgatatgtcatggattaacctaaaaacacaagcctattacagcgaggtagatattaatgcgaaaacacaacaaaaaggatttgaaggtagagagcaaaaaacctatggcattaaacttgaaaatcgtactcaattagccacctacccctttgctgctcacgctttaacttatggcggtgagatctataagcaaaagcaatcacccagtgcaaatgccgaaagcttccctaaagcagatattcgttttatgtcaggctggttacaagatgaaatgactttacgtgatgtacccatttcattcatcgtcggtacaaggtttgataaatatagcagtcaaaatgatcgttatgatgacatcagcgctgataaatggtcatcaaaaggagccgttagtattacacccacagattggttaatgctttatacctcttatgctcaagcttttagagcaccaacaattggcgagatgtataacgatgctaaacattttgatgccccattccccggagcaccaaccaattactggcgccctaaccctaatttaaagcccgaaaccaattcaacaactgaatacgggttcggttttcaattcgacgacttattatctaataatgataatctgaaaattaaagctgcccatttcaatacgcgtgcaaaagattatattgatacagatgtcgctatttttcagggatatacacaatcgacgaatattccaagagcaactatttggggttgggatatcgagatgaattatcaatcgaagttctttagttgggatttggcttataaccatacaaaaggaaaagataatgccagtaatgcctctattacctctattgagccagatacattaaccagtcgcctcgatattcccgtacccaatagtgatttttccgtaggttgggtgggacaatttactaaaaaaacagattttacaaaacatgatcgctttaatcgcccgaccaatcgccaacaagcgggttatggtgtcaatgatttctacctccgttatgaaggtagtgcttcattaacagggctaacaacctcactggtactgggtaatgcatttgataaaaaatactactcttctgcgggtattcctcaagaggggcgcaatgcaaaagtactggtgagttatcaatggtaa

SEQ ID NO: 295592 - DNA, 2232 bp, Proteus mirabilis
atggatattaatggtatgtctatgctgaaaagaaatttcaaatactccacattagctacagcaatttgtctgttatacgcgccgactacttttgctcatattgaaaaagtagagacagatacattgactgttattgggcaacaagacaatcaaataacggattttcaatctgtcgtcgatacccgttcagcacaagctcaaaccgcctctaccacggggcaattgttaaaacaaatcccggggatcaccgtatcaggaacggggatcgccaatggtggcaatattatgatgcgtggttacgatcaaagaggtgtcaaaatctttgtggatggtattcatcaacctattgataatactatgaacaagcttggtggcctttttattgaaccctcgcttatttcgcgcgttaaggtcaaacatggtggctcttcggttaaacatggaagtggcgcgctaggtggcgttgtttcgttctcaactctccatccaaatgaattattagacgccaataaaaaccttggtgctaaattatttagctcattctcctcagcggataaacatttttcttatggtggtgtgatcgcaggtagacatcagttagtggaagggttattggcttatagccaaagagagcgtggcccgatacgtattgctgatgactcaatattaaataaccacgaacgtatcaaaaattattttgcaaaagcctatgtttaccctacagaggaacaaaccgttattttttctgcccgtcaatataataatgcaggagagcaaagagaagttttaaatcgaatgggagggtttggaaaaagagacagtaataatatgtatcgagccaccaaacaaaatgatatctcactcacctatcatttaaatccaaataattatgattggctcgatctgagcactcaactttattattctcagtttaaaattgcgcatacgtttctgacggatacacgcaaagaaatatatccagacatagaaagtgtgctaggtaattctgaaaaacgtacccaatatacctatggtatgaaagtagaaaacgcctttaatttaaattactttcaagataggttgactcaatctgtgattatcggcattgatgctgaaaaacagaagatggtatcgaataataaggctaaaaatttccctttatcacatatggataatgcctcaggttgggttcataacacgttaagtaccccactattccccattactttaattgcgggtcttcgttacaactattatcaaaatgtccctgataacagtaaaactttagattactacaaagacttaaataaaaaaggagacatgacctccgctgacaaatatcaagaaacatatcaaaatatttctaaaaatattgcgttacgtctcacactgaccaaatggttacagatctattcttcttattctgttgcctttagggcgccgactttaagcgaaatgtataacgactcagtacatttcactataatttccccttttaagaaaagctatgatgctcgttgggttccaaattccacattagaaccagagacgaatagaacatgggaacatggtatcaatttacaaaaaaatgcgttgctttttaccaatgaccagctaaacattaaagcttcatattacagcactgaatcaattgaccacattacttatcaacagtggtatcatagtcgtaagcctatccaattaaaaaatagtcatattgcgttatctcccattaaagatgctcgtgaacctttattatttcaatcagttaacttgcctaaagcgcttattcacggctttgatttaagattgctatattctcatccatacatcgctatgggggtaaattacaatcaaactaaaaccttggaactgtcgtctctagagactatttcaatggtgcgtcctgaaacattaaccgcttttataaatgtacccattatcaaaacaccattttctgttgcttggtcaggaaagtttgccggtccaacggccaaaaaaggcacacataaataccctggttcagaggaagtgactactcgattaaaagaagatcttcagcaataccctggctatggtgtgcatagttttgcagtcaactatcaatccaataataaagatatacaagcctcattggtactcgataatgcattcaacaaagtgtattactcaacggtaggtgtgcctcaagaagctagaaatatcaaaatgtctgtcagttatcgctggtaa

SEQ ID NO: 295593 - DNA, 225 bp, Proteus mirabilis
atgattatcataatcataacctctatcagtattgctattgaaatgaataaaaatgttcataatttaaacgattcatcgataacacgtgaaacaagctccccagtcattcaatctataaatagcatagaattactgggtaaatcgggcgtggtttatattcaacataacggagagttgtatcagttacgccaaacaaaaacaggaaaacttatcctaacaaaataa

SEQ ID NO: 295594 - DNA, 1050 bp, Proteus mirabilis
atgttaaaaacagacgaattacggacaaaggctttagccagcctagtaacgccggaaacgttagctaatgagttacccatctcacaagagattatcagtaatatcacttctgcccgtcaacgcattgaagctattctcactggtgaagataaacgactattagttattattggcccttgctctatacatgatcccaaggcagctaaagagtacgcaacaaaactaaatcaacaaaaagcgcgttttcatgaccgtctagaaatcgtgatgagaacctattttgaaaaaccgcgtaccgttattggttggaaaggccttatttctgatcctttccttgataactcttgtaatgttaatgaaggcattcgtattgcaaggaaactgctaattgagatcaacgcattaggactccccacagccactgaatttcttgatatggtcacggggcaatatattgcagatttaatcagttggggggccatcggggcaagaacaacagagagtcaagttcaccgtgaaatggcctccgccctctcttgccctgtgggatttaaaaatggcactgacggtaatatacgcattgcgatagatgccattcgtgccgctcgtgccagtcacacctttttatcacctgataaaacgggacgtatgacaatttaccaaaccagcggaaatccctacggtcatattattatgcgtggcggtaaaaagcctaattatcatgccagtgatgtagcagatgctgttgatgcactgaaacaacttgatttacctgaacacttggtcatcgattttagccatggtaattgtgaaaaaattcatcgtcgccaacttgaagttgcacgcaatgtcgctcaacaaattacggatggttcacaagctattgttggtgttatggcagaaagctttttacaagagggatcacagaaagtcacagcagataaggtgctgacctatggacaatcgatcactgatccttgtctcagttgggaagataccgaacaattactggaattattagctcaagcagttgaaagtcgatttaaataa

SEQ ID NO: 295595 - DNA, 867 bp, Proteus mirabilis
atgatattaagtttgaattcaattaactgtgataataatgaacttgttgatagaactgttttttttatctctgacggcaccgctattaccgcagaagtcttaggccatgcggtactctcacaattcccattaaaaatgaaaagctataccttaccttttgtatcttctgtagaaagagcggaagaaataaaaaataagattaatgaaatttataaaaaaagtggcgccaagcctctggttttctactctattattagtcctgacgtaaaacgaataataaatagtagtgaaggattctgtcaggatattgtgcagtcattagttctccccttagaaaaagaaattggcgttcaagcgctacctcaattaaataaaacgcacggtttaacggaaaaaaatctcagcaaatatgatgctcgaattgctgctattgaatacactttatctcatgatgatgggatctctttacgcaatctcgaccaggcgcaagtgatcttaatcggtgtctcacgctgcggtaaaacccctaccagtttatatttagcgatgcaatttggcattcaagcggctaattacccttttactgctgatgatatggattttttaaaattgcctcctgaattaaaagagtatcaacataaattgtttggcttaaccattgccccagaacgccttgctgctatccgtagcgaacgtcgtgaaaacagtcgttatgcatctattcgtcaatgtcgtattgaattagcggaagttgaagcgctatttaggaaaaataacattccttacctaaatacgacaaactactctgttgaagaaatttccactaaggtaattgattctatgggattagccagaagaatgttctag

SEQ ID NO: 295596 - DNA, 2376 bp, Proteus mirabilis
atgtccagcaatagcctcaccccgtgcaatgtactttggtataaccaattgggtatgaatgacgttgatcgtgttggtgggaaaaatgcttccctcggtgaaatgatcactaatcttgcggaactgggtgtgtctgttcctaatggatttgccaccacagcgcaagcgtttaatgattttctggaacaaagtggtattaatcagcgtatttatgagttgctcgatagtattgatgttgatgatgttaatcaattagcacaagcgggtaaccaaattcgccaatgggtgattgatacaccttttacccctcagtttgagaaagatattcgtgatgcttatcagaccttaagtgaaggtgaatctgaagcctcatttgcagtacgatcatcagcaaccgctgaagatatgcctgatgcttcttttgccggccaacaagagacatttttaaacgttcaaggtatcgatgcaattttagttgcgattaaacacgtgtttgcttcactgtttaatgatcgcgcaatttcttatcgtgttcaccaaggctatgatcaccgcggtgttgctttatctgcaggtgtccaacgtatggttcgctctgatttagcttcatcaggggtgatgtttactattgatactgaatcaggctttgatcaagtagtctttattacctctgcttatggtttaggggaaatggtggttcagggggcggttaacccagatgaattctatgttcataaaccaactttggcgaaaggtttaccggcaattgtgcgccgtaacctaggctctaaaaagatccaaatggtttatgccgatagcattgagcatggtaaacaagtccgtattgaagatacgccagaagcattgcgcaatcgtttctctttaactgatgatgaagtgcaagagctagcaaaacaagcggtattgattgaacaacattatggacgtccaatggatatcgagtgggctaaagatggtcataatggtcgtctatatattgttcaagcgcgtccagaaacagttcgttctaaccaacaagttatggaacgctatcagttaaatgaaacaggcactgtgattgtagaaggtcgtgcaattggtcatcgtattggtagtggtacggttaaggttatccataacttaagtgagatggatagaatagaggcgggtgatgtgttggtcaccgatatgacagatcctgattgggagcctatcatgaaaaaagcctctgcgattgtgactaatcgtggtggaagaacctgtcatgcggcaattattgctcgtgaattaggtattccagcagtggtaggttgtggcgatgcgacggagtgtattagcgaagggcaagtggtcaccgtctcttgtgctgaaggggataccggatttgtttatgatgggaaactcgatttttctattcaaagctccgcaatcgataacatgccagaacttggcttaaaaatcatgatgaacgtcggtaatcctgatcgcgcctttgactttgctgggttaccaaatgatggggtaggccttgcgcgtttagagtttattatcaaccgtatgattggtgtgcatcctcgcgctttactcgaatacgaagatcaaacagatgcactaaaagctgaaattgatgaaatgatggcgggttatgcatcacctgttgaatattatattggtaaattaaccgaaggtatcgcaacactcgctgcagcattctggccaaaacgtgtcattgttcgcttgtctgattttaaatcaaatgagtatgcaaacttagtcggtggcgatcgctatgagcctgatgaagaaaaccctatgttaggtttccgtggtgcgggtcgttacgtatcggatgatttccgtcgttgttttgcactcgagtgtgaagcagtgaaacgtgtgcgtaatgagatgggattaactaacgtggaagtgatgatcccatttgtacgtacggtgcgccaagcagaagaagtgatagatgagttagcacgtaatggtttaaaacgtggtgagaatggcttaaaagtgattatgatgtgtgaaattccatccaatgctttattagccgatcaattcttggctcattttgatggtttctctatcggctctaatgatatgactcagttaacattgggcttagatcgtgattctggtgtcgtctcatcactgtttgatgaacgtaatgatgcggtaaaagcgctattatctatggcaattcaatcagcgaaacgtcaaggtaaatatgtcgggatctgcggacagggcccttctgaccatgaagattttgcacaatggttaatggaagagggtattgatagcttatctttaaacccagataccgttattaaaacctgggtgaaattagcacaacaataa

SEQ ID NO: 295597 - DNA, 1113 bp, Proteus mirabilis
atggaaaaaccgcagatccatacagatatacccaaaattttattcaccgttctttttatttctttttttattatcggtagtttttggatcctgaatccttttatcgttggttttatttgggctggcatgatagtggttgccacttggcctttactcattattttagaaaaacgagtaaaatatcgctggctatcaaccatgatcatgatgattttaatattactgattttcgtcattccgattattttgttaattagtagtgttattgacaacagtgctccattgattgaactagcaaaatcaccttcagatattcaaccaccacaactgctatggttgaaagagatccccatggttggtaatacgctctatgaaacttggcactctattctcgtttctggtggtaatgccttaatggcgaagatccaaccctatattggacaagcagcaaattggttctttgcacaagccttaaatattggccgttttgcgcttcacttagttgtcatgttacttttttcaggattactctttttacaaggtgaaaatgttgttgcttggttacgccattttgctgtgcgtcttgccggacaacggggtgatgcagccattttattagcctccatgtcaattcgcgcagtggcgctgggtgtggtgttaactgcgctgatccaagccgttattggtggtattggcttaggtatttcgggtgtgccttatgccacagtgttaacggtattgatgtttatttgctgccttgcgcaattaggacctttgttcgttctggttccttctattctatggctattttggaccggtgatactacatggggtatcgtcatgatcatttggggtgggattgtggcgacgatggatggtgtactacgtccattcctcatcaaaatgggagctgacctacctatggtactgattttgaccggtgttatcggtggtattttaacactcggtatgattggtctgtttattggccctgttgtattagccgtagcacacagtttattgaatgcgtggatcaatgaagttcctaaacccgatccagatttaacagaaactgtagaatttatgaataaaaactttatagaaaaagagtaa

SEQ ID NO: 295598 - DNA, 3057 bp, Proteus mirabilis
atgatcccacgtatatcgcaagcaccgcaagtcagtgaactcacaaccgaatttttaaatacactccgacaaaatggttttacaggtgatatatcgagcacttatgccgatagactcactatggcaacagataacagtatttatcagttgctaccacaggcggttatttttcctcgttccacagcggatgtgactattgtagcacgtttagtggatgaacctcgttttcattccctctctttgacaccaagaggtggcggaaccggcactaatggtcaagctttaaccgagggtatcgtggtggatttatctcgttatatgaaacgtattattgagataaacccagaacagcgatgggtaaaggtagaagccggtgtgataaaagatgaacttaatctgtttttaaaaccctatggtttcttttttgcgccagaactgtctaccagtaatcgtgcgacattagggggaatgatcaataccgatgcttcagggcaaggctctatggtatatggcaaaacctccgatcatgtattaggcgtcagagccgttttgctaggcggagaattgcttgaaactcgcgcgatggacagcgctttagctgaaactattgcgaaagaagattctgctgttggtcggatatatcaaacggtattatcccgttgcaaagcacaacgtcagcttattctcgaaaaattccctaaactgaatcgctttttaacgggctatgatttacgccatgtgtttagcgatgacatgaagcattttgatcttacgcgtattctaaccggctcagaagggactttggcctttattaccgaggcaacactcgatattacccccattccaaagcagcgcagtttagtgaatgtgaagtatgactcatttgattccgcattgcgtaacgcgccgtttttagtaaaagcaaaggcgctttctgttgaaactgttgactccaaagtattaaaccttgctcgagaagatattgtctggcattccgttaatgcattgattacggatgtgcccgataaagatatgcaagggctaaatattgttgagtttgccggcgatgataaaacacttattgcctcacaagtggaggatttatgtcagcgcttagataagctgatgaataatggcgaagggggcgttatcggttatcaggtttgtgataacctcgccgatattaaccgtatttatgccatgcgtaaaaaagcagtagggctattaggtaatgctaaagggcatgctaaacccattccttttgttgaagatacttgtgtgccaccagagcatttagcggattatattactgaatttagggcattacttgatagttatcagctcaattacggtatgtttggtcatgttgatgctggtgtattgcatgtgagacctgctttagatatgtgtgatccgcaacaagaacaactcatgaaaaccatttctgatgaaattgttgcattaacggcgaaatatggtggcttactatggggggagcatggaaaaggctttagagcgcaatatagtccagaattctttggcgaaaccctttatcacgaattacgtcaaataaaaacggtgttcgatcctcgaaatagacttaacccagggaaaatatgtcctcctctcgaggttgaggcgccaatgaaacaggtcgatgctattaaacgcggcacatttgatcgcaccattcctgtatcggttcgcgaagattttcgcggtgcattagagtgtaatggtaatggattatgttttaactttgatgttaaaagtccaatgtgtccttctatgaaaataactggacaacgtattcattcacctaaaggcagagcgacattagtcagagagtggttacgtctacttacagagcaaggagtaagccctcagcagttagaaacaagtcttacaaataacaaacctagcttacggggactgattgaaaaaacacgcaatacatggaaagctaaacgtggagaatatgatttctctcatgaggttaaaatagcaatgaatggttgtttagcctgtaaagcgtgctctacacaatgcccgattaaaattgacgtgccatcatttagagccaaatttactcagttatatcatcaacgctatctacgtccgctaaaagatcatattgtggcaaatgtcgaactcaccacaccgttaatggcaaaagtaccaagtctgtttaatttctttattaagcaaccattggtgcaatcgttgagtaaacgtactattggtatggtagatctgcctctattgtcatctccgacattaaagcagcagttagctggacatagcgcattagcgatgaccttggaagagttagagcagttatcagaaaagcaacgaagccattatgttatcgtggtacaagatccatttaccagttattacgatgccaaagtggttgctgactttattaagttgattgaaaaaattggttttaaacctgtgctattgcctttttcacctaacggaaaagcacagcatattaagggctttttacagcaatttagtaaaactgcacaaaaaacagcaacgatgcttaatcgagttgcacagttgtccattccgatggtaggagtcgaccccgctttagtcctttgctaccgcgatgaatatcgggagatattaggggataaacgcggtaactttaaggttcaactggttcatgagtggctaaatcagttagtcagtgagccgattgagatctgcgaagatgctgaaaaatggtatctttttagtcattgtactgagtcaacggcattaccgcaaagtatgcaacagtggcaagcgatattccaacgttatggtcaaccacttgaagtggtaactacggggtgctgtggtatggcgggcacttatggacatgaagtgaataactataaaaattcattgggaatttatcaactgtcatggggaaatgcattgaaaacactccctacagcacgttgcttgagtaccggatattcttgtcgtagccaagtaaaacgtattgataatattgagttaaaacatccattacaggcgcttttggagattatgcaatga

SEQ ID NO: 295599 - DNA, 414 bp, Proteus mirabilis
atgatatggaaacgaaaaacaacattaggacaacttaatcatattagcccaaataatatggtggggcaccttggtatagaactcaccgcactgggtgaggactatcttgaaggcaccatgccagtagatcagcgtactaaacagccttttggtttattacatggtggggcctctgtggtattagctgaaaccttagggtcaattgctggctatttatgcacagaaggtgaacaaaaagtggtgggtttagaaatcaatgccaaccatatgcgagcagtaaaagaaggggttgtaaaaggtgtctgtaaacctattcatttaggtcgtacacatcaagtatggtcaatagaaatttttgatgacgctgaccgtaaagtttgtatttcacgtttaacaactgcggttattgtttaa

SEQ ID NO: 295600 - DNA, 1173 bp, Proteus mirabilis
atgaacctaaagccccgcaacaattcttggaaacgaaatctctacattgtctggtttggttgttttttaacgggtgccggctttagcttgattatgccttttctaccattgtatgtagaagagcttggcattaaagatcatgagtccttaaacctatggactggtgtcgcttttagtattacttttctcttttctgccatagcggcacctttttggggaaaattgtcagatagaaaaggacgcaaattaatgctattacgttctgccttaggtatggcgatcgtcatggtactcattggttttgctcaaaatatttggcaactattaattttacgcgctttattaggggtattagggggttttgtgcctaatgctaatgctcttatcgccacacaagtgcccgttaaaaaaagtggttgggcattaggaactctttctacgggtgcagtaagtggcgcattaattgggccattaattggtggaatacttgccgatctctacggtttacgtccggttttctttattacagccgcggttttatttatctgttttatagtgaccctattttttgttagcgaaaattttacccctgtttctaaaaaagatgcattatccacccagcaagttttttcatcactcaaaaataaaagattagtcatttgcctgtttttcaccaccatgattatccaagtggcaacaggctctgttacgcctattttaacactttatatccgtgatctagccggctctatcagtaatcttgcctttattagtggtgtgattgcatctgttcccggtattgccgctttaattagtgcccctcgttttggcaaattaggtgatcgcataggccctgataaggtgcttattttcacattgggtttatctatttttatgcttattccgatggcactcgtcagtaattattgggaactaggcgcattacgttttttattgggtgcggtaaacgctgccatgttacctgcggtacaaacgcttattttatacaatattacgcctgcaattgctggtcgaattttcagctataatcaagccttacgagatgtaggaaatgttactggaccgttaatgggcgcgtttgttgcggccaattatggatttagagctgttttttatttcaccgctgcggtggtattttttaatcttggttaa

SEQ ID NO: 295601 - DNA, 942 bp, Proteus mirabilis
atgataaagtcacctccatttaaaacatcatttttacagcccaaatattggctgacatggttggggataggattactctatcttctcgttctgctcccttatcccgttatctactggttgggtacacggctaggtcgtttatctaaagtctttttaaaaaaacgtgtacaaatagcagaacgtaatcttgagctatgttttcctgacatgcctaaaaatgaacgtgaagcgttagtgaataaaaacttcgaatccgtaggtatggggctatttgaaacaggaatggcttggttttggcctgattggcgtgtgaaacgttggtttaaaatcagtggtagagaaaatattcaaaaagtacaagaaactggccaaggtattattgtcgttggtatacactttttaactctagagttaggtgcacgtatatttggcatgctaaaccccggtattggtgtgtatcgccctaatgacaatccagttatggactggttacaaacttggggtcgtttgcgttctaacaaatttatgttagatagaaaagatgtcaaaggtatgatccgcaatttaaaagcaggagagatcctctggtatgcccctgaccacgattacggcccacgaaagagtgtctttgccccactttttgccgtagataaagcagcgacaacaacaggaacctatattctagtcaaaaccagtcatccggctctgatcccgtttacaccaaagcgcttacctgaagcaaaaggttatgaactaattatttcacctgccgtagctgattttcccatcgatagtgaagaaaacaccgctatcgcaatgaataaagtggtcgaacaagaaattttacgtgctcctgatcaatatatgtggttacaccgtcgttttaaaacccgcccacctggagaagcttctttatataatgagataaagaaagtacactag

SEQ ID NO: 295602 - DNA, 603 bp, Proteus mirabilis
atgccaacaattcatctggttgatgacgatctcgccgtcaccgatgcttgccaatttctattagaaagcttaggttatgcggcgcaggtttggaatgacagcgaatattttctccataatattgacctttatcagcaaggggttgtgctgttagacatgagaatgcctaaagcagatggtagacaagtacatcaatatttaattgaaaaacacagtacgctagcagtgattttcttaacgggtcatggtgatattccgatggcggttgaagaaataaaaaaaggtgccattgattttttacaaaaacccattgatagcaatgcattactctctgcactgaaatccgcctttaccgaaactgcaacacgctttacggctgatgatatccgtcgccgttatgcctcactgacaccaagagaaaaagatattgcatattatgttattcaaggcctaatgaatcgagaaattgctgaaactgcctgtgtttctatcagaacagttgaggtacatcgagcaaaagtgatggataaaatggccgttaaaaatatcgcagaattagttaccgcattacaaggaattgatattgtagcgccaaatttatga

SEQ ID NO: 295603 - DNA, 1764 bp, Proteus mirabilis
atgacgataaaacagacaattgggataaaaaaaatcgctagtttgagcttattactgctcttttttctgctctcttcttctgcggttgccaaagagtggactattggtgtgttagcgttgcgaggcgacgcctcaacccaaagacattggcaaccgcttatcgataccttagatcaacaaatacccacagatagctttctgctgttaccacttaacttgtcagaaatgaagcaagcagtggcggacaagagagtagattttctattgacgaatccagcgcaatttgtccagcttgatagtgcatatccgctacgttggttactctctttacgctcgggttatgagcctgataacacaacaagaaatgtgattggtagccttattttggtgcgcaaagacagcgcaattacatcgattcatgaattagtcggaaagcgtgttggcgccattgcaccagatgcctttggtggatatctgttaggttacaaagcactgcgtgaagaagggattgatcctgagcaggattttacattacgttttagtggttttccggctgatgcgttactttacttattacgtgatggcgatattaatgcagcgatcatcccagtttgcttattagaaaatatggataacgaaggtcttattaataaagaagattatcgtccattattaaattattctaccaatacttcttgtttaactagtactccgctctatcctaattggtcatttgctgcattagatactgttcctgacacattagtggataaagtgacacgaacattactcaatgatgaaagcgacgccatgaaatggggggcacccgcttctcattctcaagtggaaaatttactccgagaagtcaaccaacacccaaggcagcgacaactttggcaagatgcgaaaatttgggctatccagcaccgttttattatcggattatcattgggtgccattatcttactggttttcaaccaaatctggattagttatttggtcagaagacgtagccatcaattagaacaagcgcatatccatttaagagagcaaaaagaggcattagaacaagctcagcgtttaaatattttaggtgaaatggcgtcaggctttgctcatgagcttaatcaacctctttctgcgatcaaaagttatgcccaaggtagtgcgatccgcctagaaaaagagaacaaaaatcatccattactccccgcgttacgacagatagaccagcaagcccaacgtggcgcagatattattcgcaatctacgtttatgggtaggtaagcaatcagcaaatagtgatacagtgccactgtcagaacaaaatattgcccaatgtattgaacatatttggcggttattacgtattgatgaaaaatatccacaagtgactctgatcactaagattgataaacatgataccctatacttacctgaaacattattagagcaaatattatctaatttgatcaccaatagcctacaggcgggtactaaagtgctacagataagcacccataaagcgccagataggttgttaattgtgatcaaagatgatgcgggaggaatgagccatagccagcttgaacaacctttctccccttttcaaaccaccaaaacagaaggtcttggtttaggtttggtgatttgccaacgcttattaaattcacaaggtgctgatattcacatagaaaatcaaaaagataagcaaaataatgttggattaaaaatcacccttattttccccaataacaataattag

SEQ ID NO: 295604 - DNA, 741 bp, Proteus mirabilis
atggatcttggtaaacgaaaattcttacaacaattaggggtccttaccgcaggtgcttcactggttcctctctctcaagcaggcattaaactatccccagagcgccgtgaaggctcagaggataaacgttatggcatgctgatcgatctgcgtcgttgtgttgggtgtcaatcttgtacagtgagctgtacgattgaaaaccaaacgccacaaggacaatttaggacgacagtaaaccaatatcaagttgctatcaaggggcaagagggaataacgaacgtcttactccctagattatgtaaccattgtgacgagcctccgtgtgtacctgtttgtcctgttcaagcaacatttcaacgcaaagacgggatcgtcgtgattgataatgaacgttgtgtaggctgtgcttattgtgtgcaagcatgtccttatgatgcccgttttatcaaccattccactcagacagccgataaatgtactttttgtgctcatcgcctagaagttgggttattacctgcctgtgttgaatcttgtgtggggggcgctcgtattatcggtgatatgaaagatccacacagcacaataagtaaaatgatccgcgagcatgaacatgaattaaaagtacttaaaccagaaagtggcaccttgccacaagttttttatcttggtttagatgatgcatttgtgcagccattagttggacaagggcaacccgcattatggcaggaggttcactcatga

SEQ ID NO: 295605 - DNA, 1029 bp, Proteus mirabilis
atgatttcatccgtttcgcaaattcaagaagtgatagcgatcccccaagaatacttttggttaccttgggcagttcaatatttcttttttatcggcattgcgtgttgcgcaacactttatgcatgctggcaatgttggaaagggcgtacaggtaatcctcgtttagaagctgttgcggtttttattgccgttacggcggggatcaccgcccctttagcattaaccgctgatctccatcaaaccgcacgtgtttggcatttttatgcttatccaacgccttggtcgtggatggcatggggatcactattactgccactcttctctgcatttagtattttgtactttattgccatggtcgtgcgtttagtgtggaaacgtgaatataagttaacgcgttgggttgctttagcctgcgccttaacctcgataggtttattgctctataccggccgtgaagcttctattttaaaagcaagaccggtgctttatacctactggctgccgatattactgttttttagtgccatgcaagtattgcctacgctattagcattaggtacgcgacgagagcctgtgtatcagcgtgaactggctatgtggtttatcggatctttaatgttacttgctgtatgtacaggtttttggattgcgggggatactatttcaggacaagctattaggcaacaattggcaatgggaagtttaggctggtggagtgcgataggggttattgccttatggatagtgtctgttgctatgggcggtttaatggcaaaacaggcacgctcagtggcatttattaccgtaatggcttttatttcaatgggattggcgtgggtattacgttggctaatgttaatgggaagccaatatattcccaaatataacattattaccaatccttatcagttcccgctgggtaatgatggattattagcgattgttggaacatttgggctttggatagcgttaaccattatattcagagaaagtattcgttgggttgtcaggagagtacagcatggctaa

SEQ ID NO: 295606 - DNA, 3081 bp, Proteus mirabilis
atggctaagtttacaagacgtcaatggcttaaaggtggattggttatcggtggtattgccgcatttgctgccagttatcgcgatgttgctaagcgtgctgtcgacggtctcgttgatgggacatctggtaaggttactttggataggatcaacggtaactctttattaccagaaggtaaaatcacggcgaaagcgaattggcaacctaataccaatcaagctgtttgtatgactcagtgctttggctgctggactcagtgcggtgtgcgtgcgagagtcgatcgtaacaataatcaagtattacgtattgcaggaaatccttatcacccattatctcaggatatccattttggttataacatgccaataaaagaagcctttgaaaaaatggggggcgaaagtggtttagctaaccgctctacggcttgtgctcgtggtgcgacgatgatggaaagcctcgatagtcctactcgtattcttgaacccatgaaacgagtgggtaaacgaggtgaggggaaatggcaacgaattagctttgagcaactgatcaaagaagtggttgaggggggcgatttatttggtgaagggcatgttgatggcttacgtgctatccgcgatttagcaacacccattgatcctaaacagccagccctaggacctaaagcaaatcagttattagttactaatgctggggatgatggccgagatagttttattcgtcgttttgcacaaaatgcctttggtagtaaaaattttggggctcatggctcttattgtggattagcgtatcgtgccggctccggtgcattaatgaatgatctggataaaaacgctcatgtgaagcctgattgggatcatgttgaatttgcactatttttaggtacttcacctgcgcaatcaggtaatccatttaaacgccaaggtcgccaattagcgaatgcgcgtattcgtggttcgtttaactatgtagttgtggcacctgctttgccattaaccaccacgttagcgaatgatcatggtcattgggtacccgtacaaccgggaacagatgctgctttagtgatgggtatgatccgctggatcattgaaaacaaacgctataatgctgagtatttatcggtgcccagtgaagtgtcgatgaataatgttggagagcgaagctggactaatgcgacacatttagtcattagtgatgaaaatcatccactgtcagggcagatgttaaccgccgcgcatcttgaggatattgccgatggcgaagcgcaaaatatggttatagcccttaatggacagcttacagcagcgacgcaagtagacaaagcacagctttttgttactcaaaaagtgacattaaaaacaggtattgaggttacagtaaaatcaagtttccaattattaactgaggcagcaaaccgcatgtcattggcggagtatagtgaacgttgtaaagtacctgaaagcactattattgccttagcgcgtgaatttactgactacggacgaaaagctgcggttatctcacatggtggcatgatggggggaaatggtttctatacggcgtggagtgtcatcatgctaaacgctttaattggaaatctaaacctgaaagggggggtatctgtcggtggaggtaaatttaatggtgcgatagatggccctcgttacaacatggatagttttaaaggtaaaattaagcctaaaggaatggtgctatcacgcagtaaagcggcttatgaacaatctgatgaataccgtgaacggatcgcaaaaggggagtctccttatcctgctaaagcaccgtggtatccgtttgccgcagggcaattaacagagcaactgggatcggcattagcgggttatccttattcattaaaagcatggataaccaatatgacgaacccgctatacggtattgcaggtattcgccaagttatggaagcgcgtcttaaagatccacagcatctaccattgattattggtatcgatgcttttatgaatgagaccactgcactggcggactatattgtgcctgatacgcataactttgaaagttggggatttagtgcgccgtggtctggtgtacaagtcaaagccagtacggcacgttggccgattgtagagcctcgtgtggcgaaaacagccgatggtcaacctatatcaatggaaactttctgtattgcggttgctaaagcattagacttacccggctttggtgaaaatgcgctagaagataaagatgggcatttccacgcaattaatagtgctgaagattattatctgcgtgtagcggctaatattgcctttatgggcgagcagcctgtagcacctgccagccatgaagatattttattaagtggtgtcgatcgtattcttcctgctattactgccactttaaaagaagaagaagttctaagggtggcgaatatttatactcgtggtggtcgttttgccccttatgataaagcatggaatggtgatgcgacaggcccgcaatggaagaaaccattacagatctggaatgaaaatgtagcgaagaatcatcatgctattaccggtgagcgatatagtggttgcccaacttattatccaccgcgtttatctgacggtagcgatatacatcaacattttccacaagagcaatggccattaaaactgatgtcctttaaatctcatgtggtaagtagctcaacgggcatgatccaacgtttaagaatggtaaaaccaagcaatttagtcgcgattaatccgctagatggtgaaaaatgggggatcaagcatggtgataaagtgcgcatagtgacccctggtggagaggttgaggctgaaattagtttattagagggggttatgcctggagtgttagcgattgaacatggttatggacataaagagctaggctcacgtcaacactatttagatgggcaaccattagctatggataaagcaataggtagtggtattaacttaaacgacttaggctttgctgatccaacacgagaaataacgaatacttggttagattgggtttctggtgcctctgtacgtcaaggattaccggcaaagattgagcgtatcgcctaa

SEQ ID NO: 295607 - DNA, 603 bp, Proteus mirabilis
gtgaaaatattaattattgatgagtgttactttactcgtaatggtattcggcatttcttcttaaaaaaaaatgtaaggcatgaaattattgatatgtcttctattgaagaagctaatcattatattaataactctatgcctgatattatttttattgatctcactaaatattgtcgtgaagtggcacattgtcagcacttacaatatttcttttcactgactcaagagtgtcgtttatacctctatattgatgccaactatccggacaaagatagacctatcgccttgacaaataactgttttatccttgctaaacgggtactaccttgggtattagagagaacatcaacattaacttctcgttgccaagtttttttccccacttataaacattctctttgctcaatatttagcatacaagaacaaaaaatcataaattactggatgggagaattgcctaactatcaaattgccaaaaaattaaaaattagcaatagcaccgtttattcgcataaaagacatattactgaaaaaataaatgtaaaaaatagaattgaacttttctttatatataatatattaaaatatatctatgagaaataa

SEQ ID NO: 295608 - DNA, 255 bp, Proteus mirabilis
atgagtagaaaaaatgaagttattcaaacacatcctgttgtaggctgggatattagcactgtagatatctatgatgcgatgatgctacgtttacattatcttcctgaaaacgaacaccatccagacaatgcagtggttgataaaacactttggcttactactgatgtagcaaaacagttgatttatattcttcaagcaggtattgataaaattgaatcatctgaagattttgtatcagacaacaccaagcattga

SEQ ID NO: 295609 - DNA, 1053 bp, Proteus mirabilis
atgaccactgcacaacctatcaccctcactattcgccgtcctgatgattggcatgttcactttcgtgatgatgacatgctaaaaaccgttgttccttataccagtcgttattttggcagagctatcgtaatgccaaatcttgttcccccgatcaccaccattgaagccgcccgtcgttatcgtgatcgcataaaagcagctattcctagtggcgataaattcgaaccattaatgacctgctatttaacggatagcactctgccatcagaagttgaacaaggttttctacaaggcgtatttactgcttgtaaactttatcccgccaatgcgacgacaaattctagccatggtgtttccgatatcaataaaatctatcctattcttagtgtgatggaaaaaataggtatgccattgcttattcatggggaagttactgcatcagatatcgatatttttgatagagaagctcgttttattgataacgtgatggctcccgttcgcaaacaatttcctgccttaaaaattgtttttgaacatatcaccaccaaagaagcggcacagtatgtcttagagggaaatgaatttcttggtgcaactattacaccacaacacttaatgtttaaccgtaatcatatgcttgtcggtggtgtgaaaccgcatttgtactgtttacctatccttaagcgtaatgtacaccaagaggcattaaggcaagccgttgcatcaggccattcgcgtttcttcttaggtactgactccgcgcctcatttacaacatcgcaaagaatcatcttgtggatgcgctggcgtgtttaacgcccccaccgctttagcagcttatgctagcgtatttaaagagctcaatgccctttctcactttgaagccttctgttcactcaatggcccacgtttttatggtttaccggttaatgaaggcactattaccttaacggaaaaatccgttactgcacctgcagaaattatgagtggtgatgaagcattaatccccttcttagcaaatgaagatattcattgggatattagtgtcaattaa

SEQ ID NO: 295610 - DNA, 507 bp, Proteus mirabilis
atgaatgtattaaaagacattttagagcgtgatttagcacgtattaatgccgcagaaaagcgtgatggcaaaccacactttaatagccaatttttaaaaaatcatatttggctttgcgtcagtatggtgttgtcatatttattactggccgctttgcttatttactctccttactttggggtcatttcgctgactcttttcactttgatgtttattgtgatggcaggaatactgctatttgatatcaaacctatttataagtttgatgatatcggcgttcttgaccttagagtttgctataacggcgaatggtatacttttgaaaaattatctgatgaagcgattaatgagatacgccagcacccggctatcccagcgcaaataaaagaagacatcaatgacattatacgcacaaaacaagagatacacttttatgacgtgtatttaatcgcattcgatcccatcaccaaaccgatttcgtcagaaaaattatcaccccaagtctaa

SEQ ID NO: 295611 - DNA, 213 bp, Proteus mirabilis
atgtctgacaaaatgaaaggtcaagttaagtggttcaacgagtctaaaggctttggttttattactccagcagacggaagcaaagacgtattcgttcacttttctgccattcaaggtaacggtttcaaaactctggctgaaggtcagaacgtagaattcacaattgaaaacggtgcaaaaggtccagcagctgctaacgtaacagctctgtaa

SEQ ID NO: 295612 - DNA, 195 bp, Proteus mirabilis
atgaacgttaatgatcatgttgtagtaaaaacggacggctgtgaagatcgtcaaggaaccattttactgattgaagaatttaatgaaggcattatgtacttggtttcactgcctgaatatccgaatggtatttggttttttaatgaaaaagaaggtggtgaaggcacttttgttcgaccagtacaacaaaaatga

SEQ ID NO: 295613 - DNA, 699 bp, Proteus mirabilis
atggctatgactccttatatcttaaatttggttgttgcaatgtgtcttggtgctttgattggtgccgaaagacaatggcgtcaaagaatggcaggacttcgcaccaatgctttagtggcgaccggtgctgcggtatttatcttaagctccattgaaacttcacccgatagcccaggacggattgctgcacaagtggtttctggtattggttttttaggcgcaggggtgattatgcgcgaaggaatgaatattcgaggtcttaataccgcggcgacactttggtgctctgcgggcattggtgtgttatgtggacttggactctatccacttgctaccgtagcgacattgcttattctttgtgccaatattctattacgggaagcggctcaacgaataaatgcccaaccgcaatatcaagcgacagatattgaacaacgctattctattcgtattgtttgtgatacccacgatgaagttttggtaagaacacttattttgcaagccataaacggtttacacgtgagattgcaatcattaagtagcgcagatacaccaatgcctagtcaattagaagtttgtgctgaagtgttggcaactccagctgagcaaaaagagatagaagccattgtttgcaggataagtttagaaaaaagtgtcagtgcaattaattggaaaattgcttctgagcatcctgcttaa

SEQ ID NO: 295614 - DNA, 813 bp, Proteus mirabilis
  misc_feature (777)..(786): n is a, c, g, or t
gtgttgattaaaagtgatgaaacacataatcatagcgtactgtttaatcgggttagagatttaaccgcggaaatctggtttggtcgtcgtcttgggcaagaagctgcccctgaaaaattaggtgttgataaagcgctaccttacgaagatgtaggtgagcaactttatcaattactcaatggattggatattgtttatcatgcccaaggtgaatatgcgtttgccgatgaaatcgtctttaatgctctggataccttaagaaaaggctctcgccgtaatttaaaagcgccacaaacgcttattgattggcgcccaatagtgcacgaactgcggttatttaaatctgatgctgaaattgaattactgcgcaaagccggaaaaatttctgcgttagcccatactcgcgcaatgcaaaaatgtcagccaggtatgtatgagtatcaattacaaggggaaattgaacatgagtttatctctcatggtgcgcgtttcccttcctataacagtattgtcggtagtggtgagaacggttgtatcttacattatactgaaaatgaaactaaaatgcgtgatggggatttagtccttattgatgcaggctgtgaatatgaaggttatgcgggtgatattacgcgaactttccctgttaatggtaaatttagccgtcaacaacgtgaaatttacgagattgttttaaaatcactcaatgtatccctcgaattgtataaaccgggtacaagcatcaaagaagtctctaaacatgtcgtgtatatcatnnnnnnnnnngtatatcatggtggaaggcttagttaa

SEQ ID NO: 295615 - DNA, 357 bp, Proteus mirabilis
atggtggaaggcttagttaagctcggcattatgcacggtgatatcgaacacctcattgagacaaaagcctatcagcgcttctttatgcatagcttaagtcactggttaggtcttgatgttcatgatgttggacactatggcaccgatcgtgatcgtatcttagagccgggtatggtgttgactattgaaccaggactttacattgcgccagatgcagatgtaccacaagagtatcgtggtattggtattcgcattgaagatgacattgttattactgaaacaggtaatgaaaatttaacggctatggttgttaaagatcctgatgaaattgaagctctgatggcaggaaaaatttaa

SEQ ID NO: 295616 - DNA, 1173 bp, Proteus mirabilis
atgaatgtgattattgtgggtggtggaatggcgggtgcaacgttagcactagcactttctgcattaaataagggtaatatttccatttcgcttattgaagcgcgagagccagataatgggcatcccggattcgatgccagagcgatcgctttagcgcatggcacagcaaagcgattagcacaaatcggattatggtcggtcttaaaaccctttgtgacacctattaatcacgttcatgtttctgatagaggccattgcggttttgtgaacataaatgcacaggactacgatattgacgcactgggttatgttattgaattacatgatgcggggcgtcaactgtttgcacagttgaaaaaacaacccaatattacgctatattgtcccgctaaagtggagcatgttcagcgccatctcgataacgttgaagtgacacttgatgatggtacacaacttagcggtgatttactggttgccgcagatggtacacattcacccattggtcatcaatgtcatattcaatggcagaaaacgccttatcatcaagttgcggtgatcgccaatgtaaaaacagagattgatcccaaaggttgtgcatttgagcgatttacacaatttggtccattagcaatgttacccatgagcgaagggcgtagttcattggtgtggtgccatcctattgagaaattagagcaagtttcacaatgggatgatcaaacaaccattgcacagttacaacgggattttggctggcgtttgggtaagattgaacaagtagggcagcgtcattgctatccattagttttgcaaaaagcacagcaaatgatcagccatcgtttagcattgataggtaatgcatctcaaaccttgcatcctattgcagggcaaggttttaatcttggtttacgcgatgtaatgacattagccaatacattaacctcggccatacaatcaggtcttgatatcggcagttatcgcgtattatcacaatatcaacagcttcgcgaacaggatagagaaagtactattacgatcactgatggcttagtgaaagtgtttgcgaatcgttgtatgccgttaattatctcccgtaatctaggcttaatgacgatggaattagtgcctgcacttcgtaacaaattagcacaccaaacattaggttggacaaactga

SEQ ID NO: 295617 - DNA, 1236 bp, Proteus mirabilis
atgaaatcatttgatgttgttattgctggtggtggaatggtcgggcttgcattagcctgcggattacatggctgtggattacgtatagcgataatagaaaatcacccagtcaccacgcatttccatccgcaagatgattttgcattacgggtatctgcgattaacactgccagtgagttattactcaagaaattgggggtatgggaaaacttaacggcattacgtacagctccttatcaaggtatggaagtatgggatcaagatagttttggacgtattgcgttttcagcgcaacaagaagggttatctcatcttggcactattattgaaaatcatcttattcgtgaagtgctgtggcaaaaggtcaccagtcatagtgatattacctgttattcccctgctcaaattgaacgcattgtgtggggagaaaatgaagcctttatcagcttaaatgacggtgaaatgttaaccgctaggctggttgttggcgccgatggtgcgaattcttggttgcgtaaaaatgctgatattccactgactttttgggattatgaacatcacgctttagtcgcaaccatacgcacagaacaaccccatgataatgtggcgcgccaagtgtttcatggtgaggggattttagcctttttacctcttgcagatcctcatacttgttctattgtgtggtcgctacctagctcattggctgaagattataagagtgcagataaaacgcgatttgaacgtacgctaggtgttacttttgatatgtgcttaggccagtgtgaattagtcagtgaacgtatgacaattccattaacgggtcgctatgcacgtcaatttgccgctccacggttagcgttattaggtgatgcagcacataccatccaccctttagctggacaaggggttaatcttggctttatggatgttgctgaattaattggtgaaatccgtcgtttaaaagcagaaggtaaagattttggtgagtatctctatttaagacgttttgagcgccgccgtaaacatgccgctgcggtcatgttagcgactatgcaagggttccgcgaattatttgaaggtaataaccctattaaaaagtgggtgcgtgatatcggtctttcgttagcagatagtttaccaggagtaaaaccaaagttacttgaacaggcgatgggactttctgatttaccagaatggctaaagcataaaaattctgtttcagctgaaaaaatctaa

SEQ ID NO: 295618 - DNA, 1074 bp, Proteus mirabilis
atggcaaaacagactccgttatatgatgagcacgtcgcctgtggtgctcgtatggttgattttcatggttggatgatgccactgcattatggctctcaaattgatgaacaccataatgtgcgtcaagatgcaggtatgtttgatgtatctcacatgacgattgttgatttacatggcccgcaagttaaagactttctacgttatctattagcgaatgatgtcgctaaactcaccgaaaaaggcaaagcactttatactggtatgctaaatgatctgattgtttactactttgatgagactttctatcgtctggtggttaactccgcaacccgcgaaaaagatttagcgtggatcactgagcatgccaaagattatgtcgtcgatattcaagtacgtgatgatttagcattaattgcagtacaaggccctcacgcacaagaaaaagtacagcgtttattaagtgaatcgcatcgccaaatagtggcagcgatgaagcctttctatggcgtacaacttgatgatctcttcgtcgcgacgacaggttataccggtgaagcaggttatgaaatcgccatgccaaaagagcaagctgttgattattggcagaagttattagcagtgggggttaagcccgcggggttaggtgctcgagacactttacgtttagaagcgggtatggatctttatggtcaagagatggatgaaactattaatcctcttgaggctaatatgggatggacgattgcctggttacccgaagatcgtcaatttattggtagagaagcattagaaaaattacgcgcaacaggcacagataaactggttggtctggtgatgcgagaaaaaggggtgttacgtgcaggtagtgccgtgcactttaccgatgatttaggtgaattaagagaaggcgttattactagtggcacattttcaccgacattgggctttagtattgcattagccagagtacccgcaggtattaaagatagcgcaattgttttattgcgtaatcgtgaaataccggtagaggtggtaaaacctggttttgttcgttcaggtaaagcattggtataa

SEQ ID NO: 295619 - DNA, 393 bp, Proteus mirabilis
atgagtcaaatacctagtgaattaaaatatgcgcaatctcatgagtggatccgttctgaaggcaatggcgaatacactatcggcatcactgaacatgctcaagagttgttaggtgatatggtgtttgttgatcttcctgatgtaggcagtgaagttgatcttggggatgattgtgctgtggctgaatcagtaaaagctgcatcagatatttatgccccattatctggcgaaattattgcagtaaatgaggagttggatggttcaccagagctggttaatagtgatccttatggggatggatggttatttcgcataaaagcaaaagatgaaagcgaattaaacgatctccttgatgcggctggctaccaagagttagttgaaaacgaagagtaa

SEQ ID NO: 295620 - DNA, 2877 bp, Proteus mirabilis
atgacacaaactttaactcaattagaatatcgtgatgaatttattcgtcgccatattggctcatcgccagaacagattaaagagatgcttgatgttgttggcatctcctcattaaatgaattaacacaaaagattgttcccgataatatccaattagcaacgccgcctaatgtcggagggggggctactgaacaagaagcattagcagaactaaaagcgatagcccgtaaaaataaacgttttacctcttatatcggtatgggatatgcgccttctgtattgcctcctgttattttacgtaatttgctagaaaatccaggttggtatactgcttatactccttatcagccagaagtttctcaagggcgtcttgaatcattacttaactttcaacaagtaaccattgattatactggcatggatttagcctctgcttcgctattagatgaagctactgctgccgctgaagctatggcaatggcaaaacgtgttagtaaactaaaaaatgcggagcgtttttttgtcgctgatgatattcatccccaaacactagacgtagtaaaaacccgagctaacacctttggttttgaagtgattgtcgataaagctgaaaaagtgttagagctagaaggtgtctttggtgtgctattacagcaagtcggcacaaccggtgaaattcatgattatagtcagctcattagtgaactaaaaacgcgaaaaattattaccagtgtagcggctgatctaatggcactggtgttattaacggctccagggcaacaaggagcggatattgtattaggctcagcccaacgctttggggtgccaatgggatatggtggtccacatgctgctttctttgcctgtcgagatgaatataaacgagccatgccaggacgtattatcggtgtctcgcgtgatgctgcaggtaacagagcgttacgtatggcaatgcaaactcgtgaacagcatattcgccgtgaaaaagctaactcgaatatttgtacttcacaggtattactggccaatattgctgccatgtatgcggtatatcatgggcctgaaggtctaaaaaatattgctcagcgtattcatcgcttaacggatattttagccgcgagtttaattcaaaatggcatgacattacgccatcagacatggtttgatactttaaccgttgaaacagcggataaagcgggtgtattacaacgtgctaaagatgctgaaattaatttacgaaccgatattgttggcgcagtaggtgtcactttaagtgaagtgacgactcgcgaagatgttgtcagattgattgagattatcagtggtaaagctttctctgatgacattgatacattagatgcactggtagcttcttcatcgacctcaattccaacggcaatgttgcgtaaagatgcggtgttaacccatgaaaacttccatctttatcacagtgaaactgaaatgatgcgctatatgcatcgtttagaaaataaagatttagcgcttaaccaagcaatgatcccgttaggctcatgtactatgaagcttaatgctgcggctgaaatgctgccgatcacatggcctgaatttaccgaaatgcacccattctgcccaccttatcaagcgcaaggctaccagataatgattgagcagctatctaattggttggctgccataacgggttatgatgcgatgtgtatgcaacctaactcaggggcgcaaggggagtatgctggattgttagctattcgtcgttaccatcaaagccgaggagaaggaaatcgccatatctgtttaattccaagctcagcccatggtacaaaccctgcatcagcccatatggcgggtatgacggtggttgtcgtggggtgtgatgaaaatggtaatatcgacattgcagacttaaaagcgaaagcagagaagcaccaagctgagctttcttgtgtgatggtgacttatccttcaactcacggtgtttatgaagagggtatacgtgaagtttgtgagatcattcatcaatatggcggacaggtttatcttgatggcgccaatatgaatgcgcaagtggggatcacgacgccaggctttatcggctctgatgtatcacacttaaacttacataaaactttctgtatcccccatggcggtggtggcccaggtatgggacctattggcgtaaaagcacatttagcgccatttgtacctggacatagtgtcgtggaaatggacggtgttacgacccaaggtgccgtgtcagcagcacaatttggtagtgcctcaatattacctattagctggatgtacatccgtatgatgggctcagaagggcttaaacaagcgagccaagtagcgattttaaatgctaactatattgctcaacgcttaaaagatgactatgacatcctctattctggggcggaaggttatgttgcccatgaatgtattattgatattcgtccactcaaagctaactatggtatcagtgaaatggatgtggcgaagcgtctaattgattacggcttccatgcgccaaccatgtcattccctgttgcggggacattaatgattgagccaacagaatctgaaagcaaagttgaaattgaccgctttattgatgcgttactctcgattcgtgctgaaattgcacaagtcgatgacggggtatggccgattgatgataatccgctagtgaatgcaccacatacacagtatgaattagtgcaagaatggtcacatagctatagccgtgaatgtgcggtattcccaagtgaagcaacgaaacgcaataaatattggccggcagtaaaacgccttgatgatgtttatggtgatcgtcatttgcattgttcttgtgcgccaataagtgattatgaataa

SEQ ID NO: 295621 - DNA, 603 bp, Proteus mirabilis
atgacacaacaaactaatggggcttttggccccttttcagataccatcaattttattattgaactcgataaactcaaacgcgtttaccgcaaaaataatgtattagacaatagccgtgctgaaaataccgctgagcatagttggcactttgctgttgcagcaatgagttttcaaccttatgccggtgatattgatataggtagagcgatccagctagctttagtgcatgatattgtcgaaatcgatgctggcgatgtgatggtttatgatgttgctgctcgtgaagcgattaaagagcaagagcaaaaagcagccagacgtattttttcgttgttacctgcaccacaaagtgaatattttcttaatctctggcttgaatatgatgcagcacaaacccctgagtcacaatttgccaatattttagatcgcgcaatgccaatgttaatgaatctacataacgaagggcaaagctgggttgaaaataatatccgtttagaacaagtgattgcacgaaatctatttatcgaaaaacagtggccagaattttggcaatacctctatcctcaattactagaggcacagaaaaaaggctggttaaaataa

SEQ ID NO: 295622 - DNA, 987 bp, Proteus mirabilis
atgactcaaaattctactcagacaaaacgccctcatgccgcaatcaatttaccactcaccttgatctctttagatgattggtcattgataactgcaacaggggctgatagtgaaaaatacttacaaggccaactaacagcggatattgccgcattaccgactacagagcacactttagccgctcattgtgaagctaaagggaaaatgtggagtacattgcgcattttccatcaacaagcaggatttgcttatatattgcggaaaaatgttgctgaaaaacaacttactgagcttaaaaaatacgccgtattttcaaaagtgacttttactgaaaatacagatgcggtgttattaggacttgcggggcaaggcgcggcacaagccttagcggaattcttccctgagatcccccgtaaagccaatgaagtggttaatcaccaaaatagctacttactgcaactcccgttacctacagagcgctttttaattgttacagatgaagagactgccaaaaaactagccacgacattgcccgcagaaaccagtgatagtgaccagtggttagcccttgatattgaggcgggttatcccattattgatacccctaatatcgaacaattcttaccacaagcgactaacttacaagcattaccattaagtatttgctttaaaaaaggttgctatacaggtcaagaaatggtgtctcgtgccaaattcagaggcgcaaataaacgtgctatgtatctattatcaggtggcgcagcacaattgcccgacattggcggtagcgttgagtggcaattaggtgaagataaatggcgcaaaacaggcacggtattaagtgcggttcgtatggccgataacacgattatcgccgaagtggtgatgaataatgatatggatgctgacagcgtatttcgtgtccaaggtgataccaccagccgcttaacgattaaacctttgccttactctttagaagatgagtga

SEQ ID NO: 295623 - DNA, 282 bp, Proteus mirabilis
atgactatcgatatagaaaataaagcacgaataaattgggcatgtcgccgtggaatgcgtgaactagatatttctatcatgccttttttcgaaaacgagtacgacacactctctgatgacgacaaaaggctctttgttcgtttacttgaatgtgctgatcctgatttatttaattggttgatgaaccacggccgccctgatgatgaagatctttattacatggtaaagttaattcaagagcgtaatagaattcgtatggctgaaattgttaataagtattag

SEQ ID NO: 295624 - DNA, 417 bp, Proteus mirabilis
  misc_feature (295)..(304): n is a, c, g, or t
gtgactttatggaaatcacatttaacagtttcttggtttacacagttattttcaactagtgtttacgttatttttgaaatagcattgctgttatatccttggccacctggctttatttatatctgggttcctttgttacttttacttatattaggttggtattttagccaaaaaaatatcaataaaaggaaaggggatttagtgctgcttaatggcaatcgtattcaatggaaatatcatgaatggcagattgcaaaacaaccgtggatcagccgatttggtgcaaaaataacgnnnnnnnnnntagattctatcttaaataataagcaaatcacgctatgggttgcttttgatagtatgccggaaaatgagtggcgaaatttttcacaactgctgatgcaatacccagatatttaa

SEQ ID NO: 295625 - DNA, 519 bp, Proteus mirabilis
atgaaaattggtctattttacggttccagcacctgttataccgaaatggcggcagaaaaaattcgtgacattctcggtgaagagtttattgatcttcataatgttcaagagtgcgatattactctgatgcaagagtatgacattcttattttaggtattccaacctgggactttggtgagatccaagaagattggctcgcaatttgggaaacgctaccaacattagatctcaaagataaactcgttgctatgtatggaatgggtgatcaaattgattatggtgaatggtttttagatgcattaggtatgctctaccaccatttactgccaagtggtgttaaatttatcggtttttggcctattgaagggtatgaatttaccagtcctaaaccacttactgatgatggtaaacattttgtcgggctcgcattagatgaggtgaatcaatttgaagaaagtgatgaacgtttatcacagtggtgtatgcaaattttacgagaaatagaagaaaacttgtaa

SEQ ID NO: 295626 - DNA, 942 bp, Proteus mirabilis
gtgacccagaccaagttatcgacacaaacgacaacagataataaccaagaagataatgacgttatcatagaacaatttctcgatagtatttggctagagcaagggttatctgcgaatacactcagcgcttatcgtttagatttacaggcgttaagccagtggctggtcacacaaaaactcaattggttatcggtgacgacgttagatttacacgcttttcttgccacccgtttggatgagggctataaagcaaccagtgcggcacgactgttaagtaccttacgtcggttttttcaatatctttatcgtgagaaattacgccaagatgatcccagcgctttgctttctacacctaaattacccaaacgtttacccaaagacctaagtgaacagcaagtagaaaatttacttagtgctccttgtattgatgagccaatagaattacgcgacaaagcgatgcttgaggttctttatgcttgtggattgcgggtttctgagctagtaggattgtctttatctgatattagcttacggcaaggggtgttacgtgtgataggtaagggcgataaagaacgattagttcctttaggtgaagaagctatttactggttagaacaatatctgcaatatggtagaccagcccttatgcaagggaaaaccgatgatattgtgtttccaagcttaagaggccaaaaaatgacgcgacaaacattttggcatcgtataaaacattacgcggtgatcgccggaattgattcagagaaattatcaccccatgtgttacgccacgcctttgcaacacatctattaaatcatggagcagacttgcgtgttgtacagatgttattggggcacagtgacctctctacaacacagatttatacccatgttgctacagagcgcttaaaagtgcttcatcagcaacatcacccaaggggataa

SEQ ID NO: 295627 - DNA, 717 bp, Proteus mirabilis
  misc_feature (244)..(253): n is a, c, g, or t
atgaaaaagaaattactctggttacccattttattcagtatggtgtcaatgccagtgtttgcagataacgctgctattaaagcgcaactggcaaaaatgcagataaaagcagagagcattcaaccgacaccgatagtgggtttaaatgcagtgctttctgataaaggcattttttatattactgatgatgggaaataccttacagcagggccgatttataatattaatggtgaggagcctgtcnnnnnnnnnngtatcgctaatcaagtgatcatgaaaaaaattgattcactgaaaaatgaaatgattgtttataaggctgctaatgaaaaatatgtgatcacggtttttaccgatattagttgcccttattgccaaaaattgcatcaagaagtaccagagctaaataaacaaggtgtcacggtacgttatttggcttttcctcgtaacggggtgaaaaataatgtggtcagtcaacagatgaatgccgtatggtgtagcggttttcctaaaaaatcactcgatagtgcgtttaaaggtgacaaaattattgcgattgatgactgtaaaaaaattaatatcaatgagcactttaaacttggcactatgatgggcattcaaggtacgcctgcgattgtattacctgatgcgagtatttatggcggatatatatcggcgactaatctacttgaattattaaataaaaaagagaagtga

SEQ ID NO: 295628 - DNA, 1677 bp, Proteus mirabilis
atggttactattgaaccgacattacgtcggcgtgtggcgaaagcaacagcattgccagaaagcctcgatcccttattacggcaaatttatgccaatcgaggtattacctctgaaactcagctcgagcgctcgttaaagggcttattgcattatcaagatttaaacggtattgatgttgctatctctttattagttgaggcattaaagctgcaatcgcggattgttattgtaggggattttgatgccgacggtgcaaccagtacagctcttgctattaaagcgttacgacaaatgggatttcagcaagtaagttaccatattcctaatcgttttgatgatggttatggacttagccctcaagtggttcatgatgtggcaaagaaaggcgtagatctgattattacggttgataatgggatctcctcttttgaaggtgttgatgttgctcatgaatatggtatccgtgtattggttactgatcaccatttgccgggtcactcccttcctcaagctgatgcaattatcaatcctaatttagcggattgtgcctttttgtcgaaatcattagcgggtgtcggtgtcactttctatttaatgaccgcattaagagctgaattagaaaaacaaggttggtttacagcacagggattagctcgccccaatatggccgattaccttgatttagtcgcattaggcacggttgctgatgtggttcctcttgatgaaaataatcgtatttttgtttatgagggattacgccgtattcgtgcaggacgttgctgtgcagggatcaaagccttgacggaagtttcacgtaaaacgttatcacaattagtcagcagtgacttaggttttgcattagggccaagacttaatgcggcagggcgtcttgatgatatgtctgttggcgttgctttactgttaactaatgatattggtgtcgcccgtgaaattgccaatgaactggatggattaaatcagactcgtcgtgaaatagaagcaggaatgcaagaagaagcatcgacaatttttcgccaatttatcaccacacaagatgacttaccgaatggattagctatttatcatccacagtggcatcaaggtgtggttggcattctcgcttcacgaattaaagaaaaactacatcgcccagtgattgcttttgccccaagcggtgatggtttactaaaaggctctggacgctctattcatggtgtacatttgcgagatgcattagaacgtttgaatacgttaaatccgggattaatggtgaagtttggtggccatgcgatggcggccggactatctctggaagaagataaatttccactttttcagcgtcacttttcggcacttatggcggaattagtttctgctgaacaattacaaggcgtgattttaacagacggcgagttaagcgacagtcagttatctttacctattgcggaaatgttaagagaagcagggccttggggacaagcctttcctgagccacttttcgatggcaaattcaccttactacagcaacgtattgtgggaagcaaacatttaaaaatgatgcttcaaccgataaatagccatgtaatgattgatgctattgcatttaatgttgatgttaatatatggccgggacagcgcaatgcacaactgctggtggagcatatttggccttgttaa

SEQ ID NO: 295629 - DNA, 963 bp, Proteus mirabilis
gtgtggaatgagcctgaaaaggcgcaggcgttaggaaaagaacgctcatctcttgaagctattgtagaaacaatcgaccaactcgaacaaggactagaagatgtttctggtttacttgaccttgctgttgaagccgatgatgaagaaacatttaacgaagcagttgctgagttagaaggattaaacaaaaagcttgagcaattagagttccgtcgtatgttctctggtgaatatgacagtgctgattgctatcttgatttacaagcaggctctggcggtacagaagcacaagattgggcaagtatgctaatgcgtatgtacttacgttgggctgaatctagaggctttaaaacagaaattattgaagagtctgacggtgatgttgcaggtttaaaatcagcaacaatcaaaatcataggagaatatgcctatggttggctacgtacagaaaccggggttcaccgtttagtgcgtaaaagcccatttgactcaggcggacgtcgccatacttcatttagctctgcttttgtttaccctgaagttgatgacaatattgatattgaaatcaacccagccgatctgcgtatcgacgtttaccgcgcatcaggcgctggtggtcagcacgttaataaaacagaatctgcggtacgtattacccacgttcctactgggcttgtcacacaatgccaaaatgatcgctctcagcataagaacaaagatcaggcaatgaaacagatgaaagcgaagttgtatgaactggaaatgcaaaagaaaaatgcagataagcaagtgatggaagataataagtcagatattggctggggtagccaaatccgctcttatgttctagatgattcacgaattaaagatttacgcactggtgtggaaacgcgtaatacacaagcagtgttagatggtgatctcgataaatttattgaagctagcttaaaagcgggcctgtga

SEQ ID NO: 295630 - DNA, 2091 bp, Proteus mirabilis
atggctaatttggcctcattactccgcttgccgggaaattggaaaagttctcagtggcagatactggcagggccagtacttattttgcttatactgtcaatgatggtactgccattgccaccttttctattggacttattgtttacctttaacattgccctttctatcatggtgctattagtggccatgtttactaggcgcacattggactttgctgcctttcctacaatactcctgttcactacattgttacgcttatcgcttaacgttgcatcaacacgtattatcttgatggaaggacatacaggttcagcagctgcagggcgtgttgttgaagcttttggccatttcctcgtaggtggcaattttgctatcggtatcgttgtttttatcattcttattctgattaactttatggttatcaccaaaggtgcagggcgtattgctgaagtaggcgcacgctttgtattagatgggatgccgggtaagcagatggctatcgatgctgatttaaatgctgggatcataaacgaagaagaagctaaaaaacgtcgtaaagaagtctcgcttgagtctgacttttatggatctatggatggtgcaagtaaattcgtccgaggggatgcgattgccggcttaatgatcttggtaataaacgtcgttggtggtttagtggtcggtgttgcacaacataatatggcacttaacgatgcggcaagcacttataccttattaaccatcggtgatgggctggtggcacaaataccagcactgattatatcaacagcggcgggtgttattgttactcgcgttgcaaccgatgaagatgtcggtcaacaaatggtgacgcaactctttgataaccctcgtgtactaatgctaactgcgggcgttttaggattgctggggttagtaccaggtatgccaaactttgttttcctcttctttacggctgcattagcaggattaggatggtatatcttaaaacgccatagcagtcctcaagtgcaacaacaaaaagagttggaacaagttgaaaaacaaaatcgggttgttgaagcctcttgggaagatgtgcaattagaagatccgctgtcaatggaagtgggttatcgtcttattcccatggtcgacaatcgccaaaatggtgaattgttaggtcgaattagtggtattcgcaaaaagtttgcacaagaaatggggtatttacctcctgttgtacatattcgcgataatatggaagtaaaaccttcctcctaccgcattttaatgaaaggggtagaaatcggccatggcgaagctcatcctgggcgttggttggccataaaccctggtaatgcagtcggaacgctagaaggtgataacactcaagagccggcatttggtttacctgcagtatggattgatgacagtttaagagagcaagcacaagtacaaggctatacggttgtggcggcaagtacagtgattgcaacacattttaatcatgtacttaaccaatacgcagcagagttatttggtcgccaagaagcgcaaatgctatttgatagggtaagcaaagaactaccgaaaatgacggaaaatatgatccccgatatgctgtcattaacggtgttacataaagtattgcaaaacctgttggcagagcaagtgcctattcgcgatatgagaaccatattagaagcactagcagagcatgctcctgagcaaaaagatccggcagaattaacggcggtagttcgtgttgcattacgcagggcgataacacaacactggtttggtgataaagaagagatacaagttatcggattagatgcgggactagagcgtctattattacaagcgatgcaaagtggggggggattagagcctggccttgctgaaaacattgaacaacaagccttagatgcggtacgccgtcaagagatgtcagggggcgtgcctgtactcttggttaaccatgcactacgttcgctgttatcacgctttttacgccgtagcttgccacagttagcggtattatcaaatatggaaattagcgaaggtcgtcatattcgtatgacatcaatgattggtggacaaaatcattaa

SEQ ID NO: 295631 - DNA, 1149 bp, Proteus mirabilis
gtggctgaagatagcgatctcgaaaagacagaagaacccactccccataaacgggaaaaagcgaaaaaggatgggcaaattgttcgttccaaagagctttcgtccgtattaatgattttagggggcgtcagtctactgtggatgagtgggcgttttatcactcgtgagctttatgccatgttaacggaaggttttacttttaatcaccacataatcggcaacgagaatttattgatcccccgttttgccagtttaatgaaacaggctgtatttgcgttatcgccagtgtttctaggcttggtcttagtggcaattggtggttcagccgtattgggggggattaattttagtagcaagtctatcaagtttgatccgaaaaaatggaaccctatttctggcttaaaacgtattttttcaatgaatgcgttagctgaattatttaaagcgattttaaaatcactctttgtcggcttagccgcaacggttttcttatggcacaactggaacgatattcttcatttgatcacgcttcctcctttaagtgctttagctaatgcgatgcaactgcttatttttgcggtctatattgcggtttttatgcttatcccgatggtggcattcgatattatttttcaaattcgtagccatttgaaaaagttacgcatgacacgccaagaaatcaaagacgaatttaaacaacaagaaggtgatccgcaattaaaggcgcgtattcgccaacaacaacacgagatgtcgcggcgacgaatgatggcagatgtgccaaaagcagatgtcattgtcactaacccaacgcattacgctgttgctttgcaatataacgacaaaatggttgccccaaaagtacttgctaaaggggcgggcgccattgccttaaaaattaaagaaattggtgctgaacatcgaattccgcttctagaagcgccaccgcttgctagggcgttatatcgtcacagtgagataggacaggctattcctgcaacactctatgccgctgttgcagaagttttagcttgggtctatcaactgagacgatggaaaaccgaaggtggtttaaaacctaaacaacctatgaacttgccagtgcctcccgcactggactttgctggagaagataatcgtcatggctaa

SEQ ID NO: 295632 - DNA, 657 bp, Proteus mirabilis
atgagtggggatccaattatgccgaaagataatgtcgaaataacgtcagatattatcagtcggatcggacaattgacgcgtatgttacgcgacagtttgcgagaattaggattggataaagcaatagcagaagcagcagaagccattcctgatgcaagggaaagattggactatgttgctcaaatgaccgctcaggcagctgagcgtacattaaattgtgtggaagctgcgcaaccaaaacaggatgagttaagtagtcatgcaactaagttaactgaacgctgggatcaatggtttgagcatccagaagatctcaaagatgtacgctctcttgtaacggatacccgcaattatttgcgggatatccctgaaagtgcggcttttacaaatagccaattacttgaaattatgatggcgcaagatttccaagatttaacaggccaagtgattaaacgtatgatgagtgtggttcaagaaattgaaaaacaacttgttatggtattaatggaaaatctgccaccagagcaacttgaaaaatccaatgcgaaaaaagagactgattcattattaaatggcccacaagtcaataaaaacaatgctggtgtgattaagaatcaagatcaggttgatgatttactggaaagtttaggtttctaa

SEQ ID NO: 295633 - DNA, 390 bp, Proteus mirabilis
atggcaagtaaggatctgagatttttagtggttgatgatttttcaacaatgcgccgcatcgttcgtaatttactaaaggagttaggatttatgaacgtagaagaagcagaagatggtgctgacgcgttagccaagttacagagttcggcatatgattttgttatcaccgattggaatatgcccaatatggatgggttagagttgctgaagaatattcgtagtgacgcagggcttgcaacgcttcccgttctgatggtgaccgccgaagcgaaaaaagaaaatattattgctgctgcgcaatcaggagcaagtggatatgttgttaaaccttttactgcagccattcttgaagaaaaactcaataaaatttttgaaaaactgggcatctaa

SEQ ID NO: 295634 - DNA, 1053 bp, Proteus mirabilis
atgaataaaataacggtactctgtgttgatgattcggcgttaatgcgccagatcatgcgagaaataattaatagtcaccatgatatggaggtcgttgattgtgcgccagatccgatagtcgctcgtgacttaataaaaaagtttaatccacaggtattgacgttagatgttgaaatgccacgcatggatggtattgattttttggaaaaattaatgcgcttacgccctatgccagtggtgatggtttcatcactcacagccaaaggttcagaagtgacattaaaagcattagaactgggggcggttgattttgtcactaaacctcagttaggtctacgtgaaggaatgttggcctacagtgaacttattgcagaaaaaattcgagcagcggctcaggcaagaattagtcgtcatgaaacgaaaacattaccgtctaagtcgttatcatttactcccatgatttcgagtgaaaagttaatcgctgttggtgcttcaacagggggcaccgaggctattcgtcattttttagagccattacctattaccagtcctgcagtattaataacccaacatatgccggcggggtttacccactcatttgcagagcggttaaaccgtttatgccaaatcagtgtgaaagaagctgaagatggagaacgggttttacctggacacgcctacatcgcaccgggtgattatcatatggagcttcgtcgtaatggtgctaattaccagatccatataaataaagatcctgcggtaaatcggcatcgaccttctgttgatgtgctatttaattcggttgctaaatatgcggggcgtaatgctattggtgtcattttaacagggatgggcagtgatggtgctacaggtttattagcaatgcgtcgtgcaggtagctacacatttgcacaagatgaagcaagctgcgtcgtctttgggatgcctcgttccgcggtcgaattgggagccgtggatgaggtaaaaagtataagctcaatgagtaaagccgtgctgatgaaaatcagcacaacacaatcattgcgtatctga

SEQ ID NO: 295635 - DNA, 891 bp, Proteus mirabilis
atgaaacgtaatgttactgaagaattgccagatatcgctgctcaaccgttagattttttttctgaacggtttatgttgtccgatgatcagtttcaatcaatctgccaattgatttatcaaaaagcaggtattgtgctgactaacaacaaacgggaaatggtttataaccgtctcacgaggaggttacgtgaattacggatgaataactttggtgactatcttgcgtttctaaaaagtgatgtatgcaaccctgaatggcaagagtttattaatgcgttaaccacaaacttaactgcattttttagggaagcacatcactttcctattttggctaaacacgccaaaaacagggcaggaggagtttaccgagtatggtgtgctgccgcatctactggagaagagccttattcaatagcgatgactttgcgcgatgtttttggggataacccctataaaacaaaaattattgccagcgatatcgacactaatgtgttggaaaaagcccgtaaaggtgtttatcgactggaagagttaaaaacgttaaacgaagaatatttgaaaaaatattttctcaaaggtgttggtgattttgccggatacgtgaaaattagaccacaagtaagtgaaatggtcacttttcagtatttgaatttacttgacaagcagtggaaattagaagggccatttgatgcgattttttgtcgtaatgtcatgatttattttgataaaacgacacagcaaagcttacttcatcgatttataccattgcttaaacccgatggaatgttgtttgtagggcattctgaaaatgtgagccaactaagcaaggatttttacttgcaggggcatacggtttacgggctgacaccagcaaggagaggttatgaataa

SEQ ID NO: 295636 - DNA, 1647 bp, Proteus mirabilis
atgtttaggtttcgtaaattaaagatatccaccagtctctatttattactgatgatgttttgtgtgatgcaagttatttccagtgggatctctctgggaattattcatttaaacaacaatcagatcactagaattgatttagatactgctaagcgagatgaattaggattaagttgggtatctttagtacaagcacgtaatgcaataaaccgcgttgcgataggaatgaaaactgaacagtcaacagattatatccaatctattgaatcaatcgcattatcacgtttggaaacagcaaatactcattttcaaaatttccttacagatattaatcaagaggttattccacaagaagaaaaagagatttttaataccgtaaaaaatgattatcacgttctttatagtgcactagttgaattacatggcatgttaaaaaaaggcgattttcaagggtttttagatcaaccaacggaacgctatcaaactgcaatggaaaattcatttaatacctatatgaattacgttcaacacgaagtggctgattcgatagaacaaggacatcatttttatactatcgctattttaatgtttattggcgcaatcaccatggtaattgtggtgtcaatcgcctctcatcgctggttaagttttaatattattaaacctttcgcaagtttaagccgttactttaatgatgtcgcaacaggcaaattaaatcgtgaaattctggtttttactgatgacgaaataggtgacatttttagacggttacgtgagatgcgtggcgagttggcgcgctctattcgtattgttcgtgataacagtcaggcgatgtattcgggtattcaagaaatttccaaaggtaataccgatttatcctcgcgcacagaacaacaagctgcttctttggaagagacggctgcgagtatggagcaattaacggcgacagttaaacaaaatgcggataacgcgttacaagcgagtaagttggcggaatctgcatctgaaactgcactacgaggcggtgaaattactcacagtgtggtcgaaatgatggatgctattactcaaagttctcaaaagataggcgctattattagtgtcattgatggtattgcctttcaaaccaatatcttagcgcttaatgctgcggtagaagcggcgcgagcgggtgaacaaggacgcggtttctcagttgttgcaggagaggtgcgtaatcttgctcagcgtagtgctgaagcggctaaagaaattaaaacacttattgacgagtctgtgtctcgagtctctcagggatctcgattagtaaatgatgcggggcaaacgatggaggagcttgtcacatctgtaaataaagtcactgagttaatggccgaaattgcctcggcttcagacgaacaaagtagaggtattcaccaagttgctgatgctgttagtcagatggatcaggtgacacaacaaaacgctgctttggtggagcaatcagcatctgctgccacagcattagaagatcaggctaacaacctggttaatgctgtatcggcattcgaattgcctgacacggatgaagacggatcttctcactccttagaaggtaatgggttgaagaaagcagataaaaaatcattttttaaaaagacccattaa

SEQ ID NO: 295637 - DNA, 1707 bp, Proteus mirabilis
atgtttagccgaatgaaaatagtgactgggttgttatccattcttctgttgtttggtgttttgcagtttatctccgggggtgttttttactcaaatctcagtgaaacaagacaagatctggataaaactctcacaatacaaaaacagcgtgaacgtttagatgaaagctgggcaaacttattgcaagcgcgtaacaatattaatcgtgcagctataagctatctgttacaggataaagatctgaatgttgatagctcgttgtctgtagaatatttaactggtctggcacgtaaaaatatgtctcgggccgatgataaatttaaagagtttgaacagcatataaatgcttatcaaattcattcagaagaagaaatacgcaatttaaaagggcgttttattgagtatttttctgcattaaatcagttagaaattttactgcaagataaaaacttaaaagattttttcgaacaaccaacgacttcttatcaagatggtttttataaagagtatcttgcttatgttatgcgtaatgagaagtttaataatcaattaaatagtgcattagaagcttctcatcagcgttctattatcacgatggtgatattagccattattgttgttacagcattaatcatttgttggtttgcactgcgcaatgcattaattcgaccacttaattcattgttattaaatattaaagcattttctgaaggggatctacgtcccgatatcgaggtgcatggacgtaatgaaatgagcttattagcaagtggcttaaagcacatgcaacaagagcttatacatactgttcgtggtgtttatcaaagtactgagaatatctataacagcaccagtgaaattgccgcaggtaataatgatttatcctcacgtactgaggagcaagttgcttcattagaagagactgctgcgagtatggagcagttaacggcgacagtaaaacaaaatgctgataatgcacgccaagcaagtaaccttgccaatgatgcctcagatattgcccgccaaggtggaaaagttgtggctaatgtggtgcaaacgatgcacgacatagccggaagttctcaaaaaatcaccgatattactgcagtgattgatggtatcgcatttcaaaccaatattttggcgttgaatgcggctgttgaagctgcgagagccggtgagcatggtcgcggatttgcggtagttgccggcgaagttcgtaatcttgcacagagaagtgcagaagctgctaaagaaataaaaacgttgattgaagactctgttagtcgcactgaaaccggatcggtattagttgaaagtgcaggggaaaccatgactcgtattgtcgaatctgtgacacgtgttaccgatattatgggggaaattgcctcggcatcggatgaacaaagtcgaggaatttcacaagtgggtcttgcggtttctgaaatggatcgtgttactcagcaaaacgcctctttagtagaacaatctgccgccgccgctgcgggtcttgaagatcaagcagttgcattaacccgcttagtttccatcttcaaattaccgggtcaggaagaaaaagcattagagaaaaaggaattggatgcaccccctgtagtacaagccgctgctccacttataaaaccaggaacctcagaaaagaaaaagagcagcagtgttgaagatcccgctaactgggaaactttctaa

SEQ ID NO: 295638 - DNA, 501 bp, Proteus mirabilis
atggctgcggaacatttcgagaaattatccggtgaaactgttggacaaggatttctaatttttacgttgggcaacgaagaatatggcattgatattctaaaagtacaagaaattcggggctatgaccaagtcactcgtattgcgaatgcacctagttttattaaaggtgtgaccaatttacggggggttattgtacctatcgttgatctacgaattaagttttcacaagaaaatgttacctataatgacaacacagtggtgatcgtggttaatttactcaaccgtattgtcggcattgttgttgatggtgtttctgatgtattaaccttaaaacctgaacaaatctgtcctgcgcctgaatttgcggtaacaatgtcaacagaatatttaacaggattgggtactttagatgaaagaatgttaattctggttgatattgaaaaattactcaatagcgaagaaatggaattagttgatagcgcaacaattatggctaaataa

SEQ ID NO: 295639 - DNA, 2220 bp, Proteus mirabilis
atggatattaccgagttttatcaaacattttttgatgaagcagatgagttgttagctgatatggaacagcatttactgttacttgatccgcaaaacccagatcaagagcagttaaatgctatttttcgtagtgcgcactccataaaaggaggagccgcaacatttggcttcgttaaacttcagcagaccactcatgtgctggaaaacttgctcgatagtgcaagacgccatgaaatggtacttaccgatgacattattaacctgtttctggaagcgaaagatattatgcaacagcaattggatgcacataaaaactcacaagagccagacgaggaaacatttaactatatttgtgagaagttgcgtcagttagctctagaagtcaaagaggaacaatcaactcaattaggtgaggggaatgactcagtatctttaactgaaagtaatgccccaacggagaacatcactcctgtttctgcagtgcatcatactgacgatgagcttagtaaagaaaatcaaccgctagcaacggctaatacaccaaatactgacggtctttatcagcatcatattattttatctgatttaaaagagaccgatattgatttaatgctagatgaattaaagcatctgggtgaagtcagtcaggttgaaaaacagcaccatgggttggaagcggtattaaaaaccacagcaactcaagaagatatcagtgcggtattatgttttgtgattgaaccagaacagatttcctttgctaacgttgctgctactgaggaaaaggtaacgtctacagataaaacgcaagagcaagccgaacactcaccctcatctgtgacagaaagtatccagcctgctgctcaaacagagcagccagctacgatagagaaaaacgttgctgagttgaataaaaatagtcaagcagatgaagtgactaaagttgccacaaccttgccaccaactgcgacaccagcccctgcgcgaaaacctgttgttgctcaggccaaaacggaatcaaccagtattcgcgttgcggttgaaaaggtggaccaactgattaacttggtcggggaattggtgatcactcagtctatgttagcgcaacatagtgacacgcttgagccatctattcatagtgatctactcagttgtattgcacagctacagcgtaactctcgtgatctgcaagagtcagtgatgtctatccgtatgatgccgatggaatatgtttttagtcgttttccgcgggtcgttcgtgatttagctggcaaaatgcataaaaaagttgagttaaatatgattggtagttcaactgaacttgataaaagtttaattgagaaaatcatcgatcctttaactcacttagtccgtaatagtcttgatcatggtattgaaatgcctgccgatcgcattgccgcgggcaaaccagaggcgggtcaattaacgctttcagcagagcatcaaggtggcaatatttgtattgaagtgacagatgatggtgctggattaaatcgtgagcgtattttgaaaaaggcgatatcatcgggcttagctgtttctgaaaatatgagcaatgaagaagttgcgatgttgatatttgcgccaggtttctctaccgctgaggttgtcaccgatgtttctggacgtggtgtgggtatggatgttgtaaaacgaaatatccaagaaatgggtgggcaaattcaaattagttttgaagttggaaaaggcacacgcattcgcatcttgctgccactcacattggccattttagatggcatgtcagtaaaagtgaatgatgaagtatttattttaccattaggaacagtggttagctcattacaacctgaagaggaagatatttatcctttagcaggagatgaaaaattattgcaagtaagaggtgaatatttaccgcttattgaattacaccgtacttttaatattgaaggtgcgcaaaccgatattactcaagcgattgcggttatcgtacaaagtgcagggcgccgttatgctttattggtcgataagttagttggtcaacatcaagtggttgttaaaaatatagaaagcaattaccgaaaaataccgggtatttctgctgccacaatcatgggcgatggtagtgttgctttaattcttgatgttccagaattacaacgtttaagtcattctcaaatgacagaaaagaaaaagaatacaactgcgcatacagttatttaa

SEQ ID NO: 295640 - DNA, 1050 bp, Proteus mirabilis
atgaaaagtaattcacagataatcagagttaaaaagcgagggaaaaaacagcacaacgcacaacatggtgcgtggaagatagcttacgctgactttatgactgccatgatggctttctttctggtgatgtggttactttctatcgctagtcctcaggagttaactcgtgttgctgaatattttcgcacacctctaaaagttgccattgaaaaaggccgcgttagtggagacgtgacaaacccgataccagggggaggacgtgatcctgtgtataacgaaggtgatgtactgccaaaaggtgtcgaagataaacagctcaatgaaaaacagcaattccgtaaactgaaagagaatttagagcaagttattttacaagatcctcgcttaaaagatttaaaacctcatttattaatcgacatgatggacgaaggcttacgtatccaaattatagataaagaaagccggccaatgtttaaagttggtagtgccactgttgaaccttatatgaaagatattttaactgcgatagcgccaatactaaatgactcgccttataaaatcagtttatcaggtcataccgatgatattccttatgcgagtggtgcactcaaatacagtaactgggagttatcaacggatcgagccaatgcatctcgtcgagaacttattggtgcagggcttgcagaatggaaagtactacgggttgtaggtatggcatcaactgttcacttagtaaaagaggatggttttgctccggcgaatagaaggatcagtatattagttttaactaagcaggaagaaaagaaaattgtacatgaaaatgagcgggttgcaccagcaataaaagaggcatcagaaattaaacctctgctttcagggcaagaaaccccacaagaaaacggagaaaatacacagacgaattcgtctgtgtcttcttctacatctaagcttcccgaatcaaaaaaggaaaatgttgaaacaggagtttctggggaaagtttgccatcacaatcgacaaatattacgacaaaacaggaaacaactccttag

SEQ ID NO: 295641 - DNA, 870 bp, Proteus mirabilis
gtggtgatttgtgctgtcctcggagggtttaccctcgtaggtggacatctaggcgcattatatcaacccgctgaatttttaattatttttggtgccggtatcggtgcttttgttgtaggtaataatggtcgtgcgatcgtatcaacggtaaaaatcctaccgaaattacttcgtaacactaactacaataaagcgatgtatatggatctaatggcattaatgtttcgtttgctgtctaaagcgcgccaaaacggcatgttggcattagagagagatattgaaaatccacaacaaagtgacattttttcccaatatcctcgcattatgaaagacgtttatatgctcagttttattactgattatatgcgtttgatggtgacggggaatatgaatccttatgaaattgaagcgctaatggacgaagaaattgccacttttgaagaagaaagtgaagtacctgcggcggggctctctacgatgggcgattcattacccgcatttggtattgtggccgcggttatgggggtggttaatgcgctaggtgctgccgatagacctgctggggaaatgggggcacttattggtcacgcaatggtaggtactttcttaggtattttattagcttatggctttgtttcaccattagcttctcgtatcagacaacgctctagtcaacaaatgaaaatgatggagtgcatcaagaccaccctgttatctagcatgaatggatatgcaccacagatagcggttgagtttggtcgtaagaccctctttctggcagacagaccttcatttattgaattggaagaacatgtacgtcaggtacggacaccgatgcaggcaaatcctgatgcaatgaaagaagagtaa

SEQ ID NO: 295642 - DNA, 582 bp, Proteus mirabilis
atgagtgagaaaagtatcgtccgagaggcgaaagatattcgcctagcaatggaattaatcaccttaggtgctcgcttacaaatgcttgaaagcgaaacgcaattaagtcgagggcgtttaattaaattatacaaagaattaagaggaagccctcctcctaaaggtatgctacctttttcaacagattggtttatgacatgggaacaaaatatccattcttcaatgttttataatgcttaccgctttttattaaaaagcggggggagtgtaggtgttgaagctgttgtaaaagcctatcgtttatatttagaacaatgtccacccgttaaagatcaagaacctattttagcactaacacgagcatggacattagttcgttttgttgaaagtggtatgttacaactttctgtatgtaccaaatgtaatggttcatttattacacacgcacatcagcctgcaagtaattatgtttgtagtctttgtcagcctccatctcgggcaataaaaaaacgtaaactttccgccaatcctgccgatattaacttacaactgttggatggtcttgaacagtttgcaatgtga

SEQ ID NO: 295643 - DNA, 351 bp, Proteus mirabilis
atgagtacggttgaattgcttaagcatatttatgacataaatttatcgtatttgcttttggcgcagaggttaattaaccaagaaaaggcttccgcaatgtttagactgggtatcagcgattctatggctgatgcactaaaagagctaacattgcctcaattggttaagttggctgaaacaaaccaactaatctgtaatttccggtttgaagacagcgaaacaatagaacaactcactaaagaatccagagtggatgatttgcaacaaattcatactggtatccttctttcttctaacttgttccgtcaactatcggaacatgatacctctgctacaaagaaacgggcataa

SEQ ID NO: 295644 - DNA, 612 bp, Proteus mirabilis
ttgcatttacctattgagcaagatattcgtcaacgtactttgcgtaatattcagcgccgtttccaaattgatattgagcaagcccatcgtgttcaacaattagcagagcattttttcattcaagtcagtaaaagttggcaattagataatcgctgtcgagagctactttccagcgcttgtgccttacatgaaatcggcttaagtgttgattttcgccaagcgccttcacatgccagttatttagtttctcaccttgatttacctggttatacacccgcgcaacgacgtttaatcgcctcatttttaagaaatcagaaggggattatcgatctcgcacctttgaatcagcaaaatgcgctaccgataaatcaagcataccgcttggtacgtttacttcgcctagcaattatttttgccagtcgtcgtcgtgatgatactttacctgcactgcgtttacgtacggaagatgaaaaattaatcattaccttgccacatcaatggattgctgaacatcctttacgtgcggaaaatcttcatgaagagatacagttacaaagctacgtccattggccattaatgcttgaagagcaaaataactcacgcataggttaa

SEQ ID NO: 295645 - DNA, 2022 bp, Proteus mirabilis
atgcgattaaatcccggtcagcaaaaagcagttgaatatgtgtcaggtccttgtctggtcttggcgggagccggctcgggtaaaacacgggtgataaccaataaaattgcttatcttattcgtcaatgccgttattctgctaagcagattgctgcggtgacttttaccaataaagcggcgcgtgaaatgaaagagcgtgttgctcaaacattgggaaaacaagaggcaaaaggattaatgatctcgaccttccatacattaggattggagattattaagcgagaatacaaagcattaggcataaaatccaacttttctttgtttgatgatcaagaccaatccgcattattaaaagaattaacggtagatttattagaagaagataaagatttgctatcacagttaaagagtcaaatctctaactggaaaaatgacatgctcacacctgagcaagtgattggtagagcacaatcgcagcaagatcatacttttgccgagtgctttcgacgttatgagcaacatttactaagctgtaatgtattggattttgatgacttaatcagtaagcctaccttgctattacgtactaatgaagaagtaagggcgcgctggcaacagcgtattcgttatctgctggtggatgaatatcaagataccaatacaagccaatatgagttggtgaaatggttagtgggtgaaagagcccgtttcactgtggtgggggatgatgatcagtctatttattcatggcgtggtgcgcgtccccaaaatctggtgttattgcaaaaagatttcccacagctaaatgtgatcaaactggaacaaaattatcggtcatcagggcgtattttaaaatcagctaatatttttattgaaaataatccccatgtatttgaaaaacggctgttttcagaattaggttatggggatgagctacgagtattaaccgctaataatgaagagcatgaagctgagcgtgtagcgggggaactgattgcccatcattttattaataaaactaattataaagattacgcaatactctatcgaggtaatcaccagtcgcgtatttttgaaaagtatttgatgcaaaatcgcattccttatcgcatttcgggtgaaacctcgtttttttcccgtgaagagatcaaggatattttggcttacttaagagtgatcactaatccggatgatgatgctgcattcttacgtatcgtcaataagcctcgtcgtgaaataggcccgatgactatccaaaagttgggggagtgggctaaagtccgtgataaaagcttatttaatgcctgttttgacttgggattaagccaaacgttaacaggacgaggtttaagtgcattacaggctttttcacagtggatggcgcgaattgtacaacaatcagagcgtgagcctttgcttgctgtacgtgatttgcttcatgaaatggattatgaaagttggttatatgaaacctctagtagcgcgaaagcggctgaaatgagaatgaaaaatattaaccagcttttttcttggatgagtgaaatgcttgagggggatgagttacatgaacccatgacgctctctcaagtggtcaaccgttttactctgcgcgatatgatggagcgtggtgaaaccgatgaagagttagatcaagtgcaattaatgacacttcacgcctcaaaaggactggaatttccacatgtttttctggttggcatggaagaggggatcttgcctcatcaaagtagtatcgatgaagataacgttgaagaagagcggcgtttagcttatgtcggtattactcgagcacaaaagacattaactttcacattatgtaaagagcgacgtcaatacggtgaattaattcgtccagagcccagtcgttttctatatgaattgcctcaagacgatctccattgggataccaataaaaagaaagtgttaagtgctcaagaaaagcaagaaaaagggcaaaaaggggtcgctgggcttaaagcgatgttggcgagacataaaccttag

SEQ ID NO: 295646 - DNA, 249 bp, Proteus mirabilis
atgagtataaaaagcgaattaatagccactaaagttgatatagagctcaaagaggcttttgttgcaatagctcgaaataaacacagaccagcctctcaaatcttaagagatctcattcgagtttatgtggaaagtaatcaaacacaaccaaatgaaaaaacattaaacacttttgcaaaaacagataaaggtgatgatgttttttatgctgaagatgcccatgatttattcaaaaaattggatatctaa

SEQ ID NO: 295647 - DNA, 270 bp, Proteus mirabilis
atgcgaaaagtgagttattcaggacaatttaaaaaagacttaaaactcgcagaaaagcgaggaaaggatattaataaactaaaagagattatattactattagtgcaaggaaaacgactacctgctcaattgaaagatcatccattaacaggaaactggaagcctcgtcgagatcttcatatcgaacctgattggctacttatttataaaatagacaatgatactgttcattttgacagaactggctcacattctgatttatttaaataa

SEQ ID NO: 295648 - DNA, 1476 bp, Proteus mirabilis
atggccaattattttaatacattgaatctgcgtcagcagttgtcgcaactgggtaaatgtcgctttatgtctcgtgacgaatttgccgatgaggctaattatctaaaaggtaaaaaagtcgttattgttggctgtggtgcacaaggtttaaaccaaggtttaaatatgcgtgattcaggactggatatcgcctacgcattacgccaagaggctattgatgaaaagcgtgcttcatggcgtcgtgccactgaaaatggttttgaagtaggaacctatgaagcattgatcccgcaagccgatttagtggttaacttaacgccggataaacagcactccgccgttgttcaagccgttcaaccactgatgaagtcaggcgccgctttggggtattctcatgggtttaatatcgttgaagtgggtgaaaaaattcgtgacgatattaccgttgtgatggttgcgccaaaatgtccaggtactgaggtgcgcgaagagtataagcgtggttttggtgtacctaccctaattgctgttcacccagaaaatgatgctaaaggtgaaggtatggccattgcgaaagcatgggcggcagccacaggtggacatcgtgcgggagtgttggaatcatcttttgttgcggaagtaaaatcagacctgatgggcgaacaaactatcctgtgtggtatgttacaagccggctctctgctgtgttatgacaaaatggttgctgaaggtgttgaaccgggctatgcaggtaagcttatccagtttggttgggaaacgattacagaagccctgaagcaaggtggtattaccttgatgatggatagattatctaatcctgccaagatgcgtgcttatgctttatcagagcaattaaaagagattatggcaccactgtttgctaaacatatggatgatattatttcaggtaaattctctgaaaccatgatggcagattgggcaaatgatgataaaaacttgctgacatggcgtgaagaaacgggtgcaagcgcatttgaaaattatcctgaatatgaaggtaaaatcagcgagcaagagtattttgatcatggcgtattgatggttgcgatggttaaagcgggtgttgagctggcgtttgatacaatgattgaagctggcattatcgctgagtctgcctattatgagtcactgcatgaattgccattaatcgcgaatacgattgcgcgtaaacgtctgtatgaaatgaatgtggttatttcagataccgcagagtacggtaactatctgttctcttttgctgccgtgccgatgttaaaagagtttatgacgacgttgcaaagtggcgatttagcgaagcatgttccagatagtgggacagataatgctcaattgcgtgatatcaatgaagccattcgtcagcaccctattgagattgtcggtaagaaattaagagggtatatgacggatatgaaaaagattgctgttgccaactaa

SEQ ID NO: 295649 - DNA, 888 bp, Proteus mirabilis
atggatattcgcgatctcaaactcttcttacatcttgctgaaagttgccatttcaccaagactgcgcaagccatgcatgtcagtccatccacgctttcacgtcagatccagcgtcttgaagaacaactagggcatccactttttttgcgtgataaccgccaagtcacactgactgatgcaggggaacaacttaaacgttatgctcaacacaccttattgcaatataagcaactcaaacatacgctaaaccagaacagtcccagcttgtctggagagctacgtctattttgttcagtcactgcagcttatagtcaccttccgccgatccttgaccgttttcgtgcggaaaatcccttagtcgagataaaattgactaccggtgatgccgcagatgctgtggataaagttatctcagatgaagccgatttaggtattgcaggaaaaccagagaagttgcctgaaaatatctgctttgagaaaataggcgagatccccttagttcttattgcccctgctctaccgggtaatgttcgacaccttgctacacaagaaaaaccggattggctcaatattccctttatcattcctgaacacggcccatcacgacagcgcattgctttatggtttaaacgccatcgaattcaaaatcctcttatttatgccactgtttcagggcatgaagcgattgtttcaatggttgctcttggttgtggtattgcacttattccgcaagttgtcgtcgataactgccctgagccggtacgaaaccgtatctctttgctcgataatatatcactggtagaaccctttgaacttggcgtttgtggtttacacaaacgccttcaagagcctgtgatcagtgcgttttggcgcctactccaccactaa

SEQ ID NO: 295650 - DNA, 1575 bp, Proteus mirabilis
atggcagcctttagacctttaacttcagcacccagtagtgctgaatatttaaaagccgcattaagtgcgcctgtttatgaagctgctgtcgtgacacctttgcaagagatggcaaaaatttctcagcgtttagaaaataccattttagttaaacgagaagaccgacaaccggtgcatagctttaaactgcgtggcgcttataacatgattgcagggttaacgccggagcaaaaggcaaaaggggtggttactgcatcagcgggaaatcatgcccaaggggtggcattatcagctaatcgaatgggcgtaaaagcattaattgtgatgcctattgcaacggcagatatcaaagtggatgccgtacgccaatttggtggtgaagcattgttgtatggggctaactttgatgaagcaaaagcaaaagccatcgctttggcaaaagagatgggatatacctttgtgcctccttttgatcatcccgctgtgattgccgggcaagcaacattagcaatggagctgttacaacaggacgtccatcttgatcgtatttttgtacctgttggcggcggcggtttaattgctggggttgctgtattaattaaacaactgatgcctgaaataaagatcattggtgttgaggcggaagatgctgcttgtttaaaatcagcgttagaagcaggacatcctgttgagttacctcgcgttggattatttgccgaaggtgtcgctgtcaaacgtattggcgatgaaaccttccgtttatgccaaaagtatgttgatgatgtgataaccgttgatagtgatgcaatttgtgccgctgtaaaagatctgtttgaggacgtacgcgctattgcagagccttctggtgctttagcattagcagggctaaaaaaatatgttgaggagcatcagatcaaaggggaacgtttagcccacgtactttctggcgctaatgtcaatttccatggcttacgttatgtttcggaacgttgtgaactaggtgaaaaacgagaagcgctatttgccgttacaattcctgaacaaaagggtagttttttgcgtttttgccaaattttaggacaacgtgttgttactgaatttaactatcgttatagcgatgccgatccagaaaatgcacgtatttttgtcggtgtgcgtttaagccaagggctacaagagcgtaaggaaatcgtgcaacagctaacggaggcgggttatcaagtctccgatctctccgatgatgagatggcaaaattgcatgtgcgttatatggtcggtggtcgccctaatcagccattaaaagagcgtctgtttagctttgagtttccagaagcaccgggtgcattaatgaagtttcttaaaacattagggacttactggaatattacgctatttcattaccgaagccatggtactgattatggccgtgtgctggtggcgtttgagttacctgaaacggaagggcgttttgaacggcatttagatgcgttaggttatgaatatcatgatgagacaggaaatccgtcttttcagttatttctttcaccacaaacagccagcttagtggtggagtag

SEQ ID NO: 295651 - DNA, 1851 bp, Proteus mirabilis
atgcctaaataccgttcagcaacaacgacacatggtcgcaacatggctggcgcccgcgcattatggcgtgcaacaggaatgactgacgctgattttggtaaacctattatcgcagttgtaaattcatttactcaatttgtacccggtcatgtgcatttgcgggatttaggaaaactggttgcagagcaaattgaagctgcgggtggtgtggctaaagaatttaatactattgcggtggatgacggtatcgcgatgggacatggtggcatgctttattcgttaccttcccgtgagttaattgctgattctgtggaatatatggtcaatgcacattgtgcagatgccatggtatgtatttctaactgcgacaaaatcacaccgggtatgctgatggcgtctttgcgcttaaatatcccagtcatttttgtttctggtggaccgatggaagcgggtaaaaccaagctttctgatcaactgatcaagttagatctggttgatgcgatgatccaaggggctaatcctaatgtcagtgatgctgatagtgaacaaattgagcgttctgcttgccctacatgtggatcatgctctggtatgtttacggcaaactcaatgaattgtttgactgaagcgttaggattatcgcaaccgggtaatggttcattattagcaacccatgctgatcgtaaaacattatttattaatgcgggtaagcgtattgttgaattaactaaacgttattacgaacaagatgatctatctgcattaccacgtaatatcgctaaaaaagaagcatttgaaaatgcgatgatcttagatatcgccatggggggatcaacaaataccgttttacatctattagctgccgcgcaagaaggtgatgttgattttaagatggaagatatcgacagactttctcgccaagttcctcatttatgtaaggtggcaccaagtacccaaaaatatcatatggaagatgtgcaccgagcaggtggggtgatggggattttaggtgaattagacagagcaggattacttaatcgtaatgttaataatattttaggcttaagtttgcctgaaacattagcacaatatgatgtgatgctaagccaagatgagcaagtgaaatcaatgtaccaagccggtcccgcaggtattcgtaccacaaaagctttttcacaagattgccgttggccgactttagataccgatcgtgaacaggggtgtatccgaagtaaagcgcatgcttatagccaagatggtggtttggccgtgttatcaggtaatttagcgcaagatggttgcattgttaaaaccgcgggtgtggatgaagataatttagtgtttagtggccctgctaaagtatacgaaagccaagatgatgcggtagaggcaattttaggtggcaaggtcgttgcgggtgatgtggtcattatccgttatgaaggcccgaaaggggggcccggtatgcaagaaatgctctatccaacctcatatttaaaatcaatgggattaggcaaagcgtgcgcattaatcacggatggacgtttttctggtggaacctcggggttatctatcggacacgtttcaccggaagcggcaaatggtgggatcattggtttagtggaagaaggggatattgttgatatcaatattccaaatcgcgaaattaacttacgggtagatgagaaaacactagcagcccgtcgtgaagcacaacttgctcgtggagataaagcgtggacacctaaagataggcagcgccaagtctcttttgctttacgtgcctacgcgtctttagcaaccagtgcagacaaaggtgctgtacgtgacaaatctaaactagggggctaa

SEQ ID NO: 295652 - DNA, 927 bp, Proteus mirabilis
atgacaaagcaagctgattatatttggtttaacggtgaaatggttccatgggctgaggcaaaagtacatgtcatgtctcacgcactacattatggaacgtctgtatttgaaggagtacgttgctacgattcccataaagggcctgtcgtttttcgccatcgtgagcatatgcaacgattgcatgattctgccaaaatttatcgtatgcctgtcgcgcaaagtgttgatgagttaatggaagcttgtcgcgaaacattgcgcaaaaaccagttagtcagcgcttatattcgtcctttagtttttattggtgatgtcggaatgggggttaatccaccagaaggttataaaaccgatatcattattgctgcattcccatggggggcatatttaggtgaagaggcgttagataaagggattgatgcgatggtctcttcttggcatcgagcagcacctaatactatcccgacggcggccaaagcaggaggtaattatctctcttcattgttagtgggcagtgaagctcgtcgccatggttatcaagaagggattgcattagatgttcatggttatctttctgaaggggctggtgagaacttatttgaagtaaaagatggcgttatttttactcctccatttacctcatctgcgctaccggggatcactcgcgacgcaattattaaattagcgaaagatctcggttatgaaattcgtgaacaagtactgtctcgagaatctctctatcttgctgatgaagtgtttatgtctggtaccgctgcagaaattacaccagttcgtagcgttgatggtattcaagttggtattggtcgctgtggtccagtaacaaaagctattcagaaagctttctttggtttgtttacgggtgaaaccgaagacaaatacggctggttagatcctgtcaatccataa

SEQ ID NO: 295653 - DNA, 279 bp, Proteus mirabilis
atgaaccaacacaatatcacaattgaagcccgtttttgtccagagatcttagaacgtatcttgagagttatccgccaccgtggttttcatatatgctcaatgaatatgaatatcacagaaagtaactatattaatttagctctgactgtgagcagtcaacgacctgttgatcttttatgtagccagttaacaaagttagctgatgttgcaggtattcaggtcttacatcaacaacaaaaagaaaaattacaattcataagtgcacttagtgccatgtaa

SEQ ID NO: 295654 - DNA, 1650 bp, Proteus mirabilis
atgaatggagcacagtggttagttcaagcattacgaaaacagcgagtggaaacggtctttggttatcctggcggtgcgattatgcctgtgtatgacgcactctatgatggcggtgtcgaacatgttttgtgtcgtcatgaacagggagccgctatcgctgctattggatttgctcgttctaccggtacaactggtgtctgtatcgcgacatcaggcccaggcgctactaatgtcatcacaggtcttgctgatgcattgttagattctgtgcctgttgttgctatcacagggcaagttgcttcaaatttaatcgggacagatgcttttcaagaggtggatgtacttgggctctctttagcatgcaccaaacatagttttctggtttctgatgtgaatgaactgccaagagtcgtatcagaagcattttcgatcgctaagcaagggcgtccaggccctgtgttaattgatattactaaagatgtgcaattagcagatgcttcacatttagctgattatccattgccacaagagcaagagtttccctatcccgaacatgaaatcgcgcaggctctgcagatgttagcacaagcgaaaaagccgattttgtatgttgggggcggtgtagcaatgagccaaggtgttgaggcgctaagatcttttgtaaaacagacgcaaatccccgttgtttcgacattgaaggggttaggttgtgctaatgcatttgatgccaattatttaggtatgttgggtatgcatggtacaaaagctgctaattatgccgttcaacgtagtgatttattaattgctgtaggcgctcgttttgatgatcgcgtaacgggtcgtttaaatacttttgcacccaatgcaaaagtgatccatatcgatatcgattacgcagagcttaataaattaaaacaagcccatattgctttgttaggtgatgccaaagtgttattacctaagttatctcaaccgttagctattgaggcatggcaagaagaggtacagcaattaatcgctgaatatgcttggcgctatgatcatcccggtgaagcaatttatgctcctttgttgttaaaacagttatctgatgctaagcctgaaaatagcattgtgacaacagatgttggacagcaccaaatgtggtcagcacagcatatgacatttgatgcgccagaaaattttattacttctagtgggctaggcacgatgggatttggtatccccgcggctattggtgcgcaaatagctagacctgatgcgtgtgttatctgtgtctctggtgacggctcttttatgatgaatgtgcaggagttaggcaccattaaacgtaagcaattacctattaaattggtgttattggataaccagcggcttggtatggtgcgccaatggcaagagctgttttttgagcaacgttatagtgaaaccattttaacggacaaccctgattttgttgctttggcaaaagcttttgatattccggggcagcgtattacagaaaaagcacaggttgctgaagcaattaaatgtttattaaccagtgatggcccttatttattacaggtatctatcgatgatgcagagaatgtctggcctttagtcccgccgggcgcaagcaatgatgagatgatggagaaatcaaaatga

SEQ ID NO: 295655 - DNA, 1533 bp, Proteus mirabilis
atggcattagcagtaatatatacgcgagcctcattagggatctctgcaccacttattactattgaggctcatattagccagggattaccaggactcactttagttggtttacctgaaactgtcgtaaaagaagcgaaagatagggtaagaagcgcattaataaatagtggatatagttatccagcaaaaagaattacgattaatctttcacccgctgatttacctaaagaaggagcccgctatgatttacccattgcgttagctatcttaattgcctcagagcaattaatctctgataaattaaatagttatgaatttatcggtgagcttgcactttccggtaaattacaaaaagtgaatgcggttattccctcaattttaagcgccaacaaagataatagaatatctatcatttctattgaacatcaatcagaagtttcgctcttacctaataaatccgcgttattagcgagccatcttttggatatttgtcatcatttagaaaataacaccccattaattgaagctaaaaacaacattaatcacaaaacaattgaaaaccaaaataataaagatattagtgatattattggacaaaataatgcaaaaagagctgcagaaatcactgcagcaggaaatcacaacattttatttcttggccctcctggcacaggaaaaacaatgttggcacaacgcattaatactctcttacctccacttacagctaaagaagcccttgatgtattaattatcagtagcctatcaaatacgatacatcatgatggtaaatggcctttacgtccttttagagcacctcatcatacggcatctgccgttgctttaaccggaggtggatctattcctaaacccggtgaaattacacttgcacaccatggcattttatttttagatgaattgccggaatttgatagacgtgtgttagatgcacttagagagcctcttgatgcgcgcaaaattaccatttcacgtgctaaagccaaaattagctatcccgcaaatgtgttacttgtcggtgcattaaatccaagtcctacagggcattatcaaggtactcataatcgaacgcccgtaaaacaagtattacgttatttaagcaaagtatcgggaccttttttagataggtttgacttatccgttgaaatgccattattacctcaaggtgcactactacaatcgacccataccaatgaatcgagtagcatcatacgggctcgagttttacaagccagagaacgtcagttccagcgaagtggcaagcttaatacttatttatcaagtaaagaaattgagaatttttgtcaattaaatactgaagatgcactctttcttgaagagacattgaataaattaggcttatctattcgtgcatggcataaaattttaagagtttcgagaactattgcagatcttgagaatgagccaaaaatacaacgaaatcaccttattgaagcgttgagttttcgcgccatggatagactgatgatctatttacaaaaacagttagaagggtaa

SEQ ID NO: 295656 - DNA, 339 bp, Proteus mirabilis
atggcagaaagttttatcacgactaatcgtttttttgacaataaacattatccgcgtggtttttctcgtcatggcgatttcactatcaaggaagcccagatattggaacgtcatggtcaagctttcaatgaacttgatttaggcaaacgagagcctgcaactgaagcggaaaaattatttgttgccatgtgtcgtggcgaacgagaagcagctactgttgaagaaaaaatttggaagaaatataccagtcgtataagtcgtccaaaacgttttcataccttatcgggtggaaagccacagctcgatccatctgatgactataccgattctgatgattaa

SEQ ID NO: 295657 - DNA, 825 bp, Proteus mirabilis
gtggataccgaattactgaaaacctttttggaagtcagtaagacaagacactttggccgagccgcagaatctctttatttaacacagtctgcggtcagttttagaatacgccaattagaaacccagcttgggacaaatttgtttactcgccatcgtaacaatattcgcttaacactcgctggagaaaggcttatcccttatgctgagtcattaatgaatacttggttacaggcaaaaaaagaaattagccacgcctcccaacactcagaactttcaattggcgcaacagcatcgctctgggacgcttatctaacctcttggctacaagaggcttacttagaaagaaatgagcttagaattgaatctagagtctctacaagacaatctctagtaaagcaacttcatgctcgtgagctagatctgctttttactacagaagcacccaaaatggatgagttggaaagtaaagtcattggtaatatcacatttcaacttatgaaaagagcatcacatctgaaccagcaaagcgcacaatttatcaaaattgagtggagtgctgatttgtcaccactttctcaaaatagctctgcaccaaaaacagaacctattttgacaacaaattcagctatgattgcttatcagttaatgaaaacaacaaatgccgttgcttttttacctactcattggctcgatttatatcccgatctttcaccagcagcagtagagatcatccaaaaaccgctatttgccgtatggctcaataccagtgatcaacaagtgttaattcagcaactactttctcaacctgtctccaaccatcagtag

SEQ ID NO: 295658 - DNA, 657 bp, Proteus mirabilis
atgtatgatgtttttacaccagaaacccaaagcctcaccaagcgcgtatataacacaggaacatctactgcgtttgttcgtgttgagatattggaaattgatgctgatccaaaaatgaatcagcgtgaatcagcacaaaaagaaattaaagaaggttcattaacgcaagaacggctgattgtctccccattgagattaattattccaccatcaagttttcagtcagtccgcatactatggccaggggatagagaaaaagaacgttattttagaattcgttttactcccgttcttcctgaagaaaatgatggttttggaatgagcaaagatgaaataacacaatacaaaaaaaacgcattggatgtgggagttaatgtgttaactggctacggcagtgtggttgtgatgcaagctaaaaatcccttatttaataccgttattgatgacacaaataaacaaatttcaataaaaaataaaggaaacgccaccattatattggataatatccgttattgtgaaaatataaagtcacactgtgagaataaagcgcgagaaattatcttaccaggaagagaatttgttctacaaaaaaaaataaataataaaattgactttgtattaatcgaaggtgataaatctaacacgtttaattattaa

SEQ ID NO: 295659 - DNA, 522 bp, Proteus mirabilis
atgttaaaaagatcattatccattatatttctatcttgtggcgccttaggttcaatggtagctcacgcagcagatgaacaacgctatgctatcgatttaacggcaactattcctacagaatcttttcaggttatccctgttgagagtggttggataaaccaaacacaagaaatggctttcgatttaggcacccgtaaattacaagatttcaccaagcaatttcaatataaaaacacctctgggggtattcaagcaactttaacaaatactgactcaaagggtaccgcaatcttatcaaatggtaatgataccattccattagccgtcatttttaacggcgtaacactcagtaaaacgcctagcactgtagttaatgctgatgatgccaaaacaggcggtcgtaccaaccttcgtattacacaacaaacagatacccctctaacagtaacaggctcttttacaggccaagtagccatggtttttgagcctgtagttgagactccagttgagcctgaaagctaa

SEQ ID NO: 295660 - DNA, 2412 bp, Proteus mirabilis
atgaaagtattatttgcattaatgttaataccagaaatcgccttaggatcaagtgtattcctggcaaataatacaataaaaataccgagtgaatttaagcaatatttttataactcagaaattgtttctcaagtgtatcttaatgattctcccctttttgaagctgtcttttcacttcatgaaaatggacaaattaatctcttgagaattttagatgaagaacctgatattaaaccgcaagttaaaaatgaatgggctgagattttacaaaaaggcatctcattaggtgcttgtgatgcttcctgccccgcaggactcgtctctgctgaatatcgactagataattcttcattaaaattatttacttcgcactatgaaactgaacaagtgaaaagtgattatatctatttgcctagcgctttgccaaatggtgtcattatgcacaataatttgtcagccgtttcagtgcattcagcaaagacctggaattttagttcatccgtaatttcatctcttttcggctggacgcaaaatatatcactacagtcctatggctctagtcaggccaaccaatcacaagaaaccaatatttatgcgctatacacccaaaaagaattagccggtagctttatccgcttgggcattttttctccagatacggataaaggaaatgtcgaaaccaacggatttaatacaggctctgtcgccggagtgatgtggggaacatcaaatgcattattgataaataacgaaagtgtcagtgcctcccctatttatatcacggccgccaatcaagggatcgcagaagtatggctagataatcggctcatctattcacaacaactgcaacctggcatgcaagccattgacacacggcgtttacctagtggtatttataacataacaattaatacccttgaaaatggtaaagttgtggatactcaaacggctcaagtatacaaaccgctagggtggcaaaaccctaatcaaaaatggcgtttgaatttatggggaggacaaaaaaaggatttagttcttagtagtaagaatacaactgaaaatgatagcgcatttattggtggcggagccatagattacttattcaccccccgtgtcattttaggaagtagcctcttgatatcggctgataactatcaactcagtgcaagatcaaatataacattatcttctgatgatagtttttttgctcaatacaccctgactaatgaagatacccgaaaaaattcaggcgtggatttacgctattaccgaacactttcaccggggaattcaatgaatgtattttggcgtcgaacttccaatcaaaactatcgtttaacagagtcgtctcaacaagtaggaaatacttggggagcttcgctattcacccaattaccttggtctagctcactgacattgaatggacaatatatgaaaaccccatcaagagaaggagttgagattgataccgcattgacaacaaaagcgattttggctaatcgagatgttaattttcggttaagtgcatatgaccgccccgggtttaatcaaaaaaatcgggagcagggtgtggcactaggcgtcagcctgtcagtaatgccgagtgcaaaacatactttatcagtagatgcaggtattaacgatagcaatagttattctagcctaaattaccaatggcaaccccaagatgaaggggctgttcgttggttaggtgcaggaatatcacaaagtagtgaaaatacactcattagcggtaacggcgccttggaaagtcgaacacttagtggtgatgcatatgtccagcattacgtgcaagacaaaagcacaacaacggggatcaacataagtcaaacactggtgttgggtgaaggaaattttgcggtgagtagtggcgaacgcagtttagggatggaatcggcatttatcgttgacttagagtcagatgatcccgatatgcaaattgtcgcctcagacagtatcaaagaaacaaaattatttcagggacgaaatatcattcctactgatatctggaaaaatgagcctattcatttttacagcatgggtacaaataacggcaaagtttttcctgagtatgaatcgataaatatgaaccggggtagtgtgaaatatttaaaattaaaagccgtcaaaacaacagtgctggtggcaatgctacaagataactttggtcaaatattaaagcatcgtcaggttactagtgatatcagcagtgggattattaatgcagaaggcgttttgacattagattcaggtattaataaccaaaaattaacggtcttaggcaatagtcaatcatcggcgttatcgtgtcaattacctgatgtcctatcaccaggaaaagacgtacagtttttcccagttattcattgttcaccaataggagatatgtaa

SEQ ID NO: 295661 - DNA, 1257 bp, Proteus mirabilis
atgcgctattatcattacattcttggcactgttatgctcgcaatgagtgcggttgttaatagtgcaacgattaatttaaccgcaaaattcacccccgcaataaataacagtaatagtgatggtatttttacaaatacaacccccagaagcggatattgttctcgatggccaaaatattgcgatgctaatgatgtcagtgtttatttgccgttaacaacaacaatttcatatcctattgttgctaaaaataaacctcgtgaaggtgcttactttaattttcctaaaacccctagaatacttacagtaagaaatcagaatactggtgaaacatttgacgttatatttagggttactagttattcttcacaacttacaacaaatagcagttcatctagttgggatgaaggcaaagattttagcgcacctcggggagggggctgtactttttatactccttcatggggaggagggtcaggctcaggaagctggatccaatttatttggaaaacatcaaacaacacttcaccctgttataaaataagtaccataaacagaaccgaacctcaccgattttatgacatgagcatgggttattcattagtggctaaagataacttattaaccgtaggatcagggacctataaagggaaattatcatttactgtaggaccaggaggcgactttgattttggcgataattaccaagccagtgacagcgttgttgatatcaatctcattctttctgttaatcatgatttaatcgtcactacaacgcctgaaagtcgtgcgttatcattgcaaccttgtagcgcaggtaaaatttgtaccgaagagcaaggaaagcaaaactgggaacgttggatgataacgaaaattacacctcagcttactgctcgaagtgattttttactgtcttcaacaggtgcatttacgacttatatacaatgccaatatgttcacggtgaaaattgtgccataaaaagtgacaataatggtcaactggttccagtaaaagcgtatttgagcttaccaaataatattattaatcagaaaaccaatagcacggttacacgtgcgctaatgccaatccataaggatatagtaaataatacgtttttaacaaaagatattggaagtaatcgtaaggggaatattgattttctggtagcgcaacatgatgtcgataaaatgcttttaacaagacctgatacttaccgtggaacggttactattatttttgaccccaaaatatattag

SEQ ID NO: 295662 - DNA, 759 bp, Proteus mirabilis
atgagcactccaatcacacgacaaattgtactagataccgaaacaaccggtatgaacaaactgggcgttcactatgaaggccataatatcattgaaattggtgccgttgaggttatcaatcgtcgcttaactgggcgaaatttccatgtttatataaaaccagaaagactggttgatcctgaagcttttgaagttcacgggatcagtgacgaatttttagaagattgtccttcatttgcagaaatagcggatgagtttttagcgtatattcgtggtgcagaattaattatccataacgcctcgtttgatatcggctttatggattatgagtttcagaagcttaaccgtgatattcctctcacagaaactttttgccaaataaccgatagccttgctatggcaagggagttatttcctggcaaacgcaataatctagatgcgttatgtgacagatatttaattgataactccaaacgaacactgcacggcgcattattagatgccgagatcctcgctgatgtttacttagctatgaccggtgggcaaaccgcattagctttttcaatggaaggtgaaccgaacgaagagcaaaaaggggatgatatacaacgtattgtacgaccagtgcgtggattaagagtaataaaagcctctgcagaagagttagttgcgcacgaagctcggttagatttagtggtgaaaaaaggaggccactgtttatggcgtccagctcctgcttcgaatgatgaaactgcctaa

SEQ ID NO: 295663 - DNA, 480 bp, Proteus mirabilis
atgcacaagcaggtagaaatattcaccgatggttcatgtttaggcaacccaggtcctggtggttatggtgcaattttacgctaccaacagcatgaaaaaacccttagtgaaggtttttttatgaccaccaataaccgcatggaactccttgctgctatcgtagcattagaagcgttaaaattcccttgtaaaattacactgactacggatagccagtatgtcagacagggaattaccaagtggatacatagttggaaaaaacgccaatggcgtaaagcagataaaagccctgtgctgaatgttgatttatggaagcgtcttgataaagccattgagcgtcatgaaattgaatggcattgggttaaaggtcatgcaggccatgacgaaaatgaacgttgtgatgaactggccaaagcggccgcgcaatctcccacaaaagaagatactggctatctagaaagtcaacaagataaaacctga

SEQ ID NO: 295664 - DNA, 714 bp, Proteus mirabilis
atgaaagcagcgcgttcgggaaaaccaatttgtatgccaagctcttggcgtaatattccttggggagaatattaccgcatggcaattgaattgcgattacaaaattggtggccgaaaatatacggttttcatatgcttaaattaggtcaacttagtgctgaactcgatactaaatccagtatggtctcacatcaagttaacgtgactacaacgacgataaacacagatgttatggcgtctctcaattatctgccatttgaaaataaatcggttgatgtctgtcttatggctcatgttttagattacagtgcagatcctcattggttattaagagaagccgatcgtgtattagtggatgacggttggatcatcctatcaagttttaatcctatcagcctattaggtataggaaaatgtacgcctattttacggcataaacagccttattattgtcggatgttttcacttcgacgccaagttgattggctaagtgtgcttaattatgaagtgataacacaacagaacttccagattatgccattttcccgtcccgtaaaacgtgatggtaaccgctatcatgtcgggggatgtttaaatttaatattagcgcgtaaaagaacacttcctttaacacccaccgcgatgaagtttgcattaccgcgtatgagtgtaaaaggcagagttttaggcgctacacgtaatcgacctgattaa

SEQ ID NO: 295665 - DNA, 756 bp, Proteus mirabilis
atggagcttatcagaattcccgctttatccgataactacatttggctattaagtaatgaaaatagtgaatgtgtgattgtcgatccttcccaagccaaaccggttatagatactatctcacaacgttcattaacacctgtcgctattttgttaactcatcaccacgaagatcatgtcggtggtgttgctgggttggttagtaaatatcctaacattgaggtttttggtccacaagaaacacaaactaaaggcgctaataaaattattcatgatcaagaacacattattgttgattctttttcttttttagtcatcggaacaccaggccatacattaggtcatgtcgcctactatagcgaaccttatttattttgcggtgacacgctattttccggcggttgcggacgtttatttgaaggtagtgcacaacaaatgtttagctcattacaaaagttaatggcattacctgataacaccttaatttgttgtgcccatgagtatacattagctaacttgacctttgcgcaccatattatgccaaaaaatcctgatattaccgattatttaaacaaagttactgaaatgcgccatcatttgcaaccaacagtgccgataacactgaaaaatgaaaagaatattaatctttttctaaaatctgacgatattgatttacaaagaattttaggtataacttctaatacttatgctccaataaagacatttacaaaattaagagaattaaaagacaacttttag

SEQ ID NO: 295666 - DNA, 1335 bp, Proteus mirabilis
atgaagacaaaagtgattttgttctctatattgctattggcgggttgccagcaatctaagagcataaaacccgatttgtctgcgataacacccacatctttagggacttcaacttcttaccaaccacaatatgatataaaaaccaatttgtggggttatgtagtaagtgaattaaaaatggatatccctgacaatgaaaggatttcgcagcaagaaacttattttttaaataatccaaaacatatacaaaccgttgcattacgtgcagagccttatatgtattggattattgaggaaatagaaaaacgtaatctaccgatggagcttgcactggttccggtggtggaaagtgcgtttaatcctcatgtcacctcttcagctaaagcggcgggcttatggcaatttgtccctgtcacagctaattattatggtctagcacaaaatcaatggtatgacggtcgccgtgatgttgtcgcttctactaatgcagccttagatttgcttgagcgcctttacattatgtttgatagcgactggcctttagcattagccgcttacaatgcgggcgaaggtcgtgttatgcaagcgataaaagctaatgagagcaaaaacctacctaccgattactggtcactttcattacccaaagagaccatgaattatgtgcctaaaattctcgccttaagtaaagttatccgtgacaatgaagccgatatcactttcccgaaaagtaactatcgcgataaatcattagccgcaattgatattggcgaacagataacattaagcaaagtcgctgaacttagccaattacctattacaaccgtaaaagactataaccctggctataagcgcgggatcaccgcaccaaatggccctcatgttattttacttcctcgtaataaacttgcgcagttccaaaatgcgtttgctgacgaagcgattttaaagaccatccgtttagcagtagctaaagccaatcagtcgattaagcaagaaggcatttataaagtccgctccggtgattcattttatgccattgctcgacgttataatatgagcgtaaaagagctacaacgactcaatggattaagtgcaaagagtaccctattagttgggcaaacattaaaaattcataatgcaggtagtgtgaacaatcgtccgacaggcaaaccaaccggcgcttcaccaagttactataaagttcgtcaaggtgactcttattacagtattgctcgtcgtcacaatattaatcttaagcaattaatgagctggaatgctgatatcaagatgttaaaaccgggaacgcaattaacgctttacttaaaaaaatag

SEQ ID NO: 295667 - DNA, 1638 bp, Proteus mirabilis
atgattacagttttagattatttattagtaagattaaaagagttagaaattaaaactatttttggtgttcccggcgattataatttaccttttattggtgttgttgataatgataaagatattcaatgggtaggcgcatgtaatgaattaaatgcatcatatgcttgtgaaggatacgcacggatcaaaggtttttctgctctgtgtacaacctatggagtgggggagttaagtgcgataaatggtgttgctggtgcatttgcagagcaggttcccattattcatattgttggcgcgccttctcagtcaaagcaagagaaaggaaaaacattacatcattgtttagcgacgggtaggtttgatgcctttgaaaaaatgtatcgccatatttcaaaaacaacggctgtattaacatatcacaatgcgacggaagaaattgatagagtattagaaacattgtggcgttatcgatatccggtttatttattaataccagaggatgtcggtgtgatgaaagttaataaaccaaagttaccattacaattaacattacctcaaagtaatcccgacgatttaaataaagttattactcttcttgaaaataaaattaagcaatcaaaatcaccatgtattattattggcgaacaagtatcacgttaccaattaagaaaacaagttgagaatttattagaaaaaactaatctgccgttttttactgtatggggaagtaaaggggttgttgatgaagggcgtcaacagtatggtggaatattatttggtgaattatctaatccacaaggtttagattatattataaattctgatttaattattagtcttggggtgagttgggatgaagttaatacagcgggatttaccttcgacgttcccacacaaaattgctatcaattttatgatacttatagcttaatagaggaagagaagatttatggcgtttttttactcgatatgcctaacgccttattagcccttgactatatttatccccacaacatagcgttactaccgcaaaaaatagtaccgcctgattggcaaggactgataaaaatagattctattcctcttctgttagataaagtccttgatgataattcggttattcttgctgaagcaggtaatgcttttttatgtgctgttaatcatatattttctggtaacagtcaattagtggtcagtaatatttgggcatccattggttatactttacccgccgcattaggtgttactcttgcattagaaaaccaaggacgtgcctttgttgttattggtgatggtgcatttcagatgactgcacaagagctttctactttattacgcttaaaactcaatcccgttatttttattgttaataatcaaggttacgcatttgaaaagatcttttacgggcctaaagatacctttaatgatatccaaaactggaattactcacagttacctgagctatttaattgtgatgcttatagtgtgaaagtggatagtctagaagcgttagaaaccgtattacctttattaaaagtgcatcaagataaactgtgccttgttgaacttgatatggataaacatgactattcggagccaatcagtgaatttattgcgttgcttaatcagtataaatga

SEQ ID NO: 295668 - DNA, 528 bp, Proteus mirabilis
gtgaaagatttagataccgtcattgcagtcagtgccgctattgttatcggggtgacgggtgtagcaagttggagccaaattcaggaaaatacagagtggggcgtattaatgctgtttggtggtggtttaacactgagcgcaattttacaatcttctggtgcaagtttggttatggctgattttatgaaagatacttttggtaacagccattggtttgtcattattcttgctgtaacaacctttattattgttttaactgaattcaccagtaataccgccagcgctgcgttacttgttcctatctttgcaacggtggcacaagctttaggtatgcctgttatggcgttaacgatgattattggtatcggtgcatcatgtgcctttatgttaccagtggcaacgccacccaatgcgattgtatttggctccggatatattaaacagacagagatggtacgtgtaggtggggtacttaaccttgtgtgtatcttagttatctctctctttgcttggttcttctggttataa

SEQ ID NO: 295669 - DNA, 807 bp, Proteus mirabilis
atggatgcgtccaatttagccccatcggcgaaatcaagcccgataaacaaacgagggttaattattttagcaatcgacgttgtactactgctgttattgctagaatttttaccctacgatccaaaagctaatgcaggtttagcgttaatggtgtttgtgggtgtgttatggctgacagaagctattcacgtaactattacagcgttgtttattccaatccttgcggtagtgctcgggttaatgaacaccaatgaatcgctaaaatcttttgctaatccgattattttcttattcttcggaggatttgcattagcaacagcgcttcatattcaaggattagatcgcttaatcgctaaccgcttattgatgattgctaaaggcaagctctccattgctgtcttgttactttttggggtaacggcattactctcaatgtggatcagtaacacggcaactgcggcaatgatgttaccgttagtgttaggcattttatctaacttagatattcgttcagaacgtaatactttcgtcttcgtactattaggtgttgcttatagtgccagtatcggtggtttaggtacgttggtgggtagcccgccaaatgcaattgctgctgctcaactaaatttagattttattacttggatgaagtacggtgttccaatcatgttagtgctattgcctatcatgtttattgtgatgtatctgatgctacgtcctaacctaaaacataagtttgatctgaaattagaagtgttagagtggaataacaaacttcttagtaacggtattttgctggatctttag

SEQ ID NO: 295670 - DNA, 1302 bp, Proteus mirabilis
atgtccaaaatcgttaaagtacttggtcgtgaaattatcgattctcgtggcaacccaacagttgaagctgaagttcacttagaaggtggttttgttggtatggcggcggctccatcaggcgcatcaacaggttctcgtgaagctttagaattacgtgatggcgataagtcacgtttcttaggtaaaggtgttctgaaagcggttgaagctgttaatggaccaatcgctaaagctcttttgggtcaagatgctaaagaccaagctaatatcgataaaatcatgatcgatttagatggtactgaaaacaaatcaaactttggtgcaaacgcaatcctagctgtttctttagcaaacgcaaaagcagctgctgcagcgaaaggtatgcctttgtatgagcatatttctgatctgaacggtactcacggtcaatactcaatgcctttaccaatgatgaatatcatcaatggtggtgagcatgctgataacaacgttgatatccaagagtttatgatccaacctgttggcgcgcctactctgaaagaagcggttcgtatgggttctgaaatcttccatcacttagcaaaagtgctgaaagcaaaaggcatgaacactgcggtaggtgatgaaggtggttatgcgccaaacttagaatctaatgcggctgcattagcggctatcaaagaagcagtagaagctgcgggttatgttttaggtaaagatgtaactctggctatggactgtgctgcatctgaattctataacaatgagactggtaactacgaactgaaaggcgaaggtaaaactttcacttcacaagaattcactcattacttagaagaactgactaaacagtatccaatcgtttctatcgaagatggcttaaacgaatctgactgggatggtttcgcataccaaactaaagtacttggtgacaaaatccaactggttggtgacgacctgtttgtaactaatactaagatcctaaaagaaggtatcgataaaggtattgctaactctatcctgatcaaattcaaccaaatcggttcactgacagaaacgttagctgctatcaaaatggcgaaagacgcaggttatactgctatcatctctcaccgctctggtgaaacagaagatgcaactatcgctgatttagcagtaggtacagcagcaggtcaaatcaaaacaggttctatgagccgttctgaccgtgttgctaaatataaccagctgatccgtatcgaagaagcattaggtagcaaagcacctttcaatggtctgaaagaagttaaaggccaagcataa

SEQ ID NO: 295671 - DNA, 1551 bp, Proteus mirabilis
  misc_feature (923)..(932): n is a, c, g, or t
atgaaaacgaattatatttttgtgaccggcggggtcgtatcctctctgggtaaaggcattgccgcagcctctttagcggctatactagaagcccgtggactcaatgtcaccatgatgaagttagatccgtatattaacgtcgatccaggtacgatgagcccaattcaacacggagaagtcttcgtcactgacgatggagctgaaactgatcttgacttaggccattacgagcgctttattcgcacgaaaatgacgcgtcgtaataactttacgaccggccgtgtatactcagaagtgctacgcaaagagcgtcgtggtgactatcttggtgctactatccaagttattcctcatatcactaatgaaatcaaagaacgcatcatccgtggcggtgaaggtcatgatgtcgtgttagttgaagttggtggtactgtcggtgatatcgaatcacttcctttcttagaagctatccgtcaaatggcggcagaagtagggcgtgagcatactttctatctgcacttaacattagtgccttatttagcggcttcgggtgaagtaaaaaccaaaccaacgcaacactctgtaaaagagttactctcgattggtattcaaccagatgcattaatttgtcgctcagatcgcgttattccagctaatgaacgcgccaaaattgcactgttttgtaatgttcccgagaaagcggttatctcattaaaagatgtcgattccatttataaaatccctgcactcttgaaatcgcaaggattagatgattatatctgtaaacgattcagcttagattgcccagtggcaaatctgtctgaatgggaacaggttatctacgaagaagccaaccctgaaggcgaagttaccattggtatggttggtaaatatgttgaattaccagatgcctataaatcagnnnnnnnnnncctaaaagggttagacgcaatcttagttccaggtggttttggtgaacgtggtgttgagggcaaaattatggctgctcgatatgcacgtgaaaataaaatcccttatttaggcatctgtttaggtatgcaggtggctatgattgaatttgcacgcaatgttgccaatatggaagatgctaactccacagagtttgcacctgattgtaaatacccagttattgcgcttattactgaatggcgtgatgagaatggcaatcttgaagtgcgtacagaaaatagtgacttaggtggaacaatgcgccttggtgcacaaccttgtcatttaagtggcgatagtttagtgcgtactctgtatggtaaaaataccattacagagcgtcatcgtcatcgttatgaagtgaataatctactgttaaaacgtatcgaagatgcgggtttacgtattgcaggtcgttcagttgataacaagctggtggaaattattgaaaatccaaatcatccttggtttgttgcttgtcaattccaccctgagtttacctcaacgccacgtgacggccatccgttatttgctggctttgtgaaagcagcctttgactaccaaaaaggcttgctaaaatag

SEQ ID NO: 295672 - DNA, 510 bp, Proteus mirabilis
atgactgcaaaccctaatgcaacacaaaatattattatcagagccattgaaaaaagagataacgccggcattgcacgcgttattcgagaagtttccgccgagcatggcttaacagcggataaaggatttgcagtagctgatccgattttagataccttattcgaagtttatcatcaacctcgcagcgcttactgggtggtagaaatggatggcgaaattgttggtggtggtggtgtcgcacctcttgcaggtggcgatggggagacttgtgaattacagaaaatgtatctctcttctaagttacgaggaaaaggaattgcgaaaaaaattgttcagcaatctcttgagtttggtaagcaacaaggctttagtcgctgctacttagaaactactgatattttaaaagcagcaattggtctatatgaaaaattaggctttgagtttattgataaagcattaggtaatacaggccacagcgactgtgaaattcgtatgctgaaatcactttga

SEQ ID NO: 295673 - DNA, 2889 bp, Proteus mirabilis
atggaaaataaatccgcaccgaaagagccatcgctcgatacaacttataatccgacagagattgaacaacctctgtatcaacattgggaaaaaaatggctactttaaagccaatggtgatacatccaaagaaagcttttgtattgtgatcccaccacctaatgtgacaggtagcttgcacatgggtcatgctttccaacaaaccatcatggacaccatgatccgctatcaacgtatgcagggtaaaaataccttgtggcaagcgggtactgaccatgcaggtatcgcaacacagatggttgttgagcgtaagattgctgctgaagaaggtaaaaaccgccatgattatggccgtgatgctttcatcgataaaatttgggagtggaaagcagagtccggcggtaatatctctaaccaaatgcgccgtttaggtaactccgtagattgggatcgcgaacgctttaccatggatgaaggtttatctaaagcagtaaaagaagccttcgttcgtttacacaaagaagatcttatctatcgtggcaaacgtcttgttaactgggatcctaaattacacactgccatttccgatctcgaagttgaaaaccgcgaagtaaaaggctcaatgtggcatctgcgttatccattagctgatggcgttaaaacggcagagggtaaagattatctgattgttgccacgactcgtcctgaaacactgttaggtgatactggcgttgcggttaacccagaagatccacgttataaagatctgattggtaaagaggttattctacctttaatgaaccgtcgtattcctattttagcggatgaacacgcggatatggaaaaaggcaccggttgtgtaaaaatcacccctgcccatgactttaatgactatgaagtaggtcgtcgccatcaactaccgatgattaatatcatggattttgatggcaacattcgtgttagcgcagaagtattagacactaacggtgttgaatctgatgtatatagcacagagatcccagaagcctaccaaggtatggaacgttttgcagcacgtaaagctattgtcgctgaatttgaacgtttaggattattagaagagatcaaacctcacgatttaacggtaccttacggtgatcgtggtggtgtagttattgaacctttattaactgaccaatggtatgtccgtgcagcacctttagcgaaacctgcggtagaagcggttaaaaatggcgatattcaatttgtacctaaacagtacgaaaacatgtacttctcttggatgaatgatattcaagattggtgtatttctcgtcaactgtggtggggtcatcgtatcccggcttggtatgataacgaaggtcatgtttatgtcggtcgtgacgaagaagaagtgcgtcgtgaaaataacattgctgccgatgtagcattacgccaagatgaagacgtactcgatacgtggttctcttctgcactgtggacattctcaaccttaggctggccagaaaacaccgaagcactgaaaacattccatccaacgaatgtattagtgagcggtttcgatattatcttcttctggattgcccgcatgatcatgatgaccatgcactttattaaagatgatgaaggtaaaccacaggttccatttaaaaccgtttatatgacaggccttatccgtgatgaagaaggtcagaaaatgtcaaaatctaaaggtaacgtacttgatcctttagatatgattgacggtatcacattagataaactgttagaaaaacgcactggtaatatgatgcagccacaaatggctgagcgtattgctaaacgcaccaaaaaagagttcccagaaggtattgaagcacatggtactgatgctctgcgctttactttagcggcattagcttctacaggacgtgatattaactgggatatgaaacgtctgtcaggttaccgtaatttctgtaacaaattatggaatgccagtcgttttgtgctgatgaatacagaagatcaagactgtggctatcaaggtggtgagatgacattctcattggctgatcgctggatcttagctgaattcaataacaccataaaagcctatcgtgaagcgttagataattatcgctttgatattgctgccggtattttatacgaattcacttggaaccaattctgtgactggtatcttgagttatcaaaaccggcggttcataaaggtaatgatgctcaaaaacgtgctgctcgtcataccttgattgaagtattagagggtctgttacgtcttgctcatccaattattccatttattacagaaactatctggcaacgcgttaaagaggtgaaaggcattgaaggcgaaaccatcatgctccaagctttccctgaatttgatgcgtcattagtcgacgagcaagcacttaacgatctggaatggatcaaagaggttatcgtcgcagttcgtaatatccgtgcagaaatgaatattgcgccaggtaaaccactggatgttattttacgtggtgcggatgaaacggctaaacgtcgcgtcagtgataacattggtttcttaaaagcaatgggtcgcttagcggatattcgcccattagcggaaggtgaagaagcaccattatcggtaactaaactggtgagcggtgcagagctgttgatcccaatggccggctttattgataaagatgcagagcttgcccgtttagataaagagcttgaaaaagtagagaaagatatcactacattagacagcaaattatcaaacgaaggctttgttaatcgcgcacctgaggctgttgtcgccaaagagcgtgagcgtttagcatcttgtttaaatgctaaagagaagctgattgcccaaaaagtctctattgctgcgttataa

SEQ ID NO: 295674 - DNA, 426 bp, Proteus mirabilis
atggaacatccatcaatacatcaagatttacaagcccatgaatggcttgcttgtcaacttgccgcagaacattggcgtttaggcaaacgggttttgctcgtctgtgattcacagccacaagctgaattgttggatgaagcactatgggcaagagagccacatcaatttgtgcctcataacctagcaggtgaagggcctcgttatggtgcacctgttgaattatgttggccgggcaaacggggcaatgccccgcgtgatctcctgattaatttgcagtcacaatttgcagactttgccacagctttccatgaagtgatagacttcgtacctatcgatgaacaattaaaacagttggcgcgagaacgatataaaatttatcgtagcgtcggctttactttgacaatggctacgccgccaacctattga

SEQ ID NO: 295675 - DNA, 1509 bp, Proteus mirabilis
atggagtttaatgtaaaaagcggcagcccagagaaacaacgcagcgcttgtattatcgtgggggtgtttgagcctcgtcgtttatctccgatagcggagcaacttgataaaatcagcgatggttacatcagcgccttattacgccgtggtgaactggaaggtaaagtcggccagtcattgctgctgcaccatgtgccaaatgttctctctgagcgcgttttgctgattggttgtggtaaagagcgtgaattggatgaacgtcagtacaaacaaattattcagaaaacaattaacacgctcaatgaaacagggtcaatggaagcagtttgttttctgactgagctacatgttaaaggccgtaataattactggaaagtacgtcaagcggttgagactgcaaaagactgcctctatacctttgatcaactgaaaagtaataaaaccgaattacgtcgtccattacgtaaaatggtctttaatgtccctactcgacgtgaattaccaagcggtgaacgtgctattgcccacggcttagctattgcatcagggatcaaagcctgtaaagatttagctaatatgccacctaatatctgtaatgcggcatacttagcctctcaagctcgccaactcgctgactcatccgcgaatgtctctacccgagtcattggtgaagagcagatgaaagagctaaatatgaatgcctatttagcggtcggtcaaggttcacaaaatgaatctttaatgtcgattattgaatataaaggtaatcaagatcctgaatcccgtccaattgtactggttggtaaagggctcacctttgattctggtggtatttcaattaaacctgctgatggcatggatgaaatgaaatacgacatgtgtggtgcagcaacagtatatggtgtgatgcgcgtcgttgctgagttacaactacctattaatgtcatcggtgtattggctggctgtgaaaatatgccgggtggtaaagcctatcgtcctggtgatattcttactactatgtcaggccagactgttgaggtattaaatacggatgctgaaggtcgcttagtgctgtgtgatacattaacctacgttgagcgctttgagcctgagttagttattgatatcgccacattaacaggggcttgtatggtggcattaggtcatcattatagtggattaatgtctaaccataacccattagcccatgaattaatgaatgcttcagagcaagcgggcgatcgcgcatggcgcttacctttaggcgaagagttctatgagcaaattgaatctaattttgccgatcttgccaatacgggtggacgtttagggggagccattaccgcaggttgtttcttagcgcgctttgcaagcaaatataactgggcacatttagatatcgcaggtacggcatggcgctctggtaaagcaaaaggtgctacgggtcgcccagtatctttactgtcgcagttcttattaaaccgcgcaggtttgaatagcgacgagtaa

SEQ ID NO: 295676 - DNA, 1098 bp, Proteus mirabilis
gtgattataattcgatatttagctcgggaaacccttaaaagtcagatagccatcttatttatcttgatgcttatcttctttagccaaaagctggttgaaattttaggggctgctgtagaaggtaatattcctacaaaccttgtggtttctctgctgtggctggggatccccgagatggcacagcttattctaccattaagcctttttcttggtcttctgatgacttacagcaaactttatgttgaaagtgagataaccgtcatgaatgcctgtggaataggtaaaaaagcattagtgcaagcagcactattgttgtcattacttactagcgtcttggcggcagggaatgtggtgtggttgataccatggtcgtctgtacatcaagagcaagtgctggaagatgcaaaagccaatccaagcttagcggcattaatggaagggcaatttaaaatgtccagtgaccgtaatatggtgctttatctcggtagcgtaaagggcaaccaattccaagatgttttcttggctcaattgcgtccaacacaaaaccaacgcccatctgttgtggtggcggataaagggtataccaaagagctaccaaacggtaaccaagtcgtggtacttagcgagggtacgcggtatgaaggtacggcggtactacgcgattttcgtattactgattttaccgattaccaagcggtgataggccatcgagagtctactattagccgtaatcgcgtcgaacaaaaaaccatgaatgagttgtggcactcaacagagcctgagtctatcgctgaatttcattggcgtttaaccttaattttctctgtggtgatcatggcgttaatggttgtgccgttaagtgaagtcaatccacgtcaagggcgagtattaagtatgttgccggcgatgttgctttatttggtgtttttcctattacaaagctccttgcgttcaagcggtgaaaaaggaaaagttgacccacttattgctatgtggacagtgaatgggatctattttgctttagcgctgttattgaatgcgtgggataccttaccaatgcgcaaactacgtgctcgctttaagaaaggagttgcctga

SEQ ID NO: 295677 - DNA, 1080 bp, Proteus mirabilis
atgtttggtgtattagataaatatatcgggcgtacgattttgcaatcgattttgatgacgctatttttactggtatcactgtctggcattatcaaattcgtcgatcagctgcgcaaagtagggcaaggtgattttacgaccttagatgcggggatttatgcggttttaaatatcctcaaagatgtgcaaatcttctttccgatggcggccttattaggggctttattagggttaggggcattagcgacacgtagtgagctggtggtgatgcaggcatcgggttttactcgtttgcaaattgccggctccgtgatgaaaaccgcgatcccattagtactgttaacggtattaattggcgagtggggggcaccgcaaggtgaacaatatgcacgtaattaccgtgcagaaaagatcatgggtaactctttagtgtccactaaccgtggaatgtgggctaaagatggtaatcaatttatctatattaaccgtattaaaagccaaaatgagatgcaaggcattacgctgtataatttcgataataatcgaaaacttgaaactgtgcgttatgcatccagtgccacttatgatccagataaaaaagtgtggttactgaaacaagttgagcaatctgatcttacttcgccacaaaaaattacgggtaaaaaacaggtatctttagagtggcagactcgcttaacacctgaaaaactgagtgttgtggcattagatccagatgccttatccataagtggcttatatcaatatgtaaaatacctcaaacagagtgggcaagaatcagccaactatgagctgaacttctggaaaaaaatctttgcgcctatttctgttgcagtgatgatgctaatggcgctgtcatttatttttggcccattacgtactgtacctatggggctgcgtgtggtaacaggaatagcctttggttttctgttctatattgtgaatgaagtctcaggccgattaagtttggtatatggcattcctgccgtagtggcagccttagttcctggtatgctctttttagtattaagtttatggttattaatgaggcgtaatcgctaa

SEQ ID NO: 295678 - DNA, 1275 bp, Proteus mirabilis
atggctgatttattttgttctcttttctttcaccttactcgttatgttgatcataaaatgaaaaaacatctcctaaaatatctcctcattcctgttgcactacttacgctcaatgcctgtagtcaacgagcaacggtaacgccaacgttacccgctaagtttaatcaacataatgtgcctgaattgtcacaatggccaaccaccttatcaccaaaggcgaataatagtcgggagatttttgataagtatgctcagcagatttatcaaaagagtaaccctcaagggatggtgattgtcatgattaacaatacgcaatctcttaatcgtgcttttggtactacaagccccgatagccgtcaaaccccgtcaatgaactcattaatacgtattgcttctattactaaattaatgacgagtgaagtgatgttaaaattacaagatgatggcaagttgttggttactgatcctctgcaaaaatatagttattatggtgtcgatattccattagtgaacaatcaatctcctattcgtctttatcatttagctacccataccagtggttttcctcgtgaacaacccggcggaaaatggggtagaccggtttttatttggccaacccatggcgatcgctggaactggctaaaaaaagcctctttaacaacaccggcgggacaatctgcctcttattctaatctggcttatgatttattagcagatgcattagtgaaagcctctggtaaaaactatcctcaactattaaaacagtatgtgacacaacctgcgggaatgcgtgataccacgttaacgccaaatagcacacaatgtcagcgattattaattggttatagacccagcccttgttctgagactatcgccgccgccggaagtgggggtgtttattctacgcctgcagatatgcaacgttggatgcaaggctttttaaactcaaataatacgatgagaaaagcgacggccagtaaagagcagtctatttattttccgcgccaacgactatcttctattgaagggatggatgttgcagggcgagcggatggcattggcttaggatgggtttatatggcgcctgccaatggtgtgcctgctatttaccaaaaaaccggcggtggcggtggttttaatacctatatggcaaccattcctgaattaaatatcggtgtttttgttgtcatcacccgtaaagctaatggcaccaagtttagtgaagtgactcgaggtacaaatgcccttgtgcgtgctttagcacaaagtttttaa

SEQ ID NO: 295679 - DNA, 1257 bp, Proteus mirabilis
atggctcttactgatgctaaagtcagggctgccaagcctttggataaatcgtataaattgaccgatggtgatggtatgcacttgatggtacataccaacggctcaaaatattggcgtttacagtatcgctttggcggtaagcaaaaaatgttagcgctgggtgtttatcctgatatttcactcgcagaagccagagagaaaagagatgccgctagaaagttaattgctaatggttttgatcccagtgaaaagcgtaaggaagttaaagaagagcaacaaaaagaatttaatacctttgagaaggtagctcgcgattggcacgcaacgaataagaagtggtcagaaggccatagccatcgagtcctcaaaagcctagaggacaatatctttgctgctattggtaaacgcaatattgccgaactaaaaactcgtgatctactcgaaccgattaaagcggtagagatgtctggacgtcttgaggtcgctgcacgtttacaacaacgtgtgacagccatcatgcgttatgccgtacaaagcggcttaatcgactataacccagcgcaagatatggctggcgcagttgccacaggtaaacgagtccatagagcagccttagaacttaaacgtctacctgagttcttacaacgcatcgatgattataagggaagacctttaactaaacttgcagttaaacttaccttattagtctttattcgttcgagtgaactgcgctttgctcgttgggatgaaatcgattttgaaaatgccatgtggacgatccctgctgaacgtgaagcgatagaaggggttaaacactcacatcgtggatcaaaaatgcgtactactcatttagtcccattaagccgacaagctattgagattttaaaacagatctatcaattcagcggcaaccacgaactgatctttatcggcgaccataatccaagaaaacccatgagtgaaaatacggtaaacaacgcattacgagtgatgggttatgacactaagacggaagtatgtgggcatggctttagaacaatggcgtgtagctcgttgattgagtcaggcttgtggtcgaaggatgcggtagaacgacaaatgagccaccaagaacgcaactcagtaagagctgcttatattcataaggctgagcatattgaggagcggcgattgatggtgcaatggtgggcggattatttggatgcgaatagggagaggtatgtaggagcgtttagtttggggagtagaataaggtaa

SEQ ID NO: 295680 - DNA, 1194 bp, Proteus mirabilis
atgaaaataaaagcaacagatccagatttatctacaatatatagccgaatagagagtggctttatggatttacagcctgattttcagcgtggcgaagtttggactacagccaaaaaaaggatgttaattgatactattttacgaggatggcaaattccaccaatacatgtaattttggatgaagttaaatacactcatgaagttcttgatggacaacaaaggttatgtgctataagagactttatgaataataagataaaagtgaatggtgaattaatgccattaaatgaagagattaaaagcctgcatggattaacatattcaaagttacctcacaaagttaaaatgaaatttgatatgtatccagttcgtatttttgaaatatatgaatatgaaaaaggtgagccaggagaattatttaatagattaaatcaagcgttaagtttaactgcagctgaaaaaagaaatgcttatgttggtggagtaagacaacaaattaaagatttagttgaaaaactagatgcaaatgatataggcagagattttttggggttttcaaatttaagacaagcatatgaggatctatttcttaagctatgttatttagtagagcataatgatataaccgcaaatccaagtgataaggaattagaaaatatttataggcaagatattgaatttagtattgaaaccattaatgcagtaagttattcaatttcaattttcgctgaaataaaagaaaaagttaatagtttgggatatattgttcatattacaaaagcaagtttcttttcttggttgttttttatttctaagttttttgttaattatgaaaatgacgaaatttctaatgttgattttgttaactcatacttggattttgaagttaatagatataaatatagaagtaatgaagtaatggatgaaaaactttatattcacgggctaaatgagtctgagataaaaaaggtctatagtatttttaatgagagagcatcgtcaagagtaatgactagtgaatctttattaataagggatgcatgcatatctctagctttctttggttacaataatatcgtggatgaaaatgaaactaaaattaacgagttatttaaacagataaaaaataatgaagatatatatcaagcatttgattcttattttaatattctaggggtgcttgaacgtgcttaa

SEQ ID NO: 295681 - DNA, 1644 bp, Proteus mirabilis
gtgcttaagaaaaaagaatatgaagattgctggcgccatgttggtgactttaaaaaatatagatataagctgagttctattcatattgaaggtatctctggatttatacctttcgatattaccattaaatcagcaataaatgctatctgtggtagaaatggtataggaaaatctacattattaaaagtaatatatagtatatttactaatgatgatatttttaactctattgacaactataaatattatggaagaataagggaatcatctaatggttctgaaaatttagagttattaagagaaatagatttttctaagtgttatatagaggtaactaagtcagaagatcaaagtattattaaatttcccaatgaagaggggaaactatttgatattgagtatattgattcttctagtcaggttatagctattaaaaatattctatgtgctgatgctaatccaaaagatctgattgaaggccttgattcgaactcgattataactagttatcaagatacaataaataaaattacaggaaagaaatattcagaaattaatttatacgaaatttcgtgggaagatgagattatcccctttattttcttgaagaaaaatgatattcaatatgatagtagaactatgggacttggagaacataaattactatatctagtatggaaaattttaagtagtccaaaaaattcaattcttcttattgatgaaccagagtcatttatatgccctagaagtcaaaatgatttgatggattttattgctagtattgcagataaaaataagcttacaattatatttagtactcattcagagcatataataaaaaaactaccaatgagatcttggcatatacttagaaatagtacaaaagattttaatttggtgaaagataatagaaaagaattagttatggatttacttggagtaatgccagagaaggatactatttttctagtagaagattttttcgctagccaagtattgttaagtattatcaatatatttttcccaacattaattaattctattcatgtagaattcttaaatggtgaatctgatataattgaaattataaagcgttatcctgaaaagaatagtaatgtaaagttagttgctgtttttgatgcagatcagaaaggaaaagtaaaagagtctcaatttgatagacctatattttatttaccttctaaccacagtagccctccagaaacggaagtcattgcacatactatattgaaatttcaagatatatatggctgtttagctattcctgaagataggctggatcatattaaagaagtgataaatgaagagatacatgattttttttcaacgttatcttctctattggaaattgatcgctctacatgcattacattagctataagacattgggtttctgaaaataaagagaatgttaaaatattcattaattcattaataaatttcaataatagattaaatgccagaattgttagtattgatgacaaattttatgcagagtatgaatttggcattatagaggtattagattacttgggtgaagatccgatagttgatggtaacatttactcaactaaaataaaatattctgatggtaatatagtttcttttatattaaatagataa

SEQ ID NO: 295682 - DNA, 2163 bp, Proteus mirabilis
atgaaaagttataaaatagcggtcagctacgatatgtctgactatatttcaacccaccgtgaatgtgtcgatattctacatactgatttttctgatgttgccgtgattattatttcacttaatgacattcagaatggaaagcttaatttaattgaacaaaatagctttgaacagcctatttttgccgttattaataaagatgaagttatccctgctaatattattaatcgattaactggtgtaattgatttaaataaaaaaaatagtgagttatataataaacaactagaaactgcagcgttaaaatatgaagagagtctattacctccttttttcggcagcttaaaaaaatacgttgaacaaggaaattcagcttttgattgtcctgggcatcaaggaggtgaatttttccgccgtcatcctctaggtaaccaatttgtcgagtattttggtgaaaacttattccgctctgatttatgtaatgccgatgtttctatgggtgatctgctgatccacgaaggtgccccatgtgccgcacaacaacatgcagcaaaagtctttaatgccgataaaacttatttcgttcttaatggtacatcttcctccaataaagtcgttcttaatgccttattggcaccagatgacctagtattatttgatcgtaataatcataaatcaaaccatcacggagcattaattcaagcaggagcaacgcctgtttatcttgaagctgcacgtaacccatttgggtttatcggtgggattgatgctcattgttttgaagaaaaatatcttcgtgaactcatcaaagaagtcgcccctacacgtgcaaatgaaaagcgccctttccgcctagccgttatccaattaggtacctatgacggaacaatatataacgcacgtcaggtagtcgataaaatcggacatttatgtgactacattttatttgactccgcgtgggtgggctatgaacagtttattccaatgatgaaagattgttctccacttctacttgaactgaatgaaaacgatccggggatcttagttacacaatctgtacataaacaacaagcgggattctctcaaacctcacagatccacaaaaaagatcgccatattaaaggtcaaaaacgctatgtaaatcataaacgtctcaataacgcctttatgatgcatgcctcaactagtccattctacccattatttgcagctttggatgtgaatgccaaaatgcatgaaggtgagtcaggtaaacgtttatggatgaattgcgtaaaaacagggattgaaacccgtaaattactcctgcaatcctgtaaacatattcgcccgtttattccagaaactatcgatggccgtgcatgggaagattttgatactgatgaaattgccaatgatctccgattctttaattttgttccgggagagcgctggcactcatttgagggatatgaaaaaaatcaatactttgttgatccatgtaaattactactaaccaccccaggtattaatgccaaaacaggaaaatatgaatcatttggtgttcctgccaccattttggcgaactatctacgtgaaaataacattattcctgaaaaatgcgatcttaactccatattattcctgctaacacctgcagaaagcatggcgaaaatgcagcatctggtcgcacaaattgctcgctttgaacaattactggaacaagatgccccactgaaagaggtacttccatcagtatatcatgccaaccaaacacgttatcaaggatacaccatccgtcaattgtgccaagaaatgcatgatatgtatgtgaaatttaatgtaaaacaactgcaaaaagagatgttccgtaaatcacatttcccacaagtcagtatgttacctcaagaagccaatatcgcttttgtgcgtggcgaggtggagttagttgccgtggaaaaaattgaaggccgtatcgccgccgaaggtgctctaccttatccaccaggagtactgtgtgtagtgccaggggaaatttggggtggctctgtacagcaatattttctagcgctagaagaaggaattaatctattcccgggattctcaccggaattacaaggtgtatatatccgcaatgatgaggacggtcgtctgcgggcatatggctatgtaattaagcactaa

SEQ ID NO: 295683 - DNA, 1329 bp, Proteus mirabilis
atgagtacttcaaaaaataaaatgagtgtattgcaactcactatattaactgcggtgaatatgatgggttccggtattattatgctaccgaccaagctagccgaagtaggaaccatttctattttatcttggattgtcactgcggtcggctctatggctctggcctatgcatttgctaaatgcggtatgtttagccgtcgtagcggaggaatgggagggtatgccgagtatgcctttggcaaatcggggaattttatggccaattatacctatggtatttccctgttaattgccaatgtcgctatcgcaatttctgctgtgggttatggtgccgaactgatggatgcgacaatgactccgttaggtatttgtattgcaacgattgttgtattgtggatctgcacaatagcaaattttggtggtgcgcggatcaccggacaaataagcagcatcactgtctggggggtgatcatccctgttgtgggtatttcaattattggctggtggtggttcaatcctgaacaatacattaactcttggaatccacataattttccattctttgaagccgtaggctcttctattgccatgaccttatgggcatttttaggtatggaatcagcttgtgccaatagtgaagcagttgaaaatcctgaaaagaacgttcctattgctgtattaggtggcacattaggtgcagccgttatttatatcgtatcaacaaatgttatcgcaggtattgtgccaaatatggatctggcaaactctaccgcgccatttggcttagccttctcccaaatgtttaccccaggtgttgggaaaatcattatggcgctaatgattatgtcttgttgtggatctttacttggctggcagttcaccatcgcacaagtatttaaggcgtcatcggattctggttattttccaaaaatattttctgcagttagcaaagctgatgccccggtaaaaggaatgttagttattgttgttattcaatctgcactgtcactgatgaccatcagcccatcattaaataaacagtttaatgtactcgtcaatctagcagttgtgactaatattattccttacattctttctatggcggcaatgattattttacaaaaagtcgccaaagtggaacctcataaagcgagaaccagtaatatcatcgcattcattggggcgatttatagtttctatgctctgtattcatctggtgaagacgccgtaatgtggggggcattagccacattcttgggatggacactatatggttttgtctctccacgatttgaaatgaaacaaaaccaagacctaatgacaaaataa

SEQ ID NO: 295684 - DNA, 678 bp, Proteus mirabilis
atgatgatatcagaaattaccaaaccgaaacgaggacgtccccccaaaaatcatagtcctaatacagatgtaaaaaatatagttattcaaagtggtatagaaatgtttgctgaaaaaggctatatcagttcagacatttgtaagatattagaaaaagttggtatcccgaaaggatcattttattattactttggtagtaaagaaaaatttggtttagtcgtcatccaacattatgacaactttatttctaagcaactagataactatttgtcttatactgcattacctttccccaaaagactattagcattttgtcacatgataaaatcagaaatggaaaagtatcattggcaacgaggatgcttagtaggtaatctcatacaagacattgttaatttacccattagctattataaaatactgaataatgtgatttctggatggcagaaaaaggtagaaaattatcttctagaagcacaaaaatataagtttatatctaaaaacattgattgtagacaaatggctatttttttctggatgggttggcaaggagcaataatgcaagcaaaactaacccgctctaatcagccactagatatatttatctctatttttatggcgcagatgtttgatattcctcaacatgaactagaaattactaaaaatagaataatttaa

SEQ ID NO: 295685 - DNA, 1260 bp, Proteus mirabilis
atgaatgaactaaataaaaaacacctgatgccttcaagtcatactaaagaggttctttctaataaggacttagcacttctaaatgacttgcatgcagcacttcagaatgaaaaacatcataaaagttttatgatgatcacaatattgctgatctttatggttattttcgttatttgggcatggaatagtaatcttgaagaggtaactcgtggtcaaggcagtattattcctagcagtcgcgagcagataatccaaacattggatgctggcatattaaaaagtatgcaagttaaagaaggggatatagttgaaaaaggtcaagtattattaacgctagatgatactcgaacatcggctatcttaagagaaagtgaagcaaaagttgctaatctagaagcaatacgagcacgacttaaagcggaggcttattctactgagcttagctttccagaaggtttatcaacagaattagtaactcgtgaaacaacagtatacaagatacgtaaagacgcattgaaatcaggaatagacaatttacaacaaagtaaagcattgttagaccgagaaatttctatcactaagccaatagttgcacaaggtgcaatgtctgctgtggaattattaagaatggagaggcaatcagctgatattcaattacaaatagatgaaaagaaaaataaatatttaactgaagctggggctgaattagttaaaacagaagcggaattagctcaagcaagggaaaatatggcagggcgagctgatcctgttgaacgtgctttaatacgtgcaccattaagaggtattgtgaaaaatatccgtattaatacagttggtggagtaatttcagcagggcaggatataatggaaattgttcctttagaagatcagttattagttgaagcttatattagtcctcgagatgtggcctatgtacgtgctggtatgcctgcattagtaaaattgactgcttatgattatgcgatttatggtgggttagaaggcgtcgtgactttggtaagcccagatacattgcatgatcaaaaaagacctagtgatttaaaacttaatcaagatgaagctttttatcgcgtattggtcacaactcaaagtagtcatcttacggataaaaatggaaaagagcttcctgttattccgggtatgatcgccagtgttgatattaaaacaggtgagaaaacggttttccaatatttgattaaacctataacaagaatgaagcaggcattacaagagcggtaa

SEQ ID NO: 295686 - DNA, 1254 bp, Proteus mirabilis
gtgttttctataaataaactcaaaataataacgtttgttattttaggaggtgtattatttaattcacatgcaaactctttaaagtatatattaaataattcattaaataatgcaccagagttattagaagctaaagctgatatagatatagccgttgcaaaagttaatcagactagagctcaacattttcccgtaataagcgtaactggaaataaattattaggacaatatcatagagataaaagcgactatgataataatagttttattccaggattaagaggtgaattaaatatctattctttcggtggaatagaaaatgatgttgaacgtaatgaaaaagaacaactctattatcaatttaaatatagcgaaacgaaagaaaatgtcgcttacaccatatcagatctctatttaaaagcattgctagctaaagaatctattgcggtaaagaaaaaaagtttagatagacataataagattatatctgaattaaatgtgatagcccgtaatgatgaagggcgtgtttctgaatatgttcaggcagaagcaagaaaaatattagtagaacaagatattaactattatgaaaaagaattaatgacaacgttaagtacgttatcaaaatatacgggtttccccgttggtgaaagcgatcttgtcaatccttttgatggaatgacggtcagtgatatgtatagcgaattcactgcggaaaataataatcaaaatccggcttatctagtgagtcaggctgatatcgatgctaaaaaaatgggcgttaaagtagaaaataaaaaacaattaccaagagttaatttaactggaaatataactaaagatgatcgtcagataggcattgatgtgacatgggacattattaatttttcatcattatattctattgatgaaaaagtaagtcagttaaacgcggcacaacagagaatggagagagtgattagagatattgaagaagcaagacgtttatcagtaattaatatccaaaaaagtactcaaaaattgaagatattagatgcacaaattttatcatcgacaaaagtagtcgatttttatcaattgcaatttaatgttgcacgccgttctttgttagatgttttgaatgcagaaaaagagttatctgatgttgaattatcttatgccacgacattgagtgatcttaggtacgggatgcttgattatttgtatgcacaaggaaaactttcgcactgggcacttaattcacacactcactaa

SEQ ID NO: 295687 - DNA, 4188 bp, Proteus mirabilis
atgaatataatcttttttgaaaagaattcaaacgagaaagtacaattacaacctcatgctaagcatactataacggcgaaagcaggggatgtgtatcagttaattgattcagatactcaactttctccattagatattcaagcgcatcgtaaatcggatgatcttattttatctagtaaagaacaaaatatagaagttgttattaaagatttttggcaagaatgccaaccaggggaacaacaatgttacgccactttaaatgttttagattcaaatggtgtaatgggacaagcaactattactcaagatggtcctgttttagaacatttagttgctggtgaaacaggtactctttctgataatgatgatggaattggtctatttttatgggttgctggttcaatcggtagtgcattagcgatctttttagctaatagaaatcatggtggtgacaataataaaggtaatgaggctgatattaccgcgccgagtaagccaggattaactgcagaagatgatggttctgtttctatcgatttaccaaaagatgccaataaaggtgattctgtagatgttacttttgaagatgaggatggtaattcaaatactgtcacattagaaaagggagataatggctggacatcaagtgatcctgaattaattcctgatacagataataatcaagtcactatccctaatgataagataaaagataatagtgatgttaccgcaagtgcgaaagatccgagtggtaataaaagtgatgatgttactgtaacagccaaacctgatcccgtatcagatatgcctgttttaagcattccagaagttgacgatggttatgcgaatgcagaagagctgaaagacggtttacaagcagaagttactttgccagcgggtacggttgaaggggcggaaatcaccttaacggtcactcgcccagataataccactgaaaccgtaacgcatacagtcactaaagatgaagctgctgcgggtaaagtatctgttgatattcctaaagatgcggtacaaaacggccaaaacagtgtcgatgtcagcataactcaaggcaataatccagccaaaccaggaaacaaagtagattttgctgttgatggacaaattccgggcgatacagatggtgatggtacggtggataccacaccagtggtgatcattccagaagccactgatggagtaaatgctgacgagctaaaagatggcgtacagaccgaagtgactgtaccgggggggagtgcagcaggtgacacactgacactcactattaccaaaccagatggctcaaccgacactgttgaacacacactgactgcagatgaagtgacggcaggtaaagccgatgtgacaatccccgcagataaagtgacagcagatggtaactattctgttaccgcagaaattactgatccggcgggtaataccagtggtcaaggtaaacctactgactttatggttgatacgcaaattccgggagacacagacggtgatggtgtggtggatacaacaccggtagtgaccattccagaagctacggacggggtaaatgctgacgagctaaaagatggcgtacagaccgaagtgactgtaccgggaggcagtgcggcaggtgacacactgacactcactattactaaaccagacggctcaaccgacaccgttgaacacacactgactgcagatgaagtgacggcaggtaaagccgatgtgactatccctgcagataaagcaactccggatggtaattattctgttaaagcagaaattacagatcccgcaggtaacaccagtggtgaaggtaaagcaacggacttcactgtagataccgttgccccatctacccctgtattaaatgctgaggataatggctctgtttctgttgaactgccaggggatgccaacaaaggcgatacggtagaaattacctttgaagatgaaaaaggggataaacagactgtaacaatggagaaaggggataatggttggacatctagtgatcctaatttgatcccagacagtcagggcaataacaccgctattccatctgataatgtaaaagataacagtgaagtaaccgcaatagctaaagatccaagcggtaatgaaagtgctccagcaacagcaacgtccaaaacagatgtgctaccgacagtgagtattagtgttgatacaacatcagtaaatgacaatggagataagattagtgctgatgcttctgtttcgggtgaaataacagaagttcctgcaacaatagaggacaaggatgatactaccggattagtatataccgttgctctagattatgttgcagcacaggatgtgaccgtaaccataaccttaacaaatgatgctggtcatgcaagtgcgccggattattcaacgcttgcaggctctcagcatgatgggaaaatcgccctacatggggacacaggtaaagtaacctatgatggagcttcaacagtaacggttgttattcctgctggatctaagagtgtttcatttatagttgatccaacaatggaagctaaccaaaatgcatttaatgctgaaggtatggagaaagttgttgcaaccattacgggaacatctaataacgctaccgctgtaactgatacagtaaataatgcaggtgcttctgctacaggggttatttatgatggcaaccctatttcattacgtaatctggacggcgattttacactgaagtattcattatcctcatcagtggctgaaaatggggactttggatataccatcggagttgatagcggtaaaaaggatcctaagctaacgacagattacaatgatacgatttatgttggttattatcaggatggtagcgaaacttcatcatacagcaatcttgctaactcgcaggataatggacctgatggtacaaaaacagatggtaatcaaagtattacaactgttgatttaggtgctggtgatgacctgatggtgatccgcggtaatatgttaaccaatacacgagtctatgctggtgaaggtaatgatacctttactatggacggcatgaatacagcgttacgttctatgtatgctggtagttatctctttatggaatctggtaatgataccgttacgattaaacgtacaggggtaaccaatgctggtcaaatctatcttggctcaggtagtgatacctttactcaaggtgatgccaatgatcaaaataataccgaattgtccggtttattagatctgggtagtggtactcaagataagtcaaatatgccaaatgagtatctttctgtttatcaggatggcagtaatttaagcttaggtaatgacaataacattgatgcggtcacagatgttaatactgccactatttatggttctgtctccggtgaaattttaggtggatatggtagtgataatatcactatcactaaaaatctgactggtaatgtttctgttggtgataatacagacactctaactgctgggtggatttatggtggtgccactgtttctatgggggatggcaatgatacggttactgtcactgaaggtgcgtataacacaactatttcactaggggcaggagatgatgtgtttgatgctactgctggtgttatgggggattctgttagcgcgacattagtgaatggtgaagatggcaatgacaccataaaattaggcacaattggtaaaaatctgacagttgatgcgggtgctggcgatgatactgtgattttgacaaaagattatgatccttcacctataggtaatcagggatatattaatgggggagagggaactgatactttagtcttatcaggtacgattacggtaaatatggccactaagactgatgaaggtattgctaatttcgaaaaagtcgatatgacggttaacagtgagttgaaagtggacaatagctctcagactattaagttaaccgcatctgatgtgttgggaatgaatgcaaattcaacgatttatatttccggtgatgctaatgataaggtggatttaggtgccgatggtgctggaggtttaggtacatttacagctactgccactacaacaaaagcaaccgcattagatggtactgaacatacttacactctttatagcagtgcaagtggtgctaatgtctatattgataataatattatcgataatggaggcgttatttaa

SEQ ID NO: 295688 - DNA, 657 bp, Proteus mirabilis
atgaatcgcattttaacgttagtttttgtggcatttgcttttgtgttatcaggatgtgcagagccagtcaaaacagactataccgcctttaaagcaagtaaaccaaaaagcattttagtgctgttacctaaaaatcagactccagaagtagaagctgcccatagctttttatctcaagtgacttatcctttggcggaagctggctattatgtttttcctgtcgccgttgttgaagagacctttaaacaaaatggtttgtcaacgggaagcgatatccaagcggtgagtcctagtaagttacgtgagatttttggtgcggattctgtgctctatttggatgtcacccaatatggtacttcttatcaagtgatcgccagtgagacgcgtgtcagtgccagtgctaaattggttgatttacgtaatggtgccttactgtggagtggacatgccagtgcatcgagtgcagaaggggatacagcatcgaatggtttggtgggcatgttagtttctgccgtagtgactcaaattgttgatactattgcagataaaagtcatgaaattgcaggagtagcaagtgtgcgtttactttctgctggacatgccaatgggatcttatatggtcctcgctctccccactatgaaaaagagggacaataa

SEQ ID NO: 295689 - DNA, 351 bp, Proteus mirabilis
atgtcaaaatcattgctggggttgctatttgcctcgttgttattggttgggtgccaagcgccaaagcctctttataactgggatagttatcaaacggtggtatatcaatattatcaacaaagtgaaagtgatcctcatgcgcaaatcgatgcattgaaaaaaagcatcgaggttgcccgagcaaaatcattaggcgttccaccggggttacatgcacatttgggcatgttatatgtgaccactggcgcattagacttagccatgagtgagtttgatcaggagaaaactctttatcctgaatcagcaaagtttatggattttctgatgaaaaataagggagcacaaaaatga

SEQ ID NO: 295690 - DNA, 675 bp, Proteus mirabilis
atgacatttaataaattatcattaggggtagttttactttctgcttcattactagcaggttgtgcctcagaatcttctcgctctttagaggttgctaaagtggctacctataatacgacttactcaggacctaagagtgccattgctattggtaagtttgataaccgttctaattacatgaatggtattttttctgatggtgtggatagattgggtaatcaatctaaaacgattttaattacacatttacaacaaacaggccgttttaatgttttagatcgcgctaacttaacggagttaacacaagaagcgaagattaaaggccaaagtcagcaattaaaaggcgcaacttacgttattactggtgatgtgacagagtttggtcgcaaagaagtaggtgatcgccaactatttggtatcttaggacgtggaaaaacccaagttgcttatgccaaagtgaacttaaatgttgtgaatgtgaatacctctgaagtggtgttctctacgcaaggtgcgggggaatatgagctttctaatcgtgagattgttggttttggtggcacagcaagttatgactcaacacttaatggtaaagtgcttgatttagccattcgtgaagcggtgaataatttagttgcagggattgaaagccatgcttggcagcctgagcagtaa

SEQ ID NO: 295691 - DNA, 2334 bp, Proteus mirabilis
atgaatgaatcattaagccgaattattgcacaagagctatcagtaaagccccagcaagtactttcggccattacgttactggatgaagggaatacggtgccttttgtggcccgttaccgaaaagaggtaactggtgggttagatgatactcagcttcgtcaattggaaacccgcctgagttacttacgggaactcaatgatcgtcgccaaactattttaaaatcaattgaagagcaggggaaactcacagaagaattacgctcttcgattaatgagacgcaaagtaaaacagaacttgaagatctctaccttccttataaaccgaaacgtcgtactcgtgggcaaattgcaattgaaaatggcttagagccattagctgatttgttatggaatgaaccacaacatactcctgaagacgcagcaagtgcatatatcaaccctgaaaaaggaatagatgatagtaaagcagccctggatggggctcgctatatcttaatggaacgctttgcagaagatgctggattattagctaaagttcgccaatatttatggaaaaatgcgcatcttgttagcaaagttgttgacggaaaagaagcagaaggcgctaaatttagcgattattttgatactcatgagccgattgctcatgtaccttctcaccgtgcattagcgatgtttcgtggtcgtaatgaaggtattttgcagttatcacttaatcctgatccacaattcgaagaagcccccaaagagagctatggcgaacagttgattacggagcatttaggtttacgtcttaataatcaacccgcggatagttggcgtaaagccgttgtcagttggacttggcgtataaaagtgttaatgcatcttgaaactgagttaatgggtcagttacgtgagaaagcggaagatgaagccattaatgtgtttgcacgtaacctaaaagatctcttaatggccgcacctgcaggtatgcgagctacgatggggctagatcctggtttacgtactggggttaaagtcgcggtggtggatagtaccggtaagctgattgcgacagatactatttatcctcataccggacaagcggataaagccgctgctagtgtagcggcattatgtattaagcataatgtagagttggtggcgattggtaacggtactgcatcacgtgaaacagagcgcttttttgctgatacagtaaaacgctacccagaagttaaagcacaaaaagtgatcgtgagcgaagccggggcatcggtttattcggcatcagagctggcagcgaaagaatttccggatctggatgtttctcttcgtggcgctgtttctattgctcgtcgcttacaagatccattggcggaattggtaaaaattgaccctaaatctatcggggtgggtcaatatcagcatgatgtgagccaaacattattggcaaaaaaattagacactgttgttgaagactgtgtaaatggtgtcggtgttgatttaaatacagcctctgtaccgctattgacgcgagtggcggggcttagccaatctattgctcaaaatattattgcttggcgtgatgaacatggccgttttgtggatagaaaacagttactcaaagtggcgcgcttagggcctaaagcttttgagcagtgtgcgggatttttacgtattcgtgatggtaaaaatccacttgatgcctcaacggttcaccctgaagcctatcctattgttgaaaatatcttgcaatcaatacatcaaaaaattgatcaagtcatgggcaatagtgcattactttcacaaatcaatgccagagaatttgtcaccgagcagttcggtttacctaccattaatgacatcttaaaggagcttgctaaaccggggcgtgatcctcgtcctgagtttaaaacagccacctttgccgaaggtgttgaaacaatgaatgatttagtcagtggtatgatattggaaggtactgtaactaatgtgactaattttggtgcctttgtggatattggggtacaccaagatgggttagtgcatatttcatcactgtcggataaatttgttgaagatccccatactgtggtaaaaaccggcgatattgtgaaagtaaaagtccttgaagtcgatttaccgcgtaaacgtattgcgttaaccatgcgtttagatgaagtggctgctgatagtgatcataaacgccagtcagtgactaaggataatgcttctaaacatagtcgcgggcaaaaaccgaccagaaaccgccaatcaaatacgggtaacaatgcaggtaatagtgcgatgagcgatgcattggccgcagcatttggtaaaaaacgctaa

SEQ ID NO: 295692 - DNA, 480 bp, Proteus mirabilis
atgacaaaaagtaactatattactcgtgatggctggcatgccttggataaagagctaaaatatctttggaaagaagagcgtcctcgcgtcactcaatcggtctctgaagcagcggctcaaggtgaccgttcggaaaatgctgaatatatctatggtaaaaaaagattacgtgaaatagaccgacgagttcgttttttatccaaacgtcttgatgaattaaaaattgttgacccagatcctcgtcaagaaggaaaagtgtattttggcgcttgggtaacccttgaagacgatgatgaaaacattaagacatttagactagtcggccctgatgaatttgacccagcaaaacagtggatttctattgattcccctgtcgcaagagcgctgatcggtaaaaaagtggatgatgaagttagcgtgcaaacgccaggtggcatcgttaattactgcgtattatctatcaaatattattcggaataa

SEQ ID NO: 295693 - DNA, 723 bp, Proteus mirabilis
atgcaagacagttataaagtgctgattgtggatgatgatttacgtctacgttcactattagagcgctatttgacagagcagggttttcaaatccgcaccgcggcaaactccgatcaaatggatcgtttacttactcgcgaatctatccatcttattgtcctcgacttaatgcttcctggcgaagatggcttatctatttgtcgtcgcttgagaagccaaaacaatcctatccctattattatggtgactgccaaaggggaagaagttgacagaattgtcggacttgaaattggtgctgatgattatatctcaaaaccatttaacccaagagagctattagcccgtattcgtgcggtgcttcgtcgccaagccaacgaactaccgggagcaccttcacaagacaatgcgattgtctcatttggtaaatttaagcttaacctcggtacgcgggaaatgttccacgaagatcaacatatgcctttgaccagtggtgaatttgccgtattaaaagtccttgtttcacatccccgagagccattatcacgtgataaattaatgagtctggcgcgaggtcgtgaatatagtgcgatggagcgttctattgatgtacaaatttctcgtttacgtcgcatgattgaagaagatcccacccatcctcgctatattcaaacggtttggggactgggttatgtctttgtacctgatggaacgagcgtatcataa

SEQ ID NO: 295694 - DNA, 1341 bp, Proteus mirabilis
atgagaaggctgaggctttcaccccacaataagctcactcgctctctatttctggttatctcattacttttttttagcttgatagccagttatgttgttgtacagcatcttattgtcgggccaagcctccagcaatttaataaagtattagcgtatgaaattcgtacgctagtaccggaagaactgatcttagtcgatggcaccccacttaaaatttctcccgctctacgtaataaaatttacaacgagttaggtatctcattttttgataaagacgccgctttaaaagccggtttagagtgggcaagagaagatttagaacttagccagcagatgacggattatctcaatagtgatacgacgatttggctagaaaacaccctagagtatcctattttatggattaatacccaactctcacccacgctatggatacgcgtaccacttactgaattagggcaaaatttcttattacccgtttatcggcaagccattatttttatcatcatcgtagtggcatttttctggttatataaccgttttcaaaatcgtccattgcatgaagttgaatatgcagcacgacgcattggtaaaggggtgatccctccgccaatacctgaatctggcactgctgaaatgcgttcaattattcgagcatttaatcaaatgtcatcagatattcgctcattagataatgatagaacactggtgatggcaggggtaagccatgatttacgcactccgttaacgcgtattcgtcttgctacagaaatgatgagtcctgaagatagttatcttgctgattctatcaataaagatattgaagattgcgatgccattatcggtcaatttttagactatatgcgcacaggcaaagagatgtctttagaattatgtgatatgaatggtctattgcgtgaagtgatctgcgctgaatctaactcaggcaaagtcagcgaagagcatttatacccttatcctatcaatatcacagcaaacccaattgccgtcaaacgggcgcttaccaatatgattgttaatgccacacgctacggacatggttggataagcatcacaagtaatcaaaatgaagaatatgcttggtttcaagttgaagacgatggtccaggcattgccaaagaagatagacaacgtttattccaaccctttgttcaaggggaacaagcacgaagttcaaccggtgcgggtttaggtctatccattattcgtcggatcatggatgcccatggtggctttgtcgaactcggcgatagcacgaaaggcgggttacttatccgtgccaactttccgttaaaagtgcaagaagacgaagatgattaa

SEQ ID NO: 295695 - DNA, 1041 bp, Proteus mirabilis
atgaaactgatgcgtaccaccctgaccagtgtcattgccgctgcactttcaatgacggctctttctgcacaggcaacgacctcactgactggtgctggcgcaacgttccctgctccagtttatgcaaaatgggcagatagctatcaaaaagaaactggcaacaaagttaactaccaaggcataggctcttctggtggtgtaaaacagatcattgctaatactgtcgattttggtgcttctgatgcaccattagctgatgaaaaactcaaggctgacggtttattccaatttccaactgtcatcggtggtgtggtgatggcagtcaatatctcaggtattaaatccggtgagcttgtcttagacggtgagactatcgggaatatctacttaggcaagatccaaaaatggaatgatcctgctatagctaaactaaatccaaaactcaatctacctgaccaaaacattgctgtcgtccgtcgtgctgatggttcaggcacatcattcgtttttactagctacttatctaaagtaaatagcgcatggaaagatgaagtaggcgcaggctctaccgttaaatggcctacaggcttaggtggtaagggaaatgatggcatcgcagcctttgttcaacgtctaccaggctcaattggttatgttgaatacgcttacgcaaaacaaaacaatcttgcatatactcaattagtcactgcagatggcgaagttattcctcctactgccgatagttttagcgcagcagcgagaaaaattgattggagtaagagctttgcacaagacctaacgaatcaaaaaggcgaaaatgcctggccaattacttctactaccttcattttagtgcatcaaacgcaaaaagatgcggctaaaggaaaagaagtactgaatttctttaactgggcatatgaaaaaggcaatgatgaagcgaaaaatcttgattacgccgtattgccaaaagaagtggtagaacaaattcgtgccgcttggaaaacaagcatcaaagacagtaatggtaaaccaatttactaa

SEQ ID NO: 295696 - DNA, 960 bp, Proteus mirabilis
atggccgagcatacaacggtaataaaggccccgagtaaacgaggggacgttatttttagcgcactagttcgactagctgcgttaattacacttttgcttttagcaggtatcattgtttcactgattttcgcctcatggccaagtattcaacaatttggtctgtcattcttgtggacgaaagagtgggatccacccgcacaggaattcggtgctttagtaccaatttatggtactgtcgttacctcaattattgccttgatcattgcggttccagtgagttttggtattgcactctttttaacagaactggcacccaattggctaaagcgcccattgggtatcgcgattgagttattagccgctattccaagtatcgtttatggtatgtggggactatttatctttgcgccgctctttgccacatacttccaagagcctgttggcaatgtgctctcatcagtccctattgtcggtgagttattctctggtcctgcgtttggtatcggtatattagcagcaggggttatcctcgcaattatgatcatcccttatatcgcgtctgtaatgcgtgatgtattcgaacagaccccggtgatgatgaaagaatccgcttacggtatcggctgtaccacatgggaagtgatttggaatatcgttttaccttatacccgaaacggtgtgataggtggtgtgatgcttggattaggtcgtgcgctcggggaaactatggctgtgacctttattattggtaacacctaccagttagactctgcatcactctttatgccgggcaatagtattacctctgcattagccaacgaatttgccgaagcagaaacaggtcttcataccgctgcattaatggaattaggtctgattttatttgtcattacctttatcgtccttgcgatttctaagtttatgacactacgtttatctaaaaatgaaggagcacgttaa

SEQ ID NO: 295697 - DNA, 903 bp, Proteus mirabilis
atggctaaaacatcctcttcttcattacaagttcaaacagaaaaagaactgcatatacgccataaacgccaactttggcgtcgtcaaaaaaaccgtatcgcactgtttttatctgtctctaccatggcatttggtctgttctggttaatgtggatcttgttttctacagtaaccaaaggctttgatggcatgtcttgggccttattcacagaaatgacgccgccccctaacaccgatggtggcggattagctaacgccattgtgggtagtggtctacttattttatgggcgacggtcattggtactcctttggggatcttagcgggtatctaccttgctgagtatggacgccgttcatggttagcggaagtcatacgctttatcaacgatattttattatcagccccatcgattgttgttggactgtttgtgtataccattgtggtggcacaaatgcagcacttctctggttgggcgggtattgtggcattagcgttattacaaatacctattgttattcgcaccacggaaaatatgttgaagttagtccctgatagcttacgggaagcggcttatgcattagggacgcccaagtggaagatgatcgctaaaatcacgttaaaagcctccgtatcaggtattatcacgggcgtattattagcgattgcacgtattgcgggtgaaacagcaccactgctatttacttcactatctaaccaattctggagcacagatctaaacgaaccgatagccaacttacctgtgactatctttaaattcgccatgagccctttctcacaatggcaagagcttgcttgggctggcgtattactgatcaccctctgtgttctatttatcaatattatcgcgcgcgtgctgtttgctaaaaataagcatggctaa

SEQ ID NO: 295698 - DNA, 777 bp, Proteus mirabilis
atgactatggctaatgataacgctggaaacaaaatccaagttcgtgacttgaacttctactatggtaagttccatgcgctgaaaaatatctcattagatattgccaaaaataaagtaacggcatttatcggcccttctggctgtggtaaatccactttactgcgtacttttaataaaatgtatgagctttatggcgaacagcgtgctgaaggtgaaatcttgttagatggcaacaatattctgacagataaacaagatattgcgctattacgcgcaaaagtaggcatggtattccaaaaacctacaccatttccaatgtcgatttatgacaatatcgcttttggtgtacgcttatttgaaaaactgtctcgtgctgaaatggacgaacgcgttcagtgggcgctgaccaaagccgcattatggaatgaaaccaaagataaattacatcaaagtggctatagtctttctgggggacagcagcaacgtttatgtatcgcacgcggtattgctatccgtcctgaagtattattactggatgagccatgctctgcactcgatcctatctctacaggtcgtattgaagagcttatcagtgaactaaaatccgaatataccgtggtgatcgtcacccacaatatgcagcaagctgcacgttgttctgattacactgcatttatgtatttgggtgaattaatcgagttcagtgatacggatacattatttactcgtccagcgaagaagcaaactgaagattacatcactgggcgttatggctga

SEQ ID NO: 295699 - DNA, 735 bp, Proteus mirabilis
atggataatttaaaccacaataaacatatttctggtcaatttaacgctgagttagagcatatccgtacagaactgatggtcatgggtggcttagttgaagagcaattaaaaaaagccattaccgcaatgcataaccaagaccaagcattagccaatgaagtgattgaaggtgatcaaaaagtcaatatgatggaggttgccattgatgatgcctgtatgcgtatcattgccaaacgtcagcccaccgccagtgatttacgccttattatggcgatttctaaaactatcgccgaattagagcgtattggtgatgtggcagaaaaaatctgtaaaacggcccttgagaaattttcacatcaacatcaaccactgctagtaagtttagagtccttaggccaacatgcgatacaaatgctccatgatgttcttgatgctttcgctcgtatggacttagaagaagctattcgagtctatcgtgaagatgcaaaaattgataacgaatatgaaggtattgttcgtcaattaatgacttatatgatggaagatcctcgcactatcccgagcgtactgacggcattattctgtgctcgttctatcgaacgtattggcgatcgttgccagaatatctgtgagtttatcttctactacgtcaagggtcatgacttccgtcatttagggggtgaccaagtagaaagaatgctgacaaaaaatgatgatagtcactctgctaattaa

SEQ ID NO: 295700 - DNA, 840 bp, Proteus mirabilis
atgaaattacgtgttttggcaacggcattaattgctggctcagtgcttttttctggtctggcaaaagccgataaattagacgatataaaacaggcaggtgtggtacgcattgctatttttgatagtaacccaccgtttggttttatcgatccacaaaccaaaaaattggcaggttatgatgcagatattgcgaatgaaattgccaaagatctcggggtaaaattggaattacgtccaactaacccagctaaccgtattccactacttagcgccaaaaaagtcgatttaattgccgccaacttcaccattaccgaagagcgagcaaaacaagtcgatttctctgtaccttattttgctactggacagaaatttatcgcgcgcaaaggcgtattaaccagccctgagcaaattgcgtcattacgcattggggctgacaaaggcaccgtacaggaaattaccttacgtgaacgctatcctgaaactaaagtcatctcctatgacgatacccctcttgcgtttgccgcattacgcaatggcaatgtacaagcgataacccaagatgatgctaaattagtagggttattagctaatttacctgagaaaatcaaagctgattttgaaatatcgccctttagtattacacgagaatatcaagccgttgccgcagctaaaggtgaacagcgtttaattaacgagattaataacacgctattaagattagagaaagaaggcaaagcagacgaaatttataatcgttggtttggcccagatactaagtccgctcaacctcgtggtgactttaagtttgccccactttctgagcaagcgcctcaatcctaa

SEQ ID NO: 295701 - DNA, 738 bp, Proteus mirabilis
atgtttgcgcagtttctttctcactatcttcttgagcctcactacttaagttggctgtggcaaggttttttaatcaccttgcttatctctttctggactatcattattgccacattactaggttttcttctcagtgctgcctatgatagccatatcgcgccattacgttggtgtgcggccatttatacttcactctttcgtaataccccattattggttcagctcttcttttggtattttgcttctggtgaactattgccacaaacggccatgatatggcttaacaccccacatgaactttctttatttggcttaacgctctcttggccctcttttgaatttttagccggtattattgggcttaccttttactctgtaccttttattgcccaagagctaagagcaggaatacagggagtcagacaaggccaaaaatatgcagctttagcgttaggattaacccactggcaatccatgcgttatgtcattttaccgcaagcttttcgtatcgcccttccgccattgttgggtcaatatatgaatattatcaaaaactcctctctcactatggccataggtgtcgcagagctttcttatgcttcaaggcaagttgaaactgaatcattacgtacttttgaagcgttcggcgtcgccaccatactgtatatcgctgccattgcattaatggaagcttgggggcaatggcatcagcaacgaaaattagcgcaaggatattga

SEQ ID NO: 295702 - DNA, 816 bp, Proteus mirabilis
atggaaatgattttactgtttctgattgtgggatgtataactggattttttgccggattgttaggaattggtggtggagccattattgttcctattgtgatgtatgttgttagccaacaagctatccctgcagatatggtaatgaaaatcgccctctcaacctctttttctgtcattatattttctaccgcctcttctgcttattcgcataataaacataaagcgattttatggtcacaatttccgctcctcgctgtaggcactcttctcggtatgctagttgggacattcttagtacaaaaactctcaaataccctattgcaaattatcttttgtatttttatggcctataccatatatggattattgaccaagaaaaaagaagctgaacgtgttgagaatgcccaagatccggtggtttcaaaaccagcactgacaaccggtggtagcttagtgggttttatttcaagttttattggtatagcgggtggcaccataacaataccgctattaagccactgggggtttaatacccgtaaatgtattgcaacatcatcaatgctgggtgtgattatcgccactattgggactgttatggggatcgtttatggttggcaacaaactgaattagcagactattatttaggttttgtctatctacctgcttttattggtattagtattaccagtatacttacagcccctatcggcgtaaaagttgcctataaactacctattgccagagtacgccaaatatttgccctattcttattaatcgtcatggctaaaatgttatataccctgatattgggatag

SEQ ID NO: 295703 - DNA, 579 bp, Proteus mirabilis
atgtctttcgaattaccaaaattaccttatgcgttagatgctcttgagccacatatctctaaagaaacattagaataccactacggcaaacaccaccaaacttacgtaaccaacttaaataacttggttaaaggtactgatttagaaaataaatctttagaagagctcatcaaaactactgaaggtggtattttcaataatgctgctcaagtttggaaccatacattctactggaattgcttagcaccaaacgcaggcggtgcaccaacaggtaaaattgcagaagcaatcaataaagcgtttggctcttttgaagagttcaaaaaacaatttaatgatgcagctgcaaaaaactttggttcaggttggacttggttagtgaaaaaagcagatggctcattagccattgttaatacatctaacgctgcaacacctgtttctggcgaagataaaccactgttaactgttgacgtctgggagcacgcttactacatcgactatcgtaatgcacgtgtgaaatacttagaagagttctgggcactggttaactggtcatttgttgaagcaaatcttgcttaa

SEQ ID NO: 295704 - DNA, 1026 bp, Proteus mirabilis
atggcaacaataaaagacgtggcaaaacgcgcaggcgtatcaaccacgactgtttctcatgtgatcaacaaaactcgttttgttgctgagaacacaagagcggcagtttgggctgcgataaaagaattaaattattcgccgagtgctgtcgcacgtagtttaaaagtcaatcacactaaatctattggtttattagccacgtccagtgaagcaccttactttgctgaagtgattgaagctgttgaaaatagttgttatagcaaaggctacacgctaattttatgtaattcacataataatcttgataaacaaaaagcttatttagctatgttggcacaaaaacgtgttgatggtttattagtcatgtgttcagaatatcccgatcatcttctttctctcttagaaggttatcgtaatattccgatggtcgtcatggactggggaaaagcccgtggtgactttactgataccattattgataacgcattccatggtggctatatagccggtcgttatcttattgaacgaggtcatcgtgatattggtattatccccggccctctagagcgaaataccggaggcggtcgtttacagggctttttaaaagccatggaagaagcgaaaattacggtaaaagaagagtggattgtacaaggtgactttgaacctgaatctggttacaaagccatgacccaaatgctcaatcaaaagcaacgccctactgccgtattttgtggcggtgatgttatggcgatgggagcaatatgtgcagctgatgagttaggattacgtgttcctgccgatatttccattgtcggctacgacaatatccgtaatgcacgctatttcacaccagctttaaccacggttcaccagccgaaagagcgtttaggacaaatggctttttccatgttactcgaccgtattgtgaataaacgcgaggatgcacaaactatcgaagtacacccgcgtctagtagaacgtcgctctgttgccgatggtccatttattgattatcgccgctga

SEQ ID NO: 295705 - DNA, 903 bp, Proteus mirabilis
atgtggtcagaatactcgctagaggtcgttgatgctgtcgctagaacggggagttttagctcagccgctcaagaattgcacagagtaccctccgcggtgagttacaccgtgagacaattagaagaatggcttgccgttcctttgtttgaacgccggcatcgtgatgttgaattaaccgatgcgggtaagatctttattaaagaagcccgttctgttatcaaaaaaatgaatgacactcgccatatgtgccagcaagtctcaaatggctggcgggggcagtttagcattgccgtggatggtattgtcaaaccggctagaacacagcaacttattctggacttttatcgccattttcctgatatcgaactctatgtttatcctgaagtttttaacggtgtctgggattcactagtgaacgggcgtgttgatttggctattggtgccaccagagcttcacctattggtgaacgttatagttttaaagatatgggctttatgccgtggcgatgtgtgtgtcatgctgatcatcctcttgcaagcgcggcacatccattaaccgatgatgagttacggccttatcctagtttatgtttagaagatacctcacgtagtttaccaaaacgagatacttgggcattaaataatcagcgccgaatgatagtaccttcatgggatatggggcttgagtgtttattagcaggattatgtgttggtatggtgccttggcaccgagcagagccattaatcgaacaaggtaagttggttacccttaccttagcacaacccttgccagacagtccgtgctgtctaacatgggttgataaaagcgaatcgccggcattaacttggctattagattatctaggcgatagccaaaccttaaatgaggaatggcttcgttaa

SEQ ID NO: 295706 - DNA, 1218 bp, Proteus mirabilis
atgactttaaagaattccacacaatcaaaaacaccttctctctttatggtgtatctcgcctgccttagtatgctgggctatttagctatcgatatgtatctgcctgcatttggtatgatgcaacgcgaattatcaatcagtgaaggcgccgtcagtaacagcttaagtatctttctatttggctttgctgtcgctcaactactttggggaccactctcagacaaattggggcgtaagcctattttacttattgggctaagtttcttctccctaggttgtctaggtatgctttgggtagacagtgctgccggtttactaaccatgcgcttcttacaagcctttggcgtctgctctgcagccgttatttggcaagcactagtgatagaccgttttgatgagtctcgcgctcaacacgttttcgcatcaattatgccattggtcgccctttccccagccttagcgccactcattggtgcttttctgttaaaccacggtggctggcgcatgatctttatgttgctgatggcaattactcttgtattaatgctacccacattgatgctaaaaaatattaaacaaaaatcagttattgatgcaggcccatctacagtatcatttttaactttgcttaagtcacctatctatgccggtaacgtattagtttacgcttcctgtagtgcgggtttctttgcttggttagcaggctctccgattatccttgagaagatgggttattcaccacaagatatcggcttaagctatattccacaaaccatcgcatttatggtaggtggttatggttgtcgcattctattatcaaaaatgtcgggtaaaacactgttacctttattgttaattggctacgcagtgagcatgacagcgttgttcttagtcgccaaatatacacacccaacattaacaacaattttaattccattttgtattatggctgtgatgaacggtgcttcttatcccattgctgtctctaatgcgctatcagcctaccctgaagtgagtggtaaagccgccgcattgcaaaatgcgctacaattaggtctatgtagtttagcaagctttattgtctcagcctttattagccaacagccattaattaataccacagcgattatggcactcacggctattccaatggcgctgggttactttattcaacgtaataaatccgttagcaaacacacagttcaggcgacagaataa

SEQ ID NO: 295707 - DNA, 1155 bp, Proteus mirabilis
atgagtacatcttgtgtagaagaaggccgaaagacctccaatgatccttatcaacggatcgcatcagagctgctcgctcaagcagacattcatatcaatggttctgaaccttatgatatccaagtgcataataaagatttttataaaagagtattacaacaaggctcattaggtctcggtgaaagctatatggatggttggtgggactgcgaacgtcttgatatattctttcataaagttttacgagcaggtcttgaaaataaattgccaagtaactggcgcgatattttaaaaatagccatggcacgcatttttaatttacaaacacaaaaaagagcgtggatggtgggtaaagagcattacgatttaggtaacgacctctttaccgcaatgttagatccttatatgcaatattcctgtggatattggaaggatgcggatagcttagaagttgctcaacagcacaaactcgaccttatttgccgtaagttagagctaaaaccaggtatgacattgcttgatattggctgtggctggggtggtcttgctgcttatgctgccaaaaactatggcgtttctgttacaggggtgaccatctcagttgaacaacagaaattagcacaagagcgctgtaaaggtcttgatgtcaatatcatcttagaagattaccgtgacttaaacgagcagttcgaccgtatcgtttctgttggtatgttcgagcatgttggcccgaaaaactatgccacttactttgatgtcgctcgtcgtaatatcaaagaagatggactatttttattacataccattggttctaatcacaataaagttaatgtcgatagttggataagtaaatatattttccctaacggttgtttgccgtctattcaaaaaaccgctgaggcaatggaaaataaatttgttatggaagattggcataattttggtgccgattatgacaaaaccttaatggcatggtatgagcgttttttagctagctggcctgaaattgaatctaactatacacctcgttttaaacgcatgtttagctactacttgaatgcttgtgcgggtgctttccgcgccagagacattcaattatggcaaattatgttaagcccgaaaggtagaataggtggattacgcacacctcgctga

SEQ ID NO: 295708 - DNA, 657 bp, Proteus mirabilis
atgtttacaggtattgttcagggaaaaggacgtgttattgccattgaagataaaggtgatttccgtacccatatcattgaattaccttccgagttagtcaataacttagaaacaggagcttcgatcgctaacaatggttgttgcctaaccgtcacaaaaatcgatggcaataaaattagtttcgatttagtgaaagagacgctgcgcttaactaatttgggcgagttaacggttggttcagaagttaatattgaacgagcggccaaatatggcgatgaaattggtggtcatgtgatgtctggtcatattgtcactacggctgaaattgcgaaaattattacttcagaaaataacttacagatctggtttcgtatttttgatcagacattgatgaagtatattttgcataaaggttttattggcattgatggtattagtttaactattggtgatgtggttaataatcgtttctgtgtccatctgatccctgagactcgcgatagaacgacgttaggtcgtaagcgtttgggggataaagttaatattgagttagatccacagactcaggcgattgttgataccgtagagcgtgttatggcgcaacaagcattaacggttaagcttcaagcaacacacgaagaagaaaacaaaaaataa

SEQ ID NO: 295709 - DNA, 1374 bp, Proteus mirabilis
gtgcagaagtatataaaagaagcgcgtagcttacttgctcttggtatccctgttatcatcgctcaattctcccaaactgctatgggagtagttgataccgtgatggcaggtgctgtcaatgccacagaaatgtctgcggttgctgtaggtacgtcgatttggttgccaacgattttattaggtcaaggtatattaatggcattgacccccatcgttgcacaattaaatggttcaggacaacgaaagcatattgctaatcgtacacagcaaggtttttggcttgccacttttttatccatcatggtcattgccattctttataacagccgttttattattgaagcgcaacatgatatcgagcctgagcttgcagaaaaagccattggatttattcatgccattatgtggggggctcctggttgtctctattatcaagtgctaagaagccaatgtgagggattatcaaaaacaaaaccaggcatgatcatcggctttattggattattaattaacattcctgttaactacgcctttatttacggtaaatttggtgccccacaattaggtgggattggttgtggtgtggcaaccgcctctgttttttgggcgatgttcttaatgatgcgctactatgtgcgtcgagcaccaacacaacgggatgttatgcccaaaaaacgcctagtgttacctgaattccacacaataaaacgtattacattgttagggttacctgtagggctagcactattttttgaagtaacactgtttgctgttgtggcattattagtttcaccattaggtgtaacggctgttgcaagtcaccagatagcccttaattttagctcattaatgtttatgttccctctttccttgggaatagctgcaacaattcgtgtgggttataaccttgggcaacgttctacagagcaagctcgtacttcagccattacagcccttgctgtcggattaatgctggcaagttgtaccgctattttctctattatttttagagaaaaaattgctttaatgtataacgataatattgaagtggtgacattagcctctcatcttatgttattcgccgcactttatcagttgtcagattccgtacaggttattggttcaggggtattacggggttataaagatactcgctctatcttttttattacctttatcgcttattgggtaattggtttgccttccggatatctcttgggacgaacggattatattgttgaagcaatggggccggcggggttctggattggttttattttaggtttaaccgcttctgcaattatgatgggaacacgtatttggtggatccagcgtcaatctgatgaggttgtcttattacgctcggagcgttaa

SEQ ID NO: 295710 - DNA, 1413 bp, Proteus mirabilis
atgaaaaagacaaaaattgtttgcaccatcgggccaaaaaccgaatctgaagaaaaactgactcaattactggacgcaggcatgaacgtaatgcgtctaaacttctctcacggtgactatgaagagcatggcaaccgtatcaaaaacctgcgtaatgtctgcgcaaaaacaggcaaaaaagcagccattttattagatactaaaggacctgagatccgcaccattaaattagaaggtggtaacgatgtctctttagttgcaggtcagacttttacctttacaacagatacttctgttgttggtaataaagatcgcgttgcggtcacttatgacggtttcgcaagagacttaactgtcggcaataccgtattagtcgatgacggccttatcggtatgaaagtcattaaagtcactgatactgaagtggtatgtgaagtacttaacaacggtgatttaggcgaaaataaaggcgttaacttaccaggtgtgtctatcggcctaccggcattagcagaaaaagataaacaagatcttatctttggttgcgaacaaggcgttgactttgttgccgcttcttttattcgtaaacgttcagatgttgaagagatgcgtgctcacttaaaagcacatggtggcgaaaacatcatgatcatctctaaaattgaaaaccaagaaggtttaaataactttgacgaaattttagaagcttctgacggtatcatggttgcacgtggtgacttaggtgttgagatccctgttgaagaagttatctttgcacaaaaaatgatgatcgaaaaatgtaacgctgcgcgtaaagtggttatcactgcaacacagatgttagattccatgatcaaaaatccacgccctactcgtgcagaagctggtgacgttgccaatgctattttagatggtactgatgctgttatgctatccggtgaaagtgcgaaaggtaaatatccagtagaagctgtgactattatggcgactatctgtgatcgtactgatcgcatcatgaaatcacgtttagagtcttaccaattaggtgctaaattacgtgtaacagaagctgtttgtcgtggtgctgtagaaatggcggagaaattagatgctcctcttatcgttgtagcaacttatggcggtaaatcagcgcgctctatccgtaaatatttcccaacagcacctatcttagcattaacaaataatgaagagaccgcacgccaattactgttagtgaaaggtgtgacaacacaattagttaataaaattgcttctactgatgacttctaccgtatcggtaaagatgcagcattatcaagtggcttagcccatgcaggtgatcgtgttgttatggttacaggtgcactggttgatagtggaacgacaaatacttcatcagtacacgttctgtaa

SEQ ID NO: 295711 - DNA, 1554 bp, Proteus mirabilis
atggcgacatctgcaacaagttctgcctcaaaacagctcacattattaggtttttttgccataactgcatccatggtgatggcggtctatgagtatccaacttttgcaacttccggctttagtctagtctttttcttattactaggcggtttgttgtggtttattcctgttgcattatgtgcagctgaaatggcaaccgttgaaggatggcaagaagggggcgtatttgcttgggtatctaatacgctaggggagcgctggggatttgcggcgatctcttttggttatttacaaatagcgattggttttattccaatgctttatttcgtattaggagcgttatcttatattcttgattggcctgagttaaataccgatccgctcaccaaaacgattgccgcattagtgattttatggggattagctttaactcaatttggcggaactaaatacacggctactattgctaaattaggtttcttcgcagggatattattaccggcaattattttagtgcttttagctattagttatctggtcagtggtgcgcctttagcaatagaaatcagcagcaaaacctttttccctgattttactcagattggtactttagtggtttttgtggcctttattttaagctatatgggcgtggaagcctcagccactcacgtcaacgaaatgaaaaatccgggccgtgattatccgcttgccatgtttttattaatgattgtggcaatatgcttaagctctattggcggtttatctgttgctgcagtgatccctcataacgaaatcaacttatctgcgggggtggttgaaacctttagtgttttagtcagccattttagtagcggattagtttgggcggttaaaattattgctgcactattattgcttggcgtcttggctgaaattgcgtcgtggatcgttgggccttcacggggaatgtttgtggctgcacaacaaggtattcttccgccaacactggctaaagtaaataaaaatggtgtaccggtagctttagtgatcactcagctaattattactactattgccatagtggtgctgactaacaccggtggtgggggcaatatgtcatttcttattgctttagcgctgacggtggtgatttatctatgtagctactttatgctgtttattggctatatgcatttggtttgcaagcaagctgataaaaaacgtgcatttaatattcccggtggtaaaggtgttaaattattagtggccgttgtcggtctgattgtgtctattttagcttttgttgtttcattcttcccacctagctctttaccgggtggcagcagtgatacaacgtatgtttcattgctagtggtaagttttgttattatttttgctttaccttttattatttatgcgtgctctcgcaaaggcaataaagccaatgtatcgatgatccacattaagagtcataatgcaccgaaaggacacttttttatccatcctcgtgctcgttcaacgcattatttagtgccaatagataaaacagatcatgatagtcagcaacagaaataa

SEQ ID NO: 295712 - DNA, 1392 bp, Proteus mirabilis
atgaataaaaaaacgccaagttatagctcactcgatgatgtttatgcatcggttgatttatcacaatccttaccgaaaacacattttccgcaacaagagagccatcctcgtcatgtttttgatgctgtaagggatgagctgatgctagatggcaattcaagacaaaatctggccacattttgtcaaacctgggtagatgatgagatccgtgatttgatgaatttatctatcgataaaaacatgatagataaagatgaatatccacaaacggcagaaattgaaaaccgttgtgttcatatgcttgctgatttatggcactcacccgatccactcaataccctaggttgttcaaccattggctcctctgaagcggcaatgttggggggacttgcattaaaatggcaatggcgtaaaaaacgccttgctgctgggaaagcgacagataaaccaaatcttatttgtgggccagttcaagtctgttggcataaatttgcccgttattttgacgttgaactcagagagatcccgcttgaaggtgatcgcttgatgatgagtcctgaagaggtcattaaacgtgttgatgaaaatactatcggtgtagtgccaacattaggggtgaccttcacctgtacttatgagccagtaaaagcggtacatgatgcactcgatcaactacaaaaagagaccggacttgatattcctattcatgtcgatggtgcgagtggtggctttttagcgcctttctgtgcacctgatttagaatgggatttccgtttaccgcgtgttaaatccattaactcatcaggccataagtttggtttagcgccattgggctctggttgggtagtatggcgtgaagccaaagacttaccggaagagcttatttttaatgtgaactaccttggcggtaatatgccaacctttgcgcttaatttctcacgtcccggtgggcaaattattgctcaatactataatttcttgcgtcttggcagagaagggtatgcgaagatccacaatgcctgttatcacaccgcgcaataccttgctcgagaaattgaaaagctagggccttttgaaatgatcttcagtggtgatagtcaaaaaggaatacctgcattagcgtggaaactgaaaaaagaggctaaggtaagctactccttatatgacatcgctgataaattgcgtagccgtggctggcaagtacccgcttattctatgcctgctgatcgccaagatttagttattcaacgtattcttgttcgtcatggtgtgagtttagatttggcgacattactgatagaagatatgaaacgtactctcgattatttcgaaaaacatcctgtcagcacacctttatctgaagaagacggcggtggctttaaccacagctaa

SEQ ID NO: 295713 - DNA, 351 bp, Proteus mirabilis
atggcactttccgatactaaggttcgttctgcaaaatctgaagataaagcgtataagctgacagatggtaacggactatttcttctggttcatcccaatggttctaaatattggcgcttccgttatcgcttcggcggtaaagaaaagatgctagcatttggcgtgtaccctgatatctcgctagcgaatgctcgagaaaaacgagatgaagcaagaaagcttgttgctagtggtgtagatccaagtgaaaaacgcaaagaagtgaaagaagagcaacaaaaggaatttaatacattcgagaaagttgctcgcgattggcacgcgatcaataaggcgcggttttttaactaa

SEQ ID NO: 295714 - DNA, 963 bp, Proteus mirabilis
atgagttttttagataaggttgaaaggttcattacctatttggtttttattctatatatggttgctaatctaaccttactaggtaaagatttttctttcaaaaaagaaattatcatttctctagctatcttactaataattattagcttttttctatgggattctgttaagaccatatcaagagattttatttatgtagataagcaaaaagcacaaaaaaaaccatcgggtataacaacattaatatcatgctttatttttatgttgatgatattttttatgaacatcaatcagatagagtgtgctcgttggagcctgttaggttttgtaattgcagttttaattaactctgcattattgttttatgatcttgaaactaatggctatagtatttttaataaagcaagaataacatttggaataataacatctattatttattttatttctagtgcatttgcatctagtgtttttctaaatataagcaatatggatttggctaaaactcctatggttgaaattagccttgaagtgatattttttgcgttttttgcatttttattccttcagcctttaacatattttttctttttacatttatcaaataaaatgaatgttatccaaacgatagcaagtttacttcttatcggtattacttcaattgcattagctttagcgccaatatggctaggtaatttcatggttttatcacttgattttgctacaaattttgagtggaaaacctcagcatattgtggacagaggaaaataagtaatcctaaagaaagatattttggttttcatgctgataagtatactgtctattattccgatagaaatggaaaatggggatttgaagaaataagatgtataaaaaatcaaaatggcgatgattcttttataaagttatctatagatgaaaaccctatgcctaagtggtttaatgattccgagaaagagtaa

SEQ ID NO: 295715 - DNA, 453 bp, Proteus mirabilis
atgaataagataaaaagcctatttgcgatagggctattggcagttagtgcatttagtttggctgaagagcaacagcgttatgcgagcatcacacataccagctcaaactttattaaccaaggctactgtggttattcatttaccctcgataatggcggtaaccatatggttctagaccatgcggagtttggtgcacttgaactaacgctgcgaatgaaagatggacaaggaaaagtattaggggatacggtactggaagtggaaccttttggcgattctagcgccactcgtgccacttttgctggattggaaattccttgtgaagatgttgctgagtttgaagtggttaaagccgtggaagatcagaacggacgtaaggttgagttaccactatccatttttcaggccaataatccagagctggcgaaaatgtcggtggctggggaaaaataa

SEQ ID NO: 295716 - DNA, 489 bp, Proteus mirabilis
atgaaaaaatatgtatttgtggctgcattagcctcactgtggttaatgacatcacccgcctctgccaccagccagccccctaaaaataccatttgggagtataaaggtgatggcggtaaaaccttatggcaagtgtgtggaagccaaaatagtacctgtaggattgtgggctcaaccaagcattatgttgctgtactaaatcataaatccgcatcaggttgtgcatttggtgatttttatatcgtggcaagaactgacggaaattggcaacaacgcgatacgggcacttgtagccctaacgcttatgtccaaaaaggaaccattaataatggacagtactcttcggtcgatattggtgttggcgggacgattgtagcccgttaccccattgggtattggagtatgcaaaaagagttctcaggcaagaatcgaccgcgctggaaagaaaaagaccgtactaaaggtggattgcaaacccaccaacaataa

SEQ ID NO: 295717 - DNA, 474 bp, Proteus mirabilis
atgaacaccgtttcacacttacaactgggtttagaacggatcgctatcgttatcagtatcttgttatgcctttggatcacaggggtattgctaacacatttccagcttatcgccctcatcatgaacccgtatgggatcacattgatgtacttcgttttatatcttttggctttggttatcccacaacttttggcgcaattgggcttatgggttttgagtgcctttaaagggattgattataaaatccatttcaaccccaaattaattgccattatctcgtccatcattatcggattagccctctctagcctactgagtatcatgtcatccggttggctatacggttttactgaaggtatcgccaccacgatattactggttgatttgcttatcgcaactggcactgccttttatcttcatcggcgaattcgtcactggatttcagtgcgactaaaccgtcagtcatcacattaa

SEQ ID NO: 295718 - DNA, 177 bp, Proteus mirabilis
atgacgttattaaccccaccagcatcgcatcccacacattgcccccactgttcttctgagcaagacattattgcatggggcacgggctggatgtgccgcgattgcggtcatgaatgggaaatgcccattcaaagtcaccctcacaccgtgaattcatcatcacataaggaagcttaa

SEQ ID NO: 295719 - DNA, 708 bp, Proteus mirabilis
atgtttcagaccaaccgaaaatatgaccgcatggctgtgcgactctctgcgctgattgctcgcttaatggcgggcgaaagccttgtgctctcaagtttagttcaagagttcaacgtttctgaacgcacgttacaacgggatttacgtgaacgcttggcttatctgggtgtagaaggtcggcaaggttgttatcgcttgcctatcaatacgctaaaagcttatcgagacaaagatgttcttacctttgtgaaacagattggaatgactcggttgtttccagggctagacagccgcttactcgggttactgttaacccagcagccccattcaccttgtttgatttggcatcacgcccataagatttcggctctacatgccgaccatttctatcaattggtgtatgccattaccagtaagcaatctattagcttacttacgcctgagcgtcgttttaatccactacaaccttatcaactgatttaccgtgaaggtcagtggtatttattggcggaataccaccagcaagtgcatgtcttgttgttagaggatatccagcaagttcaaccactcaatatccctttcacaccaaaacacgcagtgatgcaactgtcacaacaaaacagttttatcgctgccttaccgcattttcgattgatatcacaagtactgacctctcttccatcccacaaagaaaggagccgaccatga

SEQ ID NO: 295720 - DNA, 837 bp, Proteus mirabilis
atgagtttattagcttcgcgttttggctctgccaacagtattcgccgtgaccgtccactcaccatcgaagagttattccgtactgtaccgagtgtgttttctgaagagaagcacgattcacgcagtgaacgatatacttatattcctaccattaccttactcgatagcctgcaaaaagaaggcttttatccgttctttgcttgccagacccgtgtacgggatatcagtcgtcgagagcacaccaagcatatgttacggcttcgacgccatgaccaaattacgggaatacaagtccctgaaattattttgctcaatagccatgatggctcaagtagctatcaaatgttaccgggactctttagagccgtgtgctctaacggtttggtttgcggtgatgtgttaggtgaagtacgtgtgtcccataaaggggatgtggtgggtaaagtaattgaaggggcatatgaggtactcgatacgtttgagcaagtggctgaaaaacgcgaaagtatgcaatcattattgttacctccgcccgctcagcaagcctttgctgaagcggctttgacctaccgctttggtgaagagttccagcccgtcacacgagagcaagttctacagccccgacgcgttgaagataagaaagaagacctctggacagtgtaccaacgtctacaagaaaacctgattaaaggaggattatcaggcagaaccgcaaaaggtaaacgcgctcgcactcgttcggttaatgggattgatggtgatatcaaactcaataaagccttatgggtgatggcagataccttatttaaccaactcactccccgccaccccaactaa

SEQ ID NO: 295721 - DNA, 426 bp, Proteus mirabilis
atgaacaacacaactgaatctgctatcacaatggaaatagtcactgatgaacaacgccttgatttttggttcaaccattttggtgcagtcaaaggctgggccacctttgaagtggttatcttcaccacaatgggccaattctgcgatgagtatcatggcggttactgggagtacagctcactcaataatggcggtgcctttatctaccccgatatcaacgcagacaccttaaccctattcaacatgcacaacggcaatgaagccaccgtgagccaagaggcggcaggcattgctgtgtgtctgatcttgtacagcatctggtcattccaaacagaaagcgaagtcatgtgcgaccgcttttatcagttgcgtgactacgcttcacaacatcccgaatccgctgccattttccacttaattgattaa

SEQ ID NO: 295722 - DNA, 873 bp, Proteus mirabilis
atgaacctacaacccgaattaggaagggtgatatccgcctttcctgcttcatttaaaaatctgtttttcaaccaactcaatcacctaatcaactattcccccaccattggtctaatgggtaaaacgggtgcaggaaaatccagtcttatcaacgcattattccaatcgcccttatcgccagtgagtgatgtttcaggctgtacacggcaggctcagcgcttcagtataactatgaacaatcacacgcttacctttatagatttacccggtgtaggtgaaagtcttgagcgtgataaagagtatcaccagctctatcataacttattgccagaactggatttaatcatttgggtactcaaagcggatgacagagcatggtcttcggatgaacagtgttatcgctttctcactgagcaatgcggttatcaacctaagagatttctatttgtgctgaaccaagccgacaagatagagccctgtcgccagtgggatgaagtgtgccagcaaccatcctctgagcaagtagctaacttggaattgaagcaacaagctgtgataacagcattcaagccacaccaccctgtgatgacagtctctgcggtagaaggttttcaactcactgaattagcagagcaattaatacaggcgttaccagcgcaggccagtagcggggtagccaggcaactgaacctcccttatcgaacgcaatctgtagaaacttcggcacgtaatgattttgggcaatgcgtcagtgatatcgtcgatatgctgatagacatccttcccctacctgtcttgataaaaagcacgattggtacagtcaaaaacagcatcgtctccgtcgctaactccctgtggagcctgttcttttag

SEQ ID NO: 295723 - DNA, 939 bp, Proteus mirabilis
atgataaaaattgacgatgattacttaggttacaggcagatatatgcaatagagttttatttgttaaaaaataaaatcgtaatagatcaaaactttaatattggtcatttcactgataatagaaaaggaaagtctaatcgtgatctgttagatgaaataaaattgtatatgtcagaaagaaatacttttttaaattttgaaaattgtttgtcttgttataaagaaaatttaattgaaattggaaaaataaaatctttaaagaatgagcgaattttacttatagtaatgaactatttaatgatattttataatgaaaaactaaaagagaatgaaaataatcaccaaataatgacaatgagtagttattctccatttgaccttgatgagatgatagggagcgattctttattgaaatatgtaatttgttttattgactatatttgtatgatggtgagtaaaagcaattttgaatttttatttttggattttttaaataaaagtatgtcatatgttgataaatataaagatgtattttcatttattaataaaaccgatgattcattagattggttgattaagagaatggtgaaagaagatgtggaggtttctcgcgatatagctcttttgataaggaatgaaaaatggaaggtaattaactcttgctttgattactgggcaatcacttcaaatcctaaacacgtggattattttctttccagaacaagaaaagcatggagtcaaaagaaattccgtgatggcgttaaaggtaaagaggtattgaatacctatatatctaaagaatcaaagttaaaattaaaaaaaatagcaaagcttcataataaaaatattaatgaaattattgaagctatgattgatcaaattgacttaccagaggaaccattaaaaaagctaatattgacagctaaaaaagcaaattaa

SEQ ID NO: 295724 - DNA, 579 bp, Proteus mirabilis
atgtctagaaacacccacaacgagcattacattcagaagataaaccacactattcgtaaatcactattaacctgcaatcgtattacagctatccgcgttgacttgcgattcccatcagaaaatatattttattttagcgactccagagttatcacacgattcttcgaatccttaaaagcaaaaatagatgctgacctaaaacgtaaaaataaagcatggaaacgtaaccattcatgccccttgttttatgtatgggtcagagagtttggtgagataaacaacaaaaagcattaccatgtccttttgctattaaataaagatatttattggaacctaggtgatttcatcaaaactgaaggaacactctatgcattaatacagcaggcatggtgtagtgctattggtgtgaatgagcgttatttagttcatatcccagataacgccgttacttggctagataacaataatgccaacaatgaaagttcgatattcgaattaaaccaacgctgtcgttacttagccaaagagcatacaaaatattatgatgatggcgagcattcttttggatgcagccgttaa

SEQ ID NO: 295725 - DNA, 210 bp, Proteus mirabilis
atgagcactcaagcgcttcccttattagatgaccaatgcgttgatatgaaatttataacccgtttaaccggactaacagataaatggttttataaattgatccaagatggtgaatttccaaagccgataaaactgggacgtagctctcgctggttaaagagcgaggttgaagattggctacaggcacgtattgccgaatccagagcataa

SEQ ID NO: 295726 - DNA, 1086 bp, Proteus mirabilis
atggctaattttgataccgaatattgttattcctttcctgctgtaaggggaattcaggcaggacgagctttttatattgcaacatgccctatgagaatcatccctaaaatctttagttttgacgaaagtgaagtaccgccagaactaagagcacaaagaatattaaacaaagctcgtataccagaaatggtgaggtacttactcgataatcctaaagattatgttttttctgctttaacagcttcaatagccgttgacgtacaatttgaagaacattctggttctaacaatttggggacattgcgtgttcctatggaggctcagattttaatcaatgacgggcagcatcgacgtaaagcaatagaagatgctctagaagaaaaacctgaattagggcaagataatatacctgtccttttctttgttgatgaggggctcaaacgcagccaacaaatgtttgctgatttaaacaaatatgctattcgccctagcccttcactttcaaccctttatgaccatagagatgctagctcaagtttggctaggtatttagctatgtctatagaaccatttatagacctaacagagctagaaaaatcaagcataagtattttatcaaacaaactttttactctaagtagcattaagcaagctactaaagctttacttggtaggcaccccagaaaagaagatatagaagagagtatgctacttgctagttcatactggaaacaaatttttcttgctatgcctgactggcaactcgcggcaaaaaaagaagtatctccagcacatctacgtcaagaatacgtacacgctcatggtattggcttacaagccctaggtctattaggaaatactttactaaaagagtaccctgatgaatggcaagaaaaactcttaaatttgaagaactttaactggaaaaaaagtaatcctgagcttattaaaagagcaatgttacatgggaaattaagcaaatctaatactgcaattcaattaacttgtaatgcactaaaatcagctttatcgctccctcttactgttgaagaacaagaaattgaaagccagttggtaacaccatga

SEQ ID NO: 295727 - DNA, 1635 bp, Proteus mirabilis
atgaataaactagtacaagattatgatttggcagactatgtagattatataaatactgaacagtttgctggtaattcattatcaacatatatatcagaagtacagcgcatatattgcacagataatcgcccttgggtcattggctatagcggaggaaaagactcttctgctgtcattactcttgtatatctagcattgctgggtcttcctccaaaaatgcgcactaaagatatatttgtagtttcctcagatacattagttgaaacccctgttgttgtagatttaataaaaaaaacgatggaacaaattgagagaggagccaaacgcgatcatttaccaataactcagcattctgttacccctaaaactaatgaaacattctgggttaatctcctaggtaaaggctatccagcaccaacacgaagctttcgctggtgcactgaaaggatgaaaattaatcctgtcagtgaatttattaaagataaagtatctcaatttgaagaggttattgttgttttaggttctcgtagtagtgaaagttcctctcgtgctcaagtcattgcaaaacataagattgatggctcacgactagcgagacatacaactctagctaatgcctttatttatactcctattgatacatgggatgttgatgatgtatggaaactattaagaggagcatttcgctacgctcccgaagatatagaagagtgggaatcaccatgggggggaaataatcgcccactttggactttatatatggattcatctgctcagggagagtgtcctttagtgatcgatgatagtaccccatcatgcggtaattcacgctttggctgttggacctgtaccgttgtcactaaagataaagcgatggaaagcttgatcaaaaacggtgaagaatggatgtctccattactaaaatatcgtgatcttttagcatttactacggaccctctaaacaaagatactttccgtaactataagcgtcgctctggtaaagtgagttatcagtatgcaaaagatggtgaggagcttactactgaacgcaaacatgttcctgggccatactggcttaaataccgccagcaatggctaaaagaattactcacaattgaacgtgacatgaatgctcaaggccacgaaattacattaattactaagcctgagttacatgctatccgtcaagaatggcttaaagacccgaacgagccggattggtacgatactttaccggatatttatcatgacgtttatggggaagaccttagttgggtaatcgatgaccagtcacgtttcaatgccagtgatgcagaacttcttgagcagctggctcttgggtttgatgtggctccagaaatggtcatgaaactcattgaattagaggtttctatggaaggattaagtcgccgccaaggtatcttcgataaacttggcgccatattgaaacaagactggggcagtcttgaagaaataaaacaacaacaagaaactttacaaaagcgtaatgaccgagatattcatcacgaagaaattgcaaaattggaagttgaactgcaagtgttacagcgtagaattgccgatgtaagcgagtcaattatacttaccagtgaggaaaataattgtgttaattaa

SEQ ID NO: 295728 - DNA, 2001 bp, Proteus mirabilis
gtgttaattaaacagctggtactgcataactttcgggttttcaacggaacccacactatcgatcttacccctaaaaaacgtcaaaatgattctaatcctcgtccaatcatcttatttggaggattaaatggtgcagggaaaacatcgatattgtcggcaattcggctagctttgtatggaaggcttgcatttggttctacaactcagcagcaagaatacattaaagaacttagcactctggtccataacggttcatcttcaggtgagcaacccaatgaagcatcaatagagctaattttcacatacaacaagggaggacaagagacagagttcacagttatccgtacttggcaaaaagaaaaacgagataaacttttacttcagcaagatggaaaaattattcaaggactgaactacgaccagtgccaaggatttctgaatgaattgataccgcctggaattgctgatctatttttctttgatggtgaaaaaattgcagagcttgctgaagatgaatctggcactattctacgtaccgcggtacgtcgcttgttaggtttagatcttatagaaaaacttcgtaatgatttaatgatcttcgttaagcggcaacaatcaagtcagttggcagagccccagcagcggaatatctctgttctcgaacgaaatatgaaagaattcgctttcaagaccgaacaaatccttgaaaaagctgattatgtaaaatcacgtatcgagcttatctcaaaagaaataatacagcatgagtcacttcttagtgcacaaggtggtgcttttgctcgaactaaagcccaagaaatacagaaagttgaaacacttataaaagagaaagatcgtctggaaaaggctcttcgacatgaatgtgataattctttgccttatgcccttgctccaaaaacactcagtcgtttgcttgagcaaattaacgttgaaatgcaaataaaacaggcaaatagctttgaaaaggaattaaatcaattcctgagcgagctcaaacaagatatatctttccgttcaagtactacggggaaaattgcagccgaagcaatagaggataatttacagaaataccttgctagtaaacctaaaggtgaactgctgtttgatatctcggagcgtgaggtgggaatgattcaacaatcaatcgaacaagatagcaagaatgcttggaaacgttttgatatgtaccgtaatcagttagctgaagtcgaagagctgcaggaacaagcaaccaccaatattgcccgcgcaccagatgatgatcaattatttgatttatttgaaaaaatacgcaatttagatcgtaaacgtgaagctaagcgtcaggagtacatagcattactggaagaagccagacatgtaaaacgtcaacagttagatagtgctcgccagatacaaaaagtacatgatacagcacgtagccagcataaccatagtagtgcatttaaaaatgctaatgagaccatcaagttacttgatcgctacgccgagctgttaactaaggcaagagtaaaaactcttacaactaattttgaaattgcttatcatagacttgcccgtaaagaagatttacagcttaatgcacatataaatccagaaacattcgatgtagaattaatcgatgaagctggtacattaatcaaccgtaagcttctctctgcgggagaaaaacagatctacgcaattgctatccttgaagctctagctaaaacctctggacgtgatttaccggtgattattgacacaccattagggcgtttagactctcagcacagagataaactaattaattattactttccatatgccagccatcaagtcattatattatcaacggatacagaagtagataaacactactttatcgatcagttacgtgatgatatatcccacgcatatgagatcgtctttaatgcatatactaaatcatcaacactaaaacctggttatttctggaaattagccaaagaggtaatttga

SEQ ID NO: 295729 - DNA, 357 bp, Proteus mirabilis
atgctccctaatagaatgcaactcagccgttctactgaagaacaattaaaaaaactcaaaggatatacaggtattacacctaatattgcagctcgtttagcattttttcgttccgttgaaagtggatttcgttatttaccagagaaagatcataaaaaattagatggtttgttagtgctggataaaatcacatggttgggagataccttacaaataacagagttactactaaaaggactttatccggaaattgatgatcagaagatactaataaaggcatggagtgcacatgttgaagatggtattgcgtcattacgaaaccatcgaaacttaaaagacttttgtttatctttatag

SEQ ID NO: 295730 - DNA, 501 bp, Proteus mirabilis
atgagtaagaaaaatctcggtagtgttgcccctaaagaaaggattaatattaaatatacgccaaatactggcggagctcaggctgaagtcgaacttccattgaatatgttgattgttggggatatgaaaggtaaaacggaagagacccccattgaagatcgcaaagcgatttcagtcaatcaaaacaacttcaattctgttatggaaagtgctggcattaatttaaatattaatgttcgcaataccttagaagaaagcagtgattcagagcttaatgttaaccttgatgtgaaatctttacaggatttctctcctgatagtatcgctcgccaagtgcccgaattaaataaacttctcgaattgcgtgaagctttagttgcattaaaaggtcctctaggcaatgtcccagcttttagaaagcgtcttcaagaactacttgaaaatcaagaaactcgcgaacagcttctaaaagagctcgatattgctgctaatcaaaaataa

SEQ ID NO: 295731 - DNA, 1479 bp, Proteus mirabilis
atgtcactaaatgcagaagctcaagagcaacaagcccccgcatctacaggctctttgcttgatgaaattatggctcaatcacgtatgtctccagaaacagaagcatacgatattgccaaacaaggtgttgctgcttttattagtaatattttcgccagtgaatctgaagaccaacagatcaatcgattattaatcgataaaatgcttgttgaacttgataataaactaagtactcaagttgacgaaattcttcacgcgcctaaatttcaagaaattgaagcttcgtggcgttctttaaaattactcgttgatcgcactgattttagagaaaatattaagatcaatattcttcatgcaactaaagaagagttattagaagattttgaattttctccagaaattgttcaatcaggcttctatcaacacgtctactcttcaggatacggccaatttggtggtgaacctgttgcaacagttattggtaactacgcctttaacaatactgcgccagatatgaagttaatgcagtatgttagtactgttggtgcaatggcacacgcgccattcctatcatctgtttcacctaatttctttggtattaatagctacgctgaactgccggcaattaaagatctaaaatctgtttttgaaggccctgcacacactaaatggcgctcactgcgtgaagcagaagattcccgttatttaggattaacagcaccgcgtttcttattacgtttgccatactctccaacagaaaaccctgtaaaaatgtttaactattcagaaaatgttaaacaagaccatgagcactatttatggggtaataccgcattcttattagcaagctgtattaatgatagttttgcaaaatatcgttggtgtccaaacattattggcccacaaagtggcggtacagttaatgatcttcctgtgcatatttttgaagcgatgggtgaattacaaactaagatcccaactgaagttttagtcaccgatcgtagagaatttgaactagcagaagaaggctttatcacgctgaccatgcgtaaaggcagtgataatgctgcattcttctcagcaaactcagttcaaaaaccaaaagtcttcccaaatactcctgaaggcaaattggcagagactaactataagttaggaactcaattgccatacatgtttattatcaatcgcttagctcattatataaaagtattgcaacgtgaacagattggctcatggaaagagcgtcaagatctggagcgtgaactcaatatttggcttaagcaatatgtcgcagatcaagaaaacccaccagcagatgttcgtagtaaacgtccattgcgttcagctgaaatcaaagtacttgatgttgatggcgatccaggttggtaccaagtcgctattcaagttcgcccacattttaaatatatgggtgcaaactttgaattatcacttgttggtcgtcttgataaagagtaa

SEQ ID NO: 295732 - DNA, 1776 bp, Proteus mirabilis
atgtcatcaaaatcctactttaccaatgaatcagaatacttaaatgagctgactgagcaagttgccaaagaaaaaccgcaacttgttaatttgctttcgcacaatgttaaagatcctgatacttcgcggattatggatgggctatcttatttatcgggtaatttacgccagcaaatagatagacaatttcctgagttaactaacagtttagccaatatgctttggccaaactacgcgcgccctgtgccaagcatgacgattgttgaatatcatcctaattatgctcagtgccaacacgcaacaaaaatttcagcaggacaaccttttagtgccactccactttatgtgcaaagtgaggaaacaaaccacgagacgttatttcaatgtcgatttagtcaaagtcgcgacctctggttaatgccgacaaaaatcagtaacattttgcagcaaacaaccgccattgaaataacatttgagttagcaacaaaacagccacttgccaatattggcttagataaattgtgtttttacttaaatggtgcgccatttactacaaatcagctctattttttattaagccagcatgtgcagagtgcctctttagtcacagatgtacatacgctacctcttactcacttttcagttacgcctgttggttttcaaaagcaggatgccttacttccatacccgaaaaatagctatgatggctatcgtatactgcaagagtttttctgttttcctgaagcctttctctttctagatattcatggtttggatgacattcctttggctatcgaagcagagcaattcaaactggtgatcaattttgatctagaaattcctgatggcgttattctttacgacgacagtattaaacttaattgcacccctattgtgaatttatttcctattgatagtgaagcaataaatttgacggggaaaagtgaggagtatgttttaagtcctaattaccaacttactgaatgttttgatattttttcgattaatgaggttagagggttacgttatcctaatgatgctaaaccttatccgatcacctatacagcatttgaaagtttttatcatcaaaaccatcaaactcaaaatcatggctattaccgtttaaagataagtcaaaatgaacagttatacggctattcccatcgactttcttttgttcgtcagcaagagcctcagttacaacagtgtgaagaaaccgtttctgttgcactcaactgtactaaccgctatatcgcttcccagttatcgacgcgttctatcgatttagatagtgcatcaattccttatggggctttatctgctaagaatttattcgcaccaacactgcctttatatccattattagataaaacattatattggtctgaattaactaatttatctttaaattatcagtctttgctcaatcttgattcattaaaaaaaatattacaactctatgatttaccgtctgtttataacacacaggttgcaaggcaatcacaaaaacgcctagatgcattagttgatttacattcagagcatattgagcatatctacaaagggcttcctgttcgtggtctgaagacaactttagttgttcatcaaaatgcgtttctttccgaaggaagtttattcctattttgtaccgttatcgctcaatttttcaccttatataccagcattaatatgtttcatgagttggaagttattaaccttgataataaggaagtttatcgatggccagcacaaatcaaccagcacatactgaagtaa

SEQ ID NO: 295733 - DNA, 1038 bp, Proteus mirabilis
atggccagcacaaatcaaccagcacatactgaagtaatcgatcgttggctggaacaagctggctcatcggtaacagagtataatttttatcaactcgttgaattgttaaataaaataattcatcaagatgtcaactcgatggaggatgacagcggtattcttcgctttaaatcttattcaaatattgcatttccgacgcgagatgtcatttccattgaaaaaaataatgtcgaacaatatgaattagaagtcgcttttttaggcttacaaggaagtcagtcccccctaccaggctattatctggatgagtttgcttgggaagatgcacaacagatagaaggtatctccgcttttctcgatatcttcaatcatcgtctgatagcgttactttatcggatctggcgcaaatatcgttactacatttgctttgaaaatgaaggtcaggattcattttcacaatatatgttttctctcgttggattaggcaatggagctaatcgcggtcggatcaaaatcaaccatagcaaaatgctcgcttatgctggtcttttggcgagtccaagtcgctcttctgatgtgattagtagtcttatatctcactgtttcgacttagaaaatgtaaaagtaattggttgggagacacgccgtgttcctattcctgaatcacaacaaaacaagttaggtacgatttctcatcaatccggacaaaaatctcgcccacgaatgttattaggggagaattttagtctgggctcacacatatatgactgcaatggaaaatgcaccatcgaaatcagtgaattaagtttagaacgctatatgcgttttttacctaatggcagtgatttcgcaccattagttgcctttgtttcttacatttttcatgagcaattagcttgggatttacgtcttagcattgctgaaaagcaagccgaagggttccgtttgggtcaccaacaacacaaccaattaggctggcaaagctttttaggtcaacccgcaaagaaaccggatgtcaccattacggtattggaataa

SEQ ID NO: 295734 - DNA, 1269 bp, Proteus mirabilis
atggataaatatcagccaacaatttcttttagcatcaaaaatagtgaacagctagaaagtggttatctgccaaatgcgactttaactcaaagtggcggacagattggtagtggcaatcaatgtgactggaaaatccaagataatgaaggtgctattgccgatcggcaatgtacggtgttttggaaagatcaacacttttgcttaaaagtaaattcaggtcctgtttacattaataatgcgattattccattgcatcttgatgccgttagactgacccaaggtgatcagataaaggtgggtaaattaattattgccaccaatattagtcttaccggagagccagtacaaaatatgatggcgatgacgcctcagtctattatcgcaaaagatcataatccgctagattcattatttgatgttgatacaacagtcaaaaatgagcggaaagagcctccgtttgtaccaaccgttcagggggcattaacaacagacccactacaggctttagaaaacgaaaatctaagcttaatttctaaaaacacacaagctacttcagacgatcctttattgagtgacccccactcgtattcatctgcctttccgacatcagataatcaagagaatactatggtccaagaatttattgatttacctaaaatcacacctaatgaaaacgaacatatgaccgatgtcgatcatgtggcggttaaccctctgatgaagggattaggtatccaccttaatttaacaaatacacagcatgctaatgattttcttgttgaactgggtaaaaccgtcaaagcggctattgaaggtttactgattttgcaacaacaacaagaaagcttacaagataagcaattacgcccaattgaagataatcctctacgtcttaatagtggctatgaagagacaatgaagttgatgtttaccgatgaacgtagccctgtacatctttcagcaccagcggcagtaacagaaagcttgcacaacatccaattgcattatcaagcgaatcaagaagctatttcaaccgcactatcaaccatgttggcagcattctctcctgaacatttattaaaccgcttttctcagtatcgacgagcttcagataacacaccaatgaatgatggctgggcttgggaaatgtacaacaactattacaaagaactctcttcatctcggcaacagggttttgaaaaattattctatgaagtatacagccacgcttatgacagagcgctgagaaaaggaatagaggaagcttaa

SEQ ID NO: 295735 - DNA, 552 bp, Proteus mirabilis
atgcagcttagaactttctcaatattactgttatttagctcttttttaatattgagtggatgtagtaaaccttttgaagccgcgggtaaaatggggaaaatcttattagatccctcaactcctgttgggcaaccgaaagatcagccctctaccgttgcattaaccatccttgcggagccctatattaatcctaatcaggaaggtgaagctgcgctgataaatatccaagttgtttatcttaacgaagattcagtatttggctctgttgatcatgatcagatagatgcaaaagagggtgatttagagaaagttctaaagaaaaattatattgaccatcaagactacaccattttacctggccaatataaacccttccctactatgacgttagacccatctaaccgctacattggcattattgcctattactcagatcctgataaagcagaatggaagaaaatagtcaaagcgcgtggtaaaggacgccactacttcctattagtgcacattagggaaaatgaaatcgaatttagacaagaagaggatgattaa

SEQ ID NO: 295736 - DNA, 1359 bp, Proteus mirabilis
atgtcaactaaaaatagagtgatctggcgtgaagggctatttatcaaacctcaacattttcagcaacaacaacgtcatcaagattatatgacggtgagtattttaaataactttttttcacacttttggggatttagtaccttaaaattgagtgacgatttatatgctttaggtcgtattggtattaaagaagcttctggtgttatgccagacggcaccattttctctataccaaaccaagatttactaccacagcctattgatataacgaatattactgatagtgacagcagtattatttatctggcttttcctttaatgaacgagaatgtcagtgaaatttccactgaacataacggtagtcgtttactttctcgctacagcgaaagcaccgaaaatattcgtgatttacatactgaaaatggtgatatcagtgctattcatgttgcacagctcacaccaatactcaaacaaggtaaacatggtttagatgcctatgttgctttacctatctgtcgtattagagagcgtaatgctaatggtaatttaacgctggataatgattatattcccagcctattaaatatccgtgcctcaacattattgagccaatttctcaccgagcttgaaggaacgctgtatgaaagaggaaaacaaattgcctctcgcattggtgccccgggtcagcaaggtgttgcggatgtggcagaatttatgatgctacaagtgcttaatcgcacttatccactctattcgcattatgctcaagagccggtgatccatcctgaaaaactatttcgagatttattagagctttgtggtgaactacaaacattcacgaatacttcacgtttgcctgaaaatattgccaaatatcaacatgctaaattaacagaaagttatattccattaatagccagtatccgcgaagcactcagtgttgtcttaacaccaagagcgatcccaatcccgctacaaattcaagagcatggtattcgtgtagcaaccattcatgacaaacaactactacaacgtgctgaatttattattgcggtgaaatcacaaatgccgcaagagcaactacgtcgccaattcccacaacaaactaaggtgacaacaatcaataacattcgcagcttggttagtgtgcaaataccgggtgttcctttatcaccactttcggctgcaccaagacaattaccttatcactcgggatataactatttccattttgatcaacaaggcaatgaatggaaagggatccagcaggatggcaacatcgcattccacgtttcaggaaacttccccgatcttgatattcagttatgggcaataagagatggagcactctatgactga

SEQ ID NO: 295737 - DNA, 756 bp, Proteus mirabilis
atgactgatgatattttactgaatcatgatgatgaagagcgcattacaaagaaaaattaccaactgccactaagaggaaacaacatcaatccaatgatagatgctgctacacctttattaggcatggtattgcgcatgaaagcgatgtctgaaaccccactttcagaaaagctgtaccaacaagttgtcatggatattacctctattgagcaacaattacagatccaaggttacgagccaggtgccattgtttcatttcgttatgtgctatgtacttttattgatgaaaccgcccttggattaggctgggatcaagataatggttgggtaaaacaatcattactggttcattttcataatgaatcatggggtggtgaaaaagtctttgtcttaattgaaagattattaggtgaacctaaacgttacctcgatctgattgaatttatctacctttgtttatgcctaggataccgcgggcgctacaaagtctctgcgggacaaaatgatgaatttaatcatttattaagacgcttacaaaaacagatccaacagctaagaggtaacgctaagccaatagttctatttgaaaaaggtgataaccaacaaagccgttatcgtttaggtaagcgtttaggggctcgctatattctcataggtacagcggtattcgcgttgattatttatagcatttattcatccagactgaattatcaaacactcagtattgtggaacaacttaatactttacttggctag

SEQ ID NO: 295738 - DNA, 2724 bp, Proteus mirabilis
atgatccaaattgatctctctactctcgttaatcgattacacccaatagctaagcatgccttagaaagtgcagccgcttactgtgtaagccaccagcaacctgaaattacgattgctcagtttctacaaaaactgatagaaacgccattaactgacattcgtatgatcagtcaaaaaagcgcattagatattaatgcgttatcagagttattagatatcgacattccgccacatcaagttattacacaaagttatcctagtttttcacccttattagtcgaatggatgaaagatagctggctattagcgtcaactgagctaaatcacagtgaacttcgctctggtgcattgtttttaactttactacaaatgcctttgcgttatcttgcgaaacctgttgccgatatgcttgcgcagattaaccgcgaccaattaaaactcaattttgatcaatggactgaaggctctgctgaatcgccttttgacgaaaaaacagtatcagaaaaaggtaaccttgccgctgattcattgttagcgaaatttactcataacatgactgaacaagcgcgaaatggtgagttagatccggtcttatgtcgcgataatgaaatcgacttaatgattgatattctgtgccgtcgccgtaaaaacaatcctgtagtagtcggagagcccggtgtgggtaaaagtgcgttaattgaaggactagcactacgtattattgccggagatattcctgataaattaaggggttgtgaacttcttactcttgatttaggcgcattacaagcaggtgctgcagtcaaaggcgaatttgaaaaacgctttaaaggcattatgcaagaagtcactcaatctcctcaccctatcattctatttattgatgaagcacacaccctcattggtgcaggtaaccagcaaggtggcttagatgtttctaatttattaaaaccggctttggcgcgtggagagctacgaactatcgcagcaacgacttggagcgaatacaaaaaatattttgaaaaagatgccgcattagcgcgccgtttccaattagtgcaagtcaaagagccatcatctgcagaagccattatcattatgcgtggcttacgtagtatctatgaaaaatcccaccatgtctttattgatgatgaagcactacgagccagtgctgaattaagtgaacgttatatctctggacgtcaattaccagacaaagccattgatgtattagatacagcctgtgcaagagccgcgattaatctatcttcgccaccaaaggcattatcctctttgaaaacagaactccatcaaatcaatatggaaatggatgtattacaaagagaacactatttaggtttagatgatcattctgagcgtcttgaaacgttagcctcacaagcaagtgctattgaacaacaagcaactgatttacagcaagcatgggagcaacaaaaagagcttgtatctcaaattattaccttacgagcaacattacttaataatgctaccgaagcgactaatgacgatgtcgcaaatgatgttgcaaataatgaagtggtaagtgatataagaacttatagtgaagcagaagatgctgaagataatgctgaagataatgatgaaaaaatagcaacacagcccccctgctcatctgaagaattaaagcaacagttacaacaattagataaacaacttgctcagttacacgacacgcatttactggtttcgcctcacgtcgataaaaaacaaattgcggcggtaattgctgaatggaccggagtaccattaaatcgattatcacaagatgcattatcaattgtcactgagttgcctacctacttggaagagagtatcaaaggccaatcattagccattcaatgtttacacaaacatttacttacagcgcgggctgatttacgtcgaccgggtcgaccgctgggggcgttcttattagcaggtcctagtggcgtgggtaaaacagaaacggttatccaaattgcccaattaatgttcggtggcacacaatatctcacgactattaatatgtctgagtttcaagaaaaacatactgtttctcgccttattggttcacctcccggttatgtgggatatggtgaaggagggatcttaacagaagctattcgtaaaagaccttactcagttgttttactcgacgaagtagagaaagcgcatcctgatgtgctaaatctattttatcaagcttttgataaaggagagatagccgatggagaaggacgagtcattgattgtaaaaatatcgcatttttcctcacctctaatttaggtgaccatgtcattactgcttacgcggataaaccggacgaactagaagatgcactctacccagaattaacaactttctttaaaccggcattacttgctcgaatggaagtgatcccttatttaccgttgcctgcagaggttttacgacaaattgttgatggcaaattagctcgtcttattaacctgttaaaacagcgtttcaacgcagaaatcaatgtagaagagagtgttgctacggaaattttacgcagagcttctcgtgctgaaaatggtgcgcgtattttggaatctattattgatggtgcgttattgccgcctctttctttattacttctacaatatagtgcacgtaatgaagctatctctcatatccgcttagcgactgaaaatgatgagtttattgcggaggttaattaa

SEQ ID NO: 295739 - DNA, 789 bp, Proteus mirabilis
atgaaagcgagactaaaaaatgcgcttgcactactagaatgtcatgatgtagagacgctagctgttcaatttctaaaatatagcttttttcgtagctcactgagtgggttaattatttcgttaatgaataaagctgaaaataaattggaaagttggaatatcgacttaacgcttcaagtgcaaagccattttttagataccgatattaccgatgcagatcaccctttaattcaactgctatttaagggtgaacctgtattttggcaaaacttacaacaaggtagttatattaataatgctgctatgcgcggttttatttcacagcttccggtgaacactggattgtatagtttgcctatctatgatgttaaccataaagcatgtggcacgattattcttttagggcaagctgaagagctagaaaatatcgagcaaggtatttttcctatttattgtgaactatttaatcatcaattaaagcatctttttgaattatcaaatatgcaacaaaaaatctcttacttgcaatatatcaatcaattacaaagggaaaaagaaaccacgcttaatgaaacgttagataaattaaccgcatctgtagcgactattgcacttcctaccatacaaatcaaaggagttaatgatttagaagttgctatagaaaattatgaaaaagaaattttattagataaacagcaagaattgaaaggagatattaacgccatggcagaacagcttagtatttctaaacgagcgttaatatataaattgaagaaatacggagtataa

SEQ ID NO: 295740 - DNA, 1785 bp, Proteus mirabilis
atgttgcctgatagcatgagaggatttgcacctacgataaagggtattgcgaatagcaatgctattgttacagtcaagcagaatggttttgttatttatcaaatttctgtacctccaggtgcatttgaaataaaagatctctatgccacatcaagtagcggtaatttagatgtcacaatcaaagagaataacggtaaaattacacaatttgttgtaccttattcaaatgtgcctattttacaacgtgaaggacgcttaaaatacgaattgattggaggggaatttcgtagcggagcagattatcaagataaacctaattttggtcaattaagtttagtatatggcttaccttataatatgacgttatatggaggaagccaattttcaaataattatcaagcctatgcgattggtttaggtggtaatctaggcacctttggggcgatatcagcagatgtaatacaggcgaatagtatattgccaaacgatgagcataaaaaagggcagtcattccgattactttatgctaaatcgattaatagcacaggcactaactttcaaataatggggtatcgatattcaacgcaaggctattataccctaaatgaagttagttataaaaaaatggcagggcgtgaaatagtaacagataatggaataataagagatgaggataacttatctaactactataatttaaattattctaaaaaagggaggtttcaacttaatataaatcagcaaattaccaataatagttctttgtatattttaggctcttaccaaaactattggcgcacaactgaaactgaacagttatggcaactgggttataatgctaatattgataggataaattatagtcttagtttatcgaaattaaaatcaccgggtatgcgtggtgataataaaaatgtagcttttaatatatcaattcctcttaatgatgtatttaaccaacaaactgtaagtgacttacattcaagtagaaatagtatgtatgctgtttactcaatgaatagaagcgatgacaatgtttgggtcaatcaagtgggactaacaggaactctccttgaagacaataatttaaattataatattcaacaaggatatacgcataatggttctggttattcaggaatggtttatgctaattataaaggtaaatatgctaatataggtagcggatataattatagtaatgattggcatgagtttaattatagtttaaatggtggtgttgttgctcatgcaggaggtattactttaactcaacctttaggggataccaatattcttattaaagcaaatgatgctaataatattaaagtagaaaatgcaaatggtatattaactgataataatggttatgctgtcttaccgtttgcttcaacatataaaaataatcgagtttcattagatgttaattcattagaagaaaatattgaattagaaaatacgattattaatgtagttcctactaaaggggcattggttgaagctaattttaaaacgaatattggctatcgagcaatggttacattaagcaaaaaagatggcgctattatacctttcggtgcgatggttgttgatgaagagcgttccgtaagtggtattgttggcgataatgggaatgtttttatctctggtttagcacctgttggtaggctaaaagcaaaatggggaaaaatggctgatcaacaatgtatatttgattaccaaattaatgagaagtcatcaaaagaaaaaggtatctattttatttcttccacatgccaatattaa

SEQ ID NO: 295741 - DNA, 996 bp, Proteus mirabilis
atgattagaatagtattgtttacaataatagccattatttcaaataatgcagtcgctgtgagctgtgtcagtggttgtaatgcgaatgaatattccacgcttagtggacaactatcaaagacggaaaataaagtcggtgttactaaagatgcttctgatattactttgtccaatcgaattacattaagatggaatgcggggcaagcgcaaacatgggcgacatattccaatggtaatattcctagtgcaaataccagcaataatgactggatttattctaagatagatgactatatttctgttgcgttaagaatgactaataattgtagaacaatttatgtcccttataatgtacctacgctaagctctacttgtggtgcccgtacttatactgaaaacgaagaaagcgtcgtttctgtaagaaagtatcaaaccagaataaaaattgacaaggctattatttctggtacctatgtaaaaaatatttttgtaggcgaatttggtttttgccaaccacagaattgtgcgactaaacaaactatcattacaaagctatttttaaatctttcaatgacagttccacaatcttgcgttattaattcagggcaagtgttgaatattgattttgacaatattcctgcatcaagttttaaagtagcagggaaaaaagccgaaggagttaatacggtttctagaaacttaagtattcaatgtgacaatatagatgccagtgctgatttaacaatgcgattacaagcagattcagttcaaggtaatgctattgtttctaataataaaagtgttggctttgtggttgctaattcaagtggatctgaattaacacctaatgatttatcaagttttattcctttcagactcaaccaaaatgctgatgctaatgtcacgattaatgtttatcccgtaagtattgatggaaaaacaccaactgaaggcgctgtcacatcaagtggctttctaagagttgatttcccttaa

SEQ ID NO: 295742 - DNA, 558 bp, Proteus mirabilis
atgaatgagttattacatactagaaaaataatgcgctttctattatggggaatgctactttttagcggatatacagtattttttactaaagatgcaacagcagaattagctaatacaaatattgttataaaagcgaacattgtggcaaatacttgtagagtcagccctgattcgctaaataaatttgttgacttaggggtttggggaacaaaagattttcagcaaaaaaatacaacagagccagtaaagtttacacttaacttaactgattgcagtattgttactagcggtgtaaaagtaatgtttagtggtgatactgacagtaaggatagtaccttgtttaagttggcagaaaaaaatgcggctcaaaatataggtattgctattttagataaaaatcagaataaaatattaccgggaaaaagtagtatgatttaccctgtagagacaactaataatatttctctcgatttttatgcgcaatatatcgcaactaataaggacgtagttgggggaagtgcaaatggtgaagtattattttctttagaatatctgtaa

SEQ ID NO: 295743 - DNA, 1155 bp, Proteus mirabilis
  misc_feature (643)..(652): n is a, c, g, or t
atgaatcgtcgttcatttttaacatcatcaagcttagtgatcgggggactttcattaagttcgtttgttagcgctgcctatgccgcagaaacttcaaaccctaaacagctatttaatgcagaaaatcctttgctgttaaactttaatgaaaactcgctaggcatgtcatccaatgccaaacaggcgattattgatgcacttccccatgcttttcgctatccagatgatgcgcgaagcgcacttatcagtgcattaggtgaagaatttaagctatcagacaaacatatcactctaggtaatggctcctctgaaaccatacaagcagccgtacaatatgtggcgaataaagcgcaaaaagcaggtaaaacagtacaactgattgtgcctgatccaacgtttaattatgccgaactttatgctgaacctttaggtgttaatatcgtaaaagtgccggttgataacacattggcttttgatttaaccgccatgcagaaaaaagcacaagcatttgatggtattagcatggtatatctgtgcaatcctaataacccaaccgcaatgctgacaccaacagcggcattaacaaattggatcacctcagcaaaagaaaatgtcttttttattattgatgaagcttacgctnnnnnnnnnncacctgaatttaccagtgcgatagcattagttgctcaaggttataaaaacttgattgttacccgtacattttcaaaaatttatgcattagctggattaagggtaggctatggtgtggcagtccctgaggtaattagtgaagtagatagtttcgtttctattgataataccaatactgccggtgctgttagcgcattagcctcgttaaaagatcacgcttttgtggcatatagtcgcaagtcaattgatgtatcacgacaaatggtggttgatactttaaacgccttaaatatcgagtatgcaccttctcacgccaactttatttttcataaagtcaaaggtgatgtgaaaacttatcaagagagaatgaaagcagcaaatattatggtaggacgtgagtttcctcccgcattaggttggagccgtttgaccttaggaacccctgaggagatgagttattttgtcgcgacgttaaaagagtttagaactaaaggatggatataa

SEQ ID NO: 295744 - DNA, 123 bp, Proteus mirabilis
atggactacaccaaggagcaagtgatcagtgatattctcgaccaatatgaaaaacacttaaactttattcacttaagtcgtgaagcgcccggtgcaacattaacatttccagaatcaaattaa

SEQ ID NO: 295745 - DNA, 1878 bp, Proteus mirabilis
atgacaactcttaatagctcaaaaaaaccacagaaagacaagctcaattctgttgtttttttcgcttccgcaacgctgattttagcgttctcttttttcactattttaatgacagataccgccaatgcgtggatcattaaaacactaggttgggtatcaaaaacctttggttggtactatttattagcggcaactttgtacattgttttcgttattttcgttgccacatctcgctttggtaatattaaattaggcccagaacaatcaaagcctgaatttagtgtattaagctggtctgctatgttgtttgccgcggggatcgggattgacttaatgtttttctcagtcgctgagcctattacccaatatatgctaccgcctactggcgaaggtgaaacaatagaagcagcccgtcagtcgatggtgtggacattattccactatggcctgacgggctggtctatgtatgcactgattggtattgcactcgggtattttagttatcgttataatttacccttgaccatccgctctgcactttatcctatctttggtaatcgtatttatggtcccatcggtcatactgtcgatattgctgccgtattgggtactatttttggtattgccaccaccttaggtattggcgtagtacaacttaattatgggttgaaagttctcttcgatttaccgcaagggttaggtgtacaaggtggtttaattctactttccgtaattatggcggtgatctcagccacatcaggcgtcaataaaggcatacgtattctttcagaattaaatgtattactcgctttagggttaattttatttatcctatttgctggtgatactgaatttttattaaatgcgttagtacttaatgtcggtgattatgtaaatcgattcttaggaatgacactaaatagctttgcttttgatagaccgacggattggatgaatagctggacacttttcttctgggcttggtgggttgcttggtcaccttttgtgggcttatttttagcacgtatctcaagggggagaactatccgtcaattcgttataggcaccttaatcatcccttttgtattcacgctattatggttgtctatctttggtaatagtgcactttatgaagtgatccacggtaatcaaacctttgctgaaacagtattagcctcaccagaaaaaggcttttattctctacttgaactctatccgggatttggtttaaccgcttccgtagcgactattacaggattacttttctatgtaacctcggcagactccggttcattagttttaggtaatttcacttctcaactgagtgatataaataatgatgccccaaattggctgcgcatattctggtctatcgctattggtctattaacattaggtatgttaatggcagacggggtttctgctttgcaaaataccacggttattatgggattaccttttagctttgttattttctttattatggcaggactatataagtcattaaaagtagaagattttagacgcgtcagttcattaaacaccaatgcgccagcacctctttatggtaacaccaccatgaactggaaacagcgtctaggtcgagtgatgaatttcccaggtactacctatacccaacggatgttagatttagtttgtaccccagcgatgcaagatgtggctaatgagctgtcattacgtggtgcaaatgtctcgtttaatctttacccgctggaagaagagcctcgtttaaaccatttagaattagtggttgatttaggccaagagcagcaatttatcaaatatggccacaaaaatactcagtacctgcatttacttatcgtgctcgtcgaggaaaatcccattattaccggctag

SEQ ID NO: 295746 - DNA, 603 bp, Proteus mirabilis
atgccgaagatagggatgcagtcgatacgtaaacagcaattaattcaggcgacattagcggtgattaatgaggtcggaatgcaagatgccagcattgcattaattgcacgaaaggccggggtatctaatggcattataagccactacttccgtgataaaaatggtttattggaagcggcaatgcgccatatccaatatcagttaggttttgccgtcgcaatgcgattacgtattttaagcgatgctgagcctaaattgcgtattcaagccattgtcgatggtaactttgatacgtcacaaaccagtgaaaccgcaatgaaaacttggctggctttttgggcaagtagcatgcatcagcctaatttgcatcgtttacaaaaggttaatgatagacgtttgtactctaatctctgttatgaatttggacatgcgttaacaaaagataaagcacgcttagccgccaaaggcttggccgctttaatcgatggtttatggctacgtagtgcccttagcgaggagccattttcgttagccgaagcaaaaaaaattactgatgagtatatcgatatgcaacttaatctttgccaggataaacagacttaa

SEQ ID NO: 295747 - DNA, 1476 bp, Proteus mirabilis
atgcaaaacccaccgttacacaagctttatattcatggtggatatgttgattgcgcacaacctgaatgtgaacaatttgccgcaattaatcctgctacaggtgaggtgattgcacatttacaatcagcctgtgaagaagatattaattgggcggtagaaagtgcaaagcaaggacaaaaaatatgggctgccatgcctgcgatggcgcgctcccgtattcttcgacgtgccgtggatattttacgtgaacgtaatgatgagttagcgcatttagaaacgttagacaccggtaaacccctgtctgaaacacgttatgtcgatattgtcaccggtgctgatgtattggaatactatgcgggtcttattcctgccctagaaggggagcagatcccactacgtgacagcgcttttgtttacacccgtcgtgaaccattaggtgttgttgccggcattggtgcatggaattatccaattcaaattgcgttatggaaatcagcacctgcattagcagcaggtaatgcgatgatttttaaaccgagtgaaatgacatcattaacggcattaaaattggctgaaatatataccgaagcgggcttgcctcaaggggtatttaatgtggtaacgggtgatgccactgtagggcaatggctaacgcagcaccctgatatcgctaaggtctcatttacgggggggatcgatactgggaaaaaagtgatggcgagcgcttcttcatcaagcttaaaagatgtcactatggagctaggtggtaagtctccgttaattatttttgatgatgccgatcttgataccgcagctgatatcgccatgatggctaatttctatagttcaggacaagtatgtaccaatggaacacgcgtatttgtgccagaaaagttaaaacaagcttttgaagctaaaatcattgagcgtgtctctcgtattcgcgttggttcaccactggaaatggataccaactttggaccattagtcagcttccctcatcttgaaaaagttttaagctatatcgagttaggtaaagctcaaggtgcaaaactactttgtggtggtgaacgtttattcgctggtgcattggcgaaaggggcttatgtggcgccaacggtatttaccgattgtactgatgatatgaaaatcacgcaggacgaaatcttcggccctgtaatgagcattttaagttatcaaacagaagatgaagttattttacgcgccaataatagtgtctatggattagccgcaggcttggtgactcgagatctgacaacggcacatcgcgttatacatcaattagaagccggaatttgctggatcaatacttggggtgaatctgcagcagaaatgcctgttggtggttataaacattccggtgttggccgtgaaaatgggcttgtcacactacaaaattacactcaaatcaaatctattcaagttgaacttggggagttttcatccgttttttaa

SEQ ID NO: 295748 - DNA, 1668 bp, Proteus mirabilis
atggtctatgactacattattatcggtgctggttcagccggtaacgttcttgctacccgcttgacagaagatcctgatgttactgtgctgctccttgaagctggaggaccggactacaggttcgattttcgcacacaaatgccagcagcattagcttatccgttacagggtagacgctataattgggcttatgaaacagagcctgagccacatatgaataaccgccgcatggagtgcggtcgaggtaaaggattaggaggatcatcactcattaatggtatgtgttacattcgtggtaacgcgatggattttgatgagtgggccaaattacccggccttgaagattggaattatttaaattgcttaccctattttcgtaaagcagaaacccgagatattggggctaatgattatcatggtgatagtgggcctgttagtgtgactacaccaaaaaaggggaataatgttttattccatgcgatggttgaagccggtgtacaagctggatatcctagaactgatgatctcaatggttatcagcaagaaggatttggccctatggatagaacggtaaccccccatgggcgtcgagccagtacggcacggggttatcttgaccaagctaaatcgcgcaaaaacttaactattgagacacatgctacaaccgatattattgaatttaagggtaaaaaagcaagtggtgtgcgctattttaaaggaacgaataccacgccacagcatgtgaaagcacgtaaagaaatactgctttgtgctggggcgattgcatcaccacaaatcttacaacgctcaggtgtcggcccagaagatgttctcaacgagtttgatatttcgccagtacatgttttaccgggtgtggggcagaatttgcaagatcatctagagatgtatctgcaatatgaatgcaaacaacccgtttcactttatccagcgttaaaatggtataaccaacctaaaattggtgccgagtggttatttaaaggaacgggtattggggcgagcaatcaatttgaagcagggggttttattcgctcaagtgaaaagtttgcttggccaaatattcagtttcactttttaccagtggcgattaattataatggcagtaatgcagtggaagtgcatggttttcaagctcatgtggggtcgatgcgttcacccagtcgtggacgtataaaaataacctcacgagatccgcatcagcatccaagcatcttgtttaattacatgtcaacagagcaagattggcaagagtttagggctgctattcgtatcacgagagaaattatggcgcaacctgcattagatccctatcgcggtgaagaaattagtccggggaaagatattcaaacggatgaacagctggatgcttttgtacgtgaacgggcagaaacagcatttcacccttgtggtagttgtaaaatgggaaatgatgaaatggccgtcgtagatggtgccggacgcgttcatggtatagaaagcttaagagttattgatgcttccattatgcccaatataattactggcaatttaaatgcgacaaccattatgattgctgaaaaaatggcagacaaaattaaaggcattaaaccattgccagcaagccaagcagattactatgttgctggacattcacctgccagaagaaattaa

SEQ ID NO: 295749 - DNA, 1251 bp, Proteus mirabilis
gtgtctcaggacaacaattatagtcagggcccggtgcccatatccgcaagaaagggtggattagcgttaacctttgtgatgttgggattaacgtttttttcagccagtatgtggactggcggcgctcttggtactggtctctcctttaatgatttcttcctcgcagttcttgtcggtaatcttctccttggtatttacaccgcatttcttggttttattggttctaaaacaggtctcaccactcatcttcttgctcgttactcttttggtattaaaggctcttggcttccctcatttttactcggtggtacacaagtcggttggtttggtgtcggtgttgcgatgtttgctattcccgttggtaaagccacggggattgatattaatctcctgattgcgatatcaggaattttaatgactatcactgtgttttttggtatctctgcattaactattctctccattattgcggttcctgctattgctatcctaggaagttactcggtatatcttgcggtacatgatatgggagggcttaatacactaatggcagtgaagcctgccgaacaactcgattttaatttagcccttgccatggtggtaggctcttttatcagtgccggtacattaacggcggattttgttcgttttggacgtaaccctaaaattgccgtgattgtcgctattgtggcttttttcttaggaaatactttgatgtttgtctttggtgctgcgggagcggcatcattaggcatggcggatatttccgatgtgatgatagcgcaaggtttattactgccggcgatcattgtattaggtttaaatatctggacgaccaatgataatgcgttatatgcatcagggttaggttttgccaatatcacagggttatccagtaaaaaattatctgtggttaatggcattatcggcacattgtgtgcgctatggctttataataattttgttggttggttaacctttctatccgcggcgatcccccttgtaggtggcgttattattgcagattatctgatgaatagagcgcggtataatcaattcaatgctgacaaaatgcaaaatgtgaactgggtagccttacttgctgtggctatcggtattgctgccggtcactggttaccagggatcgtacctgttaatgccgtattaggtggcgcaatcagtttcgcggtattaaatccaatattaaatcgtcgtacagctcgacaagcggagataagtcatgctgggtaa

SEQ ID NO: 295750 - DNA, 1278 bp, Proteus mirabilis
atgctgggtaaaaatatagaacaaattaatcatgctcgtttagctggaaaagaaggtttatggcgcattacagttaaaaataaccagattgcagccattgagccacaaccgcaaagcgattttcatccccaagggttagatgcacaaggtggattggttcacgctccttttgttgaacctcatattcatttagacaccacgcagacagcaggacagccaaactggaatcaatcaggaaccttatttgaaggtattgagcgttgggcagaaagaaaagcattactcacccatgatgatgttaaacaacgggcgtggcaaacattacaatggcaaatcgccaatggtattcagcatgtaagaacccatgttgatgtttctgatgcatcgttaacggctttaaaagccatgttagaagtcaaacaagaagtcaaaccttgggttgatttacaaattgtggcatttccccaagaagggatattatcttaccctaatggcgaagcattattagaagaggccttgaaattaggtgcggatgttgtgggggcaatcccgcactttgaatttacccgtgagtatggcgtggagtcactacataaaaccttcgcattagcgctgaaatacgatcgacttattgatgtgcattgtgatgaaattgatgatgaacaatcgcgttttgttgaaaccgttgctgcattagcacataaagaaaatatcggctcacgggtaacagcaagtcatacaaccgctatgcactcttataatggcgcttatacttcgcgtttatttcgtttattaaaaatgtcaggcattaattttgtagccaatccattagtgaatatccatttgcaagggcgttttgatagttatccaaaacgtcgggggatcacccgtgtcaaagagatgttagcgagtggtattaatgtttgctttggtcatgacgatgtctttgatccatggtatccattaggtacagcaaatatgctacaagtgctgcatatggggttacatgtttgtcagttaatgggctatgggcaaattgataatggattacaacttatcagtcataatagtgcaaaaacattggcattaacggattatggtgtggaagtcggtaatagtgctaactttattattcttcctgctgaaaatggttttgatgctttacgtcgtcaagtccctgtacgttactctattcgtcacggtaaagtgattgcacaaaccgagccggctaagacagaaattatgttagctaagccaacgccaattacgtataattga

SEQ ID NO: 295751 - DNA, 390 bp, Proteus mirabilis
atgtctaaatcggcaaaaggtacgacagaacggtatggacggaacgtaaaagctaaatctggtttaaaccgcgcaatactggagcagggctggtatgaaatgcgccgacagcttgagtacaagcagctctggcgaggtggtcaggtactggcaataccccctgcctacaccagtcagaagtgcgcttgctgtggtcatacagcaaaggaaaatcgccagtcacaaagtcaattcgagtgccttgaatgtggatatacagcgaatgctgatatcaacggggcacgtaacattttagcggcaggacatgccgtgctagcctgtggagggagggtgcagtcagaccgcccgtcgaagcaggaacccgccgaggtgattcagacatcagtctga

SEQ ID NO: 295752 - DNA, 1383 bp, Proteus mirabilis
atggattattttccaatattctgtcagctcaacaataaaccttgtttattagtaggtggcggtgaagtggcagagcgtaaggcacgtttactgatggaagcgggagcggttatatccgtcgttgcaccgacattcacaccacaatttatgcagtggcaaaacgagcaacgattacagtgtttcacggctgaatttagtgttgctgatttagctgacaaatggctagtcattgcggccacagataatgagcaagtgaatcaactcgtctatcagcaggccacagaacaacgcattttttgtaacgtggttgactcgcccaagcaagctagctttattatgccctcagtgattgaccgttcccctattatggttgcaatttcttcgggaggaaaagccccagtacttgcacgtatcttacgtgaaaaaatggaacagtggttgcccaactcgctaggcgctttagcgcagttagcagggaaattacgtgagcaagttaaacaacgttttgccaccatgggtgctagacgctatttttgggagcgtttttttgcagataaagcgctacaagcggaaattgatgcaggtagagataacggcattcaacaacgtatcagcacattgctagcggaaaataaccaaccccaagggagtgtggtgttggtgggagcaggccctggagatgctggattaatgactattaaagggctgcaacaatgtcagcaagccgatgtcgtggtttatgatagattagtctctgatgaggttatgcatttagtgcgcagagatgctgaacgtatttatgttggtaaacgagctggttttcattgtgttcctcaagaggagattaaccaaattcttattaatcacgctaaggcagggaaaagggtagtgaggttaaaagggggtgatccttttatttttggtcgaggaagtgaagagttagaagctttaattgagcatcaaatacctttttctgtggtgcccggcattaccgcggcatcaggctgtaccacttatgccggtattccgttaacacatcgggattatgcacaaagtgtgcgttttattactgggcatggaaaagggctgaacgacgcacaatggcaatgtatcgcacaagataaccaaactttggttttttatatggggctaagtaaagccgattacattcagcaaatgttacttaatcagcatatgcgtgccactatgccagtggcaatagtagaaaaaggtacactagcgacacaaaaagtggttgttggtcaattacagcaactaactgaaatggcaagctcaatgaaaagtcctgcattaattattgttggtgaagtcgtcagtttaaatcaaaagctacaatggtttggtacgactttagccaattaa

SEQ ID NO: 295753 - DNA, 333 bp, Proteus mirabilis
atgagtcaatggatagcggtttgccaattagatgacatcactgtgggaactggcgtttgtgcgctggtggagcaagatcaggtggctattttccgtccataccaagatgaacggctctacgcattaagtaatattgatcccttcgcgcaagcgagtgttttatcaaggggattaattgcagagcacgacaatgagttatatatcgtcagtccactgaaaaagcagcattttcgcttaacagatggttattgccttgaagatgagcactattcaattactcattatgaagtcaaagtcgaaggcaataccgtcagtgtgcgttcgcgtcattga

SEQ ID NO: 295754 - DNA, 2547 bp, Proteus mirabilis
atgagcaagaaaacactcgcaatcatcggtaacggcatggttggacaccgttatatagaagaattgattgataagggcggcaacgaaacgttcaatattatcgtcttttgtgaagaacctcgtattgcatatgatagagtccatctctcttcctatttttctcatcacactgctgaagagctctcgttagttaaacccggttattacgagaaacatcatattgaagtattagtgggtgagcgtgtgatcaccattaatcgtgaagaaaaagtggtgcacaccaatactgggcgttgtgttagctacgacaaattgatcatggcaacaggctcttacccatgggttcctcctattaatggaaacaactcaccagattgttttgtttaccgaactatcgaagatttaaatgcgattgaagcttgtgctcgtttaagccgtaaaggggcggttattggtggcggactattaggtttagaagctgctggtgcgctaaaaagtttaggtattgaaacccatgtgattgaatttgcgccaacgctaatggcagaacagcttgatagcatgggaggagagcaactcaaacgtaaaatagagcgcatgggggttaaagtacacacagcgaaaaacacccaagcgatcttatcgacaggggaaaatgcgcgtaaaacattacagtttgccgatggctcctcacttgaggttgattttgtcgtattttcaaccggtatacgtccgaaagataaattagcacgccaatgttctctcgatatagcaccacgagggggaattgtgattaatgactattgccaaacctcagatgcggatatttatgccattggggagtgtgcttcatggcataaccaaacatttgggttagttgccccaggttataaaatggctcaggtagccgttgatcatctattaggtcaacagacagcattccaaggggcggatttaagtgcaaaattaaaactactcggggttgatgtagggggaattggtgatgctcatggtcgccaagcaggttgtcgtagctatatttatcttgatgaaggtaaagagatttataaacgcctgatagtgagtgaagacaataaatacctattaggtgcggtattggttggggacacggaagattatggcaatctgttacagttagcattaaatacaattgaattaccagaacatcctgacacattaatcttacctgctcatgctggaagtaaaccggcaatcggggttgattcattacctgaaacagcacaaatttgctcctgttttgatgtaagcaaaggcgacattattcaagctattgaacgaggttgtcatacggttgcggcgattaaagcagaaacaaaagcgggaacggggtgtgggggatgtattccgcttatcactcaagtattaaatgcggaactcacaaaacaaggcattgaagttaaccatcacctttgtgaacactttcactattctcgccaagagctttatcatcttattcgtgttgaagggctgaaaagttttgatgaactattgaaaaaacatggtcaaggctatggctgtgaaatttgtaaaccaaccgtcggctctctgctggcttcgtgttggaacgactatatcttgcgtgatgacttagttgcgctacaagatacgaatgataacttcctcgccaatctgcaaaaagatggcacttactctattattccacgctcccccggcggtgaaattacgccagcgggtattattgcgattggacaaattgcgcaagaatacaatttatacaccaaaatcacaggctctcaacgtatggcgatgtttggtgcacagaagcaagatttaccggcgatttggcagaaattaattgccgcgggttttgaaacaggccatgcctatgccaaagcgatccgtatggtaaaaacttgtgtaggaaacagttggtgtcgttttggggttggcgatagtgttggattaggtgtctttttagaacatcgttataaagggatccgcacgccgcataaaatgaaatttggggtatctggttgtacccgtgaatgctccgaagctcaggggaaagatgtagggattattgccacagaaaaaggctggaatctctattttggtggtaatggaggcatgaaaccgcgtcatggcgatctattcgcggcggatttagatgaagaaacgctgatccattatattgaccgctttatgatgttctatatccgtacggcagacaaattacaacgaacctccgtttggttagaaagcctagaagggggcgttgaatatttacgtgaggtcattattcacgacaagttaggcttaaatgcacagttagaaaaagagcttaaagttttacaagagcgcgtagcctgtgagtggcaagaaacccttgattcaccacaagcattgaaacgttttgcgcactttattaacaatccgatgcccgatcctaatatacagatggtaaaagagcgtgctcagcatcgtcctgcccgcgtgcatgaacgtattgatatcaaaatggtaacagaggagacgcaatcatga

SEQ ID NO: 295755 - DNA, 1572 bp, Proteus mirabilis
atgaaagtgaaaaccaaattattatcattacttgtgatgggtgctctcagtgcccctgtattggcagcaacacccgccaatacattgattgtagtacaaggccttgatgatattgttagccttgatcctgccgaaagtaacgaattatcaagtattcagaccgtaccaagtttatatcaacgtattgttcagcctaaccgtgacaatccagaaattaacgagccaattttagtcgagagttggcaggctcaccctgaacaaaaatctatcgtctttaaaattaaacaggatgcaaaatttgcctccggtaatagcgtacgcccagaagatattatcttctcttaccagcgtgcagtgacgatgaataaatcccctgcttttattttaaatgtgctaggttggaaagcagataatattaataccctattgaaaaaagtcagtgataaagagattgaagtacgttggacagcagatgttagccctgatgtggtacttaacatcctttctacaccaatcgcttctattgttgatgagaaattgattgccgcacatattaaaaataatgactttggtaataattggctaaaaatgaattcggctggtagtggtgcttataaaatgcgtgcctacaaacctcgccaagccattgtgttagaagctaaccctctttcaccgaccggtgcgcctaagatagccaatattattatcaaaaatgtgcccgatcccgcttcacgtcgtctgttaattgaaaaaggcgatgcggatattgcccgtgacttaggtacagaccaaactgcagcattagcaggtaaaccgggcattcaaattttaaatatcccttctgctgagcaagtctatatggcgtttaataccggtagcggaaatccgcttcttagcaatccggcattttggcaagcagcgcgctatttggtcgattataaagggatcaccaatgacttaatgcgtgggcaatattttattcaccaaagtttcttaccggtgggattaccgggggcattagaagataatccatttagttttgatccgcaaaaagcgaaagatatcttagcaaaagcaggaattactcatgcacgttttactctcgatgtagaaaacaaagttccttacatcaccgttgcacaatctattcaagcaagctttgcacaagcgggtgtacaggttgatctgttacctgctgccggtagtcaagtttatagccgagtgagagcaaggcagcaccaagcggcgatccgtttttggatccccgactattttgatgctcactccaatgctagcgcttttgcctataatgacgggcaatcaaataccgtggcttggttaaataattggaatattcctgagttaagtaaacaaacactcgtcgcccttaatgaagcggataaggctaaacgtcagtccctttatactgaaatgcaaaaagagctacaacgcagttcaccttacgtgtttatcgaccaaggcaaaaatcagattgtattacgggataacgtgaaaggttatgctcaaggtctaaatgccgatatggtctattacgacaaagtcactaagtga

SEQ ID NO: 295756 - DNA, 1041 bp, Proteus mirabilis
atgaatacactcacgatatccactcgcctaaaaagccagttgtttaccttggttcaaggtatattgacattggcgctaacacttttagggttactggttattacttttacgctttctgcgttttcccctgtggatcctgttttacaaattgttggtgatcacgccagtattgaaacttataatcaagtaaaacatgagttagggttagatttacccatctacatgcaatttttccactatgtagaagcactattgcaaggaaatttaggtacggcgacgtcaacgggtcaaccggtatttgatgatttaatcgccacctttccagccactttagaattagccactgtcgccttagtcattggcgctagtttgggggttttatttggtgtgttatgtgcgcgttttgttggcaccccctttgattttatcttacgctttttaacgctattaggtagctcagtccctattttctggttaggtttaatactactccttattttttatgccacattgcaatggacagcaggcccaggacgtttggatgatatttatcaatttaccattgagcctgtaaccggctttgccttgattgacactctactggcaggtgataaagatgcctttctaaacgctctatcacatctcatattaccggtttctctgctagcctattttgcgctggcatctattacccgtttaacacgctctgcctgtttaaatgagatgaataaagagtatgtcactctcgccagagcaaaagggattggcgaattacgtctcttatttacccatgtattacctaatattcgcggtgtattgatgaccattatcgccttgtcttatacagggatgttagaaggtgccgtattaacagaaacggtattttcttggccggggattggtcgttatctcacaacggctctctttgcgggtgataccaccgcaattatggggggcacacttgttattggtctatgttttgtgctgattaataatatgacagatatcgttattcgtctgactgatccgaggttacgctaa

SEQ ID NO: 295757 - DNA, 831 bp, Proteus mirabilis
atgtcactctcctttttaacaaaaatagcgcgctcaccttcagcgtttatcggtctgtcattgttgctccttctgctactaattgccatttttgccccttggctagcgccttatgatccaaattggcaacacgctgcacaacgcttattagcccccaatgccgcacactggttaggtactgatagttatggtcgcgatattctttcacgcttaatttatggtacacgcccaatgttaggtttagtgggtcttgttgccttgataacactaccattagggctatttattggcattttatccggttattacggcggttggacagagcggattttaatgcgttttaccgacatcattatgtctatgccctccttaattttagcctttgcctttgtcgccatgttagggccgggattacttaacggtgcattagcccttgcacttacagcatggccggcttatgcccgccaagcccgtagtgaaattcaacacttacgcaaaagtgattaccttgcagccgctgaaatgatgggaattaaaagtattagattattatgggggcacattcttcctttatgtttaccgtctgccattgtacgtttagcccttaatttagcggtgatcattcttgctgcagcaggtttaggtttccttgggctaggtgctcgccctcccatggcggaatggggagcaatgattgccgaagggatgcccgttatttttgatcagtggtgggtggccgctattccgggtacggcaattttgatcagtagccttgcttttaacttattgggtgatggattacgcgatgtattaggagaaagccatgaataa

SEQ ID NO: 295758 - DNA, 837 bp, Proteus mirabilis
atgaataaagcccctttaatcgaagtcgataatctgtgtattgattttccacgtgctagagtggtgaataatgtctcttttcagctaggacaagagcggttagcgctggtgggtgaatctggttcaggaaaatcgatgacggcacgctcattaatgggcttagtgcgtaagccgggcaaagtttctgctgataaattgcattttatgggggacgatctcctcgcttattctcctaagcaatggaaccagttacgaggaaaaacaatatcaatggtattacaagatcctcgttatgcattaaacccagtgaaaaccatttatcagcaagtagaagaaacggtaaaactccatcaaaaattatcccataaagatcgacatgcattaattactgaaactttgctttccgtgggattaccggaacagagtatttctcgctaccccggtgaattatcgggcggtatgggacaacgcgcgatgatcgctattgcgctgattaataacccaacggtactgattgcggatgagccaacttccgcactagatgcacagctacgacatcaaatattagaacttatcattacccaatgcgcacaacgagatatggctttgttgttaattagccatgatctacctttagtggctgaatattgtgatcgtgttatggtcatgtatcaaggggagcaagtggatgaacttgaggcaaaagcattacctcaagccacacatccatacacccgcaccttatggacctgtcgccctaatgcgagtacctatggcacacaattaccggtattagatagaacactgaattttaaaggtacaccttatgctaattga

SEQ ID NO: 295759 - DNA, 714 bp, Proteus mirabilis
atgctaattgatattcatcatttacgcgttcaatttgaacaaaatagacagattaagcaggtggtaaaaggtgtcaatctacaagttaaacaaggcgaaacctttagtttaattggtcgttctggttgcggtaaatcaactgtattacgggttatagccggattattacatcattggcaaggggatattaagttgttagggcaagcaattaagccacagcaacgctttcaaggtaagttacgccgtaacatacagatggtgtttcaagatccctatgcttcattacaccctcaacatcagatagaacgagcatttattgagccgttaaaaattcatcatattgcttatgataaaacaacaataacctcagcgttagagcaagtcggtttagaaggcgatattgcttatcgttatccacatcaactatcaggtggacaacgtcaacgtgtggctatagccagagcattactgttgcaaccacagttgttattgttagatgagccaacctctgcactggatatgtcggtacaagcagaaattttaaatctgcttaataccttaaaaaaacaacataacatgacttaccttttggtcagccatgatgcagatgttattgcacatatgtcggatagcgcagcgctaatggaagagggtcaattgacttgctattatgatagaaaagcgctttctcaagggcttcatcgtcttgattaa

SEQ ID NO: 295760 - DNA, 645 bp, Proteus mirabilis
atgggggcactgctggatttatccggttatattaaattttttgtcggtctttttgctattgtaaacccgatagggatcttgcctgtatttatcagtatgacgagttatcaaacggatgcaggacgtaataaaacaaacttaattgccaatggctccgttgcgattattttggttatttccctattaataggtgattcgatactgagtatttttggcatctctattgactcatttcgtatcgctggggggatgctgatagtgacaatcgcaatgaccatgataaatgggcgcttaggagaagataaacaaaataaccaagaaaaaaatgaatcagcagtacgtagcagtgttgcggtggtgcctttagcattgccattgatggcaggtcctggcgcaattagctcctgtattgtttggagttcacgttgggaaggggtgactaatttcttaggtcttgctgcgaccagtatcttttttgctttttgttgttggttactgtttcgtagtgccactttattagttaaatacttaggtcaaaccggtatcaacgttgtcacgcgtattatggggttattgttgatgtcgttaggtattgaatttattgtcaccgggttacgttctatttttccgggattattagtataa

SEQ ID NO: 295761 - DNA, 2664 bp, Proteus mirabilis
atgtctgtaactaacgttactgaactcaatgatctggttgctcgtgtaaaaaaagctcagcttgaatttgctaacttttctcaagaaaaagttgatgcaatttttcgtgctgctgcattagctgccgctgacgcccgtattcctcttgcaaaattagctgttgaagagtctggcatgggtatcgttgaagataaagtgatcaaaaaccactttgcttcagaatatatctacaatgcgtataaggacgaaaaaacctgcggtattttgtctgaagatttaacctacggtactatcactattgctgaacctatcggtattatctgtggtatcgtgccaaccactaaccctacttctaccgctatttttaaagcattaatcagcttaaaaacacgcaacggtattattttctctccacatccacgggcgaaattagccacaaaccgtgcggctgaaattgtgttaaacgctgcaatcgccgcgggtgcaccaaaagatattatcggctggatcgatgaaccttcagtggcattatccaatgcattaatgcaccatgatgatattaacctgatcttagcaacaggtggcccaggaatggtaaaagccgcttacagttcaggtaaacctgctatcggtgttggtgcgggtaatactcctgttgttattgatgactcagcagacattaaacgtgcagttgcttctattttgatgtcaaaaacctttgataatggggttatttgtgcttcagagcaatctgttatcgtcgtagacagtatctataaacaagttcgtgaacgtttcgccactcacggcggctacatgttaaccggtaaagagttaaaagctgttcaagatattatcttaaaagatggtaacttgaatgcagctatcgttggtcaaccggcagtgaaaatcgcagaaatggccggtattgaagtgcctgttaacactaagattttaattggtgaagttaaagaaactactgatgcagaaccttttgctcacgaaaaactatcgcctctgttagcaatgtaccatgcacaaaactttgaagatgcggtacataaagcagaaaaattagttgaaatgggcggtattggtcatacttcttgtttatataccgatcaagacaactgtcctgaacatgttgcctactttggcgacaaaatgaaaacttcccgtattttaatcaatacaccggcatcacaagggggtattggtgacttatacaactttaaactcgctccttctctcactttaggctgtggctcatggggtggtaactccatttctgagaacgtagggccaaaacaccttatcaacactaaaaccgtggcgaaaagagcagaaaatatgttgtggcacaaacttcctaaatcaatttatttccgccgtggttgcttacctattgcactggaagagattgcaactgatggtaaaaaacgcgcatttatcgttacagacagtttcttattcaacaacggttacgttgatgaagtgaccaatgtactgaaaaaatttggtgttgaaacggaagttttctttgaagttgaagcagatcccacattaagtgtcgtacgcaaaggtgcagagcagatgaacagctttaaacctgatgtgatcatcgcattaggtggcggttcaccaatggatgcggctaagattatgtgggtaatgtatgaacacccagaaacacacttcgaagaattagcattacgctttatggatatccgtaaacgtatttataaattcccgaaaatgggtgtgaaggctcaaatggtagcaattaccacaacatcaggtacaggctctgaagttacaccatttgctgttgtgactgatgatgaaacaggccaaaaatatccattagcagactacgcattaacgccagatatggcgattgtagatgccaatctggtgatgaatatgcctaaatcactctgtgcttttggtggtttagatgcggtgactcacgcattagaagcttatgtttctgtattagccaatgagtattctgatggtcaggcactgcaagctctgaaattgctgaaagaatatctgccagcaagctatcatgaaggtgctaaaaatccggttgctcgtgagcgtgtccacaatgcagccaccatcgcaggtattgcatttgctaacgccttcttaggggtttgtcactcaatggcgcataaattaggctctgaattccatattcctcatggtcttgccaatgcgttattaatttctaacgttattcgttataacgcgaatgataacccaacaaaacagactgcatttagccaatatgaccgtccacaagcacgtcgtcgttatgctgaaattgctgatcacttagaactgtctgctcctggtgatcgcacagccgctaagattgaaaaactgttagcttggttagaagagatgaaatcttcattaggtatccctgcttctatccgtgaggcgggcgtacaagaaagtgatttcttagcgaaagtggataaattatcagaagatgcgtttgatgatcagtgtaccggtgctaacccacgttatccgctgatctctgagttaaaacaactgttattagattcttactacggccgcgaatttaacgagcaccctgttgctgaggtaaaagaagcgaagcctgcgaaaaaaagcagtaagaaataa

SEQ ID NO: 295762 - DNA, 258 bp, Proteus mirabilis
atgaggcgttttattagggtagatcttcctcctgaacctatcattaatgataaatgtgttaggaaacgcctcaaacaaagcctttgtgatagctgttcaaaagtctgtcctgtggacgctatcacttttagtcttttgaacgttgaaatagataatgagcgttgtttccaatgcggtaattgtctatttacttgccctgttgacgctatagaaaatctgtctcttatacacatctccgagcccacgagaccgtactag

SEQ ID NO: 295763 - DNA, 873 bp, Proteus mirabilis
atgagtgaatggccattagttacctttactttgttagtacaaagttctgttggtgttactatttttactgccctctatttttgttggttagagaaagaaataggtaatcaacgagcaacacgcactttgcgccccgtattactgacaagtgctatattgggatgcttaggattattagcctcaacactgcatatgggatatccgtggaatgcgtttcatgccttgcgccatatatcatcatcatggttaagccgtgagattatctttgctgctctttacctgggcgcattatgtttatataccttgctagtactaataaaaggtcatatgaataaaaccctcttagccattatcggtttactggggttagtggatattttctgtatggcttcgctttattacagcacatcgatgataacttggatgcatgttaatacctattttatgtttatcggctctgttttttctgcgggagcggtgatcacattattaatcacttcaataagggttaaagcctttgctgatggcgaacttgctaaaaaaatagtattaagtgctttagttggtatttttcttgctgtgactatccgtatggcagagcaaccactttatttatcatggatgtcagaaatacaattaaccaatgatgcaattacttttcctcatacccctataattgcgtataatgagactttcggattaagaatatctgcatggatattgtctattatcagtatattaatgatgggatatagcctgtataaatatcgtatagctgtatttacttctgggttatctctaatttggggtagcggtattgtcctgttaattgctgaaatacttaaccgatttgcattttttattgttaagtaa

SEQ ID NO: 295764 - DNA, 630 bp, Proteus mirabilis
atgagtgaattcaaacaatatgcgcctgttagcgatgaacagcttggtttttttattgattcttctcgttgctcaggttgtaaagcatgccaagttgcatgtaaagataaaaataatttagaggttgggcgccgttttcgccgtatttatgaaatacagggcgggggatttgcgcctaatgggcaaggtgcatttgaaaataatgtctttgcatacacattaacgatttcatgtaatcactgtgacgatcctatatgtgtaaaaaactgtccaacaacagcaatgcataaacgccccggagatggcattgtccgtgttgataccagcaaatgtgttgggtgtggttattgctcatggtcatgtccttatggtgcaccacaaatgaatactgaaacgggacaaatgtcgaaatgtgatttctgcgtagatttattagcagaaggtaaaaatcctatttgtgttgatacatgtccattaaatgcgattaagtttggaaaaattaaagatctacgcgctaaatatggtcatttaagccaagttcaagggttacctgattttacaatcactcaccctaatttggtcattaaaccacatactggtgcaattaaaaaaggagggaaccaagcatga

SEQ ID NO: 295765 - DNA, 2397 bp, Proteus mirabilis
atgtctataaaaaaacaagaaaaaaggcttgctaatcaagaggggatgccattaacgcgtcgtcattttgtacaagccagtgcagcattagtgagtatgccttttttcgcacaaaatgcacaggccaatcttgataaaagcctacctattgccaacattgatgagaaacctgctactgtcgtcgcaacatgcagcacctttgactgtggtggtaaatgtgatatccgagctcatgttaaagagggaattgttacccgtattaccacaagaccagatgctgatttagatgaacaaatgccgataatgagagcctgcgtaagaggtagaggttatcgtaaattcacttatcatgcggatagacttaaatatcccatgaaacgtgtgggtaagcgcggtgaaggcaaatttgagcgtatctcttgggatgaagcaacctctttaattgctgagaatgtaacacgattaactcaacagcatggtgcagcaagtcgttttcttacggtaaataccgccgtcactggggggatcttctctggtgatactatgatgaaaaaactctttaatctcacaggaggatatcttccttattatcactcagtgagcttagggaataccgctaaagtcacaccttatacttatggcgtatctaaaacaggaagttctcttgatactttagcggatacgcctttagttattttgtggggacataatcccaacgaaaccatttttggtcacaccaatcactattttcaaaaaatgaaaaataatgggaccaaatttattgttgtcgatcctcgttattcagatacagcccaatctttagctgatcaatggatcccattacttcctaccacagataatgcactgatggatgcaatgatgtatgtcattgtgaccgaaaatttacatgataaagcgtttatcgataaatatgtgctaggttttgatgaagatcatatgcctgaaggggtgccagctaacgaatcattaatggcttatttattagggaaaaaagacggtatagcgaaaaccccagaatgggcgacaaaaatcacacgagtcccagccaatactatccgtcaattagcacgtgaatatgcgatgacaaaacccgcggccttaattcaaggttgggggccacaacgtcatatttgtggtgaacgtaccgcccgtggttcaacgttattagcagcaattactgggaatgtgggtaaaaaaggcgcttgggcggctggatatggcggaattggtaaccgtcaatctattcgtggtcctaatattggcaaaaatccggtaactgcacaaatatccattatgaattggatgcaagctgttgaggatgcgagcaaagtgacgccagaagatggccttattggcgtcgataaacttgatagtaatatcaaaatgatcttttctttagcgggtaactatcttgtcaatcaaaaccctgatgttaatgcggcagctaagttacttgaagatgaatctaaagtagagtttatcgttgttagtgatctatatatgtctccgtcagccaaatacgcagacttagttttaccagaaacgagctttttagagcgttggaatatcggtaatacatggggaacgggcaactatttcttactgtcagaaaaagtcgttgaacctgcttttgaaagacgttctgattatgaatggatcagcgatgttgctgagaaaatgggagtcaaagaggcttttaccgaaggacgaacagaaaaagagtggatagcttatctcgttaatactaacaaagaacgctttaaagatagacctgatttcccaacttttgatgaattactcaagactcgccgctatcttttcaaagatgcaccttttgttgcatttgaagaaaatattcgtgatccagaaaatcatcctttcccaactccatcaggaaaaattgaaattttctctaaacgtctctatgacatgaataatgtcgatattcctgcattatctcattatgttcctgcaattgaaggtccagaagataaattgaccgagaaatatccactacaaatgttaacttggaaaggaaaaaatagagctaattcaacgcaatatgctaacccttggttacaagaggtacaacgccaagaaatgtggataaaccctattgatgcacaaaatagaggcatcaaaaatggcgatatggtgcgtatctataacgacagagggatcacccaaatacccgctttagttaccgagcgaattattcctggtgtggttggtttacaggcgggggcttggtggtctcctgataaagacggtgttgatcatggtgggtgccctaacgttttgacatcaacacgtatgacaccattagcccatggtaattcacatttaaccgttttagttgaggtaaccaaagcatga

SEQ ID NO: 295766 - DNA, 759 bp, Proteus mirabilis
atgatcccagaaaaacgcgtcgttcgccgaatccaatctggcggttgtgcaatccattgtcaagattgcagtattagccagctctgcatcccgtttactttaaacgagcatgagcttgatcaactggataatattatcgagcgtaaaaaacctatccagaaaggtcaaaccttgtttaaagccggtgatgagctgaagtcactttatgccattcgttcaggaactattaaaagttatacgatcactgaagaaggcgacgaacagatcacaggttttcatcttgcaggtgacttggttggatttgatgccattatcaacaccgaacacccaagctttgcacaagctcttgaaacatcaatggtttgtgaaataccatttgaaacactagatgatttatcaggcaaaatgcctaatttacgtcaacaaatgatgcgtctaatgagtggcgaaatcaaaggtgaccaagagatgatcttactgctatcaaagaaaaatgcagaagaacgtttagccgcctttatttataacctctctcgccgctttgcgcagcgcggtttttcacctcgtgagttccgtttaaccatgactcgtggtgatattggtaattacttaggcctgacagtagaaactattagccgactattaggtcgtttccagaaaagtggtatgttaagtgtaaaaggtaaatacatcactattgaagatagtgaaatgttaagtgaactcgcaggcaaactgccttcctcaacagaagcttaa

SEQ ID NO: 295767 - DNA, 951 bp, Proteus mirabilis
atggaaaaatatcaaaaccttctcgttgtcattgatcctaaccaagatgaccaaccagcactacgtcgtgctgtttatatcgttcagcgtaatggtgggcggataaaagcttttctacctgtttatgatctctcatatgacatgaccacccttttatctcccgatgaacgtaatgcgatgcgcaaaggcgtgattaatcaaaaaaccgcttggataaaacagcaagctcgctattatcttgaagccggcattcaaatcgacataaaagtgatttggcataaccgaccgtatgaagccattattgaagaagtgatcaccgataagcatgacttactgattaaaatggctcatcaacatgataagttaggctccttaatttttactcccctagattggcaattgttaagaaaatgccctgctcctgtatggatggtaaaagataaagagtggccagaatacggcactattgttgtcgccgctaatctgtccaatgaagagtcatatcatgatgcattaaatttaaagttaattgaattaactaacgatttatctcaccgtatacaaaaagatccagacgttcatttactcagtgcctaccctgttgcacccattaatattgcaattgagttacctgactttgatcctaacctttataacaatgctttgcgtggacaacaccttatagcgatgaaagagcttcgccagaaattctctattcctgaggaaaaaacacatgtcaaagaaggattgcctgagcaagttatccctcaagtatgcgaagagctaaacgcgggtattgtcgtattaggtattttagggagaaccggactttctgccgctttcttaggcaatacagcagaacagctgatcgaccatataaaatgtgatttactcgctatcaaacctgatggctttacctgtcctatcactgtcgattcagacaacgaataa

SEQ ID NO: 295768 - DNA, 1389 bp, Proteus mirabilis
atgtccagcggtgttgttacagcggcatatattgtcgccgcaatattatttatttttagccttgcagggttatccaaacatgaaacctcaaaacaggggaattactttggtattgcagggatggctatcgcgttatttgcgactatctttgggccttatgctgataatgtaggttggatcattgttgctatggttattggtgccgttattggtatccgtttagccaaaaaagttgaaatgacgcaaatgccagagttagtggctattttgcatagttttgtaggtttagccgcggttctggttggttttaatagttatctagatcacaatcctgccattgatcctgtaatggccaacattcatctcacagaagtctttttaggtatctttatcggtgcggttacttttaccggctctattgtcgcttatggcaaactaagtggcaaaatgtcatccaaacctatgatgttgcctaatcgccataaacttaatttagcagctttagttatttcatttttattaatgatctggtttgtcaaaactgacagtgttggtttacaagtctttttaatgattgtgatgacagtcattgcattagcatttggttggcatttagttgcctccattggtggtgcggatatgccagttgttgtgtcaatgttgaactcttattcggggtgggccgccgctgctgctggttttatgttaagcaacgatttgttaattgtgaccggggcattagtgggttcatcgggcgctattctttcttatatcatgtgtaaagcaatgaaccgctcatttattagcgtgattgccggtggttttggtacagatggtagcagctccagtgacgaaggagagatgggggaatatcgtgaaacaaccgcagaagaagttgctgaactattgaaaaactcaacttcagtgattattacgccgggttatggcttagcagtggcacaagcacaatacccagtacatgatataacagaaaagcttcgtcagcgtggtataaaagtacgctttggtattcatccagttgcgggtcgtctaccggggcatatgaatgtattgttagcagaagcgaaagtaccttacgatattgtcttagaaatggatgaaatcaatgatgattttgctgatacagataccgttttagttattggtgcaaatgatactgttaacccagccgcacaagacgatcctaatagtccaatagcaggtatgccggtattagaggtatggaaagctcaaaacgtgatcgtgtttaaacgctctatgaatactggctatgcgggggtacaaaatccattattctttaaagaaaatacccaaatgttatttggtgatgctaaagccagtgtcgatgcgattttaaaagccttgtga

SEQ ID NO: 295769 - DNA, 1530 bp, Proteus mirabilis
atgcgaattggtatacccaaagagcgactttctaacgaaacaagagttgcagcaacacctgctacagtcacacaactcttgaaattaggatttacagtcgcgatagaaaatgaagctggcattgcttctagtttcgataatgacgcttatcaacaagcaggggctgagatcttagattgtcaaaatatttggcaatccgacattatcttaaaagttaatgcccccctagaagatgaaattgctttactcaaaaaaggctcgactttaattagttttatctggcccgcacaaaatgcaccattgctagaaaaattagctgaaaaagagattaatgtgatggctatggatagtgtaccgcgtatttcccgtgcacaatctttagatgcattaagttcaatggcgaatattgccggctatcgtgccgttgttgaagccgctcatgaatttggccgtttctttactgggcaaattaccgctgcaggtaaagtaccaccagccaaagtgatggtgattggtgcgggtgtcgctgggcttgccgctattggggccgcaggtagtttaggcgctgttgttcgtgcatttgacactcgacctgaagtcaaagagcaagtgcaaagtatgggcgctgagttcctagagctggattttaaagaagaagcggggagtggtgatggctatgctaaagtgatgtcaaaagcatttattgatgcagaaatggcattatttgcagagcaagccaaagatgttgatatcattattaccacagcattaattccaggaaaacctgcaccacgtttaatcactaaagagatggttgattcaatgaaaccaggtagcgtggtggtcgatttggcagcccaaaatggtggtaactgtgaatataccgttcctggtgagatttttaccactgaacatggtgtgaaaattattggttatactgatttagccgcccggttaccggctcaatcatctcaactttatggtactaacttagttaacctattgaaattactctgtaaagaaaaagatggtaatatcaatattgattttgacgatgtggttattcgtggtgttaccgttattaaagcaggggaagtgacatggccggcgcctcctattcaagtttcagcgcaacctaaagcagctcctgcagcaaaaccccaagaaaaacccgttgcgaaacctatttccccgtggaaaaaatatggtttattggctattgcctttttactgttcgcatggttggctaatgttgcgccaaaagagttcttatcacactttactgtcttcgcactttcttgtgttgttggttattacgttgtttggaatgtcagccattcattgcacaccccattaatgtcggtgacaaatgccatttcaggtatcattgtcgttggtgcattactacaaatcggtagtggtggttgggtaagctttttctcatttatcgctattttaattgccagtattaatatttttggtggatttaccgtcactcaacgtatgttgaaaatgttccgtaaaggataa

SEQ ID NO: 295770 - DNA, 954 bp, Proteus mirabilis
atgaagctgaaaacctcagtcatcgcagcagcggtgttatctttaactaatattactgttgcgcaggctgcacaggaactgtctccagaacaagcggcagagctaaaaccatttgaaagaattacagtcatcggtcgttttaatgcgatttatgaagcagctgacgcagtatctcgtcgtgctgataaaatcggtgctgatagtttttacattcaaggtctagatgatatcagtgatagtggtaacatgagtgtgactgccgatctgtatagaaaagatgcaccaaaagcaactgaagaagaataccgcgtatttcatggtgtaaaagaattaccaaaacctgaagctattttgctacagccttttgataccgttactattcatggttactatccaacaacacctgatattaataacgaaatcgggaaagaagcagcaaaaaaaggtgcagcatcattctttattgtccgtaatatctcggtaaatgatggtggtaaccaagaagttactgcttatatctataaaaaagatgcccctaaaagagccatacagtcttcagaagccgtggttccttatgactctgatgcgggtcgagcgcttattgccgaaggtggaagtgcagccaataaagttgaaaaaccaggacttgcgtcaaatagtgactttgatagaaatgtaggtgtatttgctgaaacacaatcatcaggtaaaagcggacgttacactgtcaccttacctgatggcactgaaattcaagaggttaataaagcagcggctgcattaatggaaccttttgataccattactttcagtggttattttgtgaactcaccggaagtttcttatcaagttgctaaacgtgccgcagagaaaggtgcaaaatactaccatattactcgtgaatggcagagtaatggtggtacggtaacaatcaccgctgatttatttaaataa

SEQ ID NO: 295771 - DNA, 1395 bp, Proteus mirabilis
ttgaataaaaaacttggtttaatgtcactaacagcgttagtgctaagctcaatggttggtgcaggtgtattcagtttgcctcagaatatggctgaggttgcaagccctgcggcactgattatcggttggataataacaggggttggcatcctttttctcgccctatcattgttattgctttctcgcttaagacctgatcttgatggcggtatttttacctatgcgaaagaaggatttggtgaatttattggcttttgttctgcttggggctattgggtctgtgcggtagttgccaatgtctcttatttagtcatcgttttcgctgctgtgagtttttttaccgacagccctaataatattatttttggtgatggtaatacatggcaggcattgttgggtgaatcaatcttactttgggttgtgcactttttagttctacgaggtgtgcaaacagccgctagtatcaatttaatggccacgatggcaaaattaataccattggggttatttattattgttgccctacttgcctttaatatggatatttttacctttgatttcgaagggataaaaatgggcgtgcccgtttgggaacaagtaaaaaataccatgttaattactttatgggtatttattggtattgaaggggccgttgtcgtatctgcaagagcaaaaaatagaagagatgttggtttagcgacaatatttgcggttgtgatcgcgctgattatttatattctcgttaccctattatctcaaggattagttagccaaccagagcttgctatgatgaaaaacccatctatggcacctttactggttcaactaattggaaatataggtgagatagttattgccgccggccttattctatcggtatgtggcgcttatttaagctggacaattatggctgctgaagtcccttatattgccgcattacaccactcttttcccaaacaactgagtaaacaaaatcacaatgatgcgccttcctcttccttgtggtttactaatttagctgttcaattatcactagtattaatttggcttactggtagtaattacaataccctactgaccatcgcgtcagaaatgatcctcgttccttatttcctggttggtgctttcttatttaaagttgccatagaacgcagtagccgaggattattactgatagcaatacctgcaagcctctatggtttatggttactttatgcatcaggtgtaattaatttattactttccgtcgttctctatgcacccggtgtattaatatttttatattcacgaaaacaatataaagataaacagtcattaaatactagtgaaaaaatactactgatgatggtattaattggcgcaattcctgcttgtggctatttagtatttaattaa

SEQ ID NO: 295772 - DNA, 567 bp, Proteus mirabilis
atgaaaataaaaaatcatatcagattactatctgcattattagttatctcttctagcatgaatgtattagcagataatagcaaaacaacagaaaagaaaaataacaatattattaattttagtggaacagtaatatcaacatcctgcaatatagatagccctagttctcctatcactttgcctacaattaataaatcggaaatagtcttagataaagattgggccaatgccaaaagcagtacaggtagtaattttgaaattaaactattagattgtggcaataataatgcaacattaacatttaacggcactgatttagccggtgaaaataaaattatgaagaataaaagcatcacaaataatagtgctaaaggagtaggaattttcattcgtagtgatgaaggtaataaaaatattattcatttaaatggtaaccaagcaataactaagagaattgaaaataaaacagcaacttataaattccatgccaattacgcgagttatcttccaaatccaacatcaggaactgtcaatacatcagtaaattttaccgttaaatattcttaa

SEQ ID NO: 295773 - DNA, 267 bp, Proteus mirabilis
  misc_feature (196)..(205): n is a, c, g, or t
atggcgacatggaattttccctcttttagcctagagtcagttgctcaaacactgttaggggaagggaaagcgattgatacaccttatgccagaatggacgaaatcaatcgccgttttaaagaagataagcccgccttagcgtattataactggcaagattgtgtcttggttaatcgtatctttgataccacacacnnnnnnnnnnaccacacacttaatggaattcttattagaaagagccagtgtaacagggctggcagcagatag

SEQ ID NO: 295774 - DNA, 1335 bp, Proteus mirabilis
  misc_feature (533)..(542): n is a, c, g, or t
atggaattcttattagaaagagccagtgtaacagggctggcagcagatagaagcggtggctctgtcgcagcatttactcacctctatttaccctcaatgcatcgtcttggttatgttgcccccaatcaaggtgaaaaacccgaagagcatagccctggtggttttgtcatggactcaacaccgggtctctatgactcagtggtggtactggactataaaagcctatatccctctattattcgcacctttttaatcgatccggtgggaatgattgaaggtatgcatcaccctgatagcacacatgccgttcccggttttcgtcaagcgtggttttcacgagaaaaacactgtttacccaccattgtttcacaaatctggcatgaacgagataatgctaaacgtcataacaacgccccgctctctcaagcattgaaaattattatgaatgctttttatggtgtattaggctcggtaggctgtcgtttttttgatcctcgattggcttcatcaattactttacgtggtcatgaaannnnnnnnnnatcaattactctacgtggtcatgaaattatgaaaaagacccgtgaagtaattgagtcaaaaggctatcaagtgatttatggtgatactgattctacttttgtttggcttaaagccgctcataacgaagtacaagcagagcagatcggtcgtcaattagcgcaagatgttaatcaatggtggaaaagctatctgactgaaacttaccagcttgatagccaattagagcttgagtacgaaacccattatcgccgattcttgatgcccactattcgaggtatggaaaccggaagtaaaaaacgttatgcaggactaagtcataataaaatggtgtttaaaggattggaaacagtcagaacagactggacaccactggcgcaagcgtttcaaaaagagctttatacacgcatctttaatcagcaaccttatcaacagtttattcgtgattatgttgctgatacgctattaggaaaatatgatgatagactggtttatcgaaaaagattgcgacgaaaattatcagactaccagcatatcccccctcacgtcaaagcagctcgattagcggatgactataatcaattacaaaataggccgcaacaatatcagcaaggcggttggattagttatataattactcacttggggccagagccgttagagcatatcacttcgacacctgactatgaacactacattaataagcaattaatgccgatagcagatgctattttgccatttctacaagatgatttttctaccttgttaaatgggcaaatgacgctctctttttaa

SEQ ID NO: 295775 - DNA, 2904 bp, Proteus mirabilis
atgccttttactcttggtcaacgttggattagcgatacagaaagcgaacttggactaggtactgttgtggcaattgatgcccgtatggtgaccttactttttcctgcatgtggcgaaaatcgtctttattcccgccatgatgccccaataacacgggtgatgtttaatgtgggggatactgtcaccagtcatgaaggctggaagctcgccatcgacaacgttgtggaagataatggcttacttatttatcacggtgtacgtttagataccgaagagccagcacaactgcgtgaagtattcttagataacaaactcacttttaataagccacaagatcgtctttttgccggtcaaatagaccgtatggatcgttttgctttacgctatcgtgcgcgtaaatttatgagcgaacagtttaagcaagcacaaagtggtctacgtggtattcgcgcaagtcttattcctcatcagctctatattgctaatgaagtgggtaaacgtcataacccacgcgttttattagcggatgaagttgggctgggtaaaactatcgaagcgggtatgataatccaccagcaaatcatggatggacgcgctgagcgtgttttaattatcgttcctgaaagcttacaacatcagtggttagttgagatgttacgtcgtttcaacctacgtttttcactgtttgatgatagccgttatagcgaatctttattagatagcgataatcctttcgaaacagagcagatgatcatttgctcattagactttgtgcgtaaaaacaaacaacgctttgaacaccttgttgaagcgacttgggatatgttagttgtcgatgaagcccaccatctggtatggagtgaaaaggcaccaagccgagaataccaagttatcgaaacgctagctgaagcgatcccttctgtattgttattaaccgcaacaccggagcaacttggtcaagaaagccattttgcccgcttacgtttgctcgatcctaatcgtttccacgattacaacgaatttattaatgaacaacaaaaatatcgccccgtagccgatgcggtaaccattttgctttcagaagatgatttaaataacgaacagcaaaatagcatcagtgagatgatcagcgagcaagatatagagccgttgctaaaagcctctaatacccaaggtgaagagcgtacaaaatctcgccaagcacttattcatatgttgatggatagacacggtacgggtcgtctgttatttcgcaatactcgctccggcgtcaaaggcttccctaaccgactgttgcacgcaataaaaatgccactaccaactcagtatcaaaccgccattaaggtggctgagattatggcagcgaaaaagagcctcgaagtacgagcaaaagagatgctctaccctgaacgtatctaccaagagtttgaaggtgaaaatgccacatggtggaactttgatccacgcgttgaatggctactaggctttttaaccgccaatcgtcatgaaaaagtattagtcatttgtgctcaagccgccacagcattgcaattagaacaagttttacgtgaacgtgaaggtattcgtgctgcagtattccatgaagggatgtctttacttgaacgagatcgtgcagccgcttatttcgcctcagaagaggaaggcgcacaagtgttactatgttctgaaatcggttcagaagggcgtaacttccaatttgctaatcaactagtgatgtttgatctcccctttaatcctgatttattagaacaacgtattggtcgtcttgatcgtatcggtcaaaaccgcgacattgatatcagtgtgccttatcttgaaggaacagctcaatctgttctattacgttggtatcacgaagggttagatgcatttgaacatacctgcccgacgggtcgtacaatttatgacaacgaatatgatgcgctagtcaattatcttgctcaacctaatgaactaggtgattttgataagtttatcgtttcttgtcgtaagcaacatgatgagatgaaactcaaactagagcaaggtcgtgaccgtctattagaaatgcactctaacggcggtgaagttggcgttgagttagcgaataagattgcagagcaagataacgatcccgatctggttaacttcgccttaaacttatttgatattgtgggcattaaccaagaagatcgtagtgatagcttaattgtattaacgccatcagatcatatgttagttcctgacttcccaggattaccacaagatggttgcacaattacctttgatagagagcacgcactctctcgtgaagatacgcaatttatcagttgggaacatcctattatccgtaatggtttagatttagtcttatctggtgatacaggtagttgtgcggtttctttattgaaaaacaaagcattacctgtaggtacgctattagttgaactgatttatgtcgtagaagcgcaagcccctaaacaccttcatttaactcgcttcttaccggcaactccagtacgcttattacttgatttaaaaggtaataatcttgcatcacaagttgaatttgaaagttttaaccgccaattaaatgcggtgaatcgccacacatccagcaaattggtcaatgcggtacaaaatgaagttcatcatgtactaaaagcatcagaatccttaatggaagcggaagcgaaaacgctaattgaacaagcgaagcaagaagcagacaacgcattaacacatgagttatcacgcttagaggcattacgtgccgttaacccaaatatacgtgatgacgaagttgaagcaattgaaaatgagcgtacgcatattcttaaccacttagatgaagcgacatggcgcttagatgcgatccgtttaattgttgttacccaccaataa

SEQ ID NO: 295776 - DNA, 654 bp, Proteus mirabilis
atgatggaagtttataacccccccactgatccttggttacacgttttatatcaagatgagcatattattgttgttaataaacccagtggattgctatctgtacccggcaaagcgctagaacatcacgacagcattatgtcgcgtataaaagccgattttcctgatgcggaatctgttcatcgccttgatatggccacgagtggtgtgatggttgttgcgcttaataaagccgccgagcgtgaattaaaacgccaatttcgtgaacgagagccgaaaaaaacctatattgcccgtgtctggggaaagcttgaaaaaccacaaggattagttgatctgccgttgatctgcgattggcctaatcgacctaagcaaaaagtatgttatgaaacaggaaagtctgcacaaactttttatgaagtgttggaatatgaagaaaatgcaacgcgggtaaaactatcaccaataaccggacgctcccatcagctacgggttcatatgctagcattaggtcatcctattttaggggatcgtttttatgctcatccgcaggcaagagcactcgcacctcgcctgcagttacatgctcaggaattatttattacgcatccggcctttcattcaccgatacattttgaatgcctggcagatttttaa

SEQ ID NO: 295777 - DNA, 801 bp, Proteus mirabilis
atgcgctattggggaaaattattaggccttatcatcggtagttttgccgggatcggcttttggggcattgtgattggggtttttctaggacacctttatgacgtacaaagaagtaaattaagctatggtgggcgctataatcgtgatagacaagcctatttctttgctgccacattccaagtcttagggcatttaaccaaatccaaaggacgagtgacacaaaccgatatcacattagccagtacgttaatggatagaatgaatttacatggggcagcacgtcaagcagcacaacaggcgtttcgagaaggtaaagaggttgatttcccacttagagccaccttacaacgtgttcgccaaatttgtgccggtcgccgtgatttactacagatgtttctggaaattcaattacaagccgcatttgctgatgggcagttacatcctaacgaacgtaagatgctgtttattattatagatgagctcggattttctcgtgcccgttttgaacatatattagccatgatgcaggcggggcaaagttttcattatcaacaagggcaaaattatcagccacaaactcaaggcccaacgctttctgacgcctataaagtgttaggtattaaagagggtgatgatgttaaaacaataaaaagagcttatcgaaaattaatgggagaacatcatcctgataaattggttgcaaaaggtttaccaccggagatgatggaaattgcaaaacaaaaagcacaagctatccaagttgcttacgatttgattaaaaaagaaaaaggatttcgttaa

SEQ ID NO: 295778 - DNA, 2367 bp, Proteus mirabilis
atgaaaaaaagttatcccacactgctggccaccttagtttgggccacaatttatgctcagcctgcatatgctgatcttgcctctcaatgtttactgggagtccctgtttataataagccattagtcgaaggcgatcctaactcattacctgtcaccattacggctaaggatatgcagggggaatacccacgcatgatccaatatagaggcaatgtagacattaaacagggaaatcaaacattaagcgcagataatgttgagttgacccaaacagaaggtgaaacaccattaagaatggtcaccgcgacaggtaatgtctcttatgatgatccacaaatcatcttaaaaggcccacgtgcttggtctaatctaaataataaagatactgatatcgaagaaggtaaataccaaatggtgggccgacaaggccgtggctacgcgaataaaatgcaaatgcgtggcgaaaaccgctataccattatggataaagggatgtttacctcttgtctacccggcgacgatagttggagtgttgtcggctctgaggttatcttagatcgtgaagagcaagtagcagaaatttggaatgcgcgttttcgtgttgctaacgtcccagttttctatagtccttatctgcaattaccgattggcgataaacgtcgctctggtttcttaattcctaatggtaactattctcgtagttctgggtttgacttccaactgccttactattggaatattgcccctaattatgatgcgactattaccacgaattatattagtcgccgtggtttaaagctcgataatgaatttcgttatttaacaaaaccgggtcgcggtactattgcggttgattggatcaaccacgacagtcaatacaataaagataaagcagacgaaaaagcgggttatctggcgcgtgattctgctacacgctggttattctattggggtcacagtggggtgatgaacaatgtgtggcgctttaatgttgactacacaaaagtcagtgataacaaatatttcaccgactttacttcgcaatatggtaataccactgatggttatgcgacgcaaaaattcagtactggttatgctcagcaaaattggaatgccacattaaccactaaacagttccaaattttctcagataataaagatgcaagggcttatcgtgctgagccgcagcttgatcttaattattataaaaatgatattggcccatttgattttcgtacttatgcacaatttgtccgctttaccagtgtcggagaaaacacccctgaagcgaaccgttatcatatagagccaaccatttccttacctgcctccactggctgggcaagctttaataatgagtttaaattgatggcgactcattatgatcaagatattcctgatgcttataagaagaagtatccacatcaaaaacttgatgatagcgtcaaccgcgtactaccacaatttaagtcagatatgaaagtggtatttgagcgccaatatgacactaacgatattacgcaaacgttagagccacgagtacaatatctgtatgtaccgtataaagatcagtctaatatcaataactttgactcagcgctattacaatccaactatagcggacttttccgtgacagaatgtacggtggtctagatcgcattgcttctgcaaaccaattaacggcgggtgttacttcacgtttttatgacagtgaactggttgaacgttttaatatttctgttggtcaaatctatttctttgagcgtccgaaaacaggttcatcgaatgaaattatcaatagcaaagatgaaaccggatctatggtatgggcaggcgatgcatattggcgcattactgatactttaggtatgcgtggtggtttacaatatgaccgtcgtttaggcagtgtctctatgggtgatgcgattatggagtatcgccgtgatagcgaccatctcttacaattgagctatcgttatgtagaccgtgattatattcaagcaacacgggttcgcccttatgatggcggggtcaatcaactaccagaataccaaaaaggcatttctcaaattggtgttgtcggcagttggcctttagcagaacgttggggactggtcggcgcttattactttgataccaaagattcagagccagtaagccaaatggttggcttacaatataacacctgttgctgggcggtaaacgttggttatgaacgtaaaattgttggctggaaagaagaccacagcgatattgacaacaaatggtcaatcaatttggaactcagaggcctaagtaacaatcatagtttaggtagtcaaaaaatgcttgagcgcggtatcttaccttatcaaagagcgttttga

SEQ ID NO: 295779 - DNA, 678 bp, Proteus mirabilis
atgaaaaattggaaaacgctggttatcggcttaatgatcacggttggtgcagccaccagcacaaccacttttgcagcacaagaactcaaccgcgtatcggctatcgtcaataacggtgtcgttctggaaagcgacgtcaatagaatgttacaaacggtgcaaatgaatgccaaaaatgccgggcaagaaatgcctgatgagcaagttttgcgccaacaaatcttagagcgcttggtgatggataacatcatcttgcaaatagctcaacagatgcaaattgatattcctgaagctgccgttgagtcaaccattcaagggattgccgcagaaaacaacctgacactagagcagttaaaaaaacgtcttgctgccgatgggattgcctataacgattatcgtcaagatattcgtaaagagatgatgttagcagaagtgcgtaataacgaagttcgtcgtcgtattacgattttgccacaagaagtggactcattagctaaacaaattgaaagccaagcaagccaaagtattgatcttaatcttagccatatcttaattccattatcagaaaatccatcacctgcagaaattgaaaaagcacagcaagtggtgaaccgtattaagaaccagctaaaaaacggtgctgatttcggaaaattagctgccacttattggtggtaa

SEQ ID NO: 295780 - DNA, 609 bp, Proteus mirabilis
atgggatgggcatcaattgatgagttaccgacaatctttgctaaacagcttgctaatgcacaaaaaggtgaaattgtcgggccactgcaatcaggtgttggtctacacattattaaagtcaatgatatacgtggtgcttcaaaaaccgtttctgtgactgaagtaaaagcacgccatatcttactaaaaagctcgcctatcatgaatgatgagcaagcttatgccaaactacagaaaatttccgccgatattcgtagcggtaaaatcagttttgcggatgcggctaaagagtattctgaagatcccggttcagcattacgtggcggtgagttaggatggtcaatgcctgatatttatgatccagctttccgtgacgcgttgatgcgtttaaacaaaaatgaattaagccaacctgtgcgctctaattttggctggcacttaattgaacttgaagatacgcgtagcgttgataaaacagatgcagcgaataaagaacaagcttaccgcttactgtttaaccgcaagtttaatgaagaagtgcaaaactggatgcaagagttgcgtgcaggcgcttatgtgaaaataatgaacgagaataatgcaaactaa

SEQ ID NO: 295781 - DNA, 1002 bp, Proteus mirabilis
atgcaaactaagctaaaaaaacccctcgttatcacccccggcgaacccgccggggttggtcctgacctgattatttcattagcacagtcacagtgggcacttccttgggtagtatgcgctgatcctcaattattacgagcaagagcacagcaactcaatctcccactcactttagttgaatattccccagataatccacctacagcacatatccctggccaaatttgtgtacttgccgttgaattaaccgacccttcggttgtcgcaggtacacttaatactgccaatggccactatgtggtacaaacgcttgctcgcgcttgtgatggatgtttaaatggagagttttctgctttagtcacagggccggtacataaaggggttattaatgatgccggtgtgccatttacagggcatacagagttctttgccgatcgtagccattgtcaacgagtggtgatgatgctggcaacggacactttaagagtcgctctcgccaccacacacctgcccttaagagaaattgctgatgcgattacgggtgagttgcttaatgagatcatcaccattttaaaccatgatctaaaaaccaaatttggcatctcatcaccacatatttacgtatgcggcctaaatcctcatgctggagaaggcggtcatatggggcgtgaggagatcgatattattgaacccgcattaaagcaattacgccaacaaggtattcaacttcatgggccttaccctgcggataccttattccagcctaaatatttaacacatgcagatgctgtgcttgcgatgtatcacgatcaaggattacctgtgctaaaatatgaaggtttcggtcgtgctgtgaatatcacgctcggtctaccttttattcgtacatctgttgatcatgggaccgcccttgaacttgcaggtactaaaagcgcagatgctggcagttttcgcaccgcattaaatttagccattaatatgatacaaaattgtaatgaataa

SEQ ID NO: 295782 - DNA, 819 bp, Proteus mirabilis
atgaataatagagtccatcaggggcactttgcccgcaaacgcttcgggcagaactttttaacagacagctatattattgaaagtattgttgaatctatttatccacaacccggtgaagccgttattgaaatcggtcctggtttaggcgcgcttactgagccggtgggggaaagaatggataaaatgacggtcgtcgaaattgaccgtgatttagctgcacgcttagaagttcaccctacattaaaagataagctaaccattattcagcaagatgcgatgacgattgattttgcccaattagcaaaagagcgtcagcaacctctgcgggtttttggtaacctaccttataatatttcaacgccattaatgttccatctatttagttttgctgatgccatttctgacatgacttttatgttgcaaaaagaggtggttaatcgcctagtggcaagtcatggtagtaaaacttatggccgcttaagtgtcatggcacaataccactgccaagtcattcctattattgaagtgccaccaagctcatttaagccagccccgaaagtagattctgccgttgtgcgtctgatcccttataaggaaaaaccctatccggtgacagatattgctatgttaagccgtatcacatcacaagcctttaatcagcgccgtaaaacgttacgtaatagcttaggtggactacttacagcagaagatatgctggcattagatattgatcccactgcacgcgcagaaaatatttctgttgagcaatactgtaaagtggcaaactggttatcatcacaacagcaacacgctgagtga

SEQ ID NO: 295783 - DNA, 378 bp, Proteus mirabilis
atgtttacttcatccaaagtggcgatacaggtacaaagcgtttacattgagagccaatcttcgccagaagaacagcgctatgtttttgcttataccatcaccatacataacttgaataaacatgctattcgcctcctacgtcgctattggttgatcaccaatgcacaaggaaataccactgaagttcaaggtgaaggggttgttggtgaacaacctctgattgaagctggctcacggtatcgttataccagtggcgcagttcttgaaacgccgatgggcaccatggaaggtcattatgaaatgattgacgcacaaggacgtctgtttcaaattgacatccctgttttccgccttgctatccctacattgataaattaa

SEQ ID NO: 295784 - DNA, 822 bp, Proteus mirabilis
atggctacttatttaattggcgatgttcacggctgttatcgtgaattacgccaacttctcaatcaagttaatttcgacgccaatcaagatacactttggttaacgggggatctggttgctcgaggacctgattcacttgaagtattgcgttttgtcaaaagcttaggctcagcgttaaaactcgtattagggaatcacgatctgcatctactgggggtatttgcaaagattagtcgtaataaacccaaagataagcttaatgaattactcaatgcaccagatgctgatgaattaattaattggttacgacgtcaaccgctattacaagttgatgaagaaaagaaaatcgttatggcacacgcaggtattacccctcagtgggatttagcaacagctaaaaaatgtgcccgagaagtagaagccatattaagtagcgatagttacccccttttcattaattccatgtatggtgatatgcccaataattggtcacccgaattaactggcttaccgcgattacgctttagcaccaatgcttttactcgtatgcgctattgttttcctaacgggcagttggatatgatttgtaaagataagcctgaaaatgcgcctgcgccattaaaaccttggtttgatctacctaatcaactaccgaatgattacagtattatctttggccactgggcctctttagagggaaaaggcacccctgaaaatatctatgcgctagatactggctgttgctggggcggtgttctaacctgtctacgttgggaagacaaacgttattttatccaacctagtctcacacatttaccataa

SEQ ID NO: 295785 - DNA, 555 bp, Proteus mirabilis
atgaaactgagtaaaattgctttggctgcggctttagtatttggtattaattctgttgctacagctgaaaatgaaacgcctgcaccaaaagtaagttcaactaaaggcgaaattcaattaaaaggtgaaattgttaattcagcatgtggattagcagcatcttcaagccctgtaattgttgatttcagtgaaattccaacttctgcattagcaaatcagcaaaaagcaggaaatatcaaaaaagatattgaattacaagactgtgatacaactgtagcgaaaactgccacagttagctatacaccaagtgttgttaacgctgtaaataaagatttagcctcttttgtttctggtaacgcatctggcgcaggtattggcttaatggatgcgggtagtaaagcagttaaatggaatactgcaactacaccagtacaattaattaacggtgtatctaaaatcccattcgttgcttatgttcaagctgaatcagctgacgctaaagtaacgccaggtgaattccaagccgttatcaacttccaagttgattatcagtaa

SEQ ID NO: 295786 - DNA, 2487 bp, Proteus mirabilis
atgttaattccttattcaccccacacaatatggaagaccatttgtgcgactttgctattaagcttggcgtttttctcacaagcagagcaggacgattctgtggaatttaacattcatatgctagacgcggaagatcgcgataatgtcgacctttcacgtttttctacctcaaattatatcattccgggtatgtactatttagatattcgtctaaatggtcgcgactttcctcgccaaaatattaattatattgaagtagcagataatcattccgtggcttgtatcgaccctactcttttaaaaaagttaacaatcaaccaagaaaaccaaaaatatatcaaacaaatatcaccagattgttttgatattagccaattacccggtatctcgattaaaaatgatggtggtgtacttgatatcacgttaccgcgctcattaatgaaatatgaagaatctgattggacacctccggagctttgggatagcggggtctctgggcttatttttgattatacattaacaggaacgtcaactcgacctaataaaggcaataataacaataccttaactggttatggtcaagcgggattaaacttgggtgaatggcgtttaagagctgaatatcaaggcaattattcttctgaatattcatctaacaatcgttttgattggaaccaaatttatgcctataagccattaccagatctcgcagccaaactaacggttggggaaacttatttaaactctcaaatttttgatagtttccgttttacaggagccaatttacaaagcgatgagagaatgttacccccttctctccaaggctatgcacctgaaattcatggcatcgccaataccaatgcaaaagtgacggtaactcaaaatggacgtttaatttatgagacaaccgtacctgctggccctttcgtgattaaccatctacaaaataccgtacagggtcaactcgatgttagagttgaagagcaaaatggtaaaattaacgaatttcaagtgcaaaccgctaatttgccttatatgactcgcccaggatctgtgcgttttaatacctcactgggacagtcatccgtgaacaaccataaaatgcaaggccctcttttctatcaaggggatttttcatgggggatgaataatacatggtctctctatggtggtgctttacttaccgctaaagattataacgcatggtctttaggtatcggccatgatatgggacgttttggtaccctttctggtgatattacacagtcttatagtaaaacctatgataatgaaaaaatcaatgggatgtcttttaaactaaactatgcaaaaacttttgatgagtaccacagtaccattacttttgcaggttatcgtttctcagaaaaaacatttcgctctttttctcagtatattgatgagcgttataacggcatcaataataatggctatgaaaaagaaatgtacaccattaccggtaataaaactttttgggcagatgatgcagagaaatcgaccaccctctatctctcttatctccaccaaaattactgggataaaaatactcaagagcagtatggtgtcacagtaagtcgtaatttttccattatggggattgagcaaatcaataccaacttgtcagcatttcgtacccaatataaagggaatactgacgatacgctctcttttaatatttcactaccattaggaagtggtcgcaatattggttataacttgcaagataacaatggcaaagtgacacaaatggcctcttatgctgataatcgcgattataataatttatggcgcataagagcaggcttaagttcggataagaaagccaataccgatggttattatcaacatcgttctcagtatgcagaaatcaatgccaatgcaagctatcaacaagataattacttagcagtgggcgcaacgataaaaggcggttttactgctactcgttatggcgctgcattacacagtagcagtatgacctctagcaccgcaagaataatggtggatactgatggtgttgcaggggtgccctttaatggtcaaagcacgactacgaaccgcttcggcattggcgtactaaccgacttaacaagttataacaatgttgatgcacgtattgacgtcgataagatggatcaagatattgaaacacgtaaagccattgcttcaacaaccttaacagaaggtgccattggttattaccaatttccggttcgtcaaggtgaacgcttaatggctgtcttacagacaactgataataaataccctccttttggtgcagaagtcaccaatcaaaaaggggaaagtattggtatggtgatggaagaaggccttgtttatattgcgggtgttaaccttaatgaatcattaaatgtaatttggaacggtaaaacacaatgttcaattaccattcccgcggaaataacagatcccttaaaacatcaatcgctcgtttgtcaggatcgttaa

SEQ ID NO: 295787 - DNA, 765 bp, Proteus mirabilis
atgaactcattcagcacactaaaaacactattttgtggctctttgctggcactgagtctagtgaatacaacacaagcgggtgtttcactggatagaactcgtattgtattaacgggtaatgaaaactcagccagtgttaatttaaaaaataccagccctgatattccttttttagcgcaatcttgggttgaaaatgaaaatgggcagaagatctcttcacccttagtggcacttccaccgttacaacgccttgatggtgctcaaaaaggcgtagttcgcattacaaaaacagctgaagttgggctattacctcaagatagagaatcactgttttatttaaatgtgcgtgaaattccacccgcaccaaaacaagccaacgtattacagatggcgatgcagtcacgcattaaattattctatcgccctagtgccatagtacctgaaaaaccgggaatggtttggcaagatcaactggtgtttaaaaaacaaggtaataaatttattgttaataatccaaccccttattacatcacgattatctcactttctaataaattaaatggtgaggatagcgataaattaaccaccttcccaggattaatggttgcgccaaaagcttcactggatataccagtaaaaaccagtaacgttaatcagttttatatgatgtatgtaaatgattacggtggacacccagagctcaaatttgtatgtcagcaagatagctgcaaagtagcccctaaagatcaacaacctaaatattaa

SEQ ID NO: 295788 - DNA, 1074 bp, Proteus mirabilis
atgatcctcaataaaaaaaacattcattccaaatcagtaatgctattttgtgccggcattgtttctttaatgccattgcacgcaattgcttatttacaaggtgaagtgagaaccaatggtggccctaatattttctatgccgtattagatcacaccacctttcctaataacaaagcgggagaattagcaacagtaaacttttcgttgcctgatcgctatgatggcacggtatattgtcctaactcacgtatttatgatcgtgcattaacctattttaaagcaacgactgatttacctcctgttggtaataacttttatcaattaaatgagtatgttgatatcaaaattaattttgaaatttgggggcctaatcctttacccacagtgcccttttctgacatacctaataatagaaataaccaacaaggttgcagagtaccctcttcacctaaaccgcatatttcctcaggaagtagcggtcaactcactttccgtttaagaaaacccattattaatggtgtcagtcttaatgggcaatctcttgcacaaatgtatgccatggtaagtcacagcggtgcgccaaaaacctatggttcagagcccatttctaaattagtgatcacctcggggatcattaccactaaagataaatgtatctttaataatggttcaccaattacctttgactttggtaatgtgggaaatacctctgattatctcaatgggcaaaactacaaaattactcgcaacatccccatcaaatgcgaagggggaagctttaccgatcctaatagcaaaataatgtttaaagttcagacaggtagctcaggtattgcgagttttgattctaactaccttggtacaacaggctctgtagatagaagtaacttaggtatcgtcttaagagataagtcaggtacgattatcccacctaaccaatatttctcggttggcaaactcaataatttcaacggaaattgggaagtaagtgcagcccccatcgccaaagcgggcagtaaaattactgaaggtgagttttcagctcatgcgacactcattgcggagtttatgtaa

SEQ ID NO: 295789 - DNA, 549 bp, Proteus mirabilis
atgaaaaacagcataataaagtcagctataacttgcttgttattgctctctccgaacacttttgctgccactgatattattggtggagagatggaatttaaaggtgttgttgttgcacatggctgtacgattgttgcgggagatgaaaataaagttattgatttcaaacaaatatctgcaaaagatctctattcactacaaaaaagcaaccccgttgcttttagtatcagtttagaaaattgtagccaagatatttataaaagtgtcactatcacattagatggtcaagcgcattcaacaatgcccaatcatatagccgttactgggagtggctcagaagatccgaaaagtattggcatcgcttttaccgacaaggcgcataatattattgaattaaaaaaaccaagtgctcctcaacagcttaataataaacgagtacaatttgattttatggcctatgttgaagcaacatcatcagctattcaaaatcaaacgatactcacaggaccatttcaagcacaagcaacctatacactcaattaccaataa

SEQ ID NO: 295790 - DNA, 531 bp, Proteus mirabilis
gtgaataaaattaaagatgatatttattggatgcataaagcgattgagcaggcacataaagcacaacaactcggtgaaattcctgtaggagccgtgttagtcgctgataataaaatcattgctaaaggttggaatcactccattattgataatgatcctactgcacatgcggaaattatggcattgcgtaaaggtgggaaacatctacagaattatcgcctacttgacgccacattatatatcacgttagagccttgcgttatgtgtgctggagcaattgtgcatagccgtgtaaaaagagtggtctatggtgcatctgatctaaaaacaggtgccgcaggctcatttattgatattttgcaacatcccggaatgaaccataaagttgaaataacatcgggtgttttaggtgaggagtgcgcacaactcttgagccagttttttaagatgagaagggcagagaaaaaacaactgaaacaacagcaacgtttaattactcaaggcttaatcatacaagagaaagccaaatag

SEQ ID NO: 295791 - DNA, 222 bp, Proteus mirabilis
atgtgcgaacccgaatgtcctaacgatgccatttcaatggggaatgatatttatgaaatcaatcctgatctttgcactgaatgtgtaggacattatgataaaccgacttgtcagtcggtatgccctatcacgaatacaattatcatcgatcctgctcatactgaatcgcaagatgaattatgggaaaagtttgtactgatccaccacgctgacaaaatctaa

SEQ ID NO: 295792 - DNA, 381 bp, Proteus mirabilis
atggctattgttggtataggtatggatatcattgagatatcacgtattgaagagataatagggcgttcaggagaacgcctcgcgcgacgtattcttactgataatgaatggattatatatcaatcacataaacaacccgttcgttttttagctaaacgatttgcggtaaaagaagccgcagccaaagcattaggtacaggcattcgtttaggattggcatttaaccattttgaagtcgctaatgatgaattaggtaaaccaacattgcactttttagctgtggcaaaagagatggcgcaaaaagcgggaataaatgctattcacgtgacactggctgatgagcaacgttacgcctgtgcaaccgttattttagaaaaataa

SEQ ID NO: 295793 - DNA, 732 bp, Proteus mirabilis
atgtctgatattctacttggcgttaatattgaccatattgcaaccctacgtaatgcccgtggtacaacttatcccgatccggttcaagcggcatttattgcggaacaagcgggtgctgatgggatcactattcatttacgtgaagacagacgtcatattaccgatcgtgatttaatgctgatcagccaaacggttcaaacaagattaaatttagaaatggcggtaacagaagagatgattgagattgcttgccaaactcaacctgatttttgttgtttagtgcctgaaaaacgccaagaagtgaccacagaaggtggtttagacgtggtgggtaatgaagagaaagtggctgatgcgattaaacgtttatcattagcggggattaaagtctctttatttattgatcctgaccatgagcaaattaatgcagcagatcgtgtcggctcaccttttattgaaattcataccggtgcttatgctgacgctgaagatgaacaggctcaagagaaggagtttgttcgcattcgtgatgcggtaacctatgcagcgtctaaaggtttaaaagtcaatgcaggtcatggtttgcattatcataatgtacaacgtattgctgcattacctgaactttatgaactcaatattggtcatgcgattattggtcgagcggtatttagtgggcttgcaccagccgttgaagaaatgaaacgcctaatgagagaagcgcgtcgctaa

SEQ ID NO: 295794 - DNA, 741 bp, Proteus mirabilis
gtggaaggctggcaacgtgcatttgttatccatgctcggccttacagtgaaacgagtttattgctcgattttttcactgagaatgaagggcgagtgcgcatattgtcaaaaggtgcgcgcggccgtcgctctcctttaaaaggagctcttcaaccttttactcccttgctcattcgttggagtgggcgaggtgagataaaaaccctccgtgatgctgagcctatctctttagcattaccattaacaggcacagtactttacagtggtctgtatctcaatgaattactttctcgtgttttggaaaatggcacatcatatagcacgctttttttcgaatacttatcttgtttgcaaatccttgctgccagtgaaactactccagaagctgctctaaggcgctttgaattagcgttattaacgcaattgggttatggcctagactttttgcattgtgcaggaagtggtgaacctgtttctgataccatgacttatcgataccgagaagaaaaaggctttattgccagtttggtggttgatcactatagttttactggattggaattaaaatcgctggcaaaacgagaatttcctacggctggcacattgaaagcagcaaaaaggtttacacgaatggccttgaaaccttatttaggtggaaaaccattaaaaagtagagagctgtttcggcaatttgctattaaaaagtgtgcgaaaaaaagcgtattgatagaggataaataa

SEQ ID NO: 295795 - DNA, 972 bp, Proteus mirabilis
atggctagcacgtttgccttgatcctaacgttggcaacgctaattacgggtattttttggtgtatagaccgttttaaattaaagccagcccgcaaagcgaagttaaaacgtttacaagagttaacgcagggaagtgaggatcagcaagagttagcaaaatcgattaataaaccaagctgggcagagacattaggctctctgtttcctgtattggcgattgtattgattttgcgttcctttgtgtatgagccgtttcagatcccatctcgttcgatgatgccgactttattagtcggtgatttcatcttggttgaaaaatttgcttatggattaaaagatcctattacacaaacaaccttgattagtacgggtaaacctaaacgtggtgatattgcggtatttaaatacccacgtgatccatcaactgactttattaaacgggtgattggtttaccgggggataaaatagtgtatgacatgacgtcgaagaaattacacatttacccaaattgtaataaagcaatatgtgatgatgaaatagcggtaacctatggtacagcgtatcctagtgaatggacattactgttacaaagtgtacctggtggtcaacgtattagcggtatgaaatcgattccgattgaagagccaatttctacagctacgcaatttcgccaagaagagagaattgaaacgattggtgatgtctctcatcgtattatgactattccgggagatgttactgtacctgaatttattcaaccgggattacctcaaggtacgtggattgtccctgaaggtcagtattttatgatgggtgataaccgtgatggtagttcagatagtcgtttctggggctttgtgcctgagcaaaacttagtcggtaaagcgacaacgatttggatgagcttcgagaaacaagaaaatgaatggcctacaggtgttcgtttcagccgtattggtggcattaagtaa

SEQ ID NO: 295796 - DNA, 1434 bp, Proteus mirabilis
atggatcttactgtcgttccggtattgaataaaattgacttacctgccgcagagcctgagcgtgtcgctgaagagattgaagatattgtcggtattgatgcgaccgatgcagtgcgttgttctgctaaaaccggcgtgggtgtaaaagaagtgattgaacgtctggtgaaagaaatacctgcgccagaaggcgatcctgacgcgcctctacaagcacttattattgactcttggtttgataattaccttggtgttgtctcacttatccggatcaaaaacggtaaagtcaacaaaggcgataaaatcaaagtgatgagtacagggcaagtttataatatcgaccgtattggtatttttacgcctaaacaagttgatacaacatcgctaagttgcggtgaagtaggctgggtagtttgcggtattaaagatattcttggtgcacctgttggggatacattaacagccgcacagaagcctgcagacaaaccattaccgggctttaaaaaagtcaaaccacaggtttatgcggggttattcccggtcagttctgatgattatgaatcattccgtgatgcattaggaaaattaagcttaaatgatgcgtcactcttttatgagccggaaagttcatccgcattaggatttggtttccgttgtggtttcttaggccttctccatatggagattatccaagagcgcttagagcgtgaatatgatcttgacctgatcaccacagcaccaacagtagtttatgaagtggaaatgactaatggtgatatcatcatggttgatagcccatcaaaactgccggcactgaacaatattgaagagatcagagagcctattgcggaatgtcatatgttactaccgcaagaatacttaggtaatgtgattactttatgtgtcgaaaaacgcggcgttcaaactaatatggtctatcatggtaatcaggtttcattaacttatgaaattccgatggctgaggtggtattagatttctttgaccgtttaaaatcaacctctcgcggttatgcttcgttagattataacttcctgcgtttccaaggctccaacatggtacgtgttgatgtcttaattaatggtgagagagtcgatgcacttgcattaatcacccataatgataacgcaccgtatcgtggacgtgagttggtggaaaaaatgaaagaattcattccacgtcaacagtttgatattgcgatccaagctgcaattggcaatcatattattgctcgttcaactgttaaacagttacgtaaaaacgtattagctaaatgttatggtggtgacgttagccgtaagaaaaaactgttgcagaaacagaaagaaggtaaaaaacgtatgaagcaaattggtaatgtcgagttaccacaagaagcgtttttagccatactgcatgttggtaaagataaataa

SEQ ID NO: 295797 - DNA, 393 bp, Proteus mirabilis
  misc_feature (218)..(227): n is a, c, g, or t
atgaaaaacatacgtaacttttccattatcgcacatattgaccacggtaaatcgacgttatcagatcgaattattcaaatttgtggtggcttaacagatcgtgaaatggctgcgcaggttcttgattctatggatcttgagcgtgagcgtggtatcaccatcaaagcacaaagcgtaacactcaattataccgctgatgacggtgaagtttatcagcnnnnnnnnnngatgaactttccggctcataaaagagtgacgcatcatttaagcttaactttatcgatacgccaggacacgttgacttctcttatgaggtttctcgctctcttgccgcttgtgaaggtgctttactggttgtcgatgcagggcaaggggttgaagcccaaacattag

SEQ ID NO: 295798 - DNA, 1590 bp, Proteus mirabilis
atgtctaatcctatttttcagcaagaagttgctcgtcgtagaacttttgccattatttcccaccccgatgcgggtaaaacaaccatcactgaaaaagtgttgttattcggacaagctatccaacgtgcaggaacagtaaaagggcgtggctcaaatcagcatgctaaatcagactggatggaaatggaaaaacaacgtggtatctccattaccacttctgttatgcagtttccttacgctgattgtctagttaacttacttgataccccagggcatgaagacttctctgaagatacgtatcgtactttaactgccgttgactgttgtttaatggtcattgactcttcaaaaggggtcgaagatcgtacccgtaaattaatggaagtgactcgattacgtgatacgccaattttgacctttatgaataaattggatcgtgatattcgtgatccgatggaattaatggacgaagttgaaactgagctaaaaattgcctgtagtcctgttacttggccgattggctgtggaaaactgtttaaaggggtttaccatatcttaagagatgaaacctatctttatcaaacaggccaaggtcatactatccaaaactcacgagtaatcaaagggttggataatcctgagttagatgaagcgattggtgatgatttagccgttcaattacgtgatgagctagagttggtgttaggtgcatcacatgagtttgatcatgaagctttcttagcgggtgaattgactccggttttctttggtaccgcattaggtaactttggtgttaatcacatgcttgatggtttggtgaagtgggcgccagcgccaatgcctcgtcaaactgatatgcgagaagtgacagcggctgaagagacattcacgggttttgtctttaaaattcaagctaatatggatcccaaacaccgcgaccgtgttgcttttttacgagtggtgtcaggcatgtatgataaagggatgaaactgcaccaagtacgtacgaaaaaagatgtggtgatttcagatgcattgacctttatggcaggggatcgttctcatgttgagcatgcttatcctggtgatattattggcctgcataatcacggtaccattcaaattggagatacttttactcaaggtgaaatgttaaaattcaccggtattcctaacttcgctccggaattattccgccgtattcgtctacgtgatccgctaaaacaaaaacaattgttaaaaggtctggtgcaattatctgaagaaggtgcggtacaggtgtttagacccctagctaataatgatttaattgttggcgcagttggggtgctacagtttgatgtcgtggttgcacgcttaaaaggtgagtataacgttgaagccatttatgaatctgtgaatgtatcgacggctcgttgggttgaatgtagtaacgaaaagaaactcgaagaatttaagcgtaaaaatgagcaacatctggcattagatggtggtgataacttaacttatattgcaccaacgatggttaacttaaatttaacccgtgaacgctatcctgatattgagttccatcaaacgcgtgaacactaa

SEQ ID NO: 295799 - DNA, 192 bp, Proteus mirabilis
gtgatcgttgttgatcctgagttatcttattcttcagatttattggttgttgcgcgtttggatgattcgaaagaagcaacctttaagcagttagtcattgacgatgaacagaaatacctaaagcctctggactcccaatattcagcaacagcgatcaacgacaacggcaccatcattggtgtggcacgataa

SEQ ID NO: 295800 - DNA, 1428 bp, Proteus mirabilis
gtgtggcttttcgatatcattaagaacggcacactggtcgataaccagtcctattttgtcagcgaaggcattttgaaaaatagacgtttaggaaagtcgataacccttagaaccaaatcaaaagggcagtggacctatcctcataacgacgagtctgcaatttggcactttttgaattcggtatctcgtgatgtcgaaaaaacgctgaatgataatatttccgatgctttaatactcttcaatgatgaagattacgaacacaatacagatggcggtttcatcgatgtctctggtacggatgccagaaattttaatctcgacacgggcaatttaatcggatttgttaagcgaggagattactctctgaagatcagctcacgttttggtgatgctttccttcaatacatcattgcagatgccgatggatttctcgaattagaaaacattggaggagaaagtcacgcagacggttacgaatggcttttagcatatctatggaacattaagtttaagagagcctaccgcttgggcttgccaaagacttatattacaagaaatgatcgtatttcccgcgtaaggggaactataaatgctacagattattttcagaataaatcatctggaaaatatttatgctcgtaccgagagcacagctacgatagccctgcaacttcactttttataaaagcttatgaagcagttgcacattactcattttgtcaccaaacacgaaatatctatagcgcatttctgactgccaatcaggggataaaaaggtcacagcaagaaattttgaggacttctcatttcaccaatcctttctacaatgattataacgtgctcattgacttatctaagcaagttattggccggaagggctctgattttgattcgcagcaggattcgagtgctttctttttcgatatttcgatgttgtttgaatatttcattcgtaagctcatcaagcgagatgggttacgcctgctaggtaagttcgagctatgtcaggaaatagcatctggtgcgctcagcggttatatgagaaaacttgaacctgatcttgttatagaaatcgatgagagattattcgtatttgatgtgaagtataaagcatttgattcacaatttggggtgaagcgtgaagatctttttcagctacatacttacatagggcagtatggaaatattgccgcaatcaaggggtgtggatttatttaccctatatcagaagaacgatgggcttcacttaaccttgaaaaaacacagggggtgatttcagatattattcaccagcaagggcaagagataccgttccatgtgctttttctaaaaattcctgaagatacttatattgattttaataggaaaatgaaagagcagtgtagtattttcattgatgccctttattctaaggttcttaatcagtga

SEQ ID NO: 295801 - DNA, 1644 bp, Proteus mirabilis
atgaaaagtagactgaaaaacctatataaatatcttattgagaacaggaaacatgaagtcaatggatggcacaaagcctatcgtgacttttacagtcaggtcgctcaaattcgtgagcgaatcacatctggagaaggcttgtctcaaaatgatgaagcttttctgaagcagttaatctatgagaagagcaacggtatcgcttctcgcggacagtctgtgttgagcaatgacaatttccagtcattcattaaaaacaagaatttcatatccgcattagaaaaatttatattgattccaaacagtgaaaacttcacgattttttctgatacgtggtctaaccaaggtaaatccaacaaccctgttctcgttaatcgagtggctgcagcttgtacactcgaagtctccacaacggttgactccggtaaattcaatcaggtttttaattggcttatacgcgaaggaataattccagtatacccaacagaagaaaatcaaagttggtttgctaaaaacatttttctattaaaaagcatcaaaagcgagtttgataatgagcttcgggaaggtaaaactgatgagttttatcttagtcagtttgtttgggtgctttacgagaatttgtcaaacccattcagtttaaagaagcagattattaaatacggggcaccggggacagggaaaacttatcaagcacgcctgcaaacttcgctcatgtttgacatctggaaagaggaatttacttccaatagccgtctcacacatgcaagtcagattgagttggttcaatttcatccttctttcagctatgaagactttatggaagggctacgtccggttttgggcagtgatgggaactcccaattaaggttgcaaaatggtgtttttaaagagttttgtcgaagcgctggtaagtgggaaatcgatgtatatgggcttggacttgctcagaagtgggagtctcttactatcaaggaacttctcccgtttagagaaaagttatcaggtgagcattggcgggatgttttcgaaatatcagatacatccaagcttgtatcggaagcagtaccaccatttttctttataattgatgaggtaaaccgggctgagttgtctcgcgtttttggtgagttaatgtactgtctggaataccgaggcactagaggttgcgttaaaacccaatatgccaatctgaacaatgaacatactggtatgcttaaggacgctaaagggtatttgttcttcattccaacaaacatctatcttattggaacgatgaacacgatagacagaagtgtcgaaagttttgacttcgctttacgtcgaagattccgttgggaagaagtggtgcctgatatggcgctattgaaataccatttgaaccaattttgcaaagcttggctgcccctggtggataaccttgaacgcttgaatgaattgatagctaaagagcctttgcttggtaatgattaccaaattggtcatgcctatttgatggatttgaagtatgcaaccagccttacagtttcggaggtacgagagcgtgtatgggatgattgtattcgtccgttattacaggagtatcttcgtggaacgggtaaggagactgaactgattagctccttcggaaaggcgtttggggtttaa

SEQ ID NO: 295802 - DNA, 447 bp, Proteus mirabilis
atgaagaccatttccccattaaaccctgctgatttacctttagcatgggaaattgaaaaactaagtcattcattcccttggagcgaagaaacattctatagtaaccaaggtgatcattattttaatctaaaaatttgcattgataatattatggtaggttttgctattacgcaattaatattagatgaagcaacgctttttaatatcgcgatacatcctgattatcaaggtaaaggctatggaaaagcattgttattagaacttattgataatattgaaagaaaagatattgctacattatggcttgaggtaagagaatccaatcaaaaagcatctaatctctatgaatctataggatttaattcagtatctgtacgtaagaattattatccaacagcaacgggaaaagaagatgcgataatcatggcttatccaattaaattctaa

SEQ ID NO: 295803 - DNA, 411 bp, Proteus mirabilis
atgagccgtaaagacagaatgttagcccaacttgggattcgtcaatgggtacttcgtaagcctgctgtattaaaaggcgaacattctgtgcaatttccggataccactcgtttacttatcattactgatgatgttgttgatctaaataacgggcttttctctgatatttttagcactatgggaatagataaaagtgaaatctattgtattacctcagaggatgtgagcctgctcacaggatcatttacaccagcctgttggctattaggtactgatatcactctacctgctcaatatacttctctgagaagcccttcattacatcaattatattttgatgccaatgcaaaacgcgatctttggaaacaaatctatcaacatgaagaccatttccccattaaaccctgctga

SEQ ID NO: 295804 - DNA, 1014 bp, Proteus mirabilis
atgtcctcattgtcccctgccagcgaagttattcttcgtcatctagatcatttcgcagacaggcacgtactcatagcaggtgatcttcaagacacgctagcatcacaaattcaggccaaaagtgttagagcctatacaaatcaatatcaccagtggctaccgctactcaaatccatgggtgataatgcattttttggtttagcggcagatcaatcattcgtaaaatattgcgacactttgatttatttttggcctaagaataagaatgaagcaacttttcagttacgtagcttatgtgcaagtttatctgtcgatactgaaatcttcatcgtcggcgaaaaccgtagtggtgtaaaaagtgctacggaattaatgaatggtatagcaaagctaaaaaaaatagattcagcacgtcgttgtagcctcttttttggttcactaacctatcaaacactctttgatcgaaataactggtggcaaacttatcgttatgacgatttaacggtgatggcattacccggtgtttttagtcaaaccgcattagatgaaggcagccgattattactctctacatttgatgatacaatggtaggtgacttactggatatggcctgtggttgtggagtgattgccacggtattaggcaaaaaaaacccgatgttaaaactcacactctgtgacgtcaatgcagccgctatttcatccagtattgccacgttaaatgttaatgaattagaaggacgggttattgcaagcaatgtctattctgcggtagaagaaacttatgattggatagtctctaatcctcctttccatgatggcttaggtaccagctatcaagctgcagaagacattattcgtctcgctcctaactttttgaaaaaaggcggtaaactgcgtattgttgccaatgctttcttaccttatcaagatattcttgatcacgtgtttggctctcatgaagtgcttgcatcaacaggtaagttcaaagtttaccaagcaaccaagaaatag

SEQ ID NO: 295805 - DNA, 264 bp, Proteus mirabilis
atggctaaatcaacacgtatctcctctgtctcttcttggacatctcgtattagtttatgggaaatgttggctgttgcttcgttatttactgtgatcacccactctattgcaggaacagcagcatttacattggttcttgttatttctatgttgctatctaccattatgttatttcataagaaattacaaatgtgggtgatgatccccgccggcgttgtgatcacctatagcttaatgaccttttttttaacctatcatgggtag

SEQ ID NO: 295806 - DNA, 543 bp, Proteus mirabilis
atgaaaaaaaatattcgtctattaacacataatgaaatccctcgcgtttgggaaattgatagaacagaattgattgaaaggctatatgttttacaacaagggcaactggtgttatctgaacagcgttttgatatgaaaggctggcctgaaggtgaggcagaacattatacccctgttttacttgaaagcgctgagcgcggtgcccctttttggggagtctttgaagatgacaagttagtcgctgctgccagtgttgatccacagtggcgaggccaagataacaccttgttacagctctctttcttacatattagccaccagcagcgtgggcaaggattagcccgtatattgtttgattattgtgtggaatatgcgaagcaaaaaggggctagcggattatatatatcctcaacgccttctgaaaatagtgttaatttttatcagcatatgggctgtcgtttaattgatgtgcctgatactgagctttatgaaagagagcctgaagatattcatttagtgcttaattttaataaagaagattaa

SEQ ID NO: 295807 - DNA, 1638 bp, Proteus mirabilis
atgctaacactgcttcatttactctcatccgtggcacttttagtctggggaacacatattgttcgcaccggtattatgcgtgtgttcggctctgatttacgccgaattttaggtaaaagtattaataaaaaatcgaatgcttttcttgccggtgtcggtgttactgccttagtacaaagtagtaatgctacggcattgctagtgatttcgttcgtcactcaaggccttatttctattacacccgctttggtgattatgctaggggctgatgtgggtacagcgctaatggcgcgggtgctgacattcgatctttcgtggttatcaccgttactgattttattgggtgtcatgacttttttaagtcgtaaaaaagagcgtatcgggcaactgggtagagtgggaataggccttggtttaattatcttagcattacaactgattgtgacttctgctgagccgataacccatgccagtgcagtacaagctatttttacctctttgagcggggatacgattttagcactattggtcggcgctatttttgcgatggttagttattcaagcttagcggcggtattacttaccgcaacattaagtgcaacaggctttatgcctttatatattagtttatgtattgttattggttctaatattggtagtggattgttggcattaatcagtagtcgtggtcaaagtattagttcacgtcaagtcgtcataggaagtctgttttttaaattaattggcgccttgctggtattgccgtggatcaccatcattgcgacaaaaatccaacaatatgatttttcccctgcggaagtgattatctattttcatgtgatttataacttagtgcgctgtgtgttgatgttgccgtttgtggggccaatggcgaaattatgtcaaaaattagtgccggaattacccgttactgggacagaagttgcacctcgttatttagatccatccgccgttgatactccctctttagctattgctaatgcagtcagagagacattacggttaggggatgtggttgaacagatgttgcaacgttttcaagccttaatggaaggggatcgtctgcaaaaaagggagattagccagctagaagaggaagtggaattgctccatagcagtattaaattgtatatggcacaaattcagcagcatgatcttggtactgaagactctcgtcgctgggcagaaattattgataccgcgatgaatttgcaacaatcttccgctatcatagcgcgtatgtctggtgaggtggtgaataaaagtttagatcatcacttaaatttatcggaggaaggacgtcgtgaattacagacactccttgagcgtctgcaaagtaatctgaatctggcgatgtcggtgtttgtttccggcaatatggagcatgcgcgtaaattacgccgagcaaaacatcgattccgtttactcaaccaacgttactcgtttgctcatgtagaacgtcttcatttgcataatatgcaaagtattgaaaccagttcgctgcataccagtttgttgggtgatatgaaacggttgaactccttattctgtgcagtggcttaccacgcattagagcggagcggatcttcttcagaacaggttaatcttcaacaatga

SEQ ID NO: 295808 - DNA, 1440 bp, Proteus mirabilis
atgtctctacgttatcaacgttctgcgttatctgtagtcgtcgcaacactctttacaagcgtgagtttctcttcttttgcagcccccgtcactgccgatactattttggcgcaagatcgcgcagcaaaaggtaatattacggaatttggtggtgctcgtcgtataacctcagatcaaactgaagcattaaaagcagcacttaataatcatcaagctaaaaatgtgatcctatttatcggtgatgggatgggggattctgagataacggtagcacgtaactatgccgaaggggctggtggcttctttaaagggattgatgcgttaccgatgaccggccaatatactcattattctttagatagaaaaacacaaaaacctaattatgtaacagattcggccgcatcagcaacagcatgggcttcaggggttaaaacctataatggggcattagggattgatgtgtttggtaaagatcaccaaacgattttggaattagcaaaagcgaatggtaaagcgacggggaatgtcactacctctgaaattcaagatgcaacaccggctgcgctattttcacatgttaccgggcgtaagtgttatgggcctgtagaaacgttagcaaaatgctcaacgaatgcgctagaaaatggcggtagaggttcaatctctgagcaattgttagtgactcgtgcagatattacactgggaggaggcgcgaaaagttttgctcaaacagcaacggccggtgaatataaagggaaaacgctcgagcaacaagcaatagagcgtggctatcaaattgtgaaagatgctaaatcgttagaggcgattacgctagcaaatcaagataaacctgtgttaggtctatttcatgacggtaatatggccgtcgcttgggaagggccaaaagccacttatcaaggtaatttaaagaatcctcctttagagtgtaaaccgaattcaaaattagacccgaatgcaccaacattagcgcaaatgaccaaaaaagcgattgatttgctgaaaacgaatgaaaatggtttcttcttacaagtcgaaagcgcctccattgataaacaagatcataatgctaatccttgtggtcaaattggtgaaacggtggcattagatgaagcggtacaaattggtttagatttcgctaaacaaaatggtgatacgcttattatagtgaccgcagatcacgctcactctagtcaaattattgaagctgatgtgaaatcaagcggcttaacacaagcattgattaccaaagatggcgctgtcatggtggtgaattatggtaactcagaaacggattcacaagagcatacaggcgcgcaattacgcgttgccgcttatggtccacatgctgctaatgtcgtagggttaacagaccaaacagatcttttctttactatgcgcgatgcgatgggattgaaataa

SEQ ID NO: 295809 - DNA, 297 bp, Proteus mirabilis
atggcagacgcaattaatcgttgtaatgcagaagaaacagctgcttgttgttgtgttgatgttggtactattatcgacaacaaaaattgtaccgcatcttatcagcacgtttttgccgataaggctcaagctgaagcgatgttaaatgagctaacagctaaagctaatgccactgcatctgaaccttgccaaattaaacatcaatttgctgatgttgaaggtggcgttcaattaaccgctgattttactttctcttgtgaagcagaaaatctgatcttccaattaggattacgttaa

SEQ ID NO: 295810 - DNA, 1305 bp, Proteus mirabilis
atgaagtcatcagcgagcagtaccataaaagatcgtgttgcgattgtcagtggattgcgtctcccatttgctaaacaagcaaccgcttatcgggggatccctgcggttgagctggggcgctcggttgtacaagaattagtgatccgtaatgaaattcctcctgaaattattgatcaactggtgtttggtcaagtagtacaaatgcctgccgcaccgaatattgcccgcgaaattgtacttggcgcagggctaagtgtaaaaacagatgcttatagtgtaacccgtgcttgtgcaacgagttttcaggctattgctaatgtggctgaaagtatgttggcaggtcatgtttcagtgggtattgctggtggcgcagattcatcttctgtattaccgattggcgtgagtaaaaaattagccgatgttttactcagtttaagtaaagcgaaaacattagggcaacggcttagttatttaagtcaactacgctttggtgatctgctacccgttgcacccgcagtggctgagtattccacaggtttacgtatgggggatactgctgagcagatggctaagacttatcatatttcaagagttgcgcaagatgaattagcgcatcgctctcatcaattagcggccaaagcgtgggaaatgggaaaattaaatgacgaagttatgacggcatttttcccaccctataaatcaggttttcatcaagataataatatccgcaaaaattctgtacttgattcttacgcaaaattgaagcccgcctttgataggcgccacggtagtgtgacagcggctaatagtacgcctcttacggatggtgctgctgctgtgctaatgatgaaagagtctgttgccaaaagtttaggctatcaacctttaggttatctgcgtagctatgcttttaccgccattgatgtctggaaagatatgttactggggccttcttatgcgactccgttagcactatcaagagccggtcttactttgagtgatttaacactaatagatatgcatgaagcttttgcggctcaaacgttgagtaacttaaccttatttgcaagtgataaatttgctcaagagcaacttggactgtcaaaagcaataggtgaagttgatatggataaattcaatgttcttggtggctctattgcttatggacacccctttgctgcaacaggggcgagaatggtgactcaaacattacatgaactgaaacgccgaggtggtggctttggtttaacaacagcttgtgctgcgggcggattgggtgcagcgatgattttggaggtggaataa

SEQ ID NO: 295811 - DNA, 2169 bp, Proteus mirabilis
atggcgactcaacaaaggatacaaacctcatctgagaaatcaccggtattccagttttcagtacgtcccgataaggtcggaattatcaccattaatgttgtagatgaaaaggtcaatacactgaaagctgcttttgttgaacagtttcaaaatgtattaaaacaggctcagcaacattcaggtgtaaaaggattaattatcacatcaggtaaacctgataattttattgctggtgctgatatatcaatgattgcagattgcaaaaccaaagaagaggccaccgcattagcgaaagcagggcaagatctttttactcaattagaaaattatcctttgcctgtcgtcgcagccatcaatggcgcctgtttaggtgggggattagaactagcattagcctgccatgggcgaatttgctccgataacagtaaaacacgtttaggccttcctgaagttcaattaggattactaccaggttcggggggaacccaaagattaccacgtttaataggggttacgaccgctttagatatgattttaactggacgacaaattaatgccaaacgggctttcaagcttggcttagttgatgacgttgtaccacaagctattttattagatgttgcagcccaatggattttaacagctaaaaaagctgctaaaaaacagactattatggagcgtttttgggcaaataccacattaggaagaaatatcctctttgatcaagctaaaaagcgcactttagctaaaaccaaaggtcattacccagcggcagagcgtattcttcacgttattgaacgaggcttagagaaagatattcaaacaggttttaaagaagaagctaatgcgtttggtgaattagccatgaccccggtttcatctgcattaaggcatctcttttttgcctcaacagcattgaaaaatgaaacaggatcatctgcaaagccagataacttacaccatataggtattttaggtggagggttaatggggggcggtattgcttttgtgacagcaacaaaaggtaatttacccgttagaattaaagatattagtgataaaggtattgcgcaggcacttaactatagttggaaagcgttatcaactaaggtcaagaaaaaacggctctctgctcgtgaacgccaaagacaaatggggttattatcagggacattggattatagcggtttccatcaaactgaccttattgtcgaagctgtttttgaagatttggctttaaagcaaaaaatggtggctgatattgaagccttaggtgaaggcaagatcatctttgcttcaaatacttcttctcttcctatccataaaattgctgaaaaagcacaatatccagaaaaaataattgggctgcactattttagtcccgttgaaaaaatgcccttagttgaagtgatccctcatgaaaaaacggatgctaagacaatcgccacaaccgttgcttttgctaaaaaacaaggcaaagttgccattgtggtaggagataaacccggtttttatgtcaatcgaattctcgccccttatattagtgaagccttaacctgtttggttgaaggggaaacgatagagaatattgacaaagcattagttcaatttggctttccagtcggccccattcaacttttagatgaagtgggaattgatattggtactaaaataacgcctattttagtcaatgagtttggtgagcgttttgcatctcctcctgcggtggatgcgattattgcggatgacagaaaagggcgtaaaaacggtcgtggtttttatctctataatcagcatgccttacctttctctttaggaaaaaataaaaagcgtgcagatccgatgatttatcgcttattacaggttaaacctaaaaatcagttatcggcttcagaaataactgaacgttgtttattgcttatgcttaatgaagcagttcgttgtttagatgaaaacattattcaacaacctagggatggtgatattggtgctgttttcggtattggttttcctcccttctttggtggaccattccggtatatagatagtatgggaacaacaaaaatagtcgataagcttaatcaattaactgaaaaatacggtgaaaagttccagccatgtgagcgattagcagcaatggccaagttaaatgaacgattctatagctag

SEQ ID NO: 295812 - DNA, 474 bp, Proteus mirabilis
atgcaaatttttattatgcgccacggtgaggctacttttgatgcgcccagtgatgcactacgatctttaacagagcgtggtgaatatgaatcattaaccatggcgaattggatgacacagcaagatcatagtatcgattatgttttagttagtccttatttgcgggcacaacaaacactgaatgttgtgcaacaaggcttagtattacccgctaagatagaaaccgatgaagggcttattcctgggggcaatcctgatcatattgctcattatttaagggcattaggggaagtgggatatcacaatattctagttatatcacatctacctttagtggggtatgtcgtggcagagctttgtccaacagtgagtgctccgatgttttcaacctcaacgattgcttgtgttgattttgatttatcaacaggctcggggaaattgctgtggcaagtctccccagcaaacttaaaataa

SEQ ID NO: 295813 - DNA, 543 bp, Proteus mirabilis
atgaacaaaaaattcatattacctccttcagaaatagaattatttcaggagatgataaaaggcaccaaaaagctcccacaagataaaatacgccaccaaacaccgcgaaaaaaagtgactcattatccaacagagcgattacagcaagagcaaatagatgcttcttactatttctccgatgagtttcaacctaacttggcaacagaaggcccgatgcgttatttaagagaaggggcaaatgcgtacgagctaaaaaaattgcgtcgtggtgattatgtaccagagttttttttagatttacatggattaacacaattaatcgccaaacaagaaattggtgccttaatcgcggcctgtagaagagagcatgtgtattgtgcctgtattatgcatgggcatggtaaacatattttaaaacagcaaacccctctttggttagctcaacaccctgatattattgcttttcatcaagcaccaaaagagtggggaggtgatgctgcactattgctgttagtcgaaaatgatgatattgcgcgtcgttaa

SEQ ID NO: 295814 - DNA, 555 bp, Proteus mirabilis
atgagcagtaaaaaactaacccctgctgaagttaatgatgcacataaactccaaacccgtcctctatctacccctacagatttagcacctaaagcaacaaaagaagttagtgcagcgatgaatgctattcttgcggatgtgtttgctttatatctaaaaacaaagaacttccactggcatgtgagcggtcctcattttcgtgactatcatctaatgttagatgaacaaggtgatcagctctttgccatgacagatcctattgccgagcgtgtacgtaaaattggtggcatgacattacgctctatagggcagatctcaaaaatgcaacgtattaaagataatgatgctgaatttgttgagcctttagatatgttagctgagctatgtcaagataatcaattacttgcagcagaactgagaaaagcacatgttgtctgtgatgaaaataacgatatctctaccgcaagcttaattgaaaattggatcgatgaaacagagcgtcgtacttggttcttatttgaagcttgtcgacgtgcagaaacatcagggcactaa

SEQ ID NO: 295815 - DNA, 933 bp, Proteus mirabilis
ttggatatcacagcaaaagaagaagccgtagctgatttaagcacgatcttagatatgttacgttgggctatgagtcagtttaattcatcagatatttattatggtcatggtacggataacgcatgggatgaagcgttacagcttgttctacctacactggctcttcctttagatattcctgatgctcttttatcaaccaaacttacaacctctgaaaaaatggaaatcattcaacttattgaggttcgtattgaacaaaaaattcctgtgccttatttaacgcatcgagcgtggttttgtggacatgaattttatgttgatgaacgtgtcttgatccctcgttctcccattggtgaattgattaataaccattttgctggactgattgggcaagagccaacccgtatccttgatttatgtactggcagtggatgtattgctattgcttgcgcccatgaatttcaagaagcagaagtcgatgcagtcgatatttcagctgatgcgttagaagttgccgagtttaatattgaaaatcatggtttaattcatcgtgtttatccaatgcaatctgatctctttgaggcaattgttcctacaccatacgatattatcgtgacgaatccaccttacgttgatgctgaagatatgggtgacttgcctgatgaataccatattgaacccgaacttgcattggcttctggtgtggatggcttagatatcaccagacaaattttactaaaagcacctgattatttaagcgaaaaaggcattcttgtctgtgaagtcggtaatagcatggtgcatcttatcgaacaatttcctgaagttccttttacttggcttgagtttgaaaagggaggcattggtgtctttatgttaacgcgtgagcaacttgtcgaattttcagatagctttgctagcgataaacgttga

SEQ ID NO: 295816 - DNA, 1086 bp, Proteus mirabilis
atggcgggaaacagtatcgggcaattatttagagtaaccacttttggtgagtctcatggcacagcgttaggttgcattgtggatggtgttcctcccggattacctttaacgcaagcggatctacaagttgatttagatagacgtaaaccgggaacttcacgttataccacacaacgtagagagcctgatcaagtgcgtattttatcgggtgtttttaatggtgtaacaacgggaaccagtattggattattaatagaaaatacggatcagcgctctcaagattatagcgaaattaaagatgtattccgcccagggcatgcagactacacctatgaacagaaatatggtttacgtgattatcgtggcgggggacgctcttctgctcgagaaaccgccatgcgtgtcgcagcgggggctattgccaaaaaataccttaaacaaaaatttggtgttgaagtaaaaggttacttatctcaattagggccgattagttgtgagttagttgattggtcaattgtagaaaccaacccattcttttgcccagatccttctcgcctagatgcccttgatgaatatatgcgagcgctaaaaaaagagggtaattctataggtgccaaagttaccgtggttgcagaaggtgtacctgcaggattaggcgaacccgtttttgatagacttgatgccgatttggctcatgcgttaatgagcatcaacgcagtaaaaggcgttgaaatcggagatggttttgatgtggtgaccttaaaagggactgaaaaccgcgatgaaattaccaaagaaggttttagcagtaatcacgcgggaggggtattaggtggcattagtagtggtcaacctattattgcacatattgctttaaagccgacttcaagtattactattgctggtaagacgcttaatcgacaaggtgaagaagtcgatatgatcaccaaagggcgacatgatccgtgtgtcggtatccgagctgttcctattgcagaagctatgatggctattgtgttacttgatcatgcgttacgtcaacggggtcaatgtggtgatgttattcctccattaatgcaatggtga

SEQ ID NO: 295817 - DNA, 801 bp, Proteus mirabilis
atggattggctattttcagatggcatctaccttctactcttttttgttgctgtattagcaggctttattgactctattgctggcggtggtggattgatcactattcctgccttgctctctgcgggaatatcacccgtacaagcgttggcaacaaataagcttcaatcagtgggcggttctttttcagccacactctattttattcgtcgtcgcgtcattgatttaaaagcacagcgctttgccatttttatgacttttattggtgctgtttctggtgcgatgttagtacaatttattaatcctgaattactaaaacaagcgctacctgttcttactatcgcaatcggtctctattttttattaacaccatctatcggggctaaggatagtaagcaacgtcttggctattatactttcggggttattattggcggtggtattggcttttatgatggtgtttttggtcctggaacaggatcttttttcgctttaggttatgtcatgttacttggttataatctctcaaaggcgacggcacatgctaaattactcaatttcacctctaattttggctctttgctattttttattcttggtggacaggtaatttggaccataggtttagttatgttatgcgggcagtttattggtgctcgcttaggtgcagggttggtgttaaccaaaggacaaaaattaattagaccaatgctggtcattatctcctttttgatgagcatcaaactcattcatgacaatcatggagatactattgcactttggttttctgcactttttaattag

SEQ ID NO: 295818 - DNA, 555 bp, Proteus mirabilis
atgtcagcacatcattatcagcagttaattgatatttttaatcaatgttttagcgatagttaccaaacacgtttagttaaaggtgataacgagccaatttatttgcctaagagtgaagagataccttatcaccaaatcattttcgcacatggattttacgcgagtgcattacatgaaatatcgcattggtgtattgctggggatgcgcgtcgtcagcaggttgattatggttattggtattgtcctgatgggcgagatcaagtgactcaagagcagtttgaacgagttgaaatcaagcctcaagctcttgactggttattctgccaagcagccaattatccatttaacgtgagttgcgataatttagacggggattttgagccagaccgttaccagtttagaaacaaggtgagagagcaagtattagcttatttgcgcgataaaaatatcccgccacgtgcacagctatttattaatgcgttacatttgttttacaatacacctgagttaacgccggagcaatttccttatcaggaaaatcccctcgttaattaa

SEQ ID NO: 295819 - DNA, 273 bp, Proteus mirabilis
atgctttctgagtatgaaacgtacttattagataaaattgatagccgtgttgaacatgctacggatgatgaattatttgctggtggatatttacaaggccacatcactttagcgattgcggagcttgagcaagaaaacaatacgcaattatcagcattaaaatcccgtgtagaagagagcattcaaaaagctatcaaagcaggagagctttctcctcctgatcaaatattggttttatcgacgtggcatgatttagttaactcgattaattag

SEQ ID NO: 295820 - DNA, 897 bp, Proteus mirabilis
atgaaaaatttctttaaaataagccttattgctagcacggtattggttttatctgcctgtgatcaacttgatttagataataaaaaagataagttttattacagtaatcccagtgaaaaaagcatgagctttgttgttgatgataaaacatatcaggttgagccgggtaaaagtggttatttaacactctcaccgggcgaacatagtttacaagatagtgcaggtaataaatccacttttatggtgtatgaaaacaacaatggtggaattttaaatcctgataattttatgtattaccgtttatctgaagtctatgctgtacaaggtaagggagatcgctttaaaccaacagaatataaagtggttattaatggctatcagttagaaatgccattacaaagcacgaatgctaccttgattgatggcaatgtatttaaatgtacttatacgttaggtgaacctttccccagtgaaattaaaagccataataaaaacgaaatggggaacatcaaaaccaaatgttttgataaacctgaattaatccaatatattatgactgattatggtcaagatctaaaaccactttcccctcaagatgagtataacgatactgttaatctagcgttagactacagtttacctcaaccacaatttactgatcctgatattcaagcagaggcagaaaattgggttgcattgcttgatcaaattaaagaaagtaatgatcctaatatccataaacagcttaaaacaccattacatgaagcaataaataagttatcaaaagccgatagtgaaagagcagtaaaaaactctgttgaagataataaatactataattcttttattcaccaagcgagccaatatcaatcttatgggatcttacctagagattaa

SEQ ID NO: 295821 - DNA, 1449 bp, Proteus mirabilis
gtgaaaataactgacaatccctatttccgtgaacaaggatatattgacggtatttggtgtgatgcaaaaagcaaagacacggttgaagtgattgatcctgcaacaaatcagcccattggtactgtgccaaatatggcaacagaagaagccaaagcggctgttgatgcagccgccaaagcattaccgacatggcgtgcgttaaccgcacatcaaagaagcactttactgcaacgctggttccaactgatacaggataacaagcgtcaacttgcagaactgatgacgtttgaacaaggtaaacccgtggccgaagcggaaggcgaaatcacctacgcagcctcatttattgagtggtttgccgagcaaggtaaaagaaccaacggtgaaattatcccctccccttcatcagataagcggcttatggtgatcaaacaagggattggtgtttgtgcggctatcacaccttggaacttccctgctgccatgatcacccgtaaagcagccccagcattagccgcggggtgtactatggtgataaaacctgccaacgaaaccccctatacagcccttgcgttagctgaattagccgcgcaagcaggaatacctgccggtgttattaatattgtcaccggtgatgcagttaaaatcggtgaagtattcacatcagacaaccgcgtgcgtaaattgagttttactggctctacaggggttggccgtttattaatgcgccaatgtgctgacagtgtgaaaaaagtctcactggagctagggggaaatgcgccatttattgtctttaatgacgccgatattgagaaagcggttgcaggtgctatgggggcgaaattccgtaacgccggacagacttgcgtgtgtgcaaatcgtttttatatccataaagatgtatatcaacaatttagtgaacgctttgttgctgaggttaaaaaactaaaagtcggtaatggctttaccgaaggcgtgactattgggcctcttattaatcataaggcggtagaaaaatcacaatcactccttgctgataccttacaacgcggtgcgacactgctatgtggtggtgaaagagataaagcaggtgaaaatttctttcagcctaccgtggtcggtaatgtgcctgctgatagtcatattcttgaagaagagatctttggccccgtggcacctttagtcatttttgacaatgaagaagaagtagtacatctagccaataataccatctatggcttagccgcttatttctacagtgaagatccacaacgtatttggcgtgtggctgaaaatctagaatatggcatggtcggtattaacacaggtctaatttccaatgaagtggctcctttcggtggtataaagcagtctggcttaggtcgtgaaggctctgagcatggtattgaggactatatggaaatgaaatacctctgccaaggcctgtaa

SEQ ID NO: 295822 - DNA, 621 bp, Proteus mirabilis
atgtcaaaaccatcatttgattctattgaatcgcaggcaagttacggtattggtctgcaagtcggtcaacaactgactgaatcaggtctccaaggattagagccagcagcactgcttgccggcttgactgacgcgttagaaggcaatactccttctgtacctgttgaaacgttacacaatgctttacgtactatgcatgagcgtgctgaagctgttcgtcaagagcgtcaagcggcactggcagaagccggcaaagtattcttagcagaaaatgtaaaaaaagaaggcgtgcaagtcactgaatctggtttacagtacaaagtactgaaagcaggagatggcgctattccagctcgtactgatcatgttcgtgtgcattatactggtcgtttaatcgatggtacggtatttgatagctcagtacagcgtggtcagccagcagaattccctgttaatggggtgattgcaggatggattgaagcattaactttgatgccagtaggttctaaatgggaattatatattccttaccaattagcttatggtgaacgtggtgcgggggcggctattcctccttttgcaacattagttttcgaagtagaactattagaaattttataa

SEQ ID NO: 295823 - DNA, 741 bp, Proteus mirabilis
atgttagaacaagtcagcgaattagcccgccaagcgggtcaggcgataatgcaaatttatcaacaatcagcgccaattgaagtacaggaaaagagtgaccattcaccggttactgcagcagatttagccgcccatcaaattattaagcaaggacttgccagtattgcgccagatattcctcaattatctgaagaagatcctcctgcgtgggaagaacgtcgccattggcaacgttattggctgattgatcccctcgatggtaccaaagagtttatcaataaaaatggtgagtttacggttaatattgcgttgattgaacagggtgtgccggtattaggcgttgtgtatgcaccagtacaaaatattctctactcagcagccaataaacaggcatggaaagaaacctgtggtcagcgtttaccaataaaagtcagccgtgctgaaccccccgtgattgttattagtcgttctcatcaagatgatgaattaaaagaatatttatcgcaattgggtgagcaccaaacggtggctgttggatcttcattaaaattttgtctagtggcggaaggaaaagctcagctttatcctcgttttggacctactcatacatgggatactgcagcaggacacgctattgcgatagccgcaggggcacatgttaccgattggaaaggggtgacacttgattattcaccgagagaatcactgataaatcctggttttagagtttctattttctaa

SEQ ID NO: 295824 - DNA, 561 bp, Proteus mirabilis
atgcacaaaataaccttggctgcacttttgcttagcacatctacatgggtatttgcccataatattactgaagataccctactaccggcgatctctgtgagtgacaaaggggagcttctttatgatggtgccaaagataaatttagctatcaaaattggaatagcggactacttagtggcaaagtacgcacaattcaacatatcgctggacgcagtaaggctaaagagatgaatgcgccactgattgaagccatcaaacaagccaaatttccacaaaatagttatcagacaaccactatcatcaatactgatgatgctatctttggtactgggccttttgttcgcggtagtgttgaagacagtaaaaaagagtttccttggtcacaatttattgttgatgctgatggtgtagcacaaaaaggttggggactagaaaaagagagttcagcaattattgtgctggataaacaaggaaaagttcgttttgtcaaagaaggtgtattaagtggtgcagaaataacttccgccattaaccttatcaatgacttaattaaagaatag

SEQ ID NO: 295825 - DNA, 207 bp, Proteus mirabilis
atgaagatcttcaatcgctataacccagaaaaaattgctctctacgttaagacgttatttcgtggacggttttatatcaaaggaatgggcgcatttgagttcgattacggtaaaattttattgccgaaaataaaagataagctgcattttaatgtgatgagtgaagttaaccagcaggtggttttactcaaagctgaaatgggctaa

SEQ ID NO: 295826 - DNA, 1374 bp, Proteus mirabilis
atgcttaatagtttactcattgtgcttttgctgtgtgccattagcgcctttttttcgctgtctgaaatatcactggcggcctcccgtcgtattaaactcaaacagttggttgacgaaggaaatatcaacgctgctcgtgtattaaaaatgcaagaaacccccggtatgttttttaccgtggtacaaattggtcttaacgccgttgccattttggcgggtattgtcggtgaatctgctttttctcccgcattaaaagatctcttttcccgctttttagaagcacctctcgcgcaacaattaggatcggtctgttcatttattatcgtcacatcgatgtttattctgcttgccgatttaactcctaaacgtatcggcatgatcaagccagaagtcattgcactgaaaattgttaatcctatgcgtttttgtctcgccttattccgccctttagtttggttgtttaatggcatggcagatcttatctttaaactatttaaaatcccgatggtaagaaatgaagatattacatctgatgatatctttgcgattgtcgaagccggtgccgtagcgggggtattacgtaaacaagagcacgaattaattgaaaatgtctttgaattagaatcacgtaccgtaccatcagccatgacaccacgtgaagatgttgtctactttgatcgcgaagagacagaagaagatattaagcataaaattgccactcagccccactctaaattcttagtttgtgaaggggatatagaccatattattggttatgtagattcaaaagagctactcaaccgtgtgatcaatgggcaaagtcttaacctcaaagaaggtgtgcatatccgtaaagcccttattattccggataccttaactttatctgacatgctagaaagctttaaaacctcaggggaagattttgccattattctcaatgaatatgcgatggtgatgggcgttatcaccttaaatgacgtgatgaccactttaatgggcgatctgattggcccgggccaagaagagcaaatcgtcagtcgtgatgagcattcatggttggttgaaggtggaacacctattgatgatgttatgcgggcattagatattgatgatttcccggattctagcaattacgaaaccattgctgggtttatgatgttccgtttgcgtaagatccccaaacgtactgactatgtgaagtttgcaggttataaatttgaagtggtggatattgataactataaaattgatcaactgcttgtcactaaaattgatgatattccgccagtaaaaccggttttgcaagaagcaatacctgctcctcaaacaacggcagaagtgccttttgagcacgaagagcataaagcctaa

SEQ ID NO: 295827 - DNA, 627 bp, Proteus mirabilis
ttgcaacataaagcttatcatcctgagcatgccgtaatcggcagcacaacgccattagaaatttctgctaatcatgccgtcaatgggcattctatccgtgagatcccagaaaatatgcaaattgcttattttgccatgggctgcttttggggcgttgaacgcctattttggcaacaacccggtgtttatagcacaagtgccggttatagcggtggtgtaacagaaaatcccacctatgagcaagtttgccaaggccgtaccggtcatgcagaggtcgttcgtgtggtatttgatccgacccttatcagctatcaacaattattggctattttttgggagaatcatgacccttcccaaggtatgcgccaaggtaatgatattggtagccaatatcgctcggccatttataccctaaccccagagcaatatgcacaagctattgagtcaaaacaacgttatcaacaagctatcaatagtgaaggggcacataaagagatcaccactgaaatacaacctgccggacctttctattttgctgaagattatcatcagcaatacctatttaaaaaccctcaaggttattgtggacttggtggcattggtatctgttttccaccggcaaactaa

SEQ ID NO: 295828 - DNA, 1743 bp, Proteus mirabilis
gtgccgagatactccgttatctacgttctctgtctgtcttctataacgtcttttgcttatggggcaaatttacgtttaaaagtagaaggtttagaagggcaactcgaaaagaatgtacgagtccagctatcaaacataacaacagaagaagttgcaccagacgggcgttttcgtgcgcgtgttgaaaaggcaattaaagagggcctacggcctttaggttattatcagccaacggtcactttctcttatcaagaaaatacccctccgacacgccctgtattaacagcaaaggttgagcttggtattcccgtactgttaaaaggggtcaatattgtactggaagggggagctaaaacagatgaacaatatgccaaagtgattaaagaaaacactccccctcttgatagtgtgttaaatcatgccgaatatgaaaaattaaaaggctcgttaacagggcttgctattcgtcgtggttactttgatgcagatatggaaaaaagccagctcggtgtctctttagataatcacgcctcttattgggattttgtctttaatagtggtgaacgttaccgttttggtaaagtgaattatactggctcacaaattcgtgaagactacctacaaaatattgtgccttttaaagaaggggaatattactcttctgaagatttggcagagtttaatcgacgcttagctgccacaggatggtttaattcggcggttgtcacacctaatatcgctaaagcacgtagtgaaggcaattatttgctaccaatggatgccgttgttacccctcgttcacgtaactatatggagctagggggcggttttgccacagatgtcggacctcgattaaatatgcagtgggataaaccttggataaattctaggggccatagtttaacatcgaatatgagtatttctaagcctgagcaatctattggtgctaattataaaattccattaaaagttaacccattagaacaatattatggcattcaaggcggctataaacgtacagatttaaatgatactcgttcggataccaccacactgaacgtttctcgtaactgggatatgtcaacgggatggcaatacagtattaatacccgctggagtctgagccactttacccaaggtgatgttaccaatacaaccatgttgctttatcctggtgcgaatgcaagtcgcgtacgccaacggggtggcatgatgccttattggggggatagccaacgttattcagtcgattattccaataaaatatggggatctgatgttgaatttctcgccctacaagctcagcaagtgtggatacgcacgccttgggaaggccaccgttttgtggtcagagggacgtttggctggattgaaacgaatcaatttgagaaagtgccacccgaattacgtttctttgccggtggcgatagaagtattaggggttataaataccaaagtatttcaccggaagatagcaaaggtaaattaacaggggcatcaagaatgctaacgggatctgctgaataccaatataacgtaactggaaattggtggggagctgtatttgttgatagtggtgaagccgttaacgattttacgaaaagtgattttaaaacaggtgcgggtgcgggggttcgttgggcatctccagtcgggcctgtaaagtttgatttagccgttccagtcaatagtggtgaagagcgtaagttacagttttatattgggttaggagctgagttatga

SEQ ID NO: 295829 - DNA, 3822 bp, Proteus mirabilis
atgatgaagtggttgaaaaggataacactaacgctacttatcatcattttactggttttaggtgctcttgcatggattttagggacgcaatcagggctacattttgccattaatagtgcagctcgttgggtgccaggtttaaccattaatagtgttaatggcggttggcaagatttacgtttaacgggtgttgagtatcaaatgccgggtgtagacgtcaatgtgggggagttatcactaggcttaaatttaagctgcttgaaggacaaacaactgtgtgttgaggccttaggcacacgtgatgttatcgtcaatgtagataccagtgcactccctccagcacaagaaacacccccttctgagcctttaactgagcttaatgcccctttacctatctatttaaactctctctcattagccaatacgcgtgtacaaattgatgatatggccctatcactcaatgagtttactacggcagcacaatgggaagggcgtcaagttaccttaaaaccgacagtcattaatgatttgttggtggcgttaccgaaaacacccgaagacggtagtgttgccgccatggcgcaagatgtaaaagaagttgcagcaacgacgcctcaagcggagcctaaaacaccgcaagagcaagagcaggcactagctgacactattaagacaattttcgccaagcctttattagcgcagttacccgaaattattattcctgttgatatcaatgtggaggggatagaaggtaaacagttacaagttagtggtgatacgcctgtgactattaatcaactctcttttcaagccaatacgcaaggtcaacaggttaatctcactaggctcagtattgatgcgccagaaggcgaagtcagtttaaatggtcaaattacactggataaacagtggccggttaatctagatatgcaagcgatgcttcgtgagatggcaggattggaagagtttaaagatcagcaagcgacactgtccttacaaggtgcgatacttgatgaattaaaactcgcactctctttaacaggaactgttaccgcaagccttgatgcacaagctgagctcgctaaagcacatcttccactaaaattaaccttagagagccaaaaagtgcgctggcctttaacgggagatgtgcagtatcaacttaatgatactcgactacgtcttaatgggcagacggataattatgatctttcattacgttctaatattgaaggacaagagatcccgccagccaaattgaccctagacgctaaagggaatgaagagaaaatagcactcactcgtttgcgtttagctgcattacaaggtcatgcggatattactggtgtggcagattggagtaaggcgattagctggaatgcattattgactatctctggtattaatacagctaaacaatatcccgatatgccagcgaaattagatggacgtattgctacaacgggtagcctgtatggaggaagttggcaactgcgagtgcctgaaattaccttagatggtaatttaaaaaataatcttattaaggcgcgaggaaacgcctatggtaatgattcggggcaatggaatattcctcaattaaccttaattctaggtaaaaataatctcgatattgcggggcacttaggtgagcagtgggcgcttgatgcgaacatcaatgctccggggttaaatggtttagtgccggggttagcgggcgttattaaagggaaagtgaatgttcgcggtgatattaataagccgaaaattattgctgatatcaatgcacaagggatcaaatggcaagatcagctcagtgttgggtcagttgtggttaaaggtgacattcagtcagatgacgtgatcagtggcaaactggcaattacggcacgtcagttaaaacaggctgatttgattattcgtcaattaacgctagatgcggccgggacagaaaaacagcataagcttaccttgaaaatggatggggaacccgtatcgggtggcctgacattagccggctcgtttgataaagaaaaacagcagtggcaaggcacacttaacaataccgcatttgatacgcctgtaggcgaatggcgtttaaataaagcgatggcgctaaatttattagcggaaaaacagcaagtgacgattggttcacattgctgggtaaatcctaatgcacaactgtgtgtacctaaagagatcactgtaggtgagagtggtagtgcggcaatcacgttaacacgctttgatttagccatgataaaaccattcttacctcctgaaaccgcgctacgcggtgtctttacgggagatgctacggcaacttggaatgcgaaaggcggattacctaaagcgtcagttaaccttaaaggtcagggcgttggtgtaaaacaaaatgtcgatggtacggtattacctattgattttgatgcagttacgttaaatgcgggtatcaataatggtaaagcgaccttgcaatggttaattagtattgccggtaatggtgactttaaaggccatgtcaatgttgctgatctagaaaaaacacgtcaattatcaggtacggttgatattgataatctgacattagatctgattaagcctttcttgggtaaaggtgaaatagcgcaaggtagtgtaggggcacagctacgtttaggagggaatgcacaatcaccattgctatttgggcagtttggtattaaccagttaaaagtagttggtcactggatcccatttgacatcaccaaagggaatgtcgatattcgctttaatggtgcgacttctgatttaggcggtagaatcgaaacaccggaaggttatttaaatctgacggggaatgcggactggcgcaaactagatgagtggcgtgccgtggtggctgcgaatggcaataaactgcgtgtgtcattaccaccaatggttcgtattgatgttaacccagacttagtttttgaagctaatccacatttgcttaaattagatggacgtattgatatcccttgggctcgtatcgtggtgcaggaattacccgagtctgcggtgtcggcctcttctgatgaagtgatgttggataaagaattacaacctatagcaccaaagcagacttctatacctattcaaagtaatttggcgattaatattggcgatgatgtcacattagatgcctttgggttgaaagccagattaacaggggcattaaaagttgctcaaagtaaacaaggattgggattaaatggtcaagtggatattcctcgcggggaattcaaagcttatggacaagatttacaagtacgtaaagggcaaatcttgttctcagggccggttgatcagccatacttaaatattgaagcgatacgtaaccctgataatacggcagataatgtcattgctggggttaaagtcaccggacttgcggataagccgaaagtggaaatattctctgagccggccaaaacacaacaagaagcattatcctacttgttaagaggggaaggattagcaagtggtgattctgattcagcacaaatgacagccatgctaataggattaggtgttggacaaagtggacaactcgtaggacgtattggcgaaacctttggtatttctgatttagcgttagatacacaaggtgtaggggatagttcacaagttgtcgtcagtggtaagataaccgatgatttacaagtgaagtatgggatgggtatatttgattcgctagcgacgttaacattacgttatcgcttgatgcccaggttgtatttacaagcagtgtctggtatgaatcaggcaatagatctgctttatcaatttgagttttaa

SEQ ID NO: 295830 - DNA, 348 bp, Proteus mirabilis
atgcgaattattgtttatggaagtttacggcgaaatcagggtaaccatcactggatgacctacgcacagctattaggtgagtataaattagcggggtataaactctatgatttagggttttatcctgctgtggttgaaggtgatggtgaaatagaatgtgaagtttatcggatcacgccttccattttgacggagcttgatgaactgaaaaaaaatgatcaagattacaagcgccagttgatatcaacaccttatggtagtgcttggatctatctttatcaaaagccagttgatgggttgcgagaaatcaaaagtggagattggctaaaacgccacgaagaagagtaa

SEQ ID NO: 295831 - DNA, 192 bp, Proteus mirabilis
atggaaaataaaaaatttattcgctcggagataaaaagagaaaaagagagtacaaaccaagatataaataaattaaagaaattattttcaataaacaactatcactatagagatattaataacgaagaaaatcaacatagccttatttatcgttggccattactcaacacatttaattcaataactaaatga

SEQ ID NO: 295832 - DNA, 732 bp, Proteus mirabilis
atgccactaattgtattaaaagggctcagaggtggagtaggaaccacctcaataaccattgcattggctcgccaatttcatcaccataaatacaatgtcattgttatcgataactgtgtgaataatatcttacatttctattttccagaaaaatcacaagtcaccacattaggacaagcactactcgcgcataccccaatagaacaagcgatttgtgattatcaaaacggttatcagattttaccttttggagtcgttaattcagaagataaattgcacttgcaagcatctgccgctgccaatcaacatctgcagcatttttttaccacttttactcaacaatacccagacactttaatttttctcgatttacaaccagagcacgataccctttttaaatcatgggttgcgaaagccaatatcgtattaaccgttaccacacctgaaagtaactgccatattcggcttaaccaacatacctttgctgccaatgagtatattctggtgaatcaattttgtgccactagccaaatccatcaagatttttatcaattttggcaaaccagtcagtttcctttctgcccaataaaacttcatcgcgatgaagcattattagaagcctgtgcttcacgcttacctttatatgattaccgcgctaattgcatgttagttgaagaaattaatcaacttctacaatggtgtttgcctttattgttaagcaaaaaaggatag

SEQ ID NO: 295833 - DNA, 2598 bp, Proteus mirabilis
atgtcaaccatcgattatccagagaaaaaagcgtcccgctcgataaggcaacaggctactatgcagtcgcatatcttaacccgttattacaaattttatcgtcataatggggcttcattcagtgcggctatcgtgaatgagcttttctgggtattaatgtggctctttttgcgtatggaatcccctttttggcagaaaatagcacaaaaacaacaacaactatttcctcatattaatccgcgtcgccctaaattatgcgatccgatccgatacttattacaaagtatttggcttatttgccattatttgatgctcaccttggtgaaaaaaccgattcaatttattgtctatattagacagtattatcaaaatctctttgctcgcttatctcctgttgcgcgagatatgatccatcataagaaaacaaacacgccactatggcaatacgctctattatcgctcgttgctgtttttgccatttttattatcttattaagtattactcaaccttttgatttaaaactacaatttgtttttgttctcgtgatttggctgatagccttagctatccgcgatatccctggccgactgtcttctattaccattattattttatcgctgactattgcttgccgatatatttggtggcgctatcaatacacactctactgggtggataatctgagccttttctttgggatcttactattactggctgaaacctatgcatggattgtgttatttcttagttttatgcaatgtatttggccactccatcgacaacctatttcaatgcctcaagatacaacacaatggcctactgtcgatatttttattcccacatataacgaagcgctacaagttgtaaaaccaacactttatgcctgtttaaacattgattggcctaaagataaattaactatctatttattagatgatggctctcgccctgagtttgcggcttttgctaaagaaattggtattcggtatatcactcgtgaaaaacatgattttgccaaagccggtaatatcaaccatgcattgagcaaagcctgcggagaatatgtggctatttttgactgtgaccatattccgacacgctcattcttacaatttactatgggctggtttctaaaagacgaaaaaatggcattggtacaaacaccacaccactttttctctcctgatccctttgaacgtaatttaggcaatttccgcgaaacaccgaatgaaggcacgcttttttatggattagtgcaagatggtaatgatacttggaatgcagcttttttctgcggctcctgtgctgtattacgtcgttgtgctttagatgaaattggcgggctggcagttgaaactgtgaccgaagacgcacatacctcattacgcttacatcgtcatggttggacttctgcttatattcgtatccctcttgccgcaggattagcaacaggatcactttcagcacatattggccaacgcatacgttgggcaaaaggaatgatacaaatatttcgtttagataacccgctctttggcaaagggctgacactgccacagcgcttttgttacctcaatgccatgttgcactttttatcaggcataccaaggatgatcttcttattagcaccactaacgttccttatctttcatgcctatattatttacgcacccgccatcgctatcgctttgtatgtcgtgccttatttattacacatttggttagccgcgaccaaattacaaggtccttatcgccactcattttggggagagatttatgaaacgattttagcttggtacaccactcgtcccgtattaagcaccctattctcaccttataaaggtaaatttaatgtcacagagaaagaggcaattatgaagaaaagttttgtcgattggcaaattaatcgcccctatattctgtttcttaatcttaatttgctaggaattctatttgctttctggcgtatcgcaacaggcgatcccgatgaaaggttagccgtactcatgtgcttagtttgggtatgctataacttagtattactaggtgttgccattgctgtttctgtagaagcaaagcaagagcgacagttcccacgggtacgtctaaaagtgcccgcaatactattactccaagacggttcgctttattcttgtcagctcaatgacttctctgataatggctgtgccattgtattaccagataattttacagttcccttatcttgtcaccaagagatcaccgttattctcaaacaaaatcaacgtgaatatgcttttgaagcacgtattttacggattgataatcgcattattggcttacaactgcttaatatggatacacaaaaatccattgattttaccgcctgtacttttgaacgagccgacacttgggctaattggcaacacgctctccctgccgataatccactgaatagtttaagaaatatcatttatatcagtatgcggggctataacaccttacttaaacgcgccccgtatcttgtttacctcttatttcgtttattagggcagtgtttattgtggctattatcgctacttccacgacgtgtcaatgtttcacaaatatttcattaa

SEQ ID NO: 295834 - DNA, 3276 bp, Proteus mirabilis
atgatgtggcgcatttgttatcaatatcgccaatatctccttgctcttggtttgctggcaggcatattgcctgtcacgcaagccgcagatgatccgactgaaacttttttatatgagcaagttagactaggtaactcgaaaagtaacgatgttttagtttctcaatcactgtatcgtttatcacttataaaaccgaacgatcctagtgtgttgttaatgcgtatccaatttgctgtaaaacaaaaagaaacagcaaaagcacaacaactggttgagcaattacgtatgcatggcgaaaatactgaacaatatcaacgtgcgattaagctactatcattaactaatgaagataaccgccaaatcctacaaaaagcctacctttatcagactgcgggtcgttatgatgaagccttgcaattatatgatgatatttaccaaggcacgccccccgatgaagggttagcccttgagtatctcaatgtattaattgctgcaaaccatgccaacaaaatggcacgtattaagcagatttatcacacttaccccaataaccaacagatagctaatatctatcagcaatatcatcttaccccagcattatctactgcctcagcagcctctgcttccaataacacattatctattcgcgcattaaaacagcagttacgccagcagcctgataatgcagacataataggaacattaggcgtgcgctattcgcgcgcaaatcaacgggcactcgcgatttattatctttctcaagcactcacattggctcccaaacacaacgatagtgatttgtggcgtacgctgttgcaatcaaatcaatattggcatttacttgccaaagcagatgaagcgttattgaatcaagagtactctgccgctaagcgctattttacccaagtacgtcaactcagcccctataaaagtgaagcttatattggtttaggggatatcgagttagcgcaacatcaattagagcaagctgaacgttattatcaacaagcgctacaatatcagcctaatgacgcggcgactttgcatagcctgaccaagctctatcgtcaacaatctcatcaaaaagccgcccaatttatggctaacttgacatcacagcaatacaaaaatttagcccaagactatgggtatatcatttcaggtatacaacaagacttagctgctgatgatgaacagcaacaacactatctcagtgcgattgagaaacgtaaggctatcgctaaagcgtatcccgatgaagtctggaatatttatcgtctggcggatgatttacttatcactcaacaaccccaacttgctgaggattactttaatcaacttaatcaacgacgacctaatgatccctctcgacgatatgcctatgcgttatatctcaataaaacagggcgagcacaacaagcacttaacaccttaaagacgatccctttatcgcagcgcagtgaaagtatgaacgccttagatagccaattacgttttggtcaaattatggcgcatgcacaatcactaagagaacataaccaacaacagcaagctgtcgaatatcttttcacccatattcctcctgagcaaaaaatagaaagctatctgttattagcgcaatgggccgaagaagatgaccaactcaatcaagcattaaattattatcatacagtattaaatttagcgcctaataatgaaacagcactattaggtgcaacagagatatctttagcgcaacatcaaatagatcaagctcgttattacttagctcagatagaacaattatctcctgaaaaatttaaccactattcactaagacgtttagcaaacgctgaaaaaacgacgggaaatattgataaagccaaacactattttatctatttagctcgccaagttgacaaggagccagatagtgctgatagattaattttacgtgatattggtcgtttttatcgtgatagccaacaagttcaatccgctcatcactattatcaacaagcgatgctaaaagagggtatcacgcatacactgccaaaaaacaatattgaatacaccacacttatgcgtaacaacccaaatgataattggctatcacgtagtgtacgtgatgatgcaagtaccctttatcgtcaacaagagtggcgttttaccctagagcatgattattggggatcaaatggcagtgagggatactctaaattacgcgctcataccaccatgttacaactggatcatcctatttatcatggacgtttcttttggcgtactgattttgtgcacttaaatagtggcacattaggtacagcgccatacgatgctaaatttggtagttgttatcgcacaggttgtttccctctaaagcaaaaagcctttggtgttagtcctgctatcggttgggaaaatgagcaatggcaatgggatttaggtaccacgccactcggttttaatgtaactgattgggtaggtaaaattgcttataacgatagtttttatcatctcggttggagtgtagatcttcaccgtcgcccggtaaatagctcattacttgcctttgcaggccaacgtgatagttggaccaatcaagtttggggaggagtaagaaaaacggggcttcgtttaagtggcagttatgatctgggaggcaaggatgggtattggggagaaatatcgtttgatagattaacaggaaaaaatgttaaaaataacagcagtgtaaaagccatgggtggttattactataagttaatcaatgaaaatgatcgccgcatttctgttggcttaaatagcatgctttggcattacaataaagatcttagtggctacaccttggggcaagggggttattatagcccacaacaatatctctcattctcactgcccgttaattaccgtcaacgtactgaaaattggtcatgggaagtatctggctctctctcttggtcttattcaaaaaccgatgatagcagacgttatccattacaaaatctcgtttcaagcgataaatttaattctgatcccataaaagaaatatttaagcatgagagaaatatcattgataagggggattcgggtcatggttttggttatacagcaagagcattaattgaacatcgaataacaccacattggtttataggtgccgctatcgatattcagcaagcgaaaaactatacgccaagccatgcactaatgtatttacgctattcatttgatggatggaatggtgatttagatcttccgcctaacccgcttattccttacgcagattttaaataa

SEQ ID NO: 295835 - DNA, 414 bp, Proteus mirabilis
atgaccaaattaattgcttttattagtggcctattatttagtgctggattgatcatcggtggtatgagcaacccacaaaagatcttggcatttttagatattcgtggggattgggatccgtcattgttatttattatgggggcggggcttatcgtcagtgctattagttaccaaattgcacgtcatcgtcaacaaagtttattagcctgtcctctggccattccaactaaaacagtgattgataaacctctcgtcttcggcagtatcttatttggtttaggatgggggcttgcgggtatttgccctggacccggtttggtattagcgggggggggttttacccaaggtgtattatttgtgtcagctatgattgttgggtggctatttattgggttaattcgcaaaccacaataa

SEQ ID NO: 295836 - DNA, 435 bp, Proteus mirabilis
atgaatatagattgggttcactttacgccttggagctcggcattgggtgggctattaataggtttagcagcggctattttattactgtttaatggtcgtattgcaggtattagtgggattttaggaggagtattaaccactaaccaacaaggtaatgggtggcgatgggcatttttactcggtatgttgattacaccgacactattttatctatttgataaaccgttaacacctattatcgacgtttcaccttggcagttgatcattgccggtgtactggtgggagcaggtacacgtctggggaatggctgtaccagtgggcatggaatttgcggattagcacgattatcgcgtcgttctattgttgcagttcttgtctttatggtgacggcatttgtgactgtgtatattcaacgccatgtcatcggaggctaa

SEQ ID NO: 295837 - DNA, 324 bp, Proteus mirabilis
atgacacaacgagttcaacctgatttattggaagccatgaaattagcggctaatgaagcctctagtatgctgaaaacgctaggcaatggtgatcgactactcttattgtgccaattaagtcagggcgaaaaaagtgtcagtgaattggaagaaagtttagggatccgccagcctacgctttctcaacaacttactgtgttaagaaatgaagggcttgtgaatactcgtcgtgatggaaaacgtattttttattctattgctgatgaaaaagtattggtgctattaaatacactttatcagctatattgtcctatagcaggttaa

SEQ ID NO: 295838 - DNA, 519 bp, Proteus mirabilis
atgctctctaatatgaaaacagtaagagtccctatcgccttagtgcaaagtgttatgcgtacactgcgtgaaaaactgcaacaggccaataaatatcttaatacagattacccagaacccactctacaatataaccagagaggaactattgcaggcagtgcctattatgcaaattgggagatccgtcttaatcctacattattgattgaaaataaacagaattttattgaagaagttattcctcatgaattagcacatctgctagttagtcgccattttggtcgtgtggcacctcatggcaaggagtggaaatggatgatggaaactgtgttacaggtgagtgcgaaacggacccatcattttgatatcagcaatgtaacagcaaaaacgtttagctatgcttgtcgctgccaagaaatacaccagttaactcttcgccgacacaataaagtacaacgaggagaaacccagtatcgttgtcgtcattgtcaggcgattttacaattaattaaagagtaa

SEQ ID NO: 295839 - DNA, 1074 bp, Proteus mirabilis
atgaaatttactcctcaacataaaatggatgctgcattaatggcaggcgcatccttaaacacacccaataatcattcaatacaagagcaacatcatcgtttaaaagatgatgctaccgttagtgcttatatgagccagaattatatttctgtttctgtcgcagattcggttgaacatgtaaaagcacagctggttaatgatttaaaagatgaattaattccgacttatctgtatgtcgtagataaagataattatcttaacggtattttgccggttaaatcattactacttgctgataatgggctttttgtttcggatattatgcgccaaacatttttctcagtttcaccggagcaaagccgacatgatgtttatcagttaattagccaaagtggtttagacagtgtacctgtgatgcattttggtaagttagttggtgtattacgacctcaagatattgctgatttaattgaagatgaaaatacgctagatgcacaaatgcagggggcaacgtcgccattagaacaaccttatttagagacaagtccggttactttgtggcgtaaacgtgttgtctggctattaatgctgtttattgctgaagcttataccagtacggtgttacatgcttttgaagacagacttgaagctgctatctctttagctttctttattccattattaattggtactggtggcaatagcggtacacaaattacctcaacattagtacgtgccatggcattaggtgaggtgagcttgcgtaatgtatggtcagtattaagaaaagagatcacgacctcgataatggtggctttaaccatgggaatagcaggatttattcgtgcttggaccttaggggttggcatggaagtgatgatagtggtgggattaacgctaatttcaattacggtttggagtgctattgtatcttctattattccaatggtattaaagcgtattggtgttgatcctgcggtggtgtctgcaccttttattgcaacatttattgatggtactgggcttattatctactttgaaatagcatctcataccatgagtgtgtttgcttaa

SEQ ID NO: 295840 - DNA, 216 bp, Proteus mirabilis
atgagaaaattgttatttatttgtttatttactgtcatactttctggttgcgaaaaaaatcaaaccctagatggctctaatgttgagtcattacgaatatcgattgtagaaatgcgcaattcattaccgcttgaagagcagcaacgctttgatgaagcaatagaattagccatgcgatatgatcacgcgaaaaatgtgtcaatcgttagatggtaa

SEQ ID NO: 295841 - DNA, 1668 bp, Proteus mirabilis
gtggctcaatacgtttatagtatgttgcgtgtcgggaaagttgttccccctaagcgacatatccttaaaaacatctcactcagcttctttccgggcgcgaaaattggtgtgcttggtctaaatggtgccggtaaatcaaccttactgcgtatcatggccggtatcgataccgatatcgaaggtgaagcacgtccacaaccgggtctaaaaattggctacttgccacaagagccaaaattaaacccacaacaaacggttcgtgaagccgttgaagaagcggtaagcgaagtcaaaaatgcactcaatcgtcttgatgaagtgtatgcagcttatgctgatcctgatgctgattttgaccaactggcaaaagagcaaggtcagctagaagcgattattcaatctcacgatggtcataatcttgataaccaattagagcgtgcagcagaagcactacgtttaccagattgggatgccaaaattgaacatctttctggtggtgaacgtcgccgtgtggctatctgtcgtttactgttagaaaagccagatatgctgttgttagatgaaccgactaaccacttggatgctgagtctgttgcttggttagaacgcttcttacatgattatgaaggcactgttgtggcgattacccacgaccgttacttccttgataatgtcgcaggatggatcttagaacttgaccgtggagaaggtattccgtgggaaggtaactactcctcttggttagagcaaaaagatgcgcgtcttgaacaagaagcagccactgaagccgctcgccataaatcaattcaaaaagaacttgagtggatccgccaaaatcctaaaggtcgtcaggctaaaggtaaagctcgtcttgctcgctttgaagaactcaatagcgttgattaccaaaaacgtaatgaaaccagtgagctatttattccacctggacctcgtttaggggataaagtgctagaagtgagtcacctcactaaatcttatggtgatcgcgttctgattgatgatttaagtttctccattcctaaaggcgctatcgtcggtattatcggtccaaatggtgccggtaaatcaacgctgttccgtatgatctcaggtcaagaacaacccgattcaggaaccgtgactttaggggagaccgtgaaactggcctctgttgatcagttccgcgatagtatggatgacagcaaaacggtttgggaagaagtttctggtggtcaagatattatgcgcattggtaactttgaaatcccaagtcgcgcttatgtgggccgctttaactttaaaggcgttgaccaaggtaaacgcgttggcgaactgtccggaggtgagcgtggacgtttacaccttgcgaaacttctccaagtcggcggtaatatgttgctgctcgatgaaccgaccaatgatctggatgttgaaacgctacgcgccttagaaaatgcgctattagaattcccaggttgtgctatggtcatttcccatgaccgttggttcctagaccgtatcgccactcatatcatcgattatcaagatgaaggtaaagtcgaattctttgaaggtaactttactgaatatgaagagtataaaaaacggacattaggtaacgaagctatccaacctcgtcgcatgaaatataaacgcatcactaagtaa

SEQ ID NO: 295842 - DNA, 1920 bp, Proteus mirabilis
gtggttaagcaaaagtggtccttcgtcttggcaattagtacattgtgtttctctgcgtgggcacaagcagattcattaagtgaacaacgaacacgttaccaagaaattaaagcagcttgggatgctaaagatacagcacaagttgaaaaattattaccgacattacaagattatcctctttatccctatcttgaatatcgccaaattaccgacaatcttgatgtggtcgctccggctgtggtgactgaatttgtcgaaaaatatccaactttgccacccgcgaaagcactaccttctttgtttgttaatgagttagcaaaacgtcaagagtggcaaaacttactgacttttagtcctaatcctcctaagcctaaagcagcaaggtgtaactactattatgctaaatgggcgacaggggataaacaaacggcgtgggttggtgcaaaagaagcgtggttaaacggtacttctatgccttcaagctgtgatccgctatttgatgagtggcaaaaagcaggaaatttaagcattgaattagtgttagagcggattaatttagcaataaaaagtggtaatactgggttagcaacttatttagctaagcgattgccgatggattatcaaacgattaacgatgccattgttgaactacaagatcaccctaatctggttgctcgttatgccacacaactttcaccaacagattttacgcgtaatattgtacaagccgcattttcacgttgggcgcgaaaagatgccgatagtgcaagagcacagcttgatagtattgccagagctcaaaaaatgacgacagctgaacgccaattaatgcgtgatacggtcgcttggcaatatatgccatatgccacaccagagcaggctaaatggcgtgatagtgtgatacaagataccgcttcagataccctgcgtgagcgtcgtgtgcgtttagcgttaagccaaaatcagcccgcagaattagctttatggttagaaagattatcacctgaaagtaaaaataaagaggagtggcgttattggcgagcgatggtgttgcaatcgcaaggtaaaaacagtgaagcacaagcgcttttacaagaactaacacaacatcgcggtttttatcctatggtggcggctgaaaagctaggtaaaccttatgttatggtaatagacaaagcgccaagtgtttcacccacaattccacagcaacctgaagtgcaacgagtacgcgaattaatgtattggcaaatggataatttagcgcgtactgagtgggcaaattatgttgccacccagcctgctaccacacaatctcaactagcgcgttatgcttttgagcaacaatgggctgacttagcagtacaagcaacgattactggtaaaatgtggaaccatttagaagagcgtttcccacttgcatggcaaaatgaatttgaacgatatacgaaagataaagcgatagatcgcaattatgcgatggcgatcgctcgccaagaaagtgcatggaacccacaagctcgctcttcagctggggcaacgggtcttatgcaagtgatgccgaaaaccgcagagttcacggtaaaacaagcaggtattaccgggtatgcaagtagtgcgcaactgacagatccggttaaaaatattgaaattggtaccgcttatcttgattctgtttatcagcgttttaatcaaaaccgtattttatctagtgctgcctataacgcaggtcctgcacgggttgaccgttggttatctgatgctaataaccaactagatgctattgcttttattgagagcattcctttcgcagaaacgcgtggttatgtcaaaaatgtactctcatttgcggtgttttatagctattttgccggagagcaacaaccggtattaactcaaactgagtggaatagtcgttattaa

SEQ ID NO: 295843 - DNA, 312 bp, Proteus mirabilis
atgctagatcctgcattatcaccagaagagaatgaacactgggtacgttttgttgagttattacgccaagcgtttgaacagggagttgaatttcctgttttacaacttttaatgacgccagatgagcgcagtgcattagcaacaagagtgcgtattgttcaagaattaatgcgtggggaattaagtcagcgagagctaaaagagctattaggagttggcatcgccactattaccagaggctctaatagtttaaaaacagcaccccatgatgtgaaattatggcttgaaaaagagcttatgataaaaaaataa

SEQ ID NO: 295844 - DNA, 540 bp, Proteus mirabilis
atgtatcatgtcattgcagccactacgaatccagcaaaaatcaacgcgatcaaactcgcctttgagcaagtgttcggtaaagatacctttgatattgaagatattaatgtcgatagccgcgttccacagcaacctattggaaatacagaaacgagaactggcgcacgccaacgtgtgatggccgcaagacaagtacgtccagaagctgacttttgggtaggtgttgaagcgggtattgaagacgatatgacttttgcttggattgttatcgaacacgagcaaattcgcggtgaatctcgctcagccagtttaatgctaccggaacagatcttaaaaggtgttcgtgaaggtcgtgaacttggcgatgaaatggcatttttaaccaagattgataatattaagcaaaaaggtggcgctattggttattttactgatggtttattaagccgcacttctgtttaccaacaagcgattgtattagctttagtccccgtcactcatgatatttataaacaacttaacaaaaaagatgatgaatga

SEQ ID NO: 295845 - DNA, 648 bp, Proteus mirabilis
atgttacaggtctatcttgttcgccacggtgaaactgagtggaacgtggcgagacgtatacaagggcaatctgatagcccactaacagcaatgggtgtgcgacaggcacaacaagttgctgaaagagtaaaatcagcaggtattacccacataatttctagtgatcttggccggacttgtcagacggcagagattattgcacaagcttgtcgctgtgacgtaatcacggatccccgtttgcgtgaacttgatatgggcgttcttgaacagcgagagatcgccacattaaatacacaagaagaagcttggcgcaagagtttaattgatggtacacctgatggacgaattccccaaggagaatccatggtggaattagctaatcgtatgcaggctgctttaaacagttgcttggcgttaccagagcatagccgtcctttactggtgagtcatggtattgcattaggttgcctgctaagtactgtgttaggcctacctgcttacgctgaacgacgtttaagactacgtaactgttcaatttcacgagtggactatcaaaacagtccttggctcgctaatggatgggtaatcgaaacagcaggggatgtgagtcatcttactgatatcgctcttgatgaagtacagcgttaa

SEQ ID NO: 295846 - DNA, 903 bp, Proteus mirabilis
atggatcaaaccaacatcatacgtgatttactcgcttggcttgacaataatctggatcagccactatccctcgataatgtcgcaactaaagcgggttactctaagtggcacctacaacgcatgtttaaagaagtaacggggcaagcgattggttcttatattcgttcgaggcgtctatctcgcgcggctgtggcattgcgtttaacaagtcgtcctatcttagatatcgctttacaatatcgttttgattctcaacaaacatttactcgcgcctttaaaaagcagtttgatagaactccagccctatatcgccgttctgatgagtggtgtgctgttggtatttgtcctccaataaaattagatcctcagcctttgcccaaatgggaatatgtgcaattaccggagataaaattgattggtattgaacaaacttgtagccatacactagaacaatgggccaatgcttgttccgatatgcgtcaaacattttggcaaaattatattactaaggtaaacactatcccccatgaggtttatggtttgcaccatacacaacacagtgatgagcatgaagatgaacagcgtgttatctacaccaccgccgttgagcctgcttatgcgagttttgtagaagatgatactgcttatgaagtcatattagaggctggcgattatattcgctttgacttcgagggagaggcaaaacgaggcgccatgcaggaatttttattcttaatctatggtgtttgcttgccaaccatggggcttactcgccgtaaaggacatgatattgaaaagtattatcttaaagaagtgcactatgacaatgtgatgaccgccgagccacaagatcatattaagcgttttgagtattatattcccattaaacgcgaattggcctaa

SEQ ID NO: 295847 - DNA, 477 bp, Proteus mirabilis
atgtttaatttcaaaaagatactcacactttctatcttgcttcctatgtcaataatggtgaaagctgaagaaattggttatgtcgatacggtttttaagttttttggtgccaatcataaaattgtcattgaagcttttgatgatcctgaagtcaaaaatgtcacttgctatttaagccgtgctaaaacagggggcatttccggtagtttagggcttgctgaagataccgccgatgcggctatttcttgccaacaagtagggccaatcgaattaagcgaaaaagtcttaaaaggtaaaaatcgtggtgatgttgtttttcaaaaaagaacgtcactagtctttaaaaagctacaagtggtgcgtttttacgataaaaaccgccatgcactgatatatcttacttactctgataaggttatcgatggctcaccgaaaaatgccattagtgcagtacccatcatgccatggaaagagtaa

SEQ ID NO: 295848 - DNA, 717 bp, Proteus mirabilis
atgcaaaccccgcacattctgattgttgaagatgaagtagttactcgtaataccctgaaaagcatattcgaagctgaagggtatatcgtacacgaagccactgatggcaacgagatgcataatattctgtccgaccatgatatcaatctggttattatggatattaatcttcctggtaaaaacggtcttctattagcccgtgaattacgtgaacaggtaagtgttgcattaatgttcctaacaggtcgtgataatgaagttgataaaatcttaggccttgaaattggtgccgatgattacatcactaaaccatttaatcctcgtgaattaactatccgtgctcgtaacttattgtcacgcactatgaatttagcgaatggcacagaagagcgtcgtttagttgaaagctataaatttaatggttgggagctagatattaatagtcgctctcttattagccctacaggtgaacagtataaattacctcgtagtgagtttcgtgcgatgttacatttctgcgaaaacccaggaaaaatccaaactcgtgcagaattactgaaaaaaatgacgggtcgtgaattaaaacctcatgatcgtactgtagacgttaccattcgtcgtattcgtaaacactttgaatcaacccctgatacacctgagattatcgctactatccatggtgaaggttatcgtttctgtggtgatttagacgagtga

SEQ ID NO: 295849 - DNA, 648 bp, Proteus mirabilis
atgcgagtgttaaaatttgggggaacttcagttgccaatgcagaaagggtgctgaatgttgctgatatcgctgagaaaaaacgagagcagggacaagtcgctctggtattatcagcacctgccaagataacgaattacttggtggcaatgattgaaaaaacggcagaaggagaagaacctctcactcaagtacgagaagcagagcaaatcttcgctaatctattgcaaggtttacgagaaaatcaacctggttttgattaccaaggtttaaaagacaaagttgagcgtgagtttgctgagattaaacatatcctgcatggtatctccctattagggcaatgtcctgatagcatcaatgctgcgatgatttgtcgtggtgaaaagctttcgattgccattatggagtcggtgttacaagctagaggatataacgttaccgtcattgatccggttaaaaatctccttgctcaaggtcattatctcgaatcgacagtggatattcctgaatcaactcgccgtatttccgcccttaatattccgaaagatcatatgatcttgatggcaggtttcactgccggtaatgaaaaaaatgagcttgtggttctcggtcgtaatggctcagattattcagccgccaccataggataa

SEQ ID NO: 295850 - DNA, 660 bp, Proteus mirabilis
gtggttaaagtttatgcaccggcgtcaattggcaatgtgagtgtcggttttgatgtgttaggagccgcagtttcgcctattgatggtcaattattaggagattgcgtaaccgttgaagcggcgcaagaatttcaacttcacagcaaaggacgatttgttagcaaattaccttctgatactaagcaaaatattgtttatcaatgttgggagctattttgtgaaaaattaggtaaacaattacctgtctcgatgacacttgaaaaaaacatgccgataggctcaggattaggatcaagtgcttgttctgttgtggctgcacttgttgcattaaacgaatttgctcacaaaccatttagtgaaagccacttattattaatgatgggagagctggaaggccgtatttccggtagtgtgcattacgataatgtcgcgccatgttatttaggtggtttacaacttattttggaacaaaacgacattatttgtcagcctgtgccagcttttgacgattggtattgggtgatggcttatccggggatcaaagtctcaacggcacaagcaagggctatcctccctaaacaatacgataaagctgatattattaatcatggtttattcatgcttgtcatacacaacaaccaaaacttgccgcaagcttaa

SEQ ID NO: 295851 - DNA, 255 bp, Proteus mirabilis
atgaaagatgtgattgcagagccctatcgaacacagttgctccctggttttgataaagcgagagaggctgcattacaaaaaggcgcgcttgcatgcggtatttcaggctcagggccaacgctgttttctattactgattcattggctattgcccaagatgtggcgcaatggttacaacaacattatgtacaaaacgatgaaggctttgtacacatctgccgtttagatactcgtggcgcaagagagatagggtaa

SEQ ID NO: 295852 - DNA, 555 bp, Proteus mirabilis
atgcagtggcggaatacatctactcgctatgggcacttgtcgcttcttttacattgggggacagcattaaccgtctatggcatgtttgccctaggattgtggatggtaaatttaggctattacgatagctggtatcattcagcccctgaaatacataaaagtatagggataattctatttattgttcttcttttccgagcaatttggcgttggatttctcctccaccaacagcattatccagctatagtcgacttactcgcattagtgcccatgtggctcatatgctgttatatctaattttatttgccatcattataagtggctatttaatttctactgctgatggtcagccaatatctgtattcgattggttctcagtacctgctgttttcacaggggaaggggaacaagctgatttagccggtgatgtacatctttatttagcctgggcggttgttgtgttatcgctattacatgccgcgggtgcattaaaacatcactttatagataaagatattacattgaaacgtatgcttggcataaaaacacaataa

SEQ ID NO: 295853 - DNA, 579 bp, Proteus mirabilis
atgtttaagaaggcgttattgagtttaactgcaggtgcattattatttaatgctagttcagcattagcggctgattatcaaattgataaacaagggcaacatgcttttgtgcaatttcgtatccaacacttaggttatagctggttatacggcacatttaaagattttgatggaagcttcacttacgataaagaagatccttcaaaagataaagtcgatgttgtgattaaaacgggtagtttagatactaatcacgctgaacgtgacaaacacttacgtagtgctgatttttttaacgtcagtaaatatcctgaagctaagtttgtctcaaccaaagtgactcgtgatggtgaaaattatacggtgacgggtgatttaacacttaatggcgttacaaaaccaatttcactaaatgcaaaattaattggtgaaggtactgatccgtggaaagggtatcgcgctggttttgaagcaacaggtaaagttaatctgaaagagtttaactttaaatcagatttaggaccaaaatcgcaagaagcagaattaatcatctctgttgaaggtgtgaaaaaaaattaa

SEQ ID NO: 295854 - DNA, 1086 bp, Proteus mirabilis
atgctaaaaaaattacgacatactttattaagtacattaattatttcaggtacctttttaagtagtataactacggcgcaagcttgtacccgagttgtttatttaggtgaaaataaccaaataattaccgctcgttctatggactggaaatacgaaattggtactaatttatggatattccctcaaggaatgcaacgttctggtgaggctggtgataattcagttcaatggcaatcaaaatatggtagtgtgattgcatcaggttatgatatttctactactgatggtattaatgaaaaaggattagtggctaatttattatggcttgctgaatcagattacccaagttattccaaagataagcctgcaatggctatttctgcatgggcacaatatgtattagataattttgctactgttgaagaggcggtaactgctttaaaagatgagccttttattgtcttaacagacaaagtacccggacaggatagagtcgcaacgttacatttatcattgtctgacagttctggtgatagcgcaattattgaatatattgatggtaaacaggtgatccaccatagccgaaaatatcaagtgatgactaactcccctatattttctgaacagttagcattaaatagctattggcagcagattggtggtacggtaatgttaccgggtactaatagagcatcggatcgttttgcaagagcctctttttatattaatgctattcctaaatcgcaatcgagcaaaaaatcacttgccagtgtatttggggtgatccgcaatgtttcggtgccttatggattaagtaccgtagaatctccagaaatatcatcgactcgttggagaactgtcgctgatcataaaaatcagctctacttttttgaatctgcattatcaccaaatactttttgggttgatttgaaacaaattgatttttcaaaagaaacaggaaaagtgatgatgttagcgttaggccaagagcagtcaacgatttattcaggagatgcaagctctcagtttaagccagcgaaaccttttaaatttaaagggttagaaaatataccaatacaaaattaa

SEQ ID NO: 295855 - DNA, 1170 bp, Proteus mirabilis
atgaagttatcggcagtcgttaattttatggagacatcgtcttttagcagaaagacgatgtctttcttattgatcttgaatagtctttttattatttactcgatattactttctcgtggtgtttatcttgattgggaaatacacggttttgctgattggctaaaatcgttaggtatattgaaattacttgatattcctaaagtgatgttagcgagtgcacttattttgctctctttctttatgtatatgggggcgcggattgcgtggtgcgtttcattaatattattagtgacgatcgtttttttagatgtcgcggtttatcaccaagctggtactcaagcctatacttcattagcattagccattgtattggttatcagccggcgtgcttttcctcatcatagtttaaccagtgccggttttgttgcttttatctgtacgatttcgctactgtgtttctctatgttaggcagcctctatattggtgatgaatttaaaccacatatcacaacgttaatggatgctttttacttttccattgtctgtatgacaacactcggttttggcgatatcgttcctatctcaagtaatgcgagaatgtttaccctaacagtggttattttggggatcactgtttttacgacttctattgtttatgtgatgggatttttggctcgtggtactcgcgatattgtgaagaaaaggatcgctaaaatgcatgatcattttattattattggctcttcaatgttggcagcacaattagagaaagggcttagagagcaaggtaaaccggttattgcgatttgttcggataaaaagcaagccatgtatgataaagaagccaatattattgaaggtgatccaaccaatgtaaaaacattacaaacggcaaatattcgccaagcgagttgggtggcgacgttatctgaaagtgatgcggaaaatacctttattttattaactattcaagagtgcccagatcttcaagcgaaattaatcactatcattaataaagatgagaatagagaaaaaataagtcgattacgtccagatatgctgttgtctttagcttcgttaggcaaagaaattatgatgaaagtcctttgtggtgaatctattaattcgtctgatgttactgatttattaatcaataaatatttaaaataa

SEQ ID NO: 295856 - DNA, 855 bp, Proteus mirabilis
atggaacttgttacgtataaaacgctacctgaatggcacttaacagcgatccctttagcattattagagcgtcataacacaaaagaaggcacttatgcgcaaatgcggatattacaagggagtatgacatttgtgctatttaaggataatggagaacaagtgttcctagagtgtgatagcgaaaatcagcctccgcttattcaacctcagcaatggcataaaatcgataaagcgagtgatgatgtactttgccagctctcttttttatgcactcccgaagataaattttttaaagaaaatgatttgtcattaccgcattcagaagtgcgttatatggcaacattgactaccccatgtaaagtgcttgatttaggcgcaggacgtggtcgtaatagcttctatttagcattacaaggttatgatgtgaccgcattagatattaatgcagctcatattgatgcaattgaagccgtcaaagctaaaaccggtttagcgatcaaaagcggcttatatgatataaatgaagcagcattaaatgagaaatacgatattattatttctactgtggttttgatgttttgccagcgtcaacgtatcgcagatattattaaaaatatgcaggagtgtacaaatccagaggggattaatgtcattgtttgtcctgttgaaacagcaaatagtggatctgctgaagttcctttcaaaaccttcttgcgccaaggtgaattagcggattattaccaaggctgggatattattaaatataatgaaaaccctgggcatctacataaaactgatgctaatggtaatcgtatccaacttaattttgcgacattaatagcgcgtaaaaaataa

SEQ ID NO: 295857 - DNA, 1401 bp, Proteus mirabilis
atgtatcagcgaaacacgatcaaaaaatcgcaaaatcaacaacgctttaattggtttagaaaagcgaaagaaactaaccttgccccggtgaaaacgcttattctttccgccattatcggtacgttagccggattaattggggtactatttgaaaaagccgttggctgggtcattcatttaagacaagataaattagccgaggtattaaccaacccttatcttttggctattggcacgttacttgtttcctctcttttagccatgagtggctactacttagtaaagaagttttcaccagaatctggtggttcaggtataccggaaatcgaaggggcaatgatagatattcggccagttcgttggtggcgggtattgccagtaaaatttatagccagtatcggtaccttaggctcaggtatggtacttggtcgtgaaggccccaccgtgcaactaggggctaatattggtcaactcgttaatgatgtctctcgcgttaaagataaaggaacgcgccaaacactattagccacaggtgccgctgccggtttaacggctgcctttaatgctcccttggcaggcattctatttattattgaagagatgagaccacaatttaaatataatttaatctctattaaatccgtcttcattggcgtgatcatgtcttgtattgtatttcgcctaattaatggtgaaggaggcgtcatacagataggtaaattttcttcagcgccgatgaatacactgtggctctatttagtgttaggaatgttatttggtgttgttggggttatttttagtaaattactgttttatgttcaaacacaattccaacatttttatcaagataaaacctcacgttttgttttagccggtggcgtgattggtggtgcatgtggtttacttgcgttgattattcctgaaataaccggaggcggttttagtattattcctgcattaagtgccggaggatattcgttaactgcactgctactattttttgtgttacgtaccatcaccaccattatcagcttctcctccggtgcaccaggaggaatttttgcccccacattagccttaggcacactctttggtagcgcttttggattaatggcaacctatcttttccctgattatcaaattcaaattggcacttttgctattgctggaatgggtgctttatttgccgcaacggtgagagcaccactaactgggattgtgttagttctagaaatgaccgataactatcaacttattttgccaatgataattacctgtcttggcgcaaccatgctggcgcaattattaggcgggcgacctatttatacggttctactcgaaagaatactacaacgctcagaagccaaagaaaaaacagaggctcccaaagagcccctatag

SEQ ID NO: 295858 - DNA, 1401 bp, Proteus mirabilis
atggatttcatcacaaatatattaagcgctattaatagcgtggtgtggggagtaccgatgttagtcggtattctaggcatcggtctatttatgcagtttagactctcttttctgccaattagaaaattaggtacaggatttaaactcttatttgagaaaaatgataaaagaggtgaggggcaaatctcaccttttaatgcattaatgacggcgctttctgccactatcggtacgggcaatattgctggagtcgctacagcggttgtattaggtggaccgggagcgctattttggatgtggatgactgctttagtcggtatggcgactaaatattcagaagctgtgttagcggtacgttttcgtgaggttgataaatacggcaactacgttggcggaccgatgtattatattaaaaacggtttaggtaaaaaatggctttggttaggaacgctatttgctatttttggtagttttgccggcttcggtataggtaatacggtacaggcaaactcagtggcggatgttttgcaaagtaattttggtatttctaccacagtgacagcaattgcattagttattttagtcggtgctgtattaattggtggaattaagcgtattgctgatgttgccggtaaattagtgcccattatgacagtagggtattttggggcagggattgtcgtactcgcactgaatattactgctattcctgatgcatttatgttgattgtaaaatctgctttcacaccggttgctgcgcaaggtgggtttgctggtgcggctgtttgggcggcaatacgttttggtgttgcacgaggtgtattctccaatgaagcaggattaggtagtgcacccattgctcatgcgacagccaaaacacaaaacccgatccgtcaaggcttaattgccatgttggggactttcattgataccattattgtctgttctgtcaccggattaacgattgtgatcaccggacagtggctgacaggtcaaagtggggcaacacttactgcaagttcgttctctatggctatccctggaggtaactatattgttgcgatcgcattggctgtttttgcttttaccactattttaggttggagctattacggtgagaaatgtgtgcaatatctatttggaccgaaagccattatgccttttcgtattgcatggttaattgccttgccaattggcgcgactcaatccttagaatttgtttggttacttgctgatacattaaatgcgatgatggctattcctaacttaattgcattagcactgctgagtcccatcgtttatcgtctaacaaaagactatataaaagatgttaatgcggttgatattgatctaaatgaacaagtgaattctgtaagcaaaaaagaagcagaagcggaataa

SEQ ID NO: 295859 - DNA, 1482 bp, Proteus mirabilis
atgattaaattaaataatgttccatccgaatttcgtcccttagaaagctacaaaatgttaatcggcggcgaatgggtatccagtacatcgcaacaaacgaccaaaacctatagtcccgcaaccggtgagttattaagtgaatatccatcaggtacagctgaagacgttgatcttgctgtaaaagcggctcgtaaagcttttgatcattggcgtaaaacctctcctgctcaacgccaagcgctattattaaaaattgctgatcgtttagaacaagagcaagaacgttttgcttggattgagtctcttgataacggtaaaccactcaatgaatcgaaaaacatcgatttacccgcctctattgaccattttcgatattttgcaggcgtgatacgctctcataccgatgaaagtgctgtcttagacgaaaataccctgagtcttgttattcgtgagcccattggtgtcgttggacaaattattccatggaattttccattattaatggctgcttggaaattagcccctgccatcgccgctggagataccgttgttattaacccagccacactcacctcactttcattattagagctaggtcgtattttaaatgaaatattaccagccggtgttataaatattgttactggtcgtggatctgttgctggacaagctattctagaacaccaagacattgataaactagcatttaccggttcaaccaatgtaggttataccgttgcagcggcggcggcgaaaaaaatggtaccagccactttagaattggggggtaagtcagccaatatcgtcttccctgatgcgaatatgaaaaaagccgttaaatattccgcattagcgatattaatgaaccaaggacaggcctgtgaatctggctcccgtttattcttacatagagatattcatgacgcattcttaaaagagttaaaagcagaatttgagcgtatccgtgttggtgatccacttgatcctaatacacaaatgggtacccaagtcagccaagcgcaaatggataccattttaggttatgttgagctggccaaaaaagaaggtgcaactatactcacaggaggtgagcgtattacgggtgaagggtttgatgatggcttttttgttcgcccaaccattattatcaatgccacaaaccaaatgcgtgtcgcacgtgaagaaatttttggccctgtattatgtgtgatcccatttgataatgaagaagatgttattgaaatggctaatgactctgaatatggccttggtggtggtgtctggactcaagatattaaccgcgcactacgagttgcaaaagccgttagaactggccgtatgtgggtaaatacttatcatgaacttcctgcccatgcaccatttggcggttataaaaaatcaggcttaggtcgtgaaacgcataaaatgatgttagatgcctacagccaagtgaaaaacatcttcattagtaccaaagaataa

SEQ ID NO: 295860 - DNA, 1653 bp, Proteus mirabilis
atgtattgtgtgcaatgtgaacaaacaatgagaacacctgttggtaatggttgtgcctatgcacaaggtatgtgcggtaaaacagcagaaacctctgatctacaagacttattggtggcagtattagaagggctgtcagcatgggcattagctgcccgtagtgttgatattattgatcacgatatagacagctttgcgccacgggctttcttctcgacgttaaccaatgttaattttgattctgaacgtattgttggatatgccaaagaggctatttatttacgtgaaagcttaaaatcacgtacgttagccaaaaatgcagccatccaagtcgctcatcctaaagccgaaattcaattagaaggcaacgacttagccagtctacagaaacaagcccaacgctttgcattaaataatgataaagcgcaagtgggggatgatctgcatggtttacgtatgctttgcttgtatggcttaaaaggtgctgctgcttatatggagcatgctcatgttttaggccagtacgatgatgaaatttatgctgaatatcatcgttacatggcatggttaggtaccgatcctgcggatatgaatgagttgctagacaatgcaatgggcattggtcaaatgaactttcgtattatggcgttattggataaaggtgaaactcaagcttatggtgatccaacccctgtttccgttaatgtacgcccagtagcaggtaaagctattttaatttcaggccatgatctgaaagatttacagatgctacttgaacagaccgaaggtaaaggcattaatgtttatacgcacggtgaaatgttacccgcccatggttatccagagctgaaaaaatataaacacttagtcggtaactacggaagtggttggcagaatcaacaaagtgaatttgccaaatttcctggccctgtgttaatgacatctaactgtattattgatcctaatgtggggaactatggcgatcgtatttggacgcgtagtattgttggttggccgggtgtgaaacacattaaaggtgatgatttctctgaaatgattgagcaagcgctctctttagagggatttccgtacagtgaaattgaacacttaattactgttggatttggtcgtcaaacactattaaatgcggctgatacagtgattgatttagtttcacagaaaaaacttcgtcatgtcttcttagttggggggtgtgatggtagtcgtggtgaacgtagctactataccgatcttgctcgtgccattccccaagattgcttaattatgacattagcttgtggtaaatatcgctttaataaacttgattttggcacattagagggcttaccgcgcttacttgatgtgggtcagtgtaacgatgcctactctgcgattatgctagcggttaatcttgcagaaaaattaggttgtggtgtaaatgatttacccctgtccttgattttgtcgtggtttgaacaaaaagcgattgttattttattaaccctactctcattaggggtaaaaaatatttatactgggccgactgcgcctgcatttttaaccgataatttgctcgcaatacttaatgaaaaatttggtatgcgtgcgatcaccacgccagaacaagatcttcaagaaattctttctgcttaa

SEQ ID NO: 295861 - DNA, 1005 bp, Proteus mirabilis
atgacgatgccaacagctctttgtcctaatcgtatgcaagttcactctatccatcaggaaaccccggaagtgtggacactgaatttaattaaccatgatttttatcgctataaacccggccaatttgcactagtcagtattaataatagcgatgaaacgatgcgagcttatacgctctcgtcttctccgggattaagtccttttgtctctttaacggttcgtcgtatcgacaatggggtggggtcaacgtggttaacatctcaagttaagccgggtgattatctctggttatcagacgcacaaggggagttcacctgtgcagatagagaaggaacgcgttatttaatgctcgctgcggggtgcggtgtgacccctattatgtcgatgacgcgttggttgttaaataatcaacctaaagcggatatcacggtcatttttaatattcgcgaacagagccaatttatttttgaaaaagagtggttagagttggctaatgcttatccctataatctcaattttattatgatgcctaagttgccggatgataagggaatttttagtggacgtatttctcaagaaaaactagccgctttagtgcctgatattgccagtcgtactgttatgtgttgtgggcctaatagttatatggaagatactgcgcgttttgccaaaaatcttggtgtttgtgcagagaatatttttatggaacgttttggtgatgagccaatgtgtgttgatgaagcacaacaacttactatgactattcgtcatccgttaaggcaaattaacgtaccggtggggatgacattattaacagcgatggaagaaaacagtgttcctgttttggctgcttgtcgtgctggagtgtgtggtagctgtaaaacacgcattgtgaaaggcgattatgaggtcaccagcaccagtactttaactgctgatgagatagcacaaggttatgttttagcctgtagttgtcgattaacaggtgatgttgaactagcctaa

SEQ ID NO: 295862 - DNA, 339 bp, Proteus mirabilis
atgaaaaaaattgaagcgataattaagccgtttaaattagatgatgtaagagaagcattagccgaagttggtatcacgggtatgacggtaacagaggtaaaaggctttggtcgtcagaaagggcataccgaactttatcgtggtgcagagtatatggtcgattttttacctaaagtaaaaattgagatcgttgttgctgatgaaatagctgaaacttgtgtcgatactataatgactaccgctcaaacggggaagattggcgacggtaaaatttttgtttttgatgtgaatcgagttatccgtattcgtactggagagcaagacgaagaagctatttaa

SEQ ID NO: 295863 - DNA, 1617 bp, Proteus mirabilis
atgagtcgtaaattaaaactcgcacttgctcagttaaactgggttgttggcgatattgaaggcaactgtgaacgcatgttagccaccgtaaaagcgcaagaagatgccgatctggttttgttttctgagcttgcgttatgcggttactctcctgaagatctactatttcgccctgatttccaacaacgttgtgaagagcaactggttcgtttagaacaagcaagtaagaaaacggccattgtggttgggcatccttggtggcaaaacggtactatctataatgcactgtcatttttctatcaaggtgagttacaggcgcgttacttcaaacaacagctacctaattatggtgtatttgatgaaaaacgttatttccagcaaggaaatgaacgttgtgttgtgccttttaaaggctatcatttaggattattaatttgtgaagatatttggatcaacgagcctattgatgcactaaaacaagcgggtgctgatctggttctttctattaatgcttcaccttatagtcgtgaaaagccacatattcgtacccaattaattaaagaacattgccaaagaacgcatctgcctgtggtgtatctcaatcaaattggtggtcaagatgaattggtttttgatggatgttctaaagtctttgatgaacgaggaacaatcacccatcgtttagcggcttttgatgagcaagtggccgtggtggagtttgatgagttaactatcgtaccaatgcaagatgcggcacccgagctttctcctttagcgcaagtttatcaagcgttagtgctggcaacgcgtgattatgtgacaaaaaatggttttaaaggcgctatattaggattatcagggggcatcgactcaggcttaacagttgcaattgccgttgatgcgttaggtaaagagagcgttcaagcggtaatgatgccatttcgctatacctcagaaatgagtattcacgatgcgaaagagcaagctgatttattaggtgttgagtttgatactgtctctattgagccgatgtttgatgcttttatggatcaactttcgcctatgtttaaaggtagcgctgtcgataccacagaagaaaatctacaagcgcgttgtcgtgcggttattttaatggcgatgtccaataaacgtcgtcggttagtgctcaccacgagtaataaaagtgaatctgccgtaggctactcgaccttatatggtgatatggcggggggctttgatgttttaaaagatgttcctaaaacactggtgtttgaactggctaaatatcgtaatactctttcacccgctattccacaacgtgtgattgataggcccccttcagcagaattagcaccaggacaaacagatcaagataatctgccaccttatgatattttagatgcccttcttgaaggctatgttgagcaagataaatctgtttctgacttggttgcggctggatttgatgaagccattgttcgtaaagtggtaaaattagtcgatattaatgaatataagcgtcgtcaagcaccggtaggaccgcgtattaccagtcgtaattttggtaaagatcgtcgctatccgatcacaagcggttttggtcgccataactggtaa

SEQ ID NO: 295864 - DNA, 1338 bp, Proteus mirabilis
atggctggccataaatcagcgaatcttttacttgtcgatgatgatccgggattattaaagctactgggtatgcgattaacaagtgaagggtttcatatcgttaccgctgaaagtgggcaagaagcacttaaactattattaaaagaaaaaatcgatctggtgatcagcgatttacgtatggatgaaatggatggtatggcgctatttgcagaaatacagcgccaacaacccggtatgcctgtgattattttaactgcacatggctccattcctgatgctgtcgcggcaactcaacagggggtgtttagtttcttgactaaacctgttgatagagatgcgctttataaagctatcgatgaagcattagaattagtgacgacggtatctgatgaagagtggtcaaaagatatcgtgacccgtagcccccaaatgttacgcttattagagcaagccaagttagttgcacaatccgatgttagcgtactgattaatgggcaaagcggtacaggtaaagaagtccttgctcaagcaatccaccgcgccagcccacgagctaaaaaaccctttattgctattaactgcggtgctttacctgaacaattattagaatctgaactatttggacatgctaaaggtgcttttactggcgcggtaagtagtcgtgaaggacttttccaagcggcagaagggggcactctatttctggatgaaattggtgatatgccaatggcattgcaagtgaaattactgcgtgtattacaagagcgtaaagtgcggccattaggcagtaatcgtgatattgatattgatgtgcgtattctttctgcaacccatcgtgacttgccaaaagcgatggagcgtaatgaatttcgagaagatttatactatcgtttaaatgtggtgaatttacgtatccccacgttgagcgaaagagccgaggatatccctgttcttgctaaccatttattgcgcgaatcagcaaaacggcataaaccttttgtgcgtagcttctcaacggatgcgatgaaatgtctaatgacagcaagttggccgggaaatgtgcgtcagttagttaacgtcatcgagcaatgtgtcgctttaacgaccgcacctgtgattagcgaagcccttgtcacacaagcattgcaaggggaaaataccgcattacctacttttgctgaagcacggggccattttgagatgacctatttaaggaagttattgcagatgacaaagggcaatgtcactcaggctgcaaggatggcagggcgaaatcgaacagaattttataaattgttgtcacgtcatggacttgatgccaatgatttcaaagaatga

SEQ ID NO: 295865 - DNA, 1011 bp, Proteus mirabilis
atgcatatcaggtcacaaaaacaggtgtcttttcatcagtataaaaaattaaagcgaaagacactggctaatgagcaattatctatggcccctgcatcaattaagaggatcgcttcacactggaaacagtatctgtgttggataatgttgcctatgtttcttgctggatgtgcacaaaaatcgctgaccgaaactgctaatattgagcctgaaacccccgttgttaaacaaaaaactatcgattatcgttgggcagaatgtaaaactttagctgctttttatcatgaagggctcaataatccgctattttggttacgtaccattgagtgcacacagcgtattatgtctacagaagcacaacgtcaagccagtagtgttatcgttgccggatgggatggcgccttttataaaagtattttattagagcgagcgggaatgacggttgctgaacgtcgtgctcagctggttttattagaaagctatcaattgcaatttccaagctctatgcgtgttctattatctacttggattgagaatcaaacgcttacgcttgctctcgctgatgagaaaaatcgtaatcgccgttttgttacagaaacggaaaataaaatggatttactgaaaaaacaaaataatgcattagagcatgagttaaataccacacgtaaaaaactcgaaagcctcacacaaattgaacgtcaattatcgagccgaaaacaaggggcttctgtggatgctatttctcaagaagaagcgctatctgatgttcaatcttcagatgcgagtaatacagaaaaaccagccgataaaccgacagcggagcaatctaatacgtcaacggcaagtgagcaatcgataaccaaagaaaataatgaggtttcacaaccttcggtatcagcagttaaacctgaaccaccaaaagcagaacaagtaaaacctgatgcgaaaaatacctcgacagaaaaagagaatagcgcaacggttaaacctactgaaacaggatctaaataa

SEQ ID NO: 295866 - DNA, 1449 bp, Proteus mirabilis
atgatttcattgaaaaagtggcgtattttcccccgatctttaagacaattggttatcatggcattttggatggtgctgttaccgcttctcgtccttgcctatcaggcttatcaaagtttggatcagcttagtaaccaagccgctattaccaataaaaatgcgttagcggataccgagcgtagcgaggtgatgcgtaatttagctattgaaatggaaggaaattatcgacgatattgtgtattgcgtgataaaactgatgaagaaatgtatcaacagcgttatcaacaatacagcaaaatgttctctaccttgcagcagaccatcatccctctttctgagtctaaagaagcacaggccttgaatacttctttgaaaacgctcaaatcaattcaatgcaaaaatagtgaacccacttctcaaatgcaacaggcattagagcaattttcttatgccaataaccgcattgtcgtgttaactaaagagattatttttagtcgtggcgagcaactacaaatggctattgctgaaaaagggcgttattttggttggcaaagtttaattgtttttgtttttagcctgattttaattgccttatttacccgtatgatcatcggtccggttaaaggtatagaaaaaatgattaaccgattgggggaagggcgtacattaaataataacttgaattcgtttcaggggccacgtgaattacgctctttagctcaacgtattatttggttaagtgaacgtcttgcatggctagaatcgcaacgccatgagtttttacgtcatatttctcatgagttaaaaacaccgttagccagtatgcgcgaaggaacagaattattagcggatgaagtagcagggcctttaaccttagatcaaaaagaagtcgtagctattcttgataatagtagtaaacaacttcaattattaattgagcaattacttgattataatcgtaaactttccgaagtacctcagcaaattgaggaagttgatttaaccacattagtgaatgatgtggtgttagcgcatagtttacccgcccgagcgaaaggcattaagacgataatttcacttgatctgaaaaaatgtcgagcagaaacgacgttattatcaagagttattgataatctctactcgaatgcggtgcactatggcgctgaatcgggtaatatctggatctctagttatcaaattgaacagaaaatagttattgatatagccaataaaggcactccgatccctgaatcagaacaaaaaatgatttttgagcccttttttcaaggttctctattacgtaaaggggctgtcaaagggagtggtttggggttaagtattgctcatgactgtatcaaaagaatggatggcgagttaaatattgttcattctgactatgctgatgtctgttttcgtattgaactaccgctactttctgagaataaataa

SEQ ID NO: 295867 - DNA, 3891 bp, Proteus mirabilis
atggaaatcctgcgtggctcccccgctttatccgcttttcgtattaataaactattaactttatgtcaggaaaaccaacttcctgtccgtggtatttatgcggagtttatccattttgtaaaagtggatggacagctatctgaagatgaacaagctaaattaagcaagttactgcactatggcccttcattaacagagcatgagcttgttggagagatgcgtattgttgtaccacgaccgggaaccatttcaccatggtcgactaaagcgacagatattgcccataattgtggtttaacacaagtggttagaattgaacgtggtattgcttattatatagatagcgatacgatggccgaagaacagtggcagttgttatacggttttatttatgatcgtatgatggaaacaatttttaccgattatcaacaagttaatgcgctatttgctgaacagacacccaccccattaaaaacaattgatgttcttgctcacggtaaagatgcgctagttgctgccaatattgaaatggggttagcgctggctgatgatgaagttgattatctagtagatgcttttaaacgtttgcaacgcaatccaactgatgtagaactttatatgttcgctcaagcaaactcagagcattgccgtcataaaatttttaatgcagattggataatcgacggtaaagcgcaagacaaatcattatttaaaatgattaaaaatacttttgagcaaactcctgattatgtcttgtcggcttataaagataatgctgctgtaatggaaggctccgttgctgggcgtttttatcccgatacggaaaaagggcattaccgttatcatcaagagcctgtccatatcttaatgaaagtggaaacgcacaatcacccaacggcaatttctccgtggcctggtgcagcaaccggctctggcggtgaaattcgtgatgaaggggcgacaggccgtggggcaaaacctaaagccggtttagtcggtttttccgtttctaacttacgtattccggggtttgaacaaccttgggaagaagattttggcagaccagaacgtattgtcagtgcactggacattatgacagaaggccctttaggtggagccgcatttaataatgaatttggtcgccccgccttattaggttatttcagaacctatgaagagcaggttaatagtcataatggtgttgaaattcgaggctaccataaacctattatgttggctggtggcattggtaatattcgcgaagatcacgtgcaaaaaggtgagatctccgtgggtgctaagttaattgtacttggtggcccatcgatgaatatcggcctaggaggtggtgcggcttcttctatgacttccggccagtcagatgctgatttagattttgcttctgtgcaacgagataacccagaaatggagcgtcgttgccaagaggttatcgatcgctgttggcaattaggtgatgataacccgattttatttattcatgatgtcggagcgggggggctttctaatgccatgcctgagcttgtcaatgatggcgggcgtggaggtcgttttgagttacgtaacgttttaaatgatgaaccgggtatgagtcctctagagatctggtgtaatgagtcgcaagagcgttatgtattagcggtatccccagaaaaaatgccactatttgatgcgctatgccaacgagaaagagccccttacgctgtcattggcgaggcaacacaagagcgtgaattagtgttaaatgatacacattttgataataaaccaatagatatgcctttagatatcttgttaggtaaagcgccgaaaatgttgcgtgatgtcacatcacatcaaacagcaggtgaatatctcgatcgtaaagatatcgatttaaaagaagcggtttatcgcgtacttcatttacccgccgttgctgagaagacgttcttaattactattggtgatcgtagtgttacgggaatggttgcgcgtgaccaaatggttggaccttggcaaattccggtggctaactgtgcggtaacaacggccacattagatagttattacggtgaggcgatgtcaataggggaaagagcccctattgcactattagattttgccgcatcagcgcgaatggcggtaggtgaagccttaaccaatatggcgggttgcgatgtacagtcacttaatcgtataaaactttccgcaaactggatggctgcggcgggtcaccctggtgaagatgcgggattatatgatgcagtaaaagccattggtgaagagctatgcccacaattaggtattactattccggtgggtaaggactcaatgtccatgaaaacgcgttggcaagatgaacaaggaaaaacgaaagaagttatttcccctctctctttagttatcaccgcattttcccgtgttgaagatgtacgtaaaactgtcacccctgagctttctacccaagaaggaaaccgtttatatctaatcgatttaggtaatggtcataatgcattaggggcaacagcattagctcaagtttatcgtcagctaggacaaaaagcggctgatttacgtgatgtagagcagttaaaacagttttttaatgtcattcaacaattggtgagcgacggtaaattactggcttatcatgaccgctctgatggtggcttatttgtgactttggccgaaatggcgtttgcgggacattgtggccttaatgttgatatcagtgcttatgacgaagatattttagcaggtctatttaatgaagagctaggtgcggtgtttcaaattaaaggggagcatcaagaaagcgttgaaacactgtttactgaacatggtttagcagattgtttacattacttagggcaagcaacaccaagtgatgacattattattcaaagccgtgaaacggaagtttaccatgaaaagcgtagtacattacgtgtctggtgggctgaaacgacatggcaaatgcaacgtttacgtgataatcctgaatgtgcagatgaagaacatcgtgccaaacaagatagtcacgatccgggattaaatgttcacttaacctttgatcccgcagaggatattgcggcgccttatattgctacaggcagtcgtcctcgtattgcggtattaagagagcaaggtgttaactctcatgtggaaatggcagcagcttttgatcgcgctggatttgatgctattgatgttcatatgagcgatttacatacggcacaacgctcattaagtgattttgatgtactggttgcttgtggtggtttctcttatggtgatgtactcggtgcgggtgagggatgggctaaatctattttatttaatcatcgcttacgtgatgagtttgcccaattctttgcacgtcaagatacgttatcacttggggtttgtaatggttgccaaatgatgtcaacgttggccgagcttattccgggggcagatttatggccgcgctttgtacgcaatcgctcagagcgttttgaagcccgctttagcttagtaaaagtaactgatagcccgtcgctattattacaaggtatggcgggttcacagatgccaattgcggtatctcatggtgaaggttttgctgaatttcgtgacgcagcacaattagcgcagttagaagcacaaaatttagtagggctgcgttttgttgatcactatggtcaaccaacagagcaatacccattaaaccctaacggatcagtaaaagggatcaccgctgttaccacaacagatggccgctcaacaatcatgatgcctcaccctgagcgcgtttttagaacagtgagccattcttggcatccagaaaattggggagaagatagcccttggatgcgcttattccgtaatgccagaaagcaatttgactaa

SEQ ID NO: 295868 - DNA, 1470 bp, Proteus mirabilis
ttgaacaatataaggattaactatttcgttatcgttatcatagcgctattttcagccgcgattattgcactgaatattacttggcctgacaggcaaaaagcgcagataaataagattttatctcgtggtgagcttagagtgagtactatcccttcaccactgataacgataaatgataaaaaggaccccgtaggtttcgattatgaattagtgaaacgctttgctgattatcttggcgtgaaacttgtcgttaatatgcggacgaatatcaaccaactctttgatgatctggagaataataaagcagactttattgccgctggattaatttataataaagaaaggctagatacgacacgaagtgggccagcctatttctcagtttctcaacaactgatctatcgtaaaggcacattgaggcctcgtcgttttgatgagcttaatgggcgccttgtcgtcgcagccggttcagctcatgccagcttattaaaaacattaaaagaaacgcaatatcctgaactcgaatgggaagaatcagagactaaaacgacttcacagctacttgaagagttatctgaaggtaaaataacttatgtactggccgattcaatcagcgtcgcggtacaacaacgcattcaccctaatgttgcagtcgcttttgaggtgacggaaagtcgtccattaacgtggtatttaccaaatcaagatgataatagtctgtatgcagccatgttggattacttcaatcaactttcccaagacgatgtgctcgcaaggctagaagagaagtattttggtcatgttggttcatttgactactttgatacactctcttttattaccgccattgactcaatattacctaattatcaacctctgtttgaaaaatatgccgagacttttgattggcgtttattagcagcaatggcttggcaagaatcacattgggatccccatgccacgtcaccgacaggtgtaagaggcttaatgatgctaacacgtccaactgcgtcaagtatgggtataacagataggttagatcctgaagaaagtatcaaaggaggtgcacaatatttaaaacatcttctttctcgcctaccagatactatccctgatgatgaaaaaatctggtttgcacttgccgcttataacatgggatatggtcatatgttagatgcaagaaagctaaccgaacagcaaggcgccaatcctaatagctggttagatgtaaaagcgcggttacctttgctcagccaaaagaaatactatttagatcttccctatggttatgcgagaggacatgaagcttatcgttatgttgaaaatattcgtcgctatcaactcagtttagagggatacctacaagcaaaagagagtaaaaataagatcctatcgaaagacgaaaaagacgattcagccaatacagctttattaccgcctcgctccgtaggcgccccctcttcatcttag

SEQ ID NO: 295869 - DNA, 585 bp, Proteus mirabilis
atggtttcattacgcaaggatcagacagtctctctcagtaaacaagcccctgcactgagtcacctaatgtttggtttaggctgggatcctattaagaaaaagggatttctcggtggactctttggtggtaataattcgatagatttagatgcaagttgtgtattactcgatgtaaatggtaaacaaatcgatactatttggtttcgtaaactaaaatcaacttgtcagtccgttattcactcaggagataacttaacaggagagggtgatggtgatgatgaaactatttttgttgatttaaatcgtcttccttcattggttgaatatttggttttcactgtcaatagtttccgtgggcagacctttaatgaagttgaaaatgcgttttgtcgagttgtcgataaaacaaccaataaagagcttgctcattacaaattaacggaacaaggcgctcatactgggatcgtgattgccgctttacaacgtaatcacggacaatgggatttcacggcttttggctcaccttgtaaagggcttgtcattgacgagatgatgccagatattttggcgacggtggtgcgataa

SEQ ID NO: 295870 - DNA, 1137 bp, Proteus mirabilis
atgaccctaacacctggcggaaatatatccgtacctgatcaaacgttaatggtgcgtattcactcaggctcacctgttgatgtatctgcatttaggctttatgcctcaggaaaagtgaacggtgatgctgatatggtgttttatggtcaaaccactaatgatgaccgtactattatttatgcaacagcaggtaatagcacgtcgtttacggttgacttaactcgcttacgtcctgatgtcgatagaattgcttttacagctacttgtgaggggcaacaaaccattgctcatctacaacatttgtctattcaagttgatgctaacaataatgtcgttgcgaacggccatgttgatatcaatggacgcactgaagcggcattaattttaggtgagctataccgtcgcaatggaagctggaaatttcggtttattgcacaaggatttaacggtggattaaaaccattggcggaatattttggtgttgatattgctgatcctgaaccagcaccagcaccgagctcagtgaacttaagcaaggtttcgctaactaaagagaaacctgcaattagcttaactaaaaaggatgatttcggcaaaatccgcattaacctcgattggcatcgagaaagtaaaagcggtggttccgggttattaggtggattatttggtggtaacaaaggtattgatttagatattggcgcctttgttgaactacaagatggttataagtcagtgatccaagccttaggaaatggattcggtgattttaatcgcatgccttatgttgagttacaaggtgatgatcgcactggtgatgtagcgggtggcgagtggatttttatcaatggacgtgaatggaaaaatatcaagcaagtgcttatttttacttttatttatgaaggggttcctaactggagtaaaacagatggtgtggtcactattcatgttcccgagcaaccacctatcgaaacacgtttaacggatggtaataatggtcgagctatgtgtgccattgcacgacttattaatgaaaacggatcaatcaaagttgaacgtctcaatgaattttttaaaggccatcgcgatatggataatgcctacggatggggatttcgctggactgctggatctaagtga

SEQ ID NO: 295871 - DNA, 456 bp, Proteus mirabilis
atgagttttttcaataaattaaaagaaggttttaattccgggcgagcggagttaactaagcaagtcagtcgttttaaaaacaaaaaatttatgcaaggtacggtcgcagtttgtgctcgtatcgctattgccagcgatggtgtgagttctgaagaaaagcagaagatgctaggttttttaaaagcatcagaagagcttaaagtctttgatacctccgaggtgatcgaattctttaataagctaattagcagttttgaatttgatactgaagtcggtaaaggtgaaacgatgaagtatattctggcaatgaaagatcagccagaagctgcacaattagcgatccgtgtcggtattgctgttgcgaaaagtgatggtgattttgacaatgacgaaaaagaggcggtgcgtgctattgccgttgcattaggctttgagcccgcagagtttgatttgtaa

SEQ ID NO: 295872 - DNA, 1026 bp, Proteus mirabilis
atggtatccacacatattggttttccgacagaaactgtcattgtttttgttgtacttgcgataggcgctatttttatcgatttatttatgcatcgtgcagataagccgataacgttaaagaatgctgttttttggtcaatattctgggtagtcgttgccatggcattcgcgggttttttatacgtccaccatggtgcagaagttgcaagcttattcgtgacgggttatgcattagagaaagtactgtctgtcgataacctatttgtcatgatggcgattttctcttggtttgcggttcctgatcgtttccgtcaccgcattctgtattgggggatcattggtgccattgtattccgtgcgatctttgttgctattggtaccggcttattaagtttagggccttacgttgagatagtctttgctctgattgttgcttggacagccgtaatgatgctgagaagtgggaatgatagtgaagaaattgaagactattcacagcaccttgcttatcgcttagtaaaacgatttttccctatatggccaaaaattactggacatgccttcttattaacacaaaaagaggttgatgcagagttagcaaaaccggaaaacaaagacataactatcgggcgaggtacaaaagctgcgttatatgcgacaccgcttatgttgtgtgtggcggtggtagagctttctgatgtgatgtttgctttcgattcggtgcctgcaatcattgccgttagccgtgagccactgattgtttatagtgcaatgatgttcgctattttgggcttacgtactctctactttgtgttagaggcattaaaacagtatctgattcaccttgaaaaagcggttattgcattgctgttctttattgctgtaaagctggggcttaatgcaacagatcatatttggcagcatggatatagcatttccgcgacaaccagcctattcgtagtgcttggtgttcttgctctgggtattctggcaagttttgtattcccagaaaaaaagaataaataa

SEQ ID NO: 295873 - DNA, 579 bp, Proteus mirabilis
atgagcgtttctctttctaaaggtggtaatgtttctttaagcaaagcagccccaacgatgaaaaacgtcctagtcggacttggttgggatgcccgttctacagatggtcaagattttgacttagatgcatctgcatttctgttagccgctaatggaaaagtacgtagcgatgccgatttcattttttataacaacttaagatctgccgacggctctgttgttcacactggtgataaccgaacaggtgaaggtgatggtgatgatgaagcactaaaaatcaaactagataccatccccagtgatgtcgaaaaaattatctttgtagtgactatccatgaagcgcaagcgcgtcgtcaaagctttggtcaggtatctggtgcgtttattcgtttagttaatgatgacaaccaaattgaagttgctcgttatgatttaacggaagatgcatcaacggaaacggcgatgttatttggtgagttatatcgtcataacggtgagtggaaattccgtgctgtaggccaaggatatgcagggggcttaggctcagtatgtgcgcaatatggtattaacgcctcttaa

SEQ ID NO: 295874 - DNA, 576 bp, Proteus mirabilis
atggctgtttcccttgttaaaggtggtaatgtttcgctaactaaagaagcaccaaccatgacggtggctatggttggtttaggatgggatgcccgcgtgacagatggcgctgagtttgatttagatgcgtcagtattcatggtcggtgaagatggaaaagtgctttcagatgcaagttttatcttctttaataataaagtgagccaatgtggtagtgttgaacaccaaggcgataatcgtactggagaaggcgaaggtgatgatgaacaagtcaaaatcactttatccaaagttcctgctgaagtgaaaaaactggtttttgctgtcactatttacgatgctgaaaaccgcaaacaaaactttggtatggtgagcaacagttttatgcgcgtttataataacgacaataacactgaaattgcacgttttgatctttctgaagatgcctctacggagacggcgatgatctttggtgaactctatcgtcatggttcagattggaaatttaaagcagtaggccaaggttttgcgggtggtttaggcgcactagccgcacaacatggcgtcaatatttaa

SEQ ID NO: 295875 - DNA, 681 bp, Proteus mirabilis
atgcaaccacaatttgaaaacgcaaaaaacaccgtaaaaacattatcagtgtttgattttgatggtactttaacctatcacgatagctttatcccttttctaaagtttgcctttgggcgtcgtaaatttgctcgtcgtattatcaaaatggtattccccacattacgttgttttagacgtaaactgactcgtgatgaattaaaagaagtgctgattaaaacttttttaaccgatatcaaagaagaatggctcaaagaaaaagccgaagccttttgtaaagcctactggagtaagttaatgcgtcctgcaggtttattagccgttgctgaagagattaaccgtcatgctgaagtgaccatttgttcagcttctccggctatggtgttgcaaccttttgcggatcgacttggtataaagttaataggaacaacacttgaagtggttgatggtgtgctgacaggaaaaatcattggcaataactgccgttgtggcgaaaaaatcaaacgattagagcgtgtctatggcgatcttactcaataccacttaagggcgtggggcgattcacgtggtgatcatgaattactctatgctgcacaagatccacattggcgctatttccacacaggaagtaataagtcaaaaaaatcacctattaaaataacgcttaaaaaagactcataa

SEQ ID NO: 295876 - DNA, 1569 bp, Proteus mirabilis
atgagtattaaacgaaccgtaaaattaggctcttctttactgttattgatttttattctatcgtctgccttatcttcattttttatttataaaatgcaaaacaattttactcaagttgatgtcttatctgcacgttatgacgatgtgttgatggctcgttatcaactggctattatgcgttctaatgtcaattatctattacaagacaaagatagtcgtgtcgcagatcgtaacaaaattattcagcaaaataaaaagctagctatcatggctaaaaacaccatggaaacatgggtgaaagagaagaaaatgactgttgcagcacaaaaaaatgctgatgatatttcgatgttattttataatctgatagataaattagttttagatcctaataaattagcgacaataaagataaaagctaatcaatttgatcaagattttgaacatcttgatcaattatttgaaaaatatattcagactagaaataaaaatagtctctaccttactcataaacaagattcaatggttgagttttctatctactcaacaattatctcattaattattttattaattgttttgtactttgtgcttcattggatcaataaaacctttgtttctaatcttaatacattgtctgagatattaaataaagtaggtaatgctgacttggttttttctgtaccacaagtaaaaaatgatgagtttggtaaacttttttctcgtgtcagtgatatgcaaaaagcattaacctcgacaatcttttctgtcaaaaaagaggctatggatataaaagggggcgcatttaaaattgcttctggtaatcaagagctttcatctcgtacagaagaacaatccagtgcgttacaacaaaccgctgccagtatggagcagatcaaaatagccgttgctaacaataccgataatacaattgaagcaaataatattattaatcaatctactgacattgttatggatggcgctaatgtcatgaaagaagctgtattatcgatgaagaaaatagaacaaggtgcagtgaaagttggggaaattaatgatgttattaataaattagccaatcaaactaatattttggccttaaatgctgctgtagaagcagcaagagctggcgagcaagggcgtgggttcaccgttgtggccgctgaggtacggaacttagccgcaaaaagtgctgaagcagcaaaagagattagccaagttcttaaagcatctatcaatgatgttacctatggtacaaatttagttaataaaagcggtgagtgcatgcaagagattgtctcttccatttcaaaagtaaacaagatcatgcaagggattagtttagcgtcggaagagcaacgtcttggtgtcgaacaaattgcagtagcaattaatcaaatggatacggtagtacaacaaaatgcctctttggtcgatctcgccgcctcttctaccatgatgttaaacgataaagcacaagtgctgatggataatgtcgcagtctttaatattgacgatcttgaaaaagagccagagcagaaacaagagttaatcaatgaacaagaataa

SEQ ID NO: 295877 - DNA, 1521 bp, Proteus mirabilis
atgagtattgaaagaacagcgaaagtaggctctattatactattagctattttcttagtgacatcagctttatcatcgttttttatttatcaaatgcaggataattttgcttcattaaactcgttaactacgagattaaataatgtgcaagaggcaagatatgaactagcaaccatacgctctcatgttaactttttagtcaatattggtcatgaaaatttagatatgcaagaaaccaaagctcgattagtttctgaagctaaaacattagcggctaaatcaaaagcgacaattaacgcttgggaaagggaaagcaaaatcagtgctgacgcacaaagaaactcagaacaattatcggcactatttatcaaactcgtcgatactattattgcgcctattgatacgctagcttatgaaaatattgatttatcgaaagatttttccaaacttgctgagttgtttgatgaatacttagtgataactcaaaatgttaatgatcaaatagaagacgaacaaaaatggatgtttcaactctttatttacactacatgtattgctttagtgatactgattggactgctttatttagtgatccgttgggttaataaaacctttctctttaacctcaatacgctctctgccattttgcaaaaagtgggagaagggaatttaaacttctcgttacccaaaaatagaaaagatgagtttggtacactattttctcatgtcggagatatgcaaaatgcactgacatcgactattggtttggtgaaagaagaagcattagtgatcaaaagcggttcagcagaaatcgcagcgggtaatcaagatctctcttctcgtacagaggagcaagcgagtgcattgcaacaaaccgcagccagcatggaagagataaaaattgcggtagtgaataataccaataatgccgtattagcaaactctatcacagcacaaacgcgtgatttggctatcgatggcgctagcattatgaatgatgccattacttcgatgaaaaaaattgaagtcggtacgttaaaagtcgctgaaatcaatgacgtggtaaacaatattgccagtcaaaccaatattcttgcgttgaatgcggcagtggaagccgctcgtgcaggggagcaagggcggggttttacagttgttgcaacagaggttcgcaatttagcagccagaagtgcggaagccgctcgtgaaattaatcagattattcgagcttctgtggcggatgtcgcacatggtcgtgaactggttaataaaaccggtgagcatatacaagaaattgtcacctcaattaccaaagtaagcgatatcatgcagggaattagcattgcatcggaagagcaaaaagtgggaattgaacaaatagccgtcgcgataaatcaaatggattctgtggttcagcaaaatgcggctttagtagaacaaggagccacctcaaccatgatgttagatgaaaaagcacaaaatctgaccgataaagtatcagtttttcaaatcaaagaataa

SEQ ID NO: 295878 - DNA, 912 bp, Proteus mirabilis
atgacgaggttattgcgtatcgatattaaacagttattttatttaatcgctttggataaaacgcaacattttggtcaagctgccgagatgtgccatgttacgcaacctaccttatcaatgcgattacgtaatttagaaaaagagcttgatgtggttcttatcaagcgtagctctcgctttgagggatttaccgaagaaggcgagaaaatattaaaatgggcgaaaactatgcaatctgcttacgatggattacaagcagaagccgctaactttcgacagcaactatttgggcaactgcgtataggtattgtgcctttaaccaatttaaatcctatgctgatgttgcagaaaatatcggcactattccctgagataagttttcaagtgctctcaacgaatagtgaaaatattatagatcgacttaatagtaatagtcttgatattggtatctgctatttggaaaaagcgaatactcaacagcatgaaatttatgcattaaaacaaacggagttagggcttttatttcatcgcaatcactttatgccttcaacaagaactatctcgtggcatgaagcgattaaacaaccattggctttattaaataaagagaatcactttaggcaatccgtggatttagcttttcagcgttataacttacaccccaaggtgttggtcgaaagtagttctacattacatcttatacaatcagttaatgcagggttttgcgcctcgattgtccctattgctaaaggtatggaaaatctcagccaagatctagatgttgtacctattgttgatgcaaccattaatgccccattggggattgtgatccgcaaagaagagccgcgctctatattaattgaaaaatgctttgcacaaatgcgtacttacttagaaagtacaggtctatag

SEQ ID NO: 295879 - DNA, 2286 bp, Proteus mirabilis
atgagtaagaaaaaatcacctattcctggagtgaaaccctataatggacccgcaggaggatggggggcattaaaagcaacagctatcgcggtacgcactcaaatggatgcttttattgcacctaaaacattgcttaatactaatcagcctgatggttttgattgccccggctgtgcatggccagacaaagagcatcattctactttccaattttgtgaaaatggagctaaagcggtcacatgggaagcaacaaaaaaaagagtcacacctgaatttttagcacaacataccgtaacagaattgctgacaaagtcagacttcgaattagaaggctacggtcgtttaacccatcctctcgcttatgatgcagatactgacactcttcgtcctgtgacttgggagcaagcatttactcgtattggtgagctattaagaaatatgccatcacctgatagtgttgaattctacacctcaggtagagcttccaacgaagccgcgtatctattccaactgtttgcgcgagaatatggcaccaataattttcctgattgctcaaatatgtgtcatgaaccgactagtgtaggcttacctcaatcgattggcataggtaaaggcacagtttctttagatgactttgataacactcaactcattattgccattggacataaccctggaactaatcacccaagaatgatgggaacactgcatgaagtagctcgtcgtggtgtacctattgttgtatttaatccattgaaagaacgtgctttagagcgatttaccgaccctcaaagtgttattgagatggcgacttatagctcaaccaatatcgcctcatcttattatcaagtcaaagccggtggtgatgctgcggcgttaaaaggcattatgaaaaccttaattgagtgggataatgagcgtggagacattctcgaccacgattttattgctgagcatacactaggttttgaagccgtagttgaagatcttaaacaaacttcttggcaagatattgaaagtgaaagtggcctttcgcaagcagatattgagagtgtcgcactcctttatgccaattctccggccaccattattacctatggtatggggatcacccaacataacaaaggtacagcgaatgtgcgtctgattgctgatttgttattaatgaaagggaatattggtaagctgggtgctggcatatgcccattacgtgggcactctaatgtgcaaggtaaccgaactgttgggatcacagaaaaaccatctgtcgaatttttacaaaaaatagaacaaacttttggttttaaaccaccttataaacatggtcacgatgcagttaacgcaatgcaagcgatggttgatggcacagcaaaagcgttaatttgtttagggggtaattttgccgtggcattacccgaccctcaacaatcatttgctgcaatgagaaagcttgatttaagtgtacacatcggcacaaaattaaatcgctctcatttattaacggcaaaaaatacctttatattaccttgtttggggagaacagaattagatgtacaagcattaggtcgtcaatccatcacggtcgaagactcaatgtcaatggtgcatgcctcttctggtaaattaacacccgcttcaccattattaaaatcagagcctgtcattgttgcaaaaatggctgctgcaacactgacagatagcaaaaccccatggctaagatttacggaaagttatgatcttattcgcgatatgattgaaaaaaccattcccggatttgataattacaaccaacgaattcgtgttcccgggggtttccgtatgccactccctgccgttgagagagtttgggatacccccacaggtaaagccatgttctcggtatttaaaggtgtgaaagagaataaaatggtcatgggtgatgatgttcttcgtttagtcactattcgtagtcatgaccaatataatacgaccatttatgcacttgatgatcgctatcgtggcatctttggtagacgcgatatactgtttatgaataatgtcgatatgatagcaagaggcttaaacgaaggtgataaagtcaccattgaaacggtcagcgaaaatagaaaactacagcttgataatataactgttgtttcatttagcattgctcctggcacagtggccgcttattacccagaagccaatgtccttgtaccattagattatattgataaagagagtggaaccccctcttataaagcaatacctgtcagaatttatgataaaaaaacacaagtcgcttaa

SEQ ID NO: 295880 - DNA, 1167 bp, Proteus mirabilis
gtgaaacagaacactactttggtacgcaaaggtgacagtacattagtacctgtcgcgggtttaacggtatttgctatcgcatcaggctatttaatgagtttaattccactatctatggatagttttggtattgatactttttatgctagctggttagcaagcatttactttattggattacttataggttcagtgatgatcgaacctattattgcaaaaatagggcataggctctcttttgtgctgtttttattgttgttagcattcaccgtgagtattttgccactgttaccttatttatcggtatggctagtatctcgttttttcggtggtatggcggttgcgggtatctttgttgtagtcgaatcatggttattaattggtgataatcctaaagagcgagctaaacgcttgggcttttatatgacatcactttatggtggcacaacattaggtcagcttgctattggtgccattggtacgcaaggggcaattccttttatcgcggtattggcattgctattaattgcagtgttacctcctttgttttttaaacaaggacaaccccaatgccacgagcataaaagtttgtcacttaaacagattagccggctgaataaagcttctttagtaggctgtatggtttctggcgttgtgatggggagtatttatggcatgatgccattggctttaaatcaaggacaatttaacaccgaccaaattggggtgttgatggcagcaattattttaggtggtatggttgttcagcctattattagcaaattgtcggtgatgatgagtaaaaccctattattagccatgatgtgcttagttggggtatttgcgatgggcatgacttatctgtctaatgactatgtggtgttaattattgcattagctttattaggaatgtcatcttttgcactttatcctattgctatcacattagcttgtgatcatgttaatgcgagctatattgtggcaattactcaggtgatgttattaagttacagcgtgggttcagcaatggggccattaggcgcaggtatgtttatgtcacaagcaagtaacggcattatgaactttttctttgtcgtgttattagcgacagctgtatatatgttatttgccagtttacgacgcaaaagccatattgtgcttaactaa

SEQ ID NO: 295881 - DNA, 846 bp, Proteus mirabilis
atgttatgtggaatgataatgttatcttctattgtgcaagcaagacctaatcaacaagttcctcaactcacaccacaagtatcaacctattatcacattatggaaaaagaggttgagcatcaaggaaagcagtatcgcttttttcttgcgatccccaaaaatacgcctaagacaacagtgctgtatagtgttgatggaaatgcacaatttccacttattgtgaatgaagcactagcgcaagcgaaaaagccattgcctgttattgcaagcctaggctatgtaggtgaaaaggcctattttatagcggaaagaactcacgactataccccaagagtacatggcgaagcctttgccaaaggcggtaatgttgaacagttttatcagtttatggtaagccaattaaaaccctatgtactagcacagatggcgcaagaaaacatcactattactgagcaatcactatttggacactcctttggtggcgtgtttacgctatatgtattatttaaccatccagacgcttttcaacgctatattgctgctagcccatctctttggtggggaaaaggtgagtggatcactcaagataaatggcaacagatccccaataatgttgcggtgaccattacattaggtgaattagaagaaacccctgatttttctcaaatgagcgaagagcaacgcttgcgctatcaaacgcgtagtagctggcttactcctcgacaactctgtgattatcttactgatgccggcaaaacatgccaattttacctctttacggggaaaggacatggcagttcaatccctgatgcaatcaaaaccgctttagaacaaagtacagaataa

SEQ ID NO: 295882 - DNA, 663 bp, Proteus mirabilis
atgtatggtaatcgtgacttaaaacctgaaacttcggttagccaagaaattggtgttggttatgacaatggtgatggttttaccgccaatgtgaccttctttaatacagaatttaaagataagcttaccaactacgataccggtgaaatcgatcctattaccggattaaaactgtaccaatatgataatgtgggtaaagctaatattaaagggattgaaaccgcggttgcattccctgtcgctgataattggcgagtaagtgctaattacacttatatcaactctaagcgtaaaagtgatgacgaaaaattaggctctggtgaatcattaaaaggttatccattggatatgacaccaaaacatagcgccaatgcgcgtgttgattggcaatacgatgaagctaccagtttctatgccaatactgcctatactggtaagcaaatttgggcggctcaacgaaatggttatactggcgctcgttatcgtagtggttatacaacctttgatttaggaatgacctataactttaataaaaataccatgctaaatttagccgtattgaatattactgatgaaacgggtcctgcggtcaacgataaaggggggaactgggtcgttgatgaaggccgtcgttattgggcaaatatcaaatatagtttttaa

SEQ ID NO: 295883 - DNA, 1047 bp, Proteus mirabilis
  misc_feature (1008)..(1017): n is a, c, g, or t
atgaaatttaaaataagtgctttaacagcctgtattttaatgacttcttattcactacacgcacaagaagataaagtagaacgattagttgtatcagcctcagggtttgcacagcaacaaacagatgcacccgctagcattacggtaatcaacaaagaacaattagagaaaaaaccgatacacgatcttgctgatgccgtaaaaggggttgaaggcgtcagtgtgaatggtaatgcaaataaacaagaaattactattcgtggcttacccggagaatacacactgattttggttgatggcagacgtcaaaatagtcgtgaatcacgccctaatgggagtggtggatatgaaggtggatttattcctcctgcggatgccattgaacggatcgaggtaatacgtgggccaatgtcatcactctatggctcagatgcgatgggcggtgtgattaatattattactaagcctgttactaaagagtggcatggtgcagtttccatggggggaacattgcaacataaccgtgacgcgggagattctatcaatggtgatttttatctttcaggcccattaattgaagataaattaggtttacaactttatggtagtagctacttacgtgcagaagataaaattacgtatgggcaagggcgtaacgataataaaaatattacggccaaattagcttttactcctacagataaccaaaccattttattagaagctggacgcaattcgctacaacgcacgacaacaccgggtaaatcgatgagcgaatttaccaatcgtggtggacgtcttgataaaaacaaaatgctagaaacgaataatgaccgtaaccattgggcattaacttataaaaatcagtttgatattttgcactctgagttaagtgtttatcaagagcaaaccaagcgtgttcaaaagacggaaggtgtagataaagcgacaggaaatagctacaaatattatgaagatcgccgccctgaaatcactaatactgttttnnnnnnnnnnttggtggtcaataccaatatgcacgtttaa

SEQ ID NO: 295884 - DNA, 1635 bp, Proteus mirabilis
atgcatacagaaggtgttggattaagcacaatagattatgcaatctttgccctctatgtcatcattattattagccttggattatgggtttctcgttcaaaagatggagctaaaaaaggaacaaaggattacttcctggcgggtaaaacactgccttggtgggcgattggttcttctcttattgctgctaatatctcagctgagcaattcattggtatgtctggctcaggattttcgataggtcttgctattgcatcttatgaatggatggcagcattgacgttaatcattgttgctaaatactttttacctatttttattgaaaaaggcatttataccattcctgaatttgttgagaatcgttttaaaagtcgtaatttaaagacgatcctcgccgtattctggttagcactctttattttcgttaacttaacatctgtattgtatttaggatcattggcgttagaaaccattcttggtgtgccgatgatgtatgccattattggtctggcactatttgcggttatctactcgctttacggtggactttcagcggttgcatggacggatgttgtacaagttttcttcctgatcctcggtggacttttcaccaccgtacttgctgttagctatatcggtggtgatggcggaataatggaaggcttaagtaagatgacagccgccgcgccagatcactttaaaatgatcttagcaaaagaaaacccacaatttatgaatttgccaggaattgctgtgctaatcggtgggctatgggttgctaacctctattactggggctttaaccaatacattattcagcgtgctttagccgctaaatctattaatgaagcgcaaaaaggtttagtgtttgccgctttcttaaaactgattgtgcctattttagttgttgtgccggggatcgcagcttttgttatcacaaccgatcctacgctgatggcaggattaggaacaatggcacaggagcatatcccaaccttagcacaagcggataaagcctatccttggttaacacaattcttacctattggggctaaaggggttgtgtttgcagcactggcagcagctatcgtttcttctttagcttccatgcttaactctatcgcgactattttcacgatggatatttataaagaatatattgggccaaaatcctcagaaacccgcttagttaatgtgggacgtattagtgcggtgattgcattgattattgcttgctttattgcgccactgttagggggcattgatcaggcattccaatatatccaagagtacacaggtttagtgagtcctggtatcttagctgtattcttgttaggactattttggaagaaaactaatgccaaaggggcaattataggggttgtactctctattccttttgctttattcctaaaattaatgccactaggaatgccattccttgaccaaatgatgtatacctttattttcaccgcggttgttattggtttggtcagcttaacctcaacgaaaagtgatgatagcgtaggggcgattgtattaactgatgcaacatttaaaacccaaagtgggttcaatattgcttcttatatcattatgatcatcctctgtgtgctttatgctgtattttggtaa

SEQ ID NO: 295885 - DNA, 1011 bp, Proteus mirabilis
atggcaactatcaaggatgtggcaaaagaagcgggtgtttctgttgctacggtatctcgggtcattaataactcaccaaaagcgagccgagcatcgatagagattgtcaattcggcaatgcaaaaattaggttatcgccccaatgctgctgcgcgagcgctggtcagtcaaagcacccaaacattaggtgttttggtgcatgacgtatccgatcccttttttggaaccttggtcaaagcggtcgataatattgccagaaaagcgggaaaacatattctggtgtgtaatggttaccatgatgcgcaagatgaacgccaatctattgaactcttgatcaacagccgttgtgatggtttagtgatccactctaaggcactttctgatgaagagttgttagcttatgccaatgaagttaatagcatggtattaattaaccgttttatcccagaaattgcggaacgttgtgtcgccttagataactataaaggggcatggattgctaccgaacaccttattcgccaaggccatactcaaatcgcctatatctcatccactcaccatattgaagataccagccaaaggcttgcgggatataaagctgctttagcggcttataatattagtttgcctgaaagctatgtcgaatatggcgagccagaaggcgaagggggagagcaagcgatgatgcgtctattaaccaagtcgatagattttacagcagtggtcacctataacgactttatggctgctggggcattatcggtgcttgatgaaaatgagatccctgttcctgaaaaaatttcagtgattggctttgatgatgtacttatcgctcgttatattcatcctcggctaacaacggtgcgttatccgatacatatgatggcagagcaagcagcaacattagcgttaaagctttctcaaggggaagtcctaacccaaaagcagcgtatttactcacccactctggttcagcgcaactccgtttataatttaagccacctttcttaa

SEQ ID NO: 295886 - DNA, 1071 bp, Proteus mirabilis
atggcattaaatgaaaaccgtttttttaagcctgaacagatgaccacacaagccgcttttgatggtttgcctgctcaagttgtgattttgacaaaccgttttggtatgtctatctccattatggatattggtgcaacatggttaagttgtattgtccctgtgaatggctatcgtcgcgatgtgcttttaggatctgcagatatgaaagcccatcaacagcaaacggcctattttggcgcaacggtagggcgttttgctaatcgtattgcaggggctaaattcaccattgccggaactgagtatcgccttgttgctaatgaaggcaacaatacgctacatggtggtaaacaaaattttagccatcgtcgctggactattgtggcgcaatccacacagtcggccactttaagcttgctatctgcagatggcgaacaaggatttcccggtaccgtcgaagccagtgtgacatatgcattaacggatgataatgaagttcatattaattatcaggctattagtgataaaacgacagcgctgagtttaactaatcatgcctattttaatttagctggggagcatactcagcgaacggctcttgaacatgatttagttatccacgcttctcactacttaaaaaatggcgcgggtaatattcctacaggggaaattgtcgatgtgactgggacgggattcgattttcgccaattaaaacgtatcggcatcgattttatgcgagatgaatgtcaaaaagccgctaatggctatgatcatgcgtttattttagacaaacaaaaaatagcagataaagcatcgattgccacagttattgcccctgaaggtgagcttaaaatggatgtttttactaccatgccttctatacagttttatacaggaaattttttggcacagagtaaaggaaaaactcgtcgttatggtaattattcggggctggctttagagacacaatattttcctgatgggccgaatcatcctgaatggggtgagaaccaaggtattttagctgcaaatactccgtggcatagccaaacaatatataaattttatcagtaa

SEQ ID NO: 295887 - DNA, 1173 bp, Proteus mirabilis
atgcaggcactgattaataatgtgactcattcttttacctctatttttggttatgccccaacacattttattcaagctccaggcagagttaatctgattggtgagcatactgattataacgatggttttgttcttccttgtgccattgattatcaaatggtagttgctgccgccaaacgagatgataatcttattcgtgtgattgcggttgattatcagaatgcgcaagatcaattctctctcgaacatcccattgagtttttacctaataaaatgtgggctaactatattcgtggcgttattcattttttacaacaagccaaatatgtatttcagggtatggatattgccattacaggtaatgtgcctcaaggggctggcttaagctcttcagctgcattagaagtggctataggacaaacagtaaaaacactttatcaacttcctattagtcaaaaagaaattgcccttaacggtcaaagagcagaaaaccaatttgttggatgcaattgcggtattatggatcagcttatttctgcatgtggtgaagagagccatgcactattaattgattgtcgttcattagccactacggcggtaaaaatgccagaaagtgcggtagtgatgatcattaactcaaataaaaaaagagggttagtcgatagcgaatataatacgcgtcgtcaacagtgtgaggaagcggcaaaaatattaaatgttactgcattacgagatgcgaccttagcgcaattgcaagcgaaaaaaacgctgatgaatgataaagtgtatcgacgtgctcgtcatgtgatcaccgaaaatgagcgtactttacaagcggctgaggcgttaaaacaaggcgatcttactaaacttagtgaattgatggcacaatcacatatctctatgcgtgatgactttgaaataaccgttaacgaagtggatacactggtagaaattgttaaatcagtgattggttcgcaaggtggcgttagaatgactggcggaggttttgggggctgtgtggtggcgctggtgactcctgatttagtcgcaaaagtgacacaagcagttgaagcccaatataaaaaccaaacaggtttaaaagaaactatttatgtctgctctgcaagccaaggggcgggctatctggagataactaatggcattaaatga

SEQ ID NO: 295888 - DNA, 1059 bp, Proteus mirabilis
atgtcaaaactgatttttgatcccgttgagcatcctcatcgtcgttataaccctttgactgggcagtggatattagtttcaccccatagagcaaaacgaccatggaatggcaaagatgaaaaacctcagatagcgacacttccctcttatgatccacattgttatctgtgcccagggaatacccgagtttcgggtgataaaaatcctgattatacaggtacttatgtttttaataacgatcactctgcattattgacagaccaatatagtgttgaggtatccgataatccactcttccagactcaagcggtgagagggatcagtcgtgttgtttgtttttcccccgatcatagtaaaactattcccgaattacctattagtagcctacgtaaaatcattgatacttgggataaccaaatagaagcgctaagtaaagagtatctatgggtacaagtatttgaaaataaaggtgaaacaatggggtgctctcaacctcatcctcatgggcaaatatgggcgagtgattttttacctaatgaattagcacgcaaagatagccaattaaaagactattttaatcaatatggccgtaatctattaatggattatgttaaagctgaatctgaagacggtagtcgaaccgtggttgaaactaaatactggttagctgtcgtgccttattgggcatcatggccttatgaaaccatgctattaccaaaaagccatattcgcagaatgagtgaattaacggctgaacaacgtgatgatttagccttgacaataaaaaaattaaccagtcgttacgataatctatttcattgttcatttccttattcaatgggatggcattttgcaccttcttttaaagagggcgaaagcatcgagcattggcaattacatgccctgtattatccgccgttattacgctctgcgacagtacgtaaatttatggtgggttatgaaatgttggctgaatcgcaacgcgacttaacgccagagcaagctgcttataatttacgccaagtaagcgatatccattataaagagcaagaaaattag

SEQ ID NO: 295889 - DNA, 324 bp, Proteus mirabilis
  misc_feature (99)..(108): n is a, c, g, or t
atggatttagctgatggtcatattgccgccttaaatgcgttaggagaaaaagcagggttacatatctataacctaggcacagggaatggcaccagtgtnnnnnnnnnnagtgtgattgaaatgattgaagcatttcgtaaagccagtggtaaagcaatcccttatgaaattcagccacgtcgcccgggagatatcgcacaatgttggtcaagtcctgccaaagcagaaaaagacttacactggaaagccattcgctctattgatgatatggcagccgatgcttggcgttggcaatcacaaaatcctaacggttatctgaaatag

SEQ ID NO: 295890 - DNA, 1011 bp, Proteus mirabilis
atgtattattccttagtaaggaaggcattgtttcggctagatcctgaacgtgcccatgattttacctttcgtcagttaaaacgcttatctcattccccatttcaatttcttattcaacaatcacttcctgccaaacccgtttcttgtatgggactttcatttaaaaatcctctcggtcttgccgccggccttgataaaaatggtgattgcattgatgcattaggggcaatggggtttggctttattgaagtgggtactgttacaccacgagcacaagtaggtaatgacaaaccgcgtctctttcgcttagtagaagctgaaggcttaattaatcgaatggggtttaataatttaggggttgataacctaatagagaatgtaaaacaatctcaatatggtggtgtgctgggtattaatatcggtaaaaataaagatacccccgtagagcaaggaaaagatgattacttaatctgtatggaaaaagtttacccttatgcaggttatattgcgattaacatctcttcacctaatacccccggcttacggacactccaatatggtgaagcattagacgatttattatctgcgattaaaaataaacaacttgagttacaagggaaatatcaaaaatatgtgcctgtggccgttaaaattgcccctgatcttactcatgaagaattaatccaagttgcagatagcttagtgcgtcaccatattgatggcgtaattgcgaccaatacaacattagacaaatcattagtgagtggattagatcactgcaatgaagctggtggattaagcggtcgtccggttcaatcaaaaagtacacaaatcattcgacaactaaatgaagagttaaaaggcgctttacctattattggagtaggggggattgattcattgactgctgcacgcgaaaaaatggatgcaggtgcttctttaatacaagtctattcaggattcatttatcatggtcctgcacttataaaatctataattaatcatatttaa

SEQ ID NO: 295891 - DNA, 1032 bp, Proteus mirabilis
atgaacgataaaaaaaccattaacacgcacacccctttacttacgaatattcgaaacctcttgatacaaggtagaaaaaacacagtacaagcagtaaacagcataatggtacaaacatattgggaaatcggtcgtttaattgttgaagatgaacaacatggagataatcgagcaaaatttggaaaaagagttttacaaactttatcagctgaattaacaaaagaatttggtaaaggatttgatacctcaaatcttcgatatatgaggaaattttatctcacatttccaattcgtgacgcagtgcgtcacgaattaagttggactcattatagaacgctactaaaactaaagaatgaactcgcccgtcaatggtatatagatgaagcaattacacaatcttggtccgcccgtgcattagaaagacaaattagcacattatattatgaacgattactttcaacacaggggaaacagcaaagtatttatcctgtattagctgaaggaaaacaaaaaactactgaactcgcaacttcagtcaaagattatttacgtgatccctatatttttgattttctaggactacctagtagtatcctgcaagaaaataaactagaacaaactttaatagaaaacctaaaagaattcttactcgaattaggaaaagggtttgcttttgtcgaacgacaacaacgtattagtactaatgatggtgatttctatattgatttagttttttataactttcacttaaaatgctttttgttaatagacttaaaaatgcataaactcacccatcaagatgttgggcaaatggatatgtatgtccgcatgtatgaagagaaaaaacgccgtcatgatgataatccaaccataggactaattctttgcactgaaaaaaatcacacagtagccaaatactccattctaaatgaaagtaaacagctattcgcttcaaaatatatgcttgaattaccaagcgaaaaagaattaattttacaattagaaaaagaacgccaaaaattatttgaataa

SEQ ID NO: 295892 - DNA, 2616 bp, Proteus mirabilis
atgacacaacaaagaattgctaaatatcgtaaagattaccgcgccccagattacaccatcactgatttgcatcttgattttatcttagataaagaaaaaacacaggttactgctattagccaatgcaagcgcttagcgacaacggcaacgtcgttggtgttagatggggaagatttaacattaaaatctatttttgttaatgatgttgcttggacacactataaagaagaaaacggcaaactcatcattgaccaattgcctgaacaatttacgttaaaaattgttaatgagattaacccatcagctaataccgcgttagaagggttatatgtttctggcgatgcgctatgtacacagtgtgaagcggaaggcttccgtcatattacttattatttagatagaccggatgttttagcgcgctataccactacgatcactgcagataaaaaacagtatccttatctattatctaatggtaaccgtgttgcacaaggtgatcttgaagatggtcgtcattgggtgacttgggaagatccgcatcctaaaccaagttatctctttgcattagtggcgggagactttgatgtattacgcgatacatttaacactaaaagtggtcgtgaagttgctttagagctatttgtcgataaaggtaatcttgatcgtgctgattgggcgatgacatcactaaaaaatgccatgaaatgggatgagtcacgctttaatttagaatacgatctcgatatctatatgatagtcgccgttgatttctttaatatgggagcaatggagaataaagggcttaatgtctttaactctaaatatgttcttgctaaaagcgaaacagcaacagacaaagattatttagggattgaatctgttattggccatgaatatttccataactggacaggtaaccgtattacttgccgtgactggttccaattaagcttaaaagagggactaacggttttccgtgatcaagaatttagctctgatttaggctctcgctcagttaatcgtatcaataacgtgcgtgttatgcgtacagcacagtttgccgaagatgcaagcccaatggctcatccaattcgtccagatagtgtgattgaaatgaataacttctataccttaacggtatatgaaaaaggggcggaagtgatccgtatgatccacacgctactcggtgaagagaaattccaagcgggtatgcagatgtatattcatcgtcacgatggtagtgcagcgacctgtgatgattttgtacaagcgatggaagatgcctcgaatgttgacctgactttattccgtcgttggtatagccaatcaggtacaccggtattgactgtacgtgatagctatgacgcacaaaaacagcaatatacattaactgttagccaaatgacgccaccaacggcagatcaggcggaaaaacaagttctacatattccgttagatattgaattatataatcaacaaggggaggttatccctttacgctcacaaggtcagccggtttctaatgtattaaatgtggtgagagaagagcagcagtttatttttgatgatgtcgctcaacagccaattccttcattattgcgagaattctctgcgccagtaaaacttgattatccttttacggatgagcaactctcattcttaatgaaacatgcacgtaatgctttttctcgttgggatgcggcgcaatctttattagggcgttatattaaagaaaacgtttcgcgtgttcaaaaagggcagccattaattttacctgaaatggtgattgatgctttccgtgctgtattgcttgataaagatatcgatcctgccttggcggcacttattctgacattacctaccgatgttgaagcgggtgaagcttttgctattatcgatcctattgctattcatcaggccttaggttttattcgtaaaactttagccactgaaatggctgatgagttctctgcggtttatcactcaatgcatatcggtgcttaccgtgtcgatcatggtgatattgctaaacgtgatttacgcaatgtctgcttgggttatttagccgttgaaaaccagcaaacgggtaatcaattggttgaagcgcaatatcacaatagcgacaatatgaccgatgcactcgcggccttaaatgctgcagtaatggcacaattaccttgtaaagaggcactattacaagagtttgatgataaatggcatcaagatggcttggtaatggataagtggtttagcttacaagcaatgagtccggcaactgatgtattacaaacagtacgcagtttgctatcacatcgctcttttactttagctaacccaaatcgtactcgtgctttaatcggtgcgtttgtgaataataaccctgtggctttccatgcagaagatggctcaggttatttattattgacagaaattctgactgacttaaatagccgaaatccacaggttgcatctcgtcttattgagccgtttattcgtttgaaacgctatgatgctaatcgccaagagaaaatgcgtgccgagttattaaagctaaaagcccttgataacttatcaggtgatttatatgagaaaatcactaaagcattagcagattaa

SEQ ID NO: 295893 - DNA, 1215 bp, Proteus mirabilis
atgattttagacgctacaccgattattacatcactgttggataccgatgcatacaagctccacatgcaacaggcggtttaccatcattatagtgatattcctgtcgttgctgaattccgctgccggagtgatgaacgtctaggtgaatatgcaacaaccttacgccatcaagtggatatgatggcagacttgtcattaactaatgaagagtttggctatcttcaaagcctgcctttctttaaaaatgactatctgcaatggtttaaacattttcgctttaaacccgagcaagtgcatatcgcgaccactgctgacaatcaattgacaattaagataactggcccttggcgtgaagttattttatgggaagttcctttgttagcattggtgagtgaaattgtccaccgtgctcgttcgccacaaatcaccgctgatgacgccgttattcaattacgcaaacttatcgatattttctatcgtgatgcggctgaacaacagattgatttagcggatttcaaattgatggattttggtactcgtcgtcgcttttcttatgatgtgcaacgtgccattgtcgatgaattaaaaaatcatttcccttatcttatcggcaccagtaactatcattttgctgaacgtatgcaactggcccccgtaggcacacaagcccatgaatggttccaagcacatcagcaaattagtcctgagcttgccaatagtcaacgggctgcattgcaatcatggctagatgaatacccagatcaactcggtattgcactcactgattgtatcactatggatgcattcttacgtgactttgatatgccattcgccagccgttatcaagggttacgtcatgactcaggtgatccgattgaatggggtgaaaaagccattgctcattatgaaaagctcggcatcgatccgatgagtaaagtattggtattctctgatagcctcgactttcagaaagccttagtactttataagcatttccataagcgtatccgcttaatttttggtatcggcaccagattgacttgtaatattccgaatattacacctcttaatattgtgattaagctggtggagtgtaatggtaaacctgttgctaaattatcagatagtccaggtaaaaccatttgtgaagatgatgagtttgtcgacaagctacgtaaagcctttgatgttcctcttgttaggcaagcttgttaa

SEQ ID NO: 295894 - DNA, 1401 bp, Proteus mirabilis
atgatcgttgcgcctgtagtcgacgtactgcaaggccgtatcgcggttggcgaagacgtcaccgttcgcggttgggtacgtacaagaagagattcaaaagctggtatctcattccttaccgtctatgacggttcctgctttaatccagtacaggccatcattaataataatttaccgaattatcaagatgaagtgctgcacttaaccacaggttgctctgtggaagtcaccggtaaaattgttgaatctccgggtcaaggtcagaactttgaaattcatgcgaccaaagttgtggtagtaggaatggttgatgatccggaaacttatccgatggccgctaaacgtcacagcgttgagtatctgcgtgaagttgctcatcttcgtccacgcacaaacttaattggtgctgttgcacgtgttcgccataccttggcacaagcactacatcgtttcttcgatgagcaaggctttttctgggtttctacgccattaattacggcggcggataccgaaggtgcgggtgaaatgttccgtgtctctaccttagatatgaacaacctgccacgtactgataaaggtgaagttgattttagcgaagacttttttggtcgcgaagctttcttaaccgtatcaggacaattaaacggcgaaacttatgcctctgcattaagtaaagtctatactttcggcccaactttccgcgctgagaattcaaatactagtcgtcacttagctgaattctggatggttgaacctgaagtggcttttgctgatctgaatgatatcgccggattagcagaaaaaatgctgaaatatgccttttctgccgtgttagctgagcgcagagatgatatggagttttttgctcaacgcgttgataaagaagccattacacgtttagagcactttatcgcttctgatttcgcacaaattgactacacagatgcgattactgtgttagaaaattgcggccagaaatttgaaaacccagtttattggggtgttgacctctcctccgagcatgagcgctatcttgctgagaaacactttaaagcccctgtggttgtgaagaactacccgaaagatatcaaagcattctatatgcgtatgaatgaagacggtaaaacagttgcggcaatggatgtgttagcaccaggtatcggtgaaatcattggtggttctcaacgtgaagaacgtttagagatgtttgataaacgtttagctgagatgggtatgaataaagaagactactggtggtatcgtgatttacgccgttatggcacagtaccacactctggttttggtctcggctttgaacgcttagttgcttatgtgactggtgtcacaaatattcgtgaagtgatcccattcccacgtacaccaagaaatgtcgatttctaa

SEQ ID NO: 295895 - DNA, 1143 bp, Proteus mirabilis
atgatgaagcgcaatattcttgcagtggtaatcccagctttaatgtttgctggtgcagcaaacgcagctgaaatgtacaacaaagacggcaacaaagtagatatctacggtaaagttgacgttcgtcattacttcgctgacaaagattctggtgaagacggtgatgcatctcgtgcacgtatcggtttcaaaggcgaaactcaaatcaataaagacttagttggttttggtcgtttcgagtacgaagttaaaactaataatactgaaggaagcgaaggtaacaacaaaactcgtctggcttttgctggtctgaaatttgctgacttcggttctttagactacggtcgtaactacggtgtaatttatgacaccaacgcatggactgacgttctgcctttatggggcggtgactcaatgtcacaaactgacgtttatatgactggccgtgctactggcgtattaacttaccgcaacactgatatgttcggttatgttgatggcttaagctttgctctgcaatatcaaggcaaaaacaacgaaaacaccaacaatgctcgtggtgaaaaaatcactgatgacaatggtaatgttgtaggctacagtgtagataaaaaagctaacggtgatggttacggtttctctaccgcttataacttaggctggggcgtaacactgggtggtggttactctaactctgctcgtacttctggccaacaacattacagctcagcaaaaggtgaacgcgctgaagcatggaacgttggtggtaagtttgaagctaacaatgtttacttagctgcaatgtacggtgaaacccgtaacatgacctatttcggtaataaaaataatattgctaacaaaactcaaaatatcgagttaactgcacagtatgattttgctgatttaggtatcaaaccatctttagcctatgttcaatctaaaggtaaagacttaggtgttgctcaaggtaacgaccaagatttagttaaatatatctctgtaggttctttctacaaatttaacaaaaacatgactgcagttgttgattataaaatcaacctgttagatgacaatgacttcactaaaacttacggcgttgcaactgacaacgtagttggtttaggtctgacttatcagttctaa

SEQ ID NO: 295896 - DNA, 1191 bp, Proteus mirabilis
atgtttgagaaaatcattgctgcaccagccgatcctattctgggtttagctgatagtttccgttctgatactcgtgaaaacaaaattaacttagggattggtgtttataaggatgaaacaggtaaaacacctgtactcaccaccgttaaaaaagcagaaaaatatttattagaaaacgaatccactaaaaattatcttcctattggcggtattcctgagtttggtgcggtcactcaagcactgttgtttggtgaacaacaccctatcatcacaaaaaaacgtgcacgtacagcacaagctccgggtggtactggggcattacgtattgcagcggattttattgctcagcaaactaatgctaaacgtgtatggataagtaacccgacttggcccaaccataataatatttttcagactgctggcttagagatttgccaatatgattattatgatgccgaaagccacggtttagattttgaaggtatgctagctagcctacaaaatgcacaagcaggtgatgttgtgctgttccacggatgttgccataacccaagtggtattgacccaacgttagagcaatggcgtcaattggctgccttatccgcagagaaaggttggttaccagtatttgactttgcttaccaaggttttgctaatggccttgaagaagacgcgcaaggcttacgcctatttgctgaaagcaatcctgagctgattgttgcaagctcatattcaaaaaactttggcctttataatgaacgtgtaggtgcttgcactattgtcgcaaaagagagcgatactgctgagaaagcatttagccaagccaaagcgattattcgcgcaaactactctaatccaccggcacatggtgcatctgtggtgaccactattttatctaacccagagttaaaagaagagtggattgaagagctcaccacaatgcgtgagcgcattcagcgtatgcgccaactgctggtgacaaccttacaagaaaaaggtgcaaaacaagatttcagctttattattgaccaaaatggtatgttctcatttagtggtcttaataaagagcaagttgaacgtctacgtgctgaatatggtatttatattgtcggctctggtcgtattaatgtcgcaggcttaacactggaaaatatggttccattgtgtgaagccattgtcgctgtactttaa

SEQ ID NO: 295897 - DNA, 1761 bp, Proteus mirabilis
atgccgcattcaacccccctcattaccaccattgttggtggattagcacttgcttacatcttaggcatgattgctcaacggctaaaaatctcacctttagtaggatatcttgctgcgggtgtgctcgctggcccatttacccccggcttcgttgctgatacctctttggcgcctgagcttgctgaaatcggtgttatcttactgatgtttggcgtaggtttacatttttctttaaaagatctaatggctgtaaaagctatcgcgatccccggtgccatagcacaaattaccgttgccaccttattagggttagggttatccactttctttggctggggtctatttagtggcattgtctttggattatgcctttcaacggcaagtactgtggtattgctacgcgcactcgaagaaagaggtttaattgatagccagcgcggtcaaatcgctattggttggttaattgtcgaagatctcgctatggtattagccttagtattactaccagctattgccaatatgcttgaaagtagtgaccaaacaagtatttcagagctattaattaacttaggtatcactattggtaaagtagttgcctttattttaattatgatgattgtcggtcgtaagcttattccgtggatcttagctaaaacggctgccactggctctcgtgagctttttaccctatgtgtgttagcactagctttaggtatcgcttacgcagcagtgacgctatttgatgcttctttcgcattaggcgctttctttgccggaatggtacttaatgagtctgacctcagccaccgagcagcacaagatactttacctctacgtgatgccttcgccgttctgttctttgtctctgtcggcatgctatttgatcctatggtattaattgagcatcctctaggcattttagccacacttgcgatcattattataggtaaatccttagcagccctagtgctcgttcgtatgtttgggcattcacgcagaaccgcattaaccatttcagccagtcttgcgcaaattggtgaatttgcctttattttagctggaatgggggttgcactaaatgttttagaaccagatgcacgtaacttggttcttgcgggcgccttagtctctattatgcttaatcctgttctcttctctttgttagaccgttatctagcaaaaacagaaaccaaagaagagcaagagcaacttcaacaagaagagatggaagaagagatgcctgtgcctgtcgatatttgtgggcatgccattatcgtcggttatggtcgtgcaggtagtatgctagctgaaaagctacaaccacaagctatcccattggtcattattgaaaatagccgtaataaatttgctgagttaaaagaaaaaggcttaaacgccgtactcggtaatgctatgaccaaagaatcgctggcattagcgcgtgttgattgtgctaaatcgctactactaaccattcctaacggttatgaagcagcagatatcgcagaaacagcaagaaaaatgaaccctgatctcaatattatcgttcgtgctcattttgacgatattattgttcgtgctaactatgatgaagaagcttcctttattcttgagaaaggggcaaatcatgtgataatcgatgaagatcagaccgcttcagcaatggctgagatgctaatacaagaagtcgagttcggttgcaccattgatgacacacctgaagagggtcaacaaattattgcacccaatgcagcgcaataa

SEQ ID NO: 295898 - DNA, 1311 bp, Proteus mirabilis
atgaaattccctggcaaaagaaaatccaaacactattttcccgttagtttacgagatccattattaaaacctatcatcaatatgactgagagcgaatcttctcgggcttatattgttggcatcgaccaaacattagttgatattgaagctaaggtagatgaagcgtttatcaatcgctataacttgagtcagggacactctctggttattgaagatgatgtagcggaagccctttatcgcgaattaacggttaataatcttattacccatgaatttgcgggtggcactattggtaacacactacataactactccgtattagcggatgatcgttctgttttattggggactatgtgcaacaatattcagattggtagttatgcttatcgctacttatgtaatacctcaagccgtactgatttaaactatttacaaggtgttgatggtgcaatagggcgttgctttaccctcattactgaaaatggtgaacgtacttttgctatcagtcctggtcaaatgaatcaacttcagcccgaaagtattcctgaggatgtgattgcagatgcatcggcattagttttaactgcttatctcgtccgttgcaaaccgggagagccaatgccgttggcaactatgaaagcgatagaatatgccaaaaagcatgatgtaccggttgtcttaacattaggtactaaatacgtgattgccgacgatcctcagtggtggagagatttcttaaaagagcatgtctctgtagtggcaatgaatgaagatgaagccctagagcttacaggtcatgctgatccattgttagcatcagatgcggctttagagtgggttgatttagtcttatgtaccgcaggccctgcagggttgtatatggcaggttttacagagagtgattttaaacgccaaaccactcatccgttacttccaggtgcaattgctgaatttaatcgttacgagtttagccgtgctatgcgttttaaagattgccaaacgccggaaaaagtctattcgcatatagagccttatatgggagggccggaaaaaatcatgaataccaatggtgctggcgatgcggcattatctgcactattacatgatattacggcaaatagttatcatcgcattaatgtacctaattcgagtaaacacccacgtagttatttgacttactcttcattggcgcaagtgtgtaaatatgctaaccgtgtaagctatcaagtattaagtcaacactcaccacgtttgactcgcggtttgcctgagaaagaagatagcttagaagaagcttactgggaacgttaa

SEQ ID NO: 295899 - DNA, 1119 bp, Proteus mirabilis
atgaatagtaagctttcaaaaccacaatcttcagaagttgataaagggcatttcgacgatttttatctaaaacagaacgatgaaatcgatctgtttgagttattttctgttctttataaatcaaaatttgtcattattgggatcacacttttatttgctatcgtaggttttactgttgcgagctttctgccccagaaatggacaagccaagctgctattacaaaaccaatgttagatgagatgaagcagttaagagctaccttaaatgatttaagcttggttgatgttgatactggcgtaaatgcttcttctgtttaccaaaaatttatcaataactacaattcccgtgtattacgtgaagaatatttagtcaatacggattactataaaaacttattggctaagatggacgatcctacgccattggataaacgtaaattaatcgaaactattgttactaaagatattaatttaaaagcatcagacagtaaaaatagtgatgaagaatttagtggcgaaattaacttaagctttactgcgccaacttctgaagaagcttacgatttgctgtcaggttatattcgctttatttctactaaagtacgggtagaagtgaaagacgaaattgatgatcaaattgagcgtaaattaaaccatgcgcaaaaagcgtatcaaatggatttagaacgtattgctaatgcgcgtaatgttaatgttcagcgcttaaaatatgcactagaaattgccaatgctgcgggagttaaaaagcctatttctagtgaaggcgcacaaattaaagatgatcctgattactccattgccatgggggctgatgcacttagtagtaaattagcgataacagaagcgattactgatcctacaacggtcagttctgaattaaaaaaccgcttatataatatccagcagttagaacaaataaaattgggtgatctgcaatttgttcctttcaaatatatgctaaaaccttatgaaccaactaagaaagatgcgcctaaacgtgcattaatcttagtcggtgccgcatttgttggttttatcctttctgtaatgggtgttttactgggctatatggcaagaaatcgccgtaaaacagcgtaa

SEQ ID NO: 295900 - DNA, 969 bp, Proteus mirabilis
atgaatgatgctaaatacggcgttcttttggtcaatcttggcacccctgatgcacctcaaccagatgcagtgaagcgctatttagctcagtttcttagcgatcctcgcgttgttgatgtttccccgtggatttggaaacctattcttcatggggttattttgccatttcgctcacctaaagtagccaaattataccaacaaatttggttgccagacggctctcctcttttagtctatagccgtgcacagcaaaaagcgttagcacaacgttttgcgcatatacctgttgaattaggtatgtgttacggcaatccttccctcaacgaaggactgacgcgattattggcacagggcgttgaaaagctaattgtattacctctctatccacaatactcttgttcgacatcgggggcggtatttgatggtattagccaactgtttaaaacgatgcgaactattccttcactgcattttgttcgtagttatgctcaacatccactttatattaaagcgctggcaaatagcattgacgagagtttcaagcaacatggtaagccggatcgtttagtactttcatttcatggcattcctgaacgatttattaaaactggggatatctattttgatgaatgttgccttacagtagaaaaattaaaacagcaacttgattatccagcagaaaaagtgatgatgactttccagtcacgttttggtcgtgagccttggttatcaccttatactgataaaacgatggaaaaactgggtagtgaaggggttgaacatgtacaggttatttgtcccggattttcatcagactgtttagaaacattagaagaaattaatgaacagaaccgtgagttctttatacatggtggtggaaaacagtatgaatacattcctgctttgaatgataaagttgagcatattgacttacttgaagctataatccgcgacatatgtgaaaaataa

SEQ ID NO: 295901 - DNA, 645 bp, Proteus mirabilis
atgcgtatcattctactaggcgctccaggcgctggtaaaggcactcaggctcaattcattaaagaaaactatggtatcccacagatttcaaccggtgatatgttacgtgctgcggttagcgcaggcacggaattaggactgaaagcaaaagcattgatggataacggtcaattagtgactgatgaattagtaatagcattagtgaaagagcgtatcaaacaagacgattgccgtaatggtttcttgttggatgggttcccaagaacaattccacaagctgatgcaatgaaagaagcgggtatcaatgttgatttcgtactggaatttgctgtacctgatgaaattattgttgaacgtattgttggtcgtcgagtgcacgcgccatcaggtcgtgtttatcacattaaatttaatccacctaaagttgaaaaccgtgacgatgtgacaggtgaagagttaacaactcgtaaagatgaccaagaagaaacagtgcgtaaacgtttaatcgaatatcattctcaaacagcacctttagtttcttattaccaaaatgaagctaaagcgggtaacgcgcagtaccacaaaattgatggtacacagaaagtaagcgaaattaatgctgaactgaaaaacatcctcggttaa

SEQ ID NO: 295902 - DNA, 1884 bp, Proteus mirabilis
atgagtatgaaagatcaggaaacgagaggatttcagtctgaagttaagcaacttctacaattaatgatccattctctttactctaataaagaaattttccttcgcgaattgatttctaatgcatcggatgcggcggataagttacgttttcgtgcattatccgatgcagctctttatgaaaatgagggtgaacttcatgtccgcattgccactgataaagaaaaaagaacactgactatcagtgataacggcataggtatgacccgcgatgaagtgattgataatttagggactattgcgaaatcagggactaaagcatttttagagtctattggacaagaccaagcgaaagatagccaattaattggtcagtttggtgtcggtttttattccgcatttattgtggcagacaaagtgacggtacgtacccgtgccgcggggcaacctgctgataaaggtgttttctgggagtcacaaggtgaaggtgattatacggttgctgatattgaaaaagcggatcgtggtaccgaaattaccctgcatctacgtgaaggtgaagacgaatatttagatgattggcgtctgcgtagtattatcagcaaatactctgatcatatttccctacctgtcgaaatagaaactaaaaatgaagaagacggcactgttacatgggaaaaaataaataaagctcaagcgttatggacgcgtaataagtcagaaatcagtgatgatgaatataaagaattttataagcatctttctcatgattttgctgatccgctgtgctgggcacataaccgggttgaaggtaaacaagagtacaccagcctgctgtatgttccttctaaagcaccttgggatttatggaaccgtgaacatcaacatggtttaaaactgtatgtacagcgcgtctttattatggacgaagctgaacagtttatgcctaactatttgcgttttatccgcggattagtcgattctaacgatttaccgttgaacgtttctcgtgagatcttacaagatagctctgtgacacgtaatttacgtagcgcattaactaaacgtgcattacaaatgttacagaaactggctgacaataatcctgaagagtatcaaactttctggaaagagttcggtttagtgttaaaagaaggtcctgcagaagatcacgctaatattgaagccattgctaaattactgcgctttgcttctactcataatgacagcgatgcacaaactgtttcattggcagattacgtgagtcgtatggttgaaggtcaggataaaatctattacatcactgcagatagctatgctgcggccaaaaatagccctcatctagaattattccgtaaaaaaggtattgaagttctactgctatccgatcgcattgatgagtggatgatgaactatctcactgaattcgatggtaaatcattccaatctgtgagcaaagcagatgaatctttagataaactggctgatgaagagaaacaagcgcagcaggaggagacagataaacaactggcaccttttgttgagcgtgtaaaaaccttactgggtgataaagttaaagaggtgaaattaactcatcgtttaacggatacgcctgctattgttactactggcgcggatgaaatgagtacgcaaatggcgaaactttttgcggctgcaggtcaacaagtccccgaagttaaatacaactttgagttaaaccctaaccatccattagtcaaacaaacggctgagttgaccgatgaaacacagttcgcggattggatcaatttattacttgatcaagcgctatttgctgaaagaggaactttagaagatccaaaccagtttattcgtttagtgaatcaactattagctaaaaacgcgtaa

SEQ ID NO: 295903 - DNA, 1200 bp, Proteus mirabilis
atgaccattttgggaacggctctgaccactaatgccacaaaagtgatgttattaggtgcaggcgaattaggtaaagaggtgatcattgaatgccaacgtcttggcattgagactattgcggttgatcgctatgccaatgcgccggcaatgcatgttgctcatcgccattatgtcgtcaatatgcttgatagtcaggcattaaaacagattataactcaagaaaaacccgattttttggtgcctgaaattgaagctattgctacttcattattagtcgaattagaaaataatggtcaaaaagttgtaccttgtgcccgtgcagtaaaactcactatggatagggaaggaatacgccgtctcgctgcagaaacattacacttactgacttctccttatcaatttgttgatgatgaagcggcttttagaaaagcggcggttgagattggttttccttgcattgtaaaaccggtgatgagttcatctggaaaaggacaaagtgttattcgttcagagcaagatctcactagtgcatggacttattctcaagaagggggaagagcagggcaagggcgcgtgattgttgaaaagatgatcccgtttgattttgagataacattactcacgattcgtgctattgatggtattcatttttgtgagcctattggtcatcggcaagaaaaaggcgattatcgtgcgtcatggcaaccacaaaaaatgagtgatattgcccttgccaaagcacaacatatcgccagtaaagtagtggagaatttgggcggttatgggttatttggtgtggaactatttatccaaggtgatgaggtgttttttaatgaagtatcaccgcgtcctcatgatacagggcttgttaccttaatttcacaagatttatcagaatttgcgctccatgtgcgtgcttttttaggctatcccatcggtggtattcgccaattaggtgcttgtgcttccgcggtgattttacctgagttgtctagtactaatattgtctatacggggttagaaaaagcgcttaaggcaaatcgacaaattcgtttatttgctaaacctgaaatctcaggacatcgtcgtttaggcgtggtgcttgctcatgccgattccataaaacatgctattgaagaggcgaatttaggtgcacaagcgattttagctcatgatggtgataaccatttatcgcagtga

SEQ ID NO: 295904 - DNA, 912 bp, Proteus mirabilis
atgtgggctcagtcaggtgtgttattagccatttgctcctatattttatggggaataacccctcttttttatcggctattacccggtgctcaaccattagagttacttgcacaacgtcttatttggtctattcccctgttattactggttcgattatttattaaaaatagaactcgctggcgtgctgttctccaagatagacgctctatttttatgtgtttatttagttcattagcaatggcagtctcttggtgcacctttacttatgcacttacgcatcaacaagtcttagccgccagtctggggtattttattaatccacttttttctattgtattgggcgttatctttcttaaagagaaattaaatcctgctgaaaaattggcggtaatattaatttgtgcaggagtgggatatcaattatggatgtatggtcaattacccatactggcactcgtgatgggaggagcatttgcgatttatggactcattcgtaaatttattcgttttgatgtcataacttcattatttattgaaactttgtggctaattccggtcgctataggggtgatgatttggctgattatgcgagatgaaagtgcgttttcttctgcagacaatttaactcgtttctattatattttaaccgcgccagtgactattctccctttactgttttttaccgcagcaataaaaagaaccaccttaaccgttattggtttagcacagtatattgaaccgacaatgcaatttttactggccgtattcctattccatgaagcatttgatgctgtgaaaggagtaagtttttcattgatttggttagggctattgtgttgtatttttgcgctgattagaaagcgccttaatgccttaaaaattcataaaggtcagcatagccaaaaaatataa

SEQ ID NO: 295905 - DNA, 675 bp, Proteus mirabilis
atgcgctatttccccagtgtttttattggcaatatcacgacgactgcaaatggatttaccagtgcgatcaccaaaaggctggtggatgggcatattaaactaacatcactgggcttagcaggtgatgagcaagcagaaaaagggtttcatggtgggcctgatcgcgctttgtgccattatcctcaagaacattatcattactggtctgagcaatttcctcaactggctgacttatttaatgctcctgcgtttggtgaaaatatttcgactaccggtctgacagaagagaatgtttttattggtgatatatatcaatggggtgacgctttaattcaagtgacccagcctcgttcaccttgttataagctaaacacggtgactgatatcagcgatttttcacaactgatgcaagatagcggtttttgtggctggttatatcgcgtgataagtcccggcgaagtaggctgtcatcatcctttggttctacgctcaagaaatagcgatatctctgtcaaagaagcaattgctattgcttttcatatgccatttgatgaggagtcgtatcgtcgcttattaacagcggcaggactatccgctagttggtgtaaaaccatgcagttaagattgcaaaaacaaactattgaaagttttgatagaaggctatttaagaaatag

SEQ ID NO: 295906 - DNA, 624 bp, Proteus mirabilis
atgagctatacattacctgcactcccttatgcttatgatgcgctagaacctcattttgatgagcgcacaatggaaattcaccatactaagcatcatcaaacttatgtgaacaataccaatactgcgttagaaaaactgcctgaattagcgggtttagaaattgatgaactcgttaagaatttacataaagtacctgctgatcaacgtacctttgtacgtaacaatgcgggtggtcattctaaccatactttcttctggaaaggattaaagctaggcactcaattacatggttcattaaaagatgccattgaacgtgattttggtagtgttgatgcatttaaagagttgtttgaaaaagccgctgctagccgttttggttcaggttgggcatggttagtattaaaagatgatggaaaattagctgttgtttctaccgcaaaccaagatagcccattaatgggtgaagagttagcaggtgcatctggctatccaattattggcttagatgtatgggaacatgcgtattacttgaaatatcaaaaccgtcgtcctgattatatcaaagcattctggtctgtagttaactgggatgaggcgcaaaaacgctatcagagcaaagcataa

SEQ ID NO: 295907 - DNA, 1959 bp, Proteus mirabilis
atgacaaaaataaaccaacatcacattcctgcaaacattgcagagcacgccctgattaataaagagcaataccaaaaagattatgcattatccatcgaaaaccctgaggccttttgggcagataaagggaaaattgttgattggataaccccctatactattgtgaaaaatacctcctttgatccaggccatgtccgtattcgctggtttgaagatgggcaacttaacattagccaaaactgtcttgatcgccatttagaaaaacgcgcggatcaagttgctattatttgggaaggtgattcccctaatgaatcgaaaagcattacctatcgccaacttcatcaagatgtttgtcaattcgccaatgtattaaaaaaactgggtatcaaaaaaggcgatgtggtggctatttatatgccaatggttcctgaagcggctgttgcgatgttggcttgtactcgtattggggctattcattctgttatttttggtggtttctcaccagaagcagtggcagggcgcattattgactctaaagcaaaattagtgatcactgcagatgaaggcttacgtgctggtagagcaatccccttaaagaaaaatgttgatgatgccctcactcatgtggatatcccgcctattgaacatgttgtggtcttacgtcgaacagggcaaacagaacaatggattgaaggacgcgatttatggtgggatgaaattgttcaaggcgtcagtacagaatgtgatgtggaagtcatgaacgcagaagatccactctttattctctacacatcaggctctacggggaaacccaaaggcgtattgcacaccactggcggttatcttgtttatgcctcaatgacctttaaatacacctttgactatcatgatggtgagatttattggtgtacagcggatgtcggttgggtaactggccatagctacttgttatatggcccgctatcaaatggtgccacaacagtgatgtttgagggcgtccccaattacccctccgtcaatcgtatggcccagattgttgataaacaccaagttaatattctctataccgcacctactgcgatccgcgcattaatggcggaaggagacaaagccattgaaggtacacaacgaacctctttacgcattttaggctcagtaggagagcctattaacccagaagcttgggaatggttttatcaaaaaatgggacgtagccaatgccctattgttgatacatggtggcaaacagaaacaggaggcttcatgataaccccattgccaggagcaatggatctaaaaccaggctcagcgactcgtccattctttggtgtacaacctgcgattgttgacaatatgggggaaatacaagacggtgcttgtgaaggtaatttggtgatcgtagattcatggccgggccaagcaagaacattatttggcgatcatgaccgttttgaacagacttacttttcgacctttaaaggcatgtacttttcaggtgacggtgcccgtcgtgatgaggacggtgattattggataacaggccgtgttgatgatgttttaaatatctctggtcaccgtttaggtactgctgaaattgaatccgcacttgtcgcccatcctaaaattgcagaagcggctgttgttggtattccccataatataaaaggacaagctatttatgcttatgtcacgctaaatcatggtgaagagcctacggcagagctttatacagaagtgcgcaattgggtacgtaaagagataggcccaatagcaacacctgatatccttcattggacagatgccttacctaaaacacgctctgggaaaattatgcgtcgtatcttgcgtaaaattgcctctggcgacacaactaaccttggagatacctcaacactcgccgatccaggcgttgtagaaaaactgttagaagaaaaacagtctctatcactgaccatttaa

SEQ ID NO: 295908 - DNA, 312 bp, Proteus mirabilis
atgaatcccaatatttatcaagagatagaaaataaccctcgctttaaagaactggttaaaaaacgtagtcgtttctcatggggactttcgattattacacttgttatgtatgtctcatttatattgctgattgctttttatccacaatggttaggtacaccgctctatgaaggcagttacattactcgaggtattcctatcggtattggcttaattatcgcctcttttctactaacagggatttacgttattagagcaaatacagagtttgacaaattaacggcagaaattcttggtgaggtagaaaaatga

SEQ ID NO: 295909 - DNA, 1656 bp, Proteus mirabilis
atgaaaaataaacactacgccatatcactattaacgttattatcccccaatgtattagccgcagcgataaccgaagggggtgaaaaacagccaattaacttccaagccattatcatgtttctgatctttgttggcttaacactgtatattacttactgggcctctaaacgaacacgatcacggtctgattattacactgcgggtggcaaaattaccggatttcaaaatggtatggctatcgctggtgattttatgtctgccgcctcctttttaggaatttcagcgttagtatacacttctggctatgatggacttatctactctattggctttttaatcggctggccaatcattctatttattatcgctgaacgtttgcgtaatttaggacgctatacttttgctgatgttgtctcttaccgtttaagtccaaagcccattagaacactttctgcaataggttcattagttgttgttgccctctatcttattgctcaaatggtaggggcgggtaaattaatcgagctgctctttggcttaaactaccatattgcggtgatcttagtcggtattttaatggttctttatgtcctttttggcggcatgttagccaccacttgggtacaaataatcaaagctattttattactcgccggtgcaacttttatggcggtcatggtaatgaaagcggcagactttaacttcaatactttgtttaaagaagctgttaacgtccatcaaaaaggcttttctatcatgagtccaggagggttagtttctgatcctatctctgcattatccttaggtcttgccttaatgtttggtaccgcaggacttccccacattatcatgcgcttttttaccgttagcgatgcaaaagaggctcgtaaaagtgttttctatgcgacaggttttatcggttatttctatattcttacttttattattggtttcggggctatcttactcgttagccctaatcctctgttcaaagatgccgctggtgctttaattggtggcaccaatatggccgctgttcatttagcggatgctgttggtggtaatttcttccttggttttatttctgcagtcgcttttgccactattttagccgttgttgcaggattaactttagcaggtgcatctgccgtttctcatgatttatacgccaatgtaattaaaaatggccaagcagatgagcgacaagagctaaaagtttcgaaaataacggttgttattctcggcattgtcgccattggtttaggtattttatttgagaaacagaatattgcctttatggtcggtttagctttctctatcgctgcaagttgtaatttccctattatcttactctctatgtattggaagggattaacaacacgtggggctgtcattggtggctggtctggcttaattgttgccgttaccttaatgatcttaggtcccacgatctgggtgagtattcttggtcatgatacacctatttatccttacgagtaccctgctcttttctctatgatcattgcctttatcgtttcatggttattctccattaccgataattcttctctggcaactcaagagcgtatgaaatttgaagctcagtttattcgctcacaaataggtattggtgcagagcaaggtaaacctcattaa

SEQ ID NO: 295910 - DNA, 1632 bp, Proteus mirabilis
atggttaactttttattctatatggaaaaaggtgataatgataaaagcatgtctcaagtaataaacttttctcttttatttattttatctatagtacctgcactattagcgggttcaaccctgcatattgaacaaaagttctctatggtgattatcggttggctcctgatgttgctctgcgcaggtatctatcggtttactataggaaaagtgattacttttattgttgcagctttatggtctttaaacctctccatctcactgtttttttatcgtgaacatgatattcccttttcatcatcaatagcagaaactttcattaatactaatggaagtgaaactgttggtatgctctcttataataaatattatgtactcttttatattgttatatttaccagttttttctatttaatacatattagcgcccgttatttaaataacaaaactaataaaagatgtttaattgctatttttatattaataattcttatttctctatacaaaaacttagcaataagatcagagagtaaaacccaattacttgctgagtattatctacttaatacccctttttacaatgcagcagctttagtgcggactttccacgaaaatagacaaatcaaaaagatcacatcagaaaaagttaattttaactatgataaagtggatcaaaaaacagaaatttatattcttttgattggtgaatcagtacgacgtgatcatttaggaatttatgggtatccgtacgatactacccctaatttagagaaagaaaaaaataatattttattatttaagcaagcttattctcctgcgcctgtgaccatattatcagtacccatatccctttctaatatcaacctaacagagttatatgataagaaacactacgctgataatatcatttctcttgccaatcatgctggcttcaaaacatattggttaagtaaccaaggtaaaggaaatccaaaaacgagtgtgatttctgttattgccaatatggcccaacataaaaaatggaatgaatttattggctatgatgaagaattattgccatttttagataatgcgcttaatgataactcatcaaataaaaagctcattgtcctacatacttatggtagtcatgagccagcatgtaatcgttttcctagcacttaccttaaaaccttttcccaacaagaagatgataactgctacgatagctctatcgcttatactgacaaacttatcagccaaattattgaaaaaatacaagataaacccgcatctatactctatttttcagatcacgcattacaacgattagataaaaatagagaagtacgttatcaccatggcgtgaacagtcctcgccaagaagcttataatataccgctctttatttggtatagcgcatctgcaacgcgaccaaatatcaatgaagaaaatttgaataaacctttttctaccgcagataattattggctattaagccaatggctaggtattgaacataactcagcgaaaaaatgttactcacctttaagcgaatgctatcaaacaaaaacgtcaatgatggtcatcgatggtaataagaagttattaaactacgcactattagaatcagaagaacaagcgcctcaataa

SEQ ID NO: 295911 - DNA, 693 bp, Proteus mirabilis
atggataacaataaagaacgctttttatcaaatcttgcttctcaattaggtaggtcgttaaaaacgcaacctgaagctttacctgaaccagtaaatttatatccagaacaacgattaacggagctttctgatgatgaactttatcaatattttctcaatacagctcagttagcaggaagtacttatgaaacgacaacattgtcatctttacctaagcatttagagactctttgtgaacagtatggtttaccagtgatattaacgggtgatccacgattacaggaaagtggggtgattgattatttatcagaacactgtcatgccaatatttgggatcatactgagggtaaaaaaaatattgaacgggtaaaagaggcaaaagtcggaattgtatttgctgaatatggacttgcagaatctggcggtgttgttttattttctggggctgacaaaggaagaagtgttggattgatccctgaaaccacgatttttgtactaaaacgcagtacgattttacctcgagttgctcagttagcagaaagattacatcaaatggcattaaaaaatataagaatgccttcttgtattaatattattagtggtcctagttgcacatcagatattgaattaattaaggttgttggtgttcatggctctttaaatgcgatttatgtgattattgaagattgttaa

SEQ ID NO: 295912 - DNA, 1419 bp, Proteus mirabilis
atgtcattaaaaacaagctctcttccttttaaaacgctaattgatcgtcaagttcacgatcaaattatgcaaaaagccgttgctaatgcgcaagaaactattggccgtaatcgtcaaaaaatggttgatgaattaggacactgggaggattggcgggatagagcggcacaaattcgtgatcatgtacttgctaatttagatgcctatttatatcaattatctgaaaaaatagaacaacatggtgggcatgttttctttgctcaaacgaaagaagaagcctctcaatatattctcaatattgcaaaagagaaaaaagccaaaaaaatagtcaaagccaaatcaatggtgacggaagaaattggcttaaaccctgtattagaaaatgcaggtattaatgttattgaaaccgatttagccgagtttattcttcaacaagcaaaagacgccccatctcatgtagtggttcctgctattcataaaaatagagcccagatacgtcaaatatttcatgacaaactgggttataacggctcagatacaccagaagaaatgacgcgttttgttcgccagaacattagagacgatttttttactgccgatatcggtattacggggtgtaattttgcggtagcagaaacaggttctgtttgtttagtcactaatgaaggtaatgcacgattaagtacaacattacccaaaacgcatattgcggtgatggggatggaacgtattgcacctacttttaaagaggtagatatcttaattaccatgttggcccgtagtgcagtagggttacgtttaacgggctataatacatggcttactggccctaaagagaatgacaacgttgatggcccagaagatttccatcttgttattgtagacaatggccgctcgaagatcattggttctgaatttaaagatattttacgttgtatccgttgtggtgcttgtatgaatacttgccctgcttatcgccatattggcggtcaaggatatgattctatctatccaggccctgttggtgccgtcttaacgccactacttggtggatataaagactttaaaaacctgccttatgtctgctcattatgtactgcttgtgatagcgtttgcccagtaaaaatacctttatcaaatcttataaagaaacatcgtgaagtcatggtagagcaaggtataacaccgacaactgaacgtaatattactcgggtatttaattatgtgaaccgccatcctatgttatggaaagttgggatgaatatgggggctcatgctacaaaatggtttattaaagaaggtaaagcgccattaaatatcggtgcaataaaagcatggacagaagcgagaaatttacctgaaggtgatggtgaaagttttcgtagttggtttaaaaaacaccaaaaagaggagaaataa

SEQ ID NO: 295913 - DNA, 738 bp, Proteus mirabilis
atggatgttaatttttatgtaacatgcattggtgacgccttaaagtctcagatggcaagagatagtgtattgctgttagaaaaactaggctgtcaagttcattttctcgaaaaacagggctgttgtggtcaacctgctattaatagtggatatattaaagatgccattccagcgatgaaaaacttgattaaaacctttgaagttaatgactatcctattatttctcctgctggatcatgttcttttgctattaaaagttatgctaaatatctggtaaatgaacctgactgggctattcgtgcagaaaaaatagctaatcgcatgtttgatctcacctcctttatcgttaatcaattaaatattgttgatgtaggtgcaagccttaaaggaaaagctgtttatcacccgtcttgcagcttatttcgtaaaatgggagtgaaagaagagccactcacactattacgtcatgtaaaagggctagaattattaccttttgacaatatggaaacctgttgtggttttggggggacgttttcggtaaaaatggctgaaatttcaggtgaaatggtcaaagaaaaagttcaccacattatggatgttcatcctgactatttaattggtgcggatgtcagttgcttattaaatataggtggtcgtttagagagagaaggtcgtccagttaaagtgatgcatattgcgcaagtattgatgagcaatgaggaggaattatgtcattaa

SEQ ID NO: 295914 - DNA, 1071 bp, Proteus mirabilis
atggaacacgctaatacagaggctttacaaagagatctcgtgttacaaaatatgaaacgggtttatcgttatcaatcggctcatcaagttcgtagtgttcgtcgccgtagtggtaaaactcgttttattaaagatacagattgggaacgcggtgttttatggacctgtgtaagtgcggcatggcaagcgacacaagataaagagtaccttaatggtgtgttaaattacaccttacatactggatttagaacaggtcctaatgcacgttttgcggatgatcatgtttgcgctcaagcttatttggcgataagtcctttgtttgaacaatctgaaattcttgaaccgacgattaaagcgtttgatatcatgctaaatgatccaaaaccagggcgtgaagactggtggtggtgcgatgcactttttatggcacctcctggttttgctgctttggctgaaattattagcgaacgacgttatttggattatatgcataccgcttattgggatgctattgaacatttacgtgatgctgaaactggacttattttccgcgatcaccgctatattcctgatggtcagggaaatgaaatgcgtgaagctaatggtgaaaaagtattttggagtcgcggtattggttgggttttggcttctattcctcgcattcttcaatatatgcctgatgattatcatgagcgcgatcgttatataacactgtttaaacaattagcgcgttctatcctagattaccaacatgaagatggtttttggcgcaccagtttattagatcctgataatttccctgcacctgaaagttcagctacggcgcttttttgttatggacttgcatggggaataaatcagggtgaattaaataaagaagaatattttcccgcattacatagagcgtggtcagcattacaatcctgtattcatgataatggtatgattggttgggtacaacttccggcatttaacccgcgagaggtaaagtttgaacataatatggattatggcgctggagcatacttattagcgggtagtgaagtattaaaaatgacgttaaataattag

SEQ ID NO: 295915 - DNA, 756 bp, Proteus mirabilis
atgaatttatttgatttaacaggcaaagttgccattgttactgggtgtaatacaggcttagggcaaggaatggcaataggtttagcacaagccggtgcggatattgttggcgtgggtattcaagatgctcctgaaacgcgtcaaaaagtcgaagcgttaggccgtcgttttcattacatcacgcaaaatttaatccaacaagatggattagatgctttagtggatgaggctgttaaggtgatgggacgtattgatattttagtgaataatgccggtattattcgccgtgaagatcttttgcaatttagtgaaaaagattgggatgatgtgattaatattaaccaaaagacactgtttttcttatcgcaaaaagtggctcgccagtttgtcaaacaaggcgaaggtggcaagataatcaacatcgcgtcaatgctttcttatcaaggaggtatccgagttccttcttatacggcaagtaaatccgcggtaatgggattaacacgagcattagcgacggaattatcacaatataatattaatgtaaatgcaattgctcctggctatatggcaaccgataacaccgctgcacttcgtgctgatgaagcgcgtaatgctgctattttagagcgtattcctgcggggcgttggggaacacctgaagatgtcgcaggtcctgccatatttttagcctctaaagctagtgattatatcaatggatataccattgcggttgatggtggttggttagctcgataa

SEQ ID NO: 295916 - DNA, 831 bp, Proteus mirabilis
atggaaattcgtcagccaattcatagtgaacatgctaaaaggcttgatacagaaggacttcgtaaagagttcctgattgagaacctattctgtgaaggggaaatgaatctcacttatagccatatagatcggattattgttgggggagttgtcccaacaactcaacctttagcattaatggcgggtaaagcacttggtgttgatttcttcttagaaagacgtgaattaggtgctattaatattggtggtgcgggtaaagttattatagacggtgaggtatttgaaattggccctcgtgaagccatttatattggtatgggagccaaatctgttgaattcaccagtgattctgtagagacaccggcgcgtttttatattaactgtgcaccagcacatcacacttatcctactcgcaaaattactcaacagcaggcctcacctgaaaagttaggtaatgcagaaaattgtaacgttcgtacgatttataagtttttacatccttcagtgttaccaacatgtcaattatccatggggatgacagtgcttgagccgggtagcttgtggaacacaatgccatgtcatactcatgaacgtcgtatggaagtatatctttatttcgatatgaaagatgacaatgtggttttccattatatgggagagccaactgaaactcgtcatttagtggtacgcaacgaacaagctgtcattagtcctagttggtcaattcattctggcgtaggaagcgcatcttatacctttatttggggaatggtgggtgaaaaccaggtattccacgatatggatcatgttgctatgaaagatctgaaataa

SEQ ID NO: 295917 - DNA, 1170 bp, Proteus mirabilis
atgaatcagcgatatgccattttagcagatagaacctttacacctgaaggtatccgttatctctgctatgtccatgttaatggtgaaaatattgaatcaatcaccacacaagcaccaacagattgcccagttattcgcttaaaaggaaaatcattattacccggttttgtggatatccatattcatggtcgtgaaggggctgatgtgatggatgcaacgcaacaagggctacaaactatagccgatgcgctggttaaaacaggggttgtggcttgggttgcaacgactgtcacagcaccgatggaagatatccgtcatgcgctattacaagtccgtgagtttgtatcaaaacctcaagcaacaggtgcgttgttactcggtagctttttagaaggcccttattttacagaacgccatcgtggttcacaccctgtgaaatatctcaaagcgccgaccatctgtgaattagaaacattactcgacagtgctgggggatcgctattgcgtgttgctgttgcacctgaagctgaaggtgcgatgaatgcgattgattggttggtcagccgaggaattaaaccaagtgtggcacatacagcagcaacttatgaacaagcttcacgagctttttcacacggtgctgattgtggtgtgcatctgtataacggcatgaccgggcttcatcatcgtgagccgggatgttgtggtgcagtgttatatcacagtgtattagctgaacttattgctgatggtatccatgttcaccctgtaatgatgcaactggcatatcgcatgaaaggatatcaacagattgccctaattacagattgtatgcgggcgggaggtttagctgatggtgattacacattaggtgctcaaacggtcaccgtcaccaatggacaggcaaaaactgccgatgggtcgctagctggcagcacttgcagtcttgatagtgcgttaagaaacatggtgcaacttgcacatattcctgagtgggaagcggttcaaatggcatcggcgatccccgctgagtatctcggcataggggataaattgggttatatcaaagcaggtcaacaagccagctttgccgtggtggatgagtgttttcatcttaccgatacattcatcagaggaaatcatatttactctgtatccggggataatgcataa

SEQ ID NO: 295918 - DNA, 435 bp, Proteus mirabilis
atgataggtcttattgtctcaggacatcttaattttgctacaggtatggcatccgctgtaaaggcgattgctggtgagcaagaaaatatcgcgtttattgattttattgagtcaatttctccggatgagcttgaacaaaaaatgcgtgaagcgattaacgctatgtcatgccagcaatatctcttcttaacagatttacctggcggtaccccctgtaatcgcgcaatggcaatcatgatgcaaaatccctctgttgaggtgttagctggggttaatttacccatgattgttaatgcggcatttgaacgggaagggtgttcaacgacggaattggtgcaaacgctacgcgaaattggtcaagacagcattcaagatattcgagagcaattggcacaaatagatagtcatgatgttgaagaagaagacggcttatga

SEQ ID NO: 295919 - DNA, 891 bp, Proteus mirabilis
atggtatctgataacagcaccgcattgaaaacgcaggataaaccagaaacaggttctttgattgatggcattgatgagtatcaagatactgctgtcagaaaagttattactaaaggcatactttggaagtgtgcattccgtggcttatttatggaaggtaacttcaactttgaacgtatgcaaggtggtggatttgctttctcaattattccagcattgaagaaaattcacggcaataataaacgcgattatgcaacatcgttgaaaaaccatctgcaattttttaatgccagtccaaagctgtttacctttttattaggaacggcggtggcaatggaagagaacaaagaaaagccatcgactgttaatgtgatgaaagtggcaggaatggggccgactgggggtattggcgatgctatcgaccatatgaccttaatgcctttgaccttagcattaggtgcttctattgcaatggaaggctcgattgcaggacctttcgttttcttcttcttgtatcaaattgtgcattttttagtgtatttcggactgatgtttatgggctatcgcgcaggtactgcggcaatggtcaatatgagcgatgccactgaaaaattagcgaaagcggcaaatattatggggatctttgtgattggtgcgctctcggcgacctttatcaaagtgcaaaccaccgcctcgctggaacttggcggaaaagtcgttgaattacaaacagccctcttcgacaaaattatgccgaatttactgccactgtgcttagttttcttaatgtacaaaatggtgaaaagtaccggtttttggggtaagccaccggtattgattttttcaaccctagcatttggcgttattgggcatgtattaggattcttataa

SEQ ID NO: 295920 - DNA, 768 bp, Proteus mirabilis
atgatttttgaagcttctttagtggctttatgggccttcttttgcggtatcgataagtacgacgtggcattaaatatccatcgaccattaattacagggcccgttgtcggtctgattatgggagatatgcaagtaggattaattgcaggtgctaccttagaacttgcatggttagggcttgtacctaatgccggagctcagccaccagatgtgacattaggcaccattgcagcagttgcttttgcggtaatgacaaaacaatcaccggaagttgcaatgggaataggtatgcctattgctgttttaatgcagatgttggtgattggtttctttgctatgactgcatttaccatgggtaaagcggatcgatatgcagaaaaggctgacggtgcggggatctctcgcttgctgattattacacttattgtccgttcactcctttatgctttagtcgcttttgttactgtttattttggtgaacatgctgctcaatggattgatgagaacacgccaaaagtcttattagaaggattaggtattggggcgaaaatggtacccgcaattggttttgcaatgcttctaaaaattatgtggtcaaaagaagtggccggtgtgttctttattggtttcgtgatgacaacctatctcaaactcccaattatggccgtcgctattttaggcgcatcagccgccgcactctacttcttctttagtggtaacaataaaaattcaagtcagcagaatgaggatttcgaagatggtatctga

SEQ ID NO: 295921 - DNA, 495 bp, Proteus mirabilis
atgaacacacctaatattgtctggacccgcattgatgaacgtttacttcatggacaaatccgcattacatggggtaaacatacggaagcaaacctaattttagtcgctaatgatgatgctgctgaaggtcccaatgctgcatttatgcaggcgggaatgaaagcatctgctggcggcgaatatgcggttcgctttttctctattcaaaaaactattgatgttattagcaaagcatctcctcgtcagaaaatttttgttctgtgtaataacccaactgatgtagcccgtttagttgaaggtggcgtgcctattactcattgtaatgttggcaatatgcattttcatgaaggtaaacgtcaaattgcgaaaacagtctctatcgatgaaaaagatcttagtgcttttaagcgtcttatcgaaaaaggggttacttgcacagtccaaaacacaccagatcaaactcctgttgatgtactaacactcgcatcagcctga

SEQ ID NO: 295922 - DNA, 1191 bp, Proteus mirabilis
atggaatatttaagctatcaaaccgctgaacttgagcagttaaacgcattttggacagcgaaagaaattgaccagcaaccagagtgctggaaaaaaacatggctatcaattcgagaaaaacgtgctgatattgagtcttttttagaaaaagcattggaggcatcaaatagcagaataattcttacgggagctggaacatccgcgtttgccggtagagcgttagcacctattttgacgggagctataaaacgtcgtgttgatgctattgccacaacggatttagttgctgatcctcaagaatatttagccgaagatatccctacattactgatttcttttgctcgttcagggaatagccccgaaagtgtggctgcgttagatattgcaaagaagtgcttatcgcaatgttaccacttagttttaacctgtaaccctcagggccagctttatcaatattgccaaaatagtcataaggcattggcgttattaatgccggaagagtcaaacgatcgctcattagcaatgacatcaagtttttcttcaatgatgatggcggcggtcactatctttttaggcgatagtgtatttactgatgctattgcgccgttttttagtgattacaaagcgcaatttgacaaagcaaataaaattatccgccatcaatacgcaggaaaattcaaacgcgttatttatcttggtagcggaggattacaagggctagcacaagaagccgcattaaaaatgttagagctgacggcgggtaaagtcgtagccaattttgataccccattaggctttcgacacgggcctaaatccatcgtaaataaagaaacccttgtggtgatgtttttctctaatgatccttatacacgtcaatacgagacagatttattacgagaggttattcacgataatgcatcaggcaaggtgatcgcgatcaccgcacgaaatgataaaactttttcaccagagagttttgtttatattccagcgttagagaactgttcagatgtggcgctattgttcccttatttgatgttggcgcaatcatttgcatttcacagttctattgcactagggaatacgcctgataatccatctccaaccggagaaatcaatcgagttgtacaaggcgtcacaatttatccgttctcacttaaaacagaagacacacagtctgctttaaattaa

SEQ ID NO: 295923 - DNA, 1281 bp, Proteus mirabilis
atgcatcctttagaaaagattgttcagcaacataaatcaggcaaacagaatggtatttattctgtttgttctgcccaccctttagtaatagaagctgctttattacaagcgctggacgatgattcctttctgctgattgaagccacctctaatcaggttgatcagtttggtggttatacaggtatgactcccgctgatttctaccaatatgttattgagaaagcggaaaatgtcggttttcctgtcgaaaagcttatccttggtggtgaccatttagggcctaatcgctggcagcatcttaatgctgaagaagcgatggcaaatgcggatgtacttattgcacattatgttgccgcgggatttaaaaaaatccatcttgattgcagtatgtcttgtgcagatgatcctattcctttaacagatgaaatcgtggcatcgcgtgcagctcgtcttgctgttattgcagaaaataccgccaaaaagacatttggttttagtgatattgtttatgttgttggcacagaagtccccgttcctggtggtgctgctgaagagcttgataccgttgaggtgacttcacctgatgctgcccgtaaaacattagcgtgccatcgccaagcattttatgacgctggtgtgggagagtgttggactcgtgttataggtttagttgtacagcctggggttgaatttgatcataccggtattattgattatcaatctgaaaaagcacaagcgttaagccaagtagtaaatgactattctcatctggtttttgaagctcactctacagattatcaaaccaatcaagcttatcagcaactcgtccatgatcactttgctattttaaaagttgggccggcgctaacatttgctatgcgtgaaggtttatatgcactttgcgccattgaagaaacattatttcctcttgagaagtgctctcgattacgtgaaaaaatggaacaattgatgtgccgtgagcctaatttttggcaaaaatattatcacggtgatgaacgtcaactcgcctttgctcgtgtttatagttttagtgatcgtattcgttattattggcctgatgccgagattaatactgctattgacacattaatggataatttatctgttaagcctattccacttcccttacttagccaatatttgccttatcaatttacccagtttagagaggggaaaattgcgggtacgcctgagtcatttgttattgcgaaaattcgtgatgtgttgtcggtttatgccgatgcgtgcaatgtccattaa

SEQ ID NO: 295924 - DNA, 780 bp, Proteus mirabilis
gtgaaagcggcagttgagaggcgtatggaaatcctcgatatggttaaccaacagggcaaaaccagagtcgaagatctcgctgaattatttaaagtctcaagtgtcactatccgcagcgatctaagttttcttgagaaaaatggctatatcgttcgctctcatggcgcagcaattcctaatacaggctttattgctgaactgagtatccatgaaaaacgtggacaaaatgcgggcattaaaacattaatcgggaaagctgccgcaacgctgataaaggatggagacaccgtcattcttgactcggggacaactacacgcgaaatcgcgacacatttaaagtcgcgcgaaaatgtagtcgtcatgactaacggtctggatgtcgcaatggagttagcaaataccacaggtgttgaggttttaatgacaggtggtgtattgcgaaaaagtgcattgtctttttctggctcacaagctgaaaatagtctaagaaattaccgtttcgataaggtttttcttggtgttgacggatttgatttacgtgttggtatcactactcacaatgaacaggaagccagtcttaaccgtttaatgtgtgatatctcagaaacgattattgcggttgcagattctacgaaattcggtaaacgcagctgtcatatgatcagagagtttggtgatattgatgtgttagtgacggattcaggtattcctgatgagtatgttcaggaactgaaagatcataaaatcgacgttatcatcgtggacgataagacagcgtaa

SEQ ID NO: 295925 - DNA, 141 bp, Proteus mirabilis
atgaggccaaatatttttggtaaagcgatggcgttgaatggcgataagacaacaacaggagcaacttgtattgccactatacaaacagtaggttgccatcaaaatatacctaataactttcatttaaaggggggtagataa

SEQ ID NO: 295926 - DNA, 603 bp, Proteus mirabilis
atgggtaatatcggtggaattccaataagcacggcaaagaaatggatactgaatacaatgtcaattgctggacagcaaaaccatgggaaaatattagcagacattttttctgtttatttagagtccatgctaagtaatggttggagaggagcatgtcatgatttgtctactgctttttatatgaccttatctgaatatagttataacccaattctctacactggagttgttaagggggaaaaaggtgaattatttgatcactcatgggtagagattgataataaaatttatgattttacaatttgctatccgaacttgaatggcgtagctgtgagtcctcctatcttttgttcaaaaaatgtagatacaaaaaaagtaactgaaataaagtatggagtaaaggaagtcaatttagattgttcagttcaacagatagtaaagtcaacaattgatgaatattcaaggtcacgccctaaaaatcatgttgacatgtatgaaattgcagctgaatatggttctattattcctaattcgacaagaaaaaaattatcatcagacacattgagacaaaaatattcatctcataaacgagttttgaaatga

SEQ ID NO: 295927 - DNA, 219 bp, Proteus mirabilis
atgggacttaatttccaagcaaaacattcgcgcaatatttgttgtccttgtttagattggagtgaaaggcgttttcatctaggtggacaaattggcagtgcattacttaatcatgcacagacacaaggttggataaaacgccaccaaggatatagagaagtgacaattaatgaaaagggcaataaagcttttgcccaatattttaatataacaatatga

SEQ ID NO: 295928 - DNA, 726 bp, Proteus mirabilis
atgaacttacatcaatcaatggaagctcgagctgaagaagcggtagctgcattaaaattaatgcaacttcgttatcccgaagttcaagtaggttttttagggttttctcaagccggatgggttattcctatcgccgctagtcaatcacaaccagctttttctgtgattattggtggtgctgtcaattggcgagaacaaggacaatattatcaaaaattgcgttatgaacagcaaggaaaaacaccggatgaaattatacaattgctggcaaaagaacaaaaagaaaatgatgatatttttggactacatggtacaaaagatcgcactcgtcgcaatgatatgagtgaagatcgatttaattttgttgttaaaaattacttaagtgattcatcaagttatttaagaaaaatgaatggtcgtatattagcggtatggggaaataatgacttaaacgttaatgctcagcttaatgcttgtcgctatcgtgcaatattaaatactcatcatcaagctgatattgttgttttccctcatgctagtcatggattactccgtgtgccagaatttaattaccaattagaaagtgattggccaatataccgtcaattacaatttctgtgggctggccgtaaagcttacactgaaggttcgttaccacttattatcgattggataaaaaataaaaatccggatttctctccctataatatggattgtaatttatga

SEQ ID NO: 295929 - DNA, 285 bp, Proteus mirabilis
atgacagaagctcgttctaaagatccactacacggtatcacgcttgaaatgcaagttaatgcgttagtggctaaatatggttgggttaaattaagccaacgaatcaaaattaactgttttagaaacgagccaagtgtaaagtcgagtttgaaatttttgcgcagaaccccttgggcgcgctctgaggtagaagcactatatctaaatcttgttgaagaaaaccttgatgatacaatcaattattctgaaagtgatccttgggcaaatagtcgctataaaaaataa

SEQ ID NO: 295930 - DNA, 1170 bp, Proteus mirabilis
atgaaaaaagataaatactttcgtatcgtgctgttattcaacgctaataaagtctatgaccgacaagttgttgaaggggtaggtgaatacttgcaggcgtcacagtgccattgggatgtatttattgaagaagatttccgcacccgtcttgataatattaatcattgggtttgtgacggcattattgcagactttgacgatcccattattactcaacatttaagccaatcacccttatctgttattggtgtcggtggctcttatcatcaagcaaaagattatccttctgtgccgtatattgctactgataattaccaattgattcatcaagcttttttacatttaaagcaaaaagggcttaaacattttgctttttatggattaccggcaaaaaactacccgcattggtctaatgagagagaatatgcattccggcaattagttactcgcgaaaaataccctggcatcatttataacggtatggatatcacacaagagaattggcaacatgcacagaatcgtttatctgactggatacaaacgttgccaccacaaactggcattattgctgtcaccgatgccagagcgcgtcatttactgcaagtctgtgataacttaaatattaatgtgcctgaagaaatcagtattataggcattgatgatgaagatatgacacgttatttatcacgtatagcgttatcttctgtagtacaaggttcacgacaaatgggatatttagccgcgaagcttctgcatcaaatattagaagggcatccaaccgaacaactaccaagaatattagttcctccagtaaaaatcattgaacgtcgctcaacagactttcattcatttagtgatcctaccgttgtacaagcaatgcactatatttattacaatgcttgtaaaggaataaaaactgagcaagtgttagacgctgtaaatatgtcgcgttctaatttagaacagcgttttaagaaagaagtagggaagactatccatgccgtgatttatgaagagaagctgaaaagggcgaaaaacttattagccacaacaacattatcaatacaagagatttctttgatgtgtggctatccgtcgttacaatatttttactctatttttaaaaaagagtttggcatgacaccaaaggattttagagatgagaattaa

SEQ ID NO: 295931 - DNA, 1170 bp, Proteus mirabilis
atgaatcagaataactttaataaattaatttctaggcaaaatacctacagtgctaaatggtgcaacagtaacgccaatgttattccattatcggttgccgatatggatatttctgcaccagattttattattaataaactcagtcagtttaatttaaccggtatttatggctataccgatcttagttctgattggaataatgttgcggtaaattggtttaaatctcaatatgcttggcatgttacacctgaatctgtagtgttttgccctcgcattatccaagccgtctctctctatattcaaaattttactcaaattggcgataaagtgacaaccttgtcacctgcttatcatcctattagcaatacagtttgtgtaaatcatcgccagctactagaaagcccattaatttatcataatgggtgctatgaaatagattttgacgatttagaagataaatttaaacaatctgtctgttttatattgctctctccccataatccaaccggaacagtatggcaacaagctgatttattaaaaattgctaaacttgctgaaaaatataaagtttttattatttctgatgacgttcatgctgattttgtttttgataatgccatttatcgtcctatatcaactttaagtagctatgtagagcaacactcttttatttgcacatcaccggctaaaaccttcaatttagcggggcttgaaatagccaatattgtgattgctaatccagaatatcgtgagaaatttaaacaatgcttaattgccgcaggtattcataatcctggttacttctctgtccctgctttcttacaagcttataccttacaaggtcaacaatggatcaaggagcttaaacattaccttgctgaaaacaggcagtgggtaaaagagcaatgtgcacgttattttcctgattgggttatcactcaaagccatggcacctacatgctatggatcaattatcaaaaaatgcagttaaccgaacaacaattaaagcattggtttgtttcattagccgaagtagaaatgagttggggaagcggttttggtgcggctggggatggttttttccgcattaatattgctacacctcgttcaatattagaaaccgtttttactcggcttattcgtacctcacctcacgccagtttggaataa

SEQ ID NO: 295932 - DNA, 1476 bp, Proteus mirabilis
atgaaaacgcaaacgataaataatccgagaacccctacacttctcgagtcactgtttcctatatttacaatggtggtgctattaggcggaggttacgccgcttttgatttacctcccgaaccactaatggtgttatcaaccgtcgtcgcggcattattagttaaacgattaggctatcgttacgacgaaatcttaacggctatctcacaaaaaatcgccaaaacgatgccggctttgctgatcttaattagcgttggtttattaatcgggacatggatggtgggaggaaccattccactgatgatctactatggattaaagatgatcagtcctgaaatgctatatgttacagcactgctagtgacatcattagtatcagtttgtactggtacttcatggggctcggcgggcactattggcgtcgcttttatgggcgttgctgtcggtatggaggctaatcttgcagcaactgcgggtgccgttgttgctggtgcttactttggtgacaaactctcaccgctatcaggggatactaacctcgctgcaatggcggccagaatagatctttatcaacatatctgtcacctgctttataccacattaccttccttgatcctcacagcgattatcatgactgtttatggtatgaatggcgatttagcaggacaaggagtgcctgaaaaagtcaccttaattaccaatgggttggagaatatttatcacttcaacttgatcctgcttattcctgtattagtcattttatatggttcggtcacgaaaaaaccgactattccagttatgctagcctctgccgctattgcgatgttgaatgcttatcttattcaaggatttggcttacatgatatcgtaaaaagtgccgttgatggctttaatgtctccatgatccaaggtaaagaagtacctgaattattaggtaatttattaaatcgtggtggtatgaactccatgatgagcaccctacttatctgtttctgcgcactctcctttgcggggactctatctttaagcggtgcattagaagtgatagttcatgcactgctaaaaatggtgcattcaacgggatcgatgatcttagcgaccattgcctgtggactgaccatgattggtgttacttgcaatggacaaatctctattcttattcctatcgaaatgttacgtggtgcgtatattgaacgcggtttacaccctaaaaaccttgctcgtactgttgaagattccgccactatttttgagcctatcttaccttggactgctgccggtgcttatatggcgggcacattaggtgttgcaaccctaagttatttaccttgggctgtattgtgctggagtggcatcttctttgccatgttatggggtttcaccggttttggcattgctaaattaacaccagaagagcaggaagaaatgactgctgagcttggatcacattcagaattacaacttgatactaaataa

SEQ ID NO: 295933 - DNA, 1317 bp, Proteus mirabilis
atgtcttactttgataaaattgaacaaattcaatatgaaggtaccaccagcgataaccctctcgcttttcgctactataatccagatgaaattattttagggaaaagaatggaagatcatctgcgatttgctgcctgctattggcataacttctgctggaatggttcggatatgtttggtattggtacgtttgatagaccttggcagacaccgggagaagcactagaacaagcaaagcgtaaagcggatgttgcttttgaatttttccataaactcaatgtacctttttactgttttcatgatgttgatgttatctctgaaggaaatagcattaatgaatatatcaccaatatggcagcaataactgaggtattagcgcaaaaacagcaagaaacgggcgttaaattattatggggaactgcaaattgttttactcatcctcgttacggagctggtgctgcaacaaatcctgatccagaagtatttgcttgggcggcaactcaagtttgtgaagcgatgaaagcaacaaaaacgctgggaggcgaaaactatgtgttatggggaggccgcgaaggttacgaaacattattaaatacagatttacgccaagagcgggaacaaattggtcgttttatgcagatggttgttgagcataaacataaaattggattccaaggtacactgctcatcgagccgaagccacaagagccaactaagcatcaatatgattatgatactgcgacagtttatggtttcttaaaacaatttggcttagaaaaagaagttaaagtgaacatagaagctaaccatgcaactttagcgggtcacagtttccatcatgaaatcgccacagctattgcattaggtattttaggctcagtcgatgctaaccgaggtgatccacaattaggttgggacacagaccaattccccaatagtgtagaagaaaatgcattagttatgtatgaaattctcaaatccggtggttttacgactggtggattaaactttgatgccaaagtacgtcgtcaaagtaatgataaatacgatcttttctatgggcatatatccggaatggacaccatggcaatggcattacgtattgcagcaagaatgatccaagacggtggacttgataaatttattgctcaacgttatgcgggatggagtgctgaacttggccaaaatatcctacaaggcaaattaagtcttgaagaagtggcaaaatatgcacaaagcaataccttagcgccccgcttacaaagcggacgtcaagagatgctagagagtttagtgaatcgttatatttttggttaa

SEQ ID NO: 295934 - DNA, 1455 bp, Proteus mirabilis
atgtatttagggctagacttaggcacatcaagtgttaaagcgatcatcatgaatgagcaaggtgatgtcgttgccagtcattctatacctttaaccctctcacgccctcatcctcaatggtcagagcaagatccacaagcatggtggcaggcaactgatgaagcgataaaacaactgagtcgtactcaacctatggaacagatccaagccattggtctcagtggtcaaatgcatggcgcggtattacttgatgcgcagcaaaatatattacgccctgctattttatggaacgatggtcgcagtgtgaaacaatgtttacgactggcaaagcaataccctcaatttaaagaaattacgggcaatttagttatgcctgggtttacagcgcctaaattgcaatgggtcgcagaaaacgaagcggagatcttttgtcagattgctcatgtgctattaccaaaagattttctacgttggaaaatgagtggtaattttgccagtgatatgtcggatgcggcgggtacactgtggttggatatgcaaaaacgcgattggagtgatgaattattagcggcaacggggctttctcgatgtcaaatgccgacactatttgaaggtaaccagataacgggttacttactgccagaaattgctaaaaaatggcaaatgaaacaagtaccgattatagcgggtggtggtgataatgcagcgggtgcaattggtgtaggagtatatcaaccgggtcaaggaatgctctctttgggcacatccggtgtctattttgttgtcagtgaaaagtttctccaaaacagtgacaatgcggtacatagtttttgccatgcattgccacaaacttggcacttaatgtcggtaatattaagtgcggcttcttgtctagattgggcatgccaattaacggggatcagtgatgttggtgcaatgtttaaagaaatagaacagcatgcacattctgatagttccctactctttttaccttatctttctggtgaacggacaccttataataatgcggatgccaaaggtgtattttgggggttaactcaccaacatcagcgtgcggatttatgtcgagcggtgttagaaggtgtcagttttgcgttgaggcaaggaattgaagtggcggataaggctggacaacacgcagacaatataacgttaattggtggaggggcaagaagtgaatattggcgacaattactagctgatattacaggaaaaaccttggattatcgtcaaggtggtgatgttggtcccgcgctgggagctgctagactggcgcaattagcgataaatccggctcatttatcacaaattattctttctcagccaaaacttgaaacacgtcatgttcccaacttagaaaaacataaggcatatcaagataaatataatgcctttaaaaagctctacacacttattgaaacaatgaaaatataa

SEQ ID NO: 295935 - DNA, 600 bp, Proteus mirabilis
atgactttcgacatttttttatcattagccatattttcatttgttacttcaattacaccaggcccgaataatattatgcttctagcatcaggcattaactttggcttaaagcgtacaatgcctcatgctatcggtgtgtctctcggtttttttgtgatgttattggctgtggggataggcataggagcacttattaaatcatcgcccattatttacaatatattaaaatatctcggagcgctgtatttattgtggttagcttggaaaacggcaattagtcattctgttgagcaaaatagtaataaacaaggctcaccgttaaccttgttagaggctgcattatttcaatggattaatcctaaatcatggatgatggcgatttcagggataacattatatacctcaccacaatatccttatatttcaatgttgttagttgctattattttcacattaattaattttccttgtgttgctatatgggccacttttggtcatagcttacgagagcgattaaaaaatccaaaaatattaaaactatttaattttattatgggtggtttattagcattaagtgctatttctgtattattccaataa

SEQ ID NO: 295936 - DNA, 1413 bp, Proteus mirabilis
atggaagagcaaacagaagttactcagcccgttagagtgaaaaatgccactctacaacgcgggctaaccaatcgtcatatccaattaatcgctattggtggtgctatcggtactggtttatttatgggttctgggaaaaccatttcgctagctgggccatcgattatttttgtttacatgataatcggctttgtcctgttctttgttatgcgagcaatgggagagctattattatcaaatttagaatataaatcatttagcgattttgccggggatttattagggccttgggctggcttttttgttggatggagttattggttttgctgggttatcaccggtatcgctgatattgttgccattacctcctatattagttattgggcgcccaattttcctgaatggggaacgtcttttatttgtgtgctgacactacttattttgaatttagccacagtaaaattatttggggaaatggaattttggttttcgatgatcaaaattaccgctattgtctctttaattattgttggtatcgtattgattagcataaattttcaatctccagccgggcacacggcaactattgaaaatatctggaatgatggcggtatgttccctaaagggatcagcggattttttgctggttttcaaattgctatctttgcctttgtggggattgagctggtaggtacagcagcggctgaaacacgtgatcctgagaaatcattacctaaggcgattaacgctattcctattcgtattattactttttatgttttggcattggcgattattatgtcagtaacgccgtggcgttctattttggcagacaaaagcccgtttgtagaactctttgtcatgattggtattccagccgcagccagtttagttaactttgtggtattaacggcagccgcctcttcagcaaatagtggtatcttctcaaccagtcgtatgctatttggtttatcgaaagagggggaggcaccaaaacagtttagccagctatcaaaacgttcagtacctgccaatggtttactctttacgagtctctgtttatcttgcggtattgtgctaatttattttattccagatgtgatgcgggtatttacgttagtaacaacggtctctgcgttattatttatgtttatttggagtatgatcttatgctgctatttagcatatcgtaagaaacgtcctcaattacatcaacaatctatttataaaatgccattagggatagtgatgtcatggctatgcttagcattttttgtgtttatggtcgtgttattggcatttgaacatgatacccgtcaagcactgatggtaacgcccatttggtttattgctttaggaatagggtatcattttgtgaaaaagcgtaaacaaaaagcacaattaaaaaattaa

SEQ ID NO: 295937 - DNA, 1485 bp, Proteus mirabilis
atggctctaaattcgccaatgctaattacctttacgatctatatattggggatgctttttatcggctatctagcgtatcgatcaacaaaaaattttgatgattatattttagggggccgaaggcttggtagtgtagtaacggcactttctgcgggcgcttctgatatgagtggctggctattaatgggattaccaggcgtggttttttttgcggggatctccgaaagttggatagccattggtttatgtttaggtgcatggcttaactggcgtttagttgcagggcgattacgtttacaaacagaaaaaaacaataatgcactgactctaccagactatttaacttctcgctttgatgacaaaagcaaaatgctacgcattatttctgcgttagttattcttattttcttcactatttattgtgcatcaggtgtcgtcgcaggaggtatgctttttgagtctacctttggcattccttatcatgaagcgatgatttatggtgcactagcaaccattgcatatactttcctaggtggttttttggcggtaagttggacggatacggtacaagccacattaatgattttcgcacttattctgacaccaattattgttattttctcaattggtggaattgacacctctatagagatcattaaagcgaaagatccggcttatcttgatatgtttaaagggcttgattttattgctattgtttcattattagcttggggattaggttattttggacagcctcatattctcgcgcgttttatggctgcagattcaaatcaaactattcgtaaagcgcgccgtattggtatgacttggatgatcctctgtttaggcggaacggtggcggtgggcttctttggtattgcttattttgaagttaatccgaccgttgcaggtccggttatggctaaaaatgagcgtatctttatggaattagcttcgttactttttaacccgtggatagctggtattttgttatctgcgattttagctgcggtaatgagtacgttaagctgccaattattagtctgcgccagtgcattaactgaagatttatataagccttttattcgtaaaaatgccagtcaaaaagagctagtttgggttggtcgtggcatggtgttattagttgcggttatcgctatttatttagcccgtgatccagaaaataaagtacttgatttggtgagtaatgcttgggcaggatttggtgctgcatttggtccggtgatccttatctctgtcacttggaaacgtatgactcgtaatggtgcttttgcgggaatgttaattggtgcattaacagtactggtatggatgcaatataaatggttcggcctttatgaaattattccgggctttattttcgcgtccatagccattgttattgtcagtttaatgggtaagtcaccaacggcagaaaatcaacaacgttttgatgaagcagaagcggaatatcgtaacacttaa

SEQ ID NO: 295938 - DNA, 3969 bp, Proteus mirabilis
atgagtagcacaacaatgggtgttagacttgatgaagaaacccgtaatagattaaaagatgctgcacaaaaattagatagaacatctcattggctaattaaacaagccatcttcaattatcttgaacaaattgaaaatgatcagctcaccctaacccctattacacaggctgagcaagatattgaagaaagcacagatcccctaacggcacattatcaaccgtttttagaatttgcagagcagatccacccacaatcggtgttacgctcggcaattacttctgcttatcgtatacctgaaacacaagcagtgcctatgctactacagcaggcaacactacctgagcatgaggctcaagccacgcataaactggcttactccattgcagaaaaattacgcaaacaaaaacagggtgttggacgctcaggtctggtacaaggcttactgcaagagttttctctctcttcccaagagggggttgccttaatgtgtttagccgaagctttattgcgtattcctgataaagcaacccgtgatgccctgatccgagataaaattagccatggcaattggcgctcgcatttagggcaaagccaatctatgtttgtcaatgccgccacttggggtctactgtttacaggcaaactcgtctctacccataacgaagagaaattatctaattctctaaatcgcattttaactaaaagtggtgaacctttagtgcgtaaaggcgttgatatggcgatgcgtttaatgggggaacaatttgtcaccggtgaaactatctcccaagcgttagccaatgcacgcaaacttgaagaaaaaggctttagatattcctatgatatgctaggagaagcggccctaacggaaaaagatgcgcaagactatttagtctcttatcaacaagccatccatgccattggtaaagcctctaatggacgaggtatttatgaaggaccggggatctccattaaactttcagcattacatccccgttatagtcgagctcaatatgatagagtgatgtcggagctttaccctcgcctactctctttaacgctacaagccaagcaatatgatattggtattaatattgatgcagaagaagcggatagactggaaatatccctcgatttattagaaaaactctgcttcgagcctgaattagcgggttggaatggtataggatttgttattcaagcctatcagaaacgctgccctttagtgattgattatattattgatttagctcgccgcagtcgtcgccgtttaatgatccgtttagtaaaaggggcttattgggatagtgagattaaacgcgcgcaaatggatggactggaagattatcctgtttatacccgtaaagtatataccgatgtctcttaccttgcgtgtgcgaaaaaactgcttgcttcaccgaattatatttatccgcaatttgccacgcataatgcccatactttatcagccatttatcatctagcgggtcaaaattactatcctggtcaatatgaattccaatgcttacacggtatgggtgaacccctctatgcacaagttgtgggtaaaattgctgatggtaaacttggtcgcccttgtcgtatctatgcgccagtaggtactcatgaaaccctactggcttaccttgtgcgtcgattattagaaaatggtgcaaatacctcgtttgtaaatcgtatcgctgacaccaccatctccttagatgaattagttgccgatccggttaaagagatcaataaaattgcgcaagctgaaggacaaatcggactttcacatcctaaaatcccgctcccaatgcagctttatggtgatgaacgcaaaaattcaccggggattgatatgtctaatgagcatcgtttagcctcattatccagtgcattactgacctctgcgatggaaaaaattcacagtcatcctctccttggtggtgagtgtaatagtgcagaagaagtgattgcaccacaatctatactcaatccggcaaatcacaccgatgtcgtcggtacagtacgtgaaacaacggccgccgaagctaattttgctttagatattgcccaagaaaatggtgaaatttggtttgcaaccccacctgcggaaagagcggcgtttttagtccgcacagcagaactgatggaacagcaaatgggtccattaatgggtgtcttagtcagagaagcgggcaaaacctatagtaatgctattgcagaagtgcgtgaggcgattgattttctttattattactcagcacaagtggcaaatgattttgataataatacccatcgtcctttaggccctgttgtctgtattagtccttggaacttcccattagccatctttagtggacaaattgcagcagcgttagcggcaggtaataccgtactggccaaacctgcggagcaaacccctctgattgcttttaaagccgtagaactattttatcaagcaggagtacctcgcagtgcattacaactcttaccgggtcaaggggagaccattggtgcacaattagtggcagatgaacgcgtgcgtggtgtgatgtttacaggctctaccgaagttgcccacattctgcaaaaaaccttagcgggtagactcgatagcgaaggtcgccctgttcctttaattgctgaaacaggtggcttaaacgccatgattgtcgactcttctgccttaacggaacaagtggtcactgacgttatggcctctgcttatgatagtgcgggtcaacgttgttctgctttgcgtattctctgtattcaagaagaggtggctgatagcacgattgaaatgttaaaaggcgcaatggcacaagccataataggtgatccaagtctcttatcaacagatattggccctgtaattgataaagaggcaaaagcgggtattgaaaaacatattcaaactatgcgcacagcgggttttgacgtttatcaagcaacctataatcaacttactaaacaggctgaaaataacagtacttttgttcctcctaccttaattgagttagataaaattagctcacttaaaaaagagatttttggccctgtactgcacgtcgtacgttattcaagccaagatctgcctgctttattagctgaaattaatgcgactggatatggattaacaatgggggttcatacccgtattgatgaaactatcgcttatgtagcgactcatgcaaaagtaggaaatttatatgtaaaccgcaatatggtaggtgctgttgtcggggtacaaccttttggtggtgaaggtttatcgggtacggggccaaaagctggaggccctgcttatctgtatcgtttattatcaaaacgtcctgaaaatgccataacacaaaccttagcacgtcaagatgaaacattaccccttgatgcctctatgcgacaaaagttattacaaacctatcatcactatatgacgtggttagcaaataaaacggaacctgcacattatcaggcgctagaagaatacgccaatgcatcacaagccggaacattgcgcgtattgccggggcctactggcgagcgtaatacctatcaattagtcccttgtggcaaggtgctttgtctctcagataatgagcaagatatatttactcagttagcgggagtctttgcatcaggatgccatgctattgtccataatgctgttttctcgcaaaaaacctatcgtgaattgcctgatatgatcagaaaagcaatcactctcacggacaactggcaagatgagtcactaagcattaatgccgttatttatcatggtgatagtgatcagttaaaagagacttgtcagcaaattgcacaacgtaaaggggctattatttcagtacaaggcttctcacgtggtgagacagcattgttattagagcgtttattgcatgaacgagcattaagcgtcaataccgccgctgccggaggcaatgccagcttaatgacaatcagttaa

SEQ ID NO: 295939 - DNA, 531 bp, Proteus mirabilis
atgtctgtttcaacacaaaagaaacggccgctaagccgttacattaaagactataaacacagccaaactcattgtttgcattgccataaggcgcttgatcggatttctctcgtattcaatcgccaagttatcaataaagaagccatttctgaaatgacagatttaattgatgatgaaacatgggaaaccttgcaaggaaagttttctgcgctgtgccgtttttgtagtgagatttactgtaatagtgaaactgattactttgacattatgtcttttaagcagtatttgttcgaacaaacggagatgagccacagtactgttcgtgagtatgtggttcgtttacgtcgactcgatgaattgctgacttccactaattttcctcgtcaagaatttacgacagagaaaattcagtcagacttgagtaaaaagctcactccctccgcatttagtaactacaacattgccctacgtaagtatgagcaatatcttgattggtgccaagcgccaacctcgatgagtagtggtcactaa

SEQ ID NO: 295940 - DNA, 723 bp, Proteus mirabilis
gtgagtgatttgtataccgccgaaggcgtgatggacaaaaatagcctctgggagcgatatgtccctttggttcgccatgaagcattacgattacaggtcaagttacctgcgagtgttgaattggatgatcttttgcaagcaggggggattggcctactgaatgccgttgagcgttatgactcaatgcaaggtgccgcctttactacttatgctgtgcaacgtattcgaggctctatgttagatgagctacgaagtcgtgattgggcgccccgtagtgtgcgccgtaatgcaagagaagtgacacaatccattcatcagttagagcaggatctaggacgaccaccatcagaacaggaagttgctgatcatttgcagattgagttagcagaataccggcagatcctattggatacaaataacagccagttgttctcttatgacgaatggcatgaaatttacggtgaaagctgtgaaccgtctcaagacgaagatcacgatgacaatcctttacaaatgttattggaaagtgatattcgccaaagagtcatagacgcgatagaattgcttcccgaaagggaaaaaatggttcttaccctgtattatcaggaagaacttaatttgaaagaaataggcgcagtgcttaatgtcggggaatcccgcgtaagtcagctacacagccaagcaatcaaaaggctgcgagcacgcttaaacccagagaaatag

SEQ ID NO: 295941 - DNA, 639 bp, Proteus mirabilis
gtgattgaattcaatttagataaaattgataacgacacattaggtgttgctagtgataacctgtttgatgctaaaacagagaaaaaaggggttaaagcaacaggtgatgatatcgatgcaaacgctctgggcatttcgggcggtacaaaatacgcgactggtgtttcagtaaaagagtataaagtagatggtaaggtttctgctaataaagttgtcttaaaggatggtagcgacgagtacgtagtaagtaaatcagactttacattaaaatcaggtactactactggtgaaattgagttcactggtagtaaaaccattaaatttaaggcagatgcaggtaaagatgttaaagttttaaatgttaaggatgacgctttagcaactttagataacgcaattagtaaggttgatgaaagccgctctaaattaggtgcgattcaaaaccgtttccaatctactatcaataacttaaataacactgttaataacttatctgcttcacgtagccgtatcttagatgctgactatgcgacagaagtgtccaatatgagtaaaaatcaaatcttgcaacaagcaggtactgctgtactggctcaagcaaaccaagtaccacaaactgttctgtctctgttacgttaa

SEQ ID NO: 295942 - DNA, 1575 bp, Proteus mirabilis
atgcagtttggttcgaagccactgtttgaaaacatttctgttaagtttggtggcggtaatcgctatggtttaatcggtgctaacggcagcggtaaatccacctttatgaaaattctcggtggtgatctcgcgcctactagcggtaacgtattccttgatcctaatgagcgtttgggtaagctaaaacaagatcagtttgcttatgaagagtttaccgtgcttgatacggtaattatggggcacgctgagttatgggaaattaaacaagagcgtgaacgtatttatagcttaccggaaatgagcgaagaagagggtttacgtgttgccgatcttgaagtgaaattcggtgaaatggacggttacaccgttgaatcacgtgccggtgaattattattaaacgttggtattccacttgagcaacataatggcccaatgagtgaagtggcgccaggatggaaactacgtgtgctccttgcacaagccctattcgctgatcctgacatcttattacttgatgaaccgacgaataacttagatattgatacgatccgctggctagaacaaacattaaatgaacgtaatagcactatgatcatcatttcccatgaccgccattttttaaatatggtgtgtactcatatggccgatcttgactatggtggactaacagttcacccaggtaattatgatgagtatatgttagcggcaacacaagcgcgtgaacgtttactcgctgataatgcaaagaaaaaagcacaaattagtgaattacaatcctttgttagccgctttagtgctaatgcatcaaaatctcgtcaagctacttcgcgtgcaaaacaaattgaaaaaattcaattaaccgaagtcaaagcttctagccgacaaaatccctttattcgttttgagcaagagaagaaattattccgtaatgccttagaagtagagaatattgctaaaggttatgaagcaaatgcgcctttatttaaagacgtaaatatgatgctggaagtgggcgaaaaagtggcgattttaggcaccaatggtgtgggtaaatcaaccatgatcaaaacattagtgggtgaattaacgcctgataatggacgcgttaaatggtctgaaaatgccactataggttattatgcacaagatcatgccactgattttgaagttgatatgaccgttttcgattggatgagtttatggatgaagccagaagatgatgaacagtcggtgcgtagtgtattgggtcgccttcttttctcacaagatgatattaaaaaatcagtcaaagtattatctggtggtgaaaaaggcagaatgctgtttggtaaattaatgatgcaaaaaccaaacgttctgattatggatgaacctaccaaccacttagatatggaatctattgagtcactgaatatggcgttagaactctatcaagggacgttaatttttgtttctcacgatcgtgaatttgtcagctcattggctaaccgaattattgaaattacgcctgaaaaagtgactaatttccaaggcacttatgatgagttcttggctaagaaagggattgatggttag

SEQ ID NO: 295943 - DNA, 456 bp, Proteus mirabilis
atgccgatatgggttgatgctgatgcctgtcctaaagttattaaagagatactttatcgggcagctgatagagaaaaagtggtgatcacttttgtggcaaatcagcgattaagtatacccgcatcgccttatttacgcacattgcaggtttctgcaggttttgatgtggctgataatgaaattgtacaacgtgcaaaccaagatgatttggtgatcactgccgatattcctttagcggctgaagtgatcgaaaaaggggctattgcactcaatcctcgaggtgaacgttatacagagtcaacaatccgcgaacgattaaatattcgtgattttatggatacgatgagagcaagtggcattcaaacaggaggaccagcaagtttatcacagcgcgaccggcaactttttgctaatgagttggataaatggttactacagcaaaaacgtaaaaaataa

SEQ ID NO: 295944 - DNA, 1401 bp, Proteus mirabilis
atgtcatttactaaatcaatgcttgcactcgctgttatggcggtttcttttactagtcacgcagccaaacaggctgatttaatgattgtcgatggcacagtgttaacaatggacgcacaaaatcaggttatcgaacaaggaacggttgttgtaaaagaaaataaaattatcgccgttggggggcctgagttaacacaagaataccaagccaacaaagtgttagatgtggatggtgatatcgtgatgccaggattaattaatacccacacacatgcatcaatgacggtttttcgctctttagccgatgacgtgccagaccgattacatcgttatattttccctttagaaaataaaatggtgtctcgcgatatggttcgcgtgggagcaaacctcgccaatgttgaaatggtaaaagggggagtaactacctatgttgatatgtattattttgaagatgaagtcgctaaaacggttgataagatgggaaatagagccatcttaggtgaatcagtgattaattttccggtggctgatgcacaaacccctgaagaaggcattcaatatgctgtcaattttattaatgaatataaagatcacccgcgcattattcctgcctttgcacctcatgcaccttataccaataccacagagaacctgcaaaaaattgctaaactctcggtagaacttgatgcccccgtgatgatccatttagcagaaaccgatagagagaaagaagaaattgcaaaacgaaccgatggtaaaagcccagttcaatatatggcagatattggcgctttaaataataaaatcattgccgctcatgcgattatggttgatgagcaagatattgatttattaaagaaatatgatgtaggtgtggctcataatattagtgctaataccaaatcagccaaaggtgtttcgcccgttgttgccatgctagagaaaggtgttcgtgttggtttagggactgatgggccaatgtcgagcaatacactcacaacgatgaatgagttaaatttagtaggcaaaattcataaattagagaataaagatcgcgccgcaatgccaccattaaccgttgttgaaatggcaacaataggctcagccaaggcattacatatggaagataaattaggctctttagaatcgggaaaacttgctgatattattgttgttgatactaaagcacctaatatggtgcctatgtatagcccatatgcagcattagtttatggtgcgaatggaagtaatgttcgtcataccattgtagatggtaaaattttgatggaagatcgccaactgttaaccgtagatgaacaagcgattatcagtgaagctcaaaactttgcgaataaagtacgccaaaccgttgttgatagtggtgaagtcgttaaatag

SEQ ID NO: 295945 - DNA, 972 bp, Proteus mirabilis
atgtctaacaaaccattacatagaattgatttgaatttgttagtcatatttcaaattcttttacaggagcgcagtgtcaccttggccgctaagtggttatccatttctccttctgctgtgagtaaagcattagccaaattaaggatatggtttgatgatcctctttttatccgtagtccacaagggttgatcccaacaccattatcgttaagtattgaagattctttatctgattttattaatattagccaccatatagccaataaacgtaatacagaagttcctgttggacttaaatttaatttagttttagaaacaccgttacatcaggtcatgttaccttctttaccacaacaaatattatctcattacccaaaatccacacttcagataaaaaattgggaatataattccctttctaatattattgatggagaagttgatattgggcttgttggacgagaatactattcacgctcaaaagagttactagagctacttcctgatgtgattgattatgaaatattatttgatgatatcccactcgtttatctacacaaaaatcatccgttaatgaaaatgaagtgggatcttaataattttttatctttttctcaggtgagtacagaatatgacaaacaaagtcattgggctttagataatatcttaaaagaaatgaacaaaagtcgtcagatagcaattacttatacttcttttgagcaatctctttttatgatatctcaacctgaccatcaattaattacttgtgcaccaggatattgtcgttattatgtgaaaacacattttcctgatattgtaacattacctatacctctcccccctgtgtttttagaccagcttcatctaccttttgttttgttatggcataagcgtaatagccataatacaaaaattatatggctaagaaatacaataagaaaaagtattaaccaacaaacctcctatatctga

SEQ ID NO: 295946 - DNA, 1185 bp, Proteus mirabilis
atgactaaatatgttatttttagtttttttttagtattgatttatcctcttggtgttgatctatacttaactggattaacagcaattgctagcgatttaaatgcttctgaagtgacattgcaccatgcattttcaatttatttgatgggaatggtgtcatccatgttaattgctggatggtgcagtgacaatttaggtcgtaagcctgttattttatttggtactctgatttttttcttagcgtcattaagtgctgggctttcgataacggaaaaacagttcttgatttcacgattttttcaaggtagtgggtcaggtttttgttacgttgttacttttgcgatattaagagacacattaacagaacaacaacgtgctaaagtactttctatgataaatggtattacttgcattattccggtattagctcctgttctaggctttattattttattatattgtgaatggtcaatgatgttctatcttatgggggcttattccctattggtttttatcttttgttttttggggataaaagagacctaccataaaaaagaaattaaaaataaaaaagtaaatctatctgtaataaaaccaacaacagactcttttttcactcgctattttttaagtcgtttacttatttcatgcttaggaatggccgttattcttacttatgtcaatatttcccctattgtagtgatgcaacaaatgaattattcaacaggagagtattcaatattaatgacatcattagcaatgataagtatgaccatttcttttttaatgccaaaaatattaatgaaataccgctataagcatattttatcagtagggtttatatgttttggaataggtattattttcctttttatagggaaaaagagtgacattcgttggttttttattacctttgcattatgcggctcaggatttgcgttattatttgggattattatgagccaagcactttctccatttagccaacgagccggcgttgcgagctctgtgctgggtatttcacaattaagtttttcttcactttatatttgggtaatggggtggattgaagtatcctcaataaatatgttggtggttattttatttatcagttgtattgtaggtactctttttctatgctttcctcggttcacagaacaaaaaaaggttaaatataatgtctaa

SEQ ID NO: 295947 - DNA, 1053 bp, Proteus mirabilis
atgaaaaacatagacaatcactatattgaaaataaaataagacaattacttaatcccattttaaatgatgagcctggagccatcattatggcccgttttgataatggattaatatatcaagctgaaaaagggctagcagatattagccaaaaacaaaaaattgatgaaaacagcatatttaatttagcatcagtatctaaacagtttacggctttttctatatttctcttagctcaagaaggtaaattatcgcttgatgaatcagtacttacctatttaccagaattaggagattatgctaaggaaattagtctttatgaattgatatatcataccagtgggttaatcgactatatggagctagcattcgagcgcggtataacttatcaaatgccgttgactcctgctgaaagtttcgctgatgttgtaagacaaacaaaaacgtattacccgattgggcaaaaatttgaatataacaatactggatactttttactgtctcaaatcattgaacgagttagccaaaaacctttttctgtttttgccgaagagaaaatttttacaccattaaaaatgaacaatacttttattgtcgaagaatatcccacaataaaccccattgtttctggttatgccaaagataagcaaggtaattatcaattgtcagaaagtccttggactcaaactggtgatggtgcaatacattcgagtgcaagtgatttgatgaaatggggtgaaaactttcgtacagctaaagtcggtggctcagaagttatcagaaaaatgacgcaggccttttctcccttaacacgagaaggccaattagttattgattatgaagcttatggttttggattatttattaataatacattaggtgaattaagctttgagcatggaggtagctggatgggaaccgcaacctattttatgcgtttgcctcatttaaggcttactatcgccgttttatctaatcgtgaagaatataatgctgatgtaatagcaattgaagttgctaaaattttaatacaagcatgcaagaaaataggataa

SEQ ID NO: 295948 - DNA, 1125 bp, Proteus mirabilis
gtgctattaggtaattttaagagtatagtagacaatctttctgcctgtttagatattatagtttttattatggaatcaacgctttctgctcaaaatatacgccaactccttgctaaggaaacaccaattattgatgttcgtgcgccaatagaattcaatcaaggagcgatgcccaacgcaataaatctacctttaatgaataatgaagagcgtgcggctgtagggacttgctacaaacaacatggctctcaaaaagcggtagagttggggcatcaattagttaaaggcgaggcttgcgagcgttttccttccggatttatttgctgtgctcgtggcggtatgcgttcacacattgttcaaaaatggttagctgaaataggcatcgattatcctttaattgaaggtggatataaagcgttaagacaagcgacgatcgaaatgaccaatgagctagtacaacgccctattatcttaattggtggttgtacaggtaatggtaaaacaaccttagtacgctctttaccagagggaattgatttagaaggattcgctcatcatcgaggctcctcatttggtcgcactattgaggctcagtttgctcaagcgactttcgaaaactaccttgctgtcgatatgttaaaaaaatccccttatcattcgcgctgggtactcgaagacgaaggccgtgctataggtgctaatggtttaccggaaagtttgcgtatacaaatggcaacagcccatttggttgtggtggatgatccatttgagcggcgtatggcaagactcaaagaagaatattttgatcgtatgactcatgactttattgaagcgtatggtgaagaaaaaggttggcaagaatacagtgattatttgcatcatggattgtatgctattcgacgtcgattaggtgctcaaagagccgcggagttaactcaattacttgataatgctttagccgcacaaaaaataagtgcgaatacagaagtgcatttttcatggttatcgcctttactaaaagaatattacgatcctatgtatcgttaccagttaagtaaaaaacaagataaaattatctatacgggtagctatgaagaagttgaacaatggtttgctaaccattaa

SEQ ID NO: 295949 - DNA, 282 bp, Proteus mirabilis
ttgaacttaataaaaaaacatcatcgaattatcagcttaactgtgatgactgtattgttgacgggctgttcacaagggcattctccttttattcctatgctaggtgcttattttccctattggatgttatgtacatttattggcctattaggtgctttttgtctacgggttttacttatctactggggaattgatgataaattgccagtacctttgttattttattttgcgattatgttatcaatttctttaactatctccttactttattttacttattaa

SEQ ID NO: 295950 - DNA, 1059 bp, Proteus mirabilis
  misc_feature (619)..(628): n is a, c, g, or t
atggataaaaaaatcaaaaaaagcctagcatgcgtgatcaccattattgtttttttgataacgctcattttattatggcaaagtattcatatatcggcattaaatcctcttagtgaagatgccatcattgatgcaaataaaattaatatctcagcctcggtgcctggacgcattgctgctgtttatgtcaaagaaaatagtaaagtcaaaaaaggcgatttactgtttacacttgatcccacaatgtacgcactcagggtagagcaagcaaaagagcaactacagattgcacaagcgacattaagcaataagcaacgtattattattgcggaaacatccaattcagaagtggcacaagagcaaataaaacgtgcgcaggtcaatttatcattagccacacaatcattaaatcgattagaacctttattagcaaaaggctttgtcacagcacaacaagtcgatgatgctcggacgttaaaacatgatgctgaagtgacattaaaacaagcacagaaacagaatgtggcatctgaagcacttattaataataccgattcagaagaagcattagtcaagtcattaaaaacatcgcttgccatggcagagtgggagttaagtnnnnnnnnnnagttaagtaatactgaggtaagggcgccaagtaatggatatatcgccggggtcgttttatctcccggtgaatttattttgtcagggcaatctgtttttaccttaattgactctgatacttggtttgcttcagcctattttaaagagacagatttaaataatataaaaattggtagctgtgtggtgatttactccatgattgataatcaacaccccattaaaggtaaagttgaaggaattagtcggggagtcatgtcgaccgatctgattaatattccaagagacttaccttatgtacctaaatcattaaattgggttcgggttgagcagcgttttcctgtcaaagtcattattactgaaccaccagaagcactcatgcgcatcggtgccactgctactgtaaatattgtacctaacgatgatgactgttaa

SEQ ID NO: 295951 - DNA, 555 bp, Proteus mirabilis
atgaaactctcaacatcatctttggcaagacaaaatggccttttccaagagatctctactgaggtattacctctctctatggcctccgatgcaattacaacaacaatgcccgataatagacaaggcatggtaagtgaactgctttaccaaaatcccttgatgattaaccacatcttactacctctgttaaaacagtatagccatgaatcacgttggttactgtggttaagtccacaacaaaaattaaatcgtagttggttaaaagaaaccggcttacccctgaataaaatcattcaactcaatcatgttgattcaattaatactgtggaattaatggagaaagcgctactaagtggaaactacagtgtagtattgggttggttaccagaaatatcgtcagaagagatgaaaagattagaatatgctgccagcatcggtaaagcgttaggttttatcatgcgacaacaaaacagtaatcatatccaaatagaaaacaataattcctctaaacgacatttaaactcgataaaaattcattcaaatcactaccattag

SEQ ID NO: 295952 - DNA, 615 bp, Proteus mirabilis
atgtcaattttacctgagcaaaggaaggctcatttattatcgcgcgtagcggaatatggaaagttaagtaagaagtctcaattcggcggttatagcttaatggttgatgaggttatctttgcgattactgctgataatgaattttatttaaaagggagtggttttgctgaaacactctataaagcaaacaacatggatgcatacgtctatctaaaaaaaggtatccccattacattgcgctattatcgtattacgcaagcaatatggcgtaatagcgctaagctcaatcaatatatcgattttgcatatcactatagtactcaggagtttttagggcagcaaaagcagcctcgtcgtatcaaagatttacccaatttgggcatagcattagagaaaaagctgaatcaagttgggattaaccgtatcgaggaattacgtacgatcggtgcgaaggcatgttatttaaaactgattgcgcaacctaagcaaggaaatagcgacttattgcttgcgttagcaggtgctattgttggctgtcatcggtctgtgttacctaatcaattaaaaatggaattgttaaattggtataaagagttatccgttaaatcctattaa

SEQ ID NO: 295953 - DNA, 2175 bp, Proteus mirabilis
gtgttcaatttgtttaatggcgcccgccgatttatctataatagccactttttatattatattcgcataataatcgcacttacgggaacgactttatttccatgggctttaggacaagaaccaaaatatactatacctcttacattaggtgttgtcgcagccgcattaactgacttagatgataggcttgtgggccgcttaagaaaccttgtgatcaccttatgttgtttcttattagcatcaacatctatcggattactctacccttaccctattttattcttttgtggtcttgctatctccacttgggggtttattttattaggcgccttgggtcagcgttatgctaccatcgcctttggtgcgctattaatcgctatttataccatgttaggtatgccgattttcccagaatggcatgaacaacctatttggctccttttaggcgcaatttggtataatttgcttaccttaattggtcacctacttttccctattcgtcccgttcaagatagccttacgcgttattatcagcagctttccgcttatctagaagccaaggccgcattatttgatcccgatattgaaggtgatcaacagcaattactgtataacttggcattggctaataatcagttaattgaggcaatgagccaaactaaactaacattactaagccgtttaaaaggtgataggggccagcgtagcagtcgtttcacattgcattattactttgtggctcaagatattcatgaacgggccagctcttctcatattcaatatcaattactgagtgatagattacgccacagtgatgtccttttccgctttcagcgcttactgtcaatgcaagcaagagcctgcgaacaagtcgctcaatctattctttggcataaaaagtaccaacataatcctcattttgaacgtgcaatcactcatttagaaaatgcacttaataatgtaaaaaacagtacttctgatccacaaattattgcgccactctataatttattacaaaacttacagggcatcgatgctttattaaaaagtattagtacagagcaatatcaaatctctcatgaccaaaaagaagaaactcagttatctgatgaagggcttactgggtggcgagatatcgtgctaagaataaagggtcacttaacaccaaaatcagccctatttagacatgcggtacgaatgtcacttgtcttatgtataggttatgtgatcatccagttttttgatttgcatcgaggatactggattttattaaccagtttgtttgtctgtcagcctaactataatgcgacacgtagacgattaacattacgggtcagtggcactattattggtattttaattggtttccctattctctattttgtgccttccatcgaaggtcaattagtgcttattgttgtgacaggtacgctcttttttgctttccgaaccgtacaatacgctcatgccactttgtttattaccctactcgttttattgagttttaatttattaggtgaaggctatgatgtcgcactaccgcggatcattgatacgttaattggatgtgccattgcctggttcgcagtcagttttatttggccggattggaagttccgtcagttgccattgctcatccaaaaaaccatgaccaataactgctactatcttgatgcgatcctcattcagtattatcaaggaagagataatagcgttaattatcgtattgcacgccgtaatgcacatagcagtgatggtgagttagcatctttaatttctaatatgtcatcagagcctaaaagctttcaaacctctcaagaagaagcatttaagttactgtgtttaaatcatactttactgagctatatttcagcgttaggtgttcatcgttgcaaaattgaagatgaagcggtactcaccctgcttaatgatactgtctgttatattgattcagcgttgagacgtaaaaaaccacaagataatgattttatacaatctcacgatcaacttatcgcacgtgttaatgcacaaccaagttcagataacgcccgtattcaattagtgttaacgcaaatacgcttgttactggatttattgccacaaattgtcaattgcattgagctaattgagcaaacagaatggcaaaacgataaagataaattagctacagcttga

SEQ ID NO: 295954 - DNA, 2052 bp, Proteus mirabilis
atggaactgaaatcaaccccaatgggacaacgtttagctcagcatccttataacagggtaaaattgttaaatgcgggtattgaggtcagtggtgaaaagcatcaatatttaattccttttaatgaattgatcgacattttttgtaaaaaaggcattgtgtggggagagttagagtttttactgcccgacaataaagtggttcgtttgcatggaacggactgggaagaaacgcaacaattttaccgctatctttatcaaacttggcaaatatggagccaagagatgagtgagataacggcgcaagtacttgaaaagcaactctcttctatccaagatataattcaaagcgataaatggataaaacaaaaccagttagccgctattcaacagtctatccaagaaagtttttctgctattcctcttcctctggaacgacttgctcaatttgataactgtaaggtgcattatcaacgctgtttacagtggttacagcaaggtaaggcattaattgcgcaagaaaatgagcaatggatcacccgtatattgacagagcatgcggagttttttactaccattgaaacatcgcctttaaatgaatcgcaatgtaaagccgttatcaacggtgaagataatatattggtattagcgggtgctggtagtggtaaaacgtcggtactagtggcaagagcagggtggttgttacgtcgtaaactagcaacctctgaacaaattctactattggcttttggacgtaaagccgctgaagagatgaaccaacgtttatctgagcgcttaaacgctgatattacggcgaaaacctttcatgcattggcattatttattatccaacagtcaactaaaaaacaacccaagatcagcgaattagaaatcaatagtgaaaagagaagaacactattgttaacgcagtggcgtgagcagtgtcagcagaaaaaagcacaagcgaaaggctggcgtgagtggttatctgaagagctagcatgggaaatccctgatggggagttttggcatgataaaaaattagaaaatcaagttgccgtaagattagagcggtggatcagtttattaagaatgcaaggtggtagccaaaaaacaatgattgattctgtgcctgcagaatatacggatgcatttaaaaagtatttaaaactattagcaccactgttaaaggcatggaaaaccgcattaaaagaagagaatgccattgatttttcagggctattacatcaagccattaatctgatagaaaaagggcgtttcgtcagtccttggaaacatattctggtggatgaattccaagatatttcaccactaagagcagcactattaaatgcgttaaaacaacaaaatacacaaacttcattatttgcagttggtgatgactggcaagctatttatcgctttagtggggctgaattattactaacaacagcgtttcatcaatcttttggtgatggtgctgagtgtgcattagataccacttatcgttttaattcgactataggtgacgttgccaatacatttattcaacaaaatcctaatcaattagctaagcctttaaatagcttaacaaaaggtaataaaaaagccgttgtattattgccggatgatcaattagaaagtttattaaataaaatgagtggttatgtcagtgacgatgaaacgatccttttattagcgcgttatcattacttacaacctgatttattgaaaaaggcgaaaacgcgctggcccaaattaaaattacagtttatgacttttcatgcttcaaaaggtcaacaagctgattatgtgattatattaggtttacaatcgggtaaagacggatttccagctccggcaagagagtcgattatagaaaccgctttattaccccctgttgaagactatcctgatgctgaagagcgccgattaatgtatgtggcattaacaagagcaaaaaaacaagtatggttattatttaataaacaacaaccatcttgttttgtgtcagaattaaaatctcaaggtgtccctacgcaaaaaaaaccataa

SEQ ID NO: 295955 - DNA, 459 bp, Proteus mirabilis
atggaacaaattgaccgcacactcgccacagaaaaaaatattgcgttagttgcacatgatcactgtaaaagctcattgcttgaatgggttaaaaacaacagtgaacagctttctcaccataagttatttgccacaggaacaacaggaaatctggttaatcaccatacaggattagaggtcactcagatgttaagtggccccatgggaggtgatcaacaaattggtgctatgatcgcagaaaagaaaattgatattcttattttcttttgggatccactcaatgccgttcctcatgatccagatgtgaaagcgctgttacgcctagcaacagtctggaatattcccgtagcaaccaatcgtgcgacggctaattttcttatttcgtcccctcttttttcacaagagtcaaaaattaaaattcccgactatgaaggttatttaaaagaacgtttaaaataa

SEQ ID NO: 295956 - DNA, 414 bp, Proteus mirabilis
atggttgattcagagatttatgacattctaagaagtgtcaaaacaattgcactggttggtgcaagtcataaagaagatcgccctagttataaagtcatgaaattcttattagagcaaggctatgaggtgatccccgttaatccgggtatggcaggggaaacaatattaggccagcaatgttatggtcatttgcaagatattcctgtggcgattgatatggtagatgtatttcgtcaatcatcagtagcgctcgagattgccaaagaagcgattaaaattaatgctaaagttttatggttacagataggtgtgatcaatgaagaagcaaaagcattagctgaacaatcggggttgcgggtggttatggatcgctgtcctaaaaaagagatagaagcccacggattgccttggtaa

SEQ ID NO: 295957 - DNA, 321 bp, Proteus mirabilis
atgatgatcgccagcaaatttggaataggccagcaggttagacataaactactcggttatttaggtgtagttgttgatgtggatgctgaatattcccttgatcaacctaacgaggatgatattgcatctaatatgaccttgcgatcagcgccttggtatcatgttgtcatggaagatgatgaaggacaaccggttcatacctatttagctgaagctcaaataacttatgaactctcagatgagcatttagataatgactcaatggatgagttgtcacaatcaatccgcaaccaattacaggccccgcgattaagaaactaa

SEQ ID NO: 295958 - DNA, 285 bp, Proteus mirabilis
atgaaggttggtagagaatatattattcaaggtcgtgtacaaggtgtcggtttccgctttcatacttatcaatggatgaaaaagcagcctattacgggttatgtgtggaatcgtgatgatggcagtgtggggatcagagcttttgctgaagagcaggtactgagaaaaatagaagattggttggctgctggaggaccaatagggagtaagattgtattctggtcggcaacaccatgccaatatgaagaaatggcagacttttcaatccgccattatgcatcttag

SEQ ID NO: 295959 - DNA, 330 bp, Proteus mirabilis
atgtttgtatttaacggacaacaaatcgagacagatagtcacggttatttaaaaaacagcaatgaatggaccgaagagatggtgccaatattagctgaacttgaagaaattgaactcacagagcaacattgggaaattatccgttttgtgcgccagttttatttagaatttaatacctcaccggcgatccgaatgttagtaaaagcattagcacaaaaatatggcgatgaaaaaggcaatagccgttatctatatcgcttattccctaaaggtccagctaaacaggcaacgaagctcgcgggcttacctaaacctgtcaaatgtatttaa

SEQ ID NO: 295960 - DNA, 531 bp, Proteus mirabilis
atgatgatttattgttatgatgacaaaataagtgaaattaaaatagaacaactcaccaaattgttatatagatgtgtccttggtggggcaagtgttgggtatactgacgcagaaactcaagtagatgatatgagaaattattggcttagtgttaatcactcattatcaacaaatacgtttaaattaattactgcagtgattgacggacaaatagtcggtgttgttggtcttgaattatgtactaaaccaaatggcaaacatcgtggggagatttgcaaactattagtatcccctgatcataggcataaaggaatagcacagcaattgatgcaaaaggctgaacaaatagcatgggagagagggataacacttttaactttagataccattacaaaaggtatgacggtgagtctatatcgctttcttggttggcaagttagtggtgaaattcctgagtttgctcaagcagttgatggtaagtttgaggctacaaccattatgtttaaacttaagcctgagagtaatagttaa

SEQ ID NO: 295961 - DNA, 123 bp, Proteus mirabilis
atgtttgtggttggtaaattaaaaattaatcaacaaattaaagcagtcactatcacactctataatggaaatagagttaataagctactaaatgatgaatacaatatcttattcatcatttag

SEQ ID NO: 295962 - DNA, 345 bp, Proteus mirabilis
atgactatgaaaaatgataataaaggttatttattgacacttatttgtgataacagtaatgataaagtagagaaaatcttccttaatcctaagatactttatattcctgatgttgccgctaaagaaattttgttattaactaacgaattaaagggcaaaatagatctctcagcccaagcgctgactttaacgctcaccaataaaaataatggtgtttcagtggataaagaatgcgagataaaagatttacttgatcctgatatggcgagtctaatggttaaagatttaatcaatatcgtccgtggttatgatatggatgaagaagccaatgtttgtggttggtaa

SEQ ID NO: 295963 - DNA, 333 bp, Proteus mirabilis
atgaaacgtatcattattcccacaaactatattcatatacgaacaacgcctttttggacaagggagacagcccctaaatcaatctgggagagacatttagacaaaggcacccagcaaggggtataccctagattatccgtgatgcaaggcactattatttattatgcctatgccgatcaatatagcccaaaacctaccgaaaccttagtgattaaggagggtgagtttggtgtatttccaccagaaacttggcacagaattgaagcacaaactgaagacaccgtgtttaatatcgacttttatgttgaccccaaaatacttgctgaaggttaa

SEQ ID NO: 295964 - DNA, 1011 bp, Proteus mirabilis
gtgattgaagcagatcgcctgatttcagcagatatacaacaacctgaagaagaaattatcgatagggctattcgtcctaagctgcttgctgaatatgtgggacaaccacaagttcgtgaacagatggaaatctttattcaggcggctaaactacgtcatgatgccttagatcacttacttatctttggtccgccggggcttggtaaaaccacgctggctaatattattgccaatgagatgggcgttaatttacgtacaacctcagggcctgtattagagaaagctggcgatcttgctgctatgctaaccaatcttgagcctcatgatgtactgtttattgatgaaattcatcgactctcgcccgttgttgaagaaatactctatccggcaatggaagattatcaacttgatattatgattggtgaagggccggcagcacgctccattaaaatcgacttaccgccatttactttagttggggcgacgacccgagcgggatcgttaacctctccattacgtgatcgttttggtattgtacaacgccttgaattctataatgtcgatgacttacagcatattgttgcacgtagtgccagctttatggggttagaaataaccgcagaaggggcgcgacaaattgctatgcgttcacgaggtacaccgcgtattactaaccgcttattacgccgagtaagagactttgctcaagtcaaaggtaatggtgaaattgatgaagatatcgcgtctaaagcactcgatatgcttaatgttgatgctgccggttttgactatcttgaccgaaaactactctttgccattattgataaatttatgggtggccccgtagggcttgataatcttgcggcagctattggtgaagagcgtgaaactatcgaagatgtattagagccttatttaattcagcaaggttttattcaacgcaccccccgtggtcgggtagccacaaatcatgcttatcgtcactttaatcgcattatggaagcaccgtga

SEQ ID NO: 295965 - DNA, 624 bp, Proteus mirabilis
gtgataggacgtattagaggcgttattcttgaaaaacagccaccagtggtgctgatcgaagcgggtaatggggtgggttatgaaataaatatgcctatgacctgtttttatgagttacctgatattggtcaagaggcgattatctacacacaatttattgttcgtgaagatgcgcaattactatatggttttaatcaaaaacaagaacgggcattgtttcgtgaattgataaaagtcaatggtgtagggcctaagctagcactggctattttatcaggaatgtctgcacgccaatttgtcaccgcaattgaaaatgaatccatctcctcattagttaaattaccgggagtcggtaaaaaaaccgcagaacgattagtggttgaaatgaaagatcgcttcaaagggcttaatggcgatctatttgaacaaaacggcgatattgagctacctgccaatgcatcatcgaaagcgccatctgctgcagatattgaagcagaagcttccgctgccttaattgccttaggttataaaccacaagaagctgccaagatgattagtcgggtagcaacggcgggtgctgatagtgaaacacttatcaaagaagcattacgcgcagcgatttag

SEQ ID NO: 295966 - DNA, 522 bp, Proteus mirabilis
atggctattattttaggtattgaccctggctctcgtgtcacgggatatggcgtaattcgccaacaagggcgacaacttatctatttaggaagcggatgtattcgtacacaggttcctgatctaccaagccgactgaaacgcatttatgcgggagtcagtgaaatcatcactcaattttcacccgatgtattttctgttgaacaagtctttatggcaaaaaatgcagactcggcattaaaattaggccaagcaagaggtgtggcgattttagcggcagtcaataatgatcttcccgtatttgaatatgcggcacgtcaagtaaaacagagtgtggtaggaacagggggagccgataaaagccaagtacaacatatggtacgctcaatcttaaaactatctgcagcaccacaggcagatgctgccgatgcgctagcgattgcgattacacactgccactttaatcaaaacttattgcgtgtaggtgatccgcgtcttgttttaactcgaggaaggttaagatag

SEQ ID NO: 295967 - DNA, 756 bp, Proteus mirabilis
atggcaggtcatagtaaatgggccaatactaaacaccgtaaagcagcgcaagatgcgaaacgcggtaagattttcactaaaattattcgtgaattagttacagcagcacgtttaggtggtggtgatcctgcaactaacccacgtctacgtgcggcagttgataaagcattatctaacaacatgactcgtgacacactaaaccgcgcgattgctcgcggtgcgggaaatgatgaaaacgataatatggaaaccatcatttatgaaggctacggccctggtggtactgctgttatggttgaatgtttaagtgataatcgtaaccgtactgtttccgatgttcgccatgccttcaccaaaacaggtggtaacttaggaacggacggttcggtatcttatctctttaccaaaaaaggtgttatctcttatgcaccgggtgttgatgaagatgccgtcatggaagccgcactagaagcgggtgcagaagacgttgaaacttatgatgatggtgctattgacgtttacacaacccctgaagctttcggtgaagtaaaagatgccatggatgctgcgggttttgtcgctgaatcagcggaagtttccatgatcccatcaacaaaagcagagcttgatattgataccgcaccaaaattaatgcgccttatcgatatgctagaagatagcgacgatgtgcaagaagtgtatcacaacggtgatatctctgatgaagttgcaaaacaactggaagatattctgtaa

SEQ ID NO: 295968 - DNA, 435 bp, Proteus mirabilis
atgaaatataagcacccagtatgtgttttagttgttatctatgccaaacagactaagcgggtgcttatgctgaagcgtcgagatgatcctgatttctggcaatctgtgacagggagccttgaagagggcgaaacaccttatcaggccgcattacgagaagtgcaggaagaagtaggaattgatatcataaaagaaaatcttgagctggtggattgccatcgttcaattatttttgagatattcgcacactttcgccatcgttatgcgcctaatgtgacacattgtcaggaacattggtttatgttagcacttccctctgaacgggaaattgaactgactgagcatacgcaataccaatggttagatgcgccactggcggcaaaattaactaagtcagccagcaatcagcaagcgattgaagaatttgttatttaa

SEQ ID NO: 295969 - DNA, 1785 bp, Proteus mirabilis
atgcgtactaattattgtgggcagttgaatagcgcccatgtgggccaaaaagtgactctttgtggttgggttaaccgccgccgtgacttaggtggacttatctttattgatatgcgagatcgtgaaggtatcgttcaggtcttttttgacccagagcagaaagaggcattttcacaggcttcagaactgcgtaatgaattttgtattcaagtcacaggaacagtacgtgctcgccctgatagccaagttaataaaaatatggcaacaggtgaaattgaactagcggcagaatcgctgtctatttttaaccgttctgaagcgctacctttagatagcaaccaaacgaatacagaagagcgtcgtttaacttatcgttatttagatttacgtcgccctgaaatgtcacaacgcctaaaaactcgtgcgaaaatcacaagttttgttcgtcgctttatggatggtgaagggttccttgatgtagaaacgccaatgctaactaaagcaacgccagaaggtgcgcgtgactatttagtaccaagtcgtgttcataaaggtaaattctacgcattacctcaatcaccacagcttttcaaacagctgttaatgatgtctggttttgatcgctattatcaaatcgtaaaatgtttccgtgatgaagatttacgtgctgatcgccaacctgaatttacccaaatcgatgttgaaacctctttcatgaccgcagaacaagtgcgtgaagtgatggagcgcatgatccacgcattgtggctagatatcttgaatgttgatttaggggcattccctgtgatgacctttgctgaggctatgcgtcgttacggctctgataaaccagacctacgtaacccaatggaactcatcgatatcgctgatttagtgaaaaatgttgagtttagcgtctttgcacaagcggctaatgatgaaaaatgtcgtgttatcgcgttacgtgtaccgggtggtgcatcgttaactcgtaaaaatatcgacgaatatactcaatttgtcagtatttatggtgctaaaggtctagcgtggatgaaagtcaacgaaaaggcaaaaggtatcgaaggggtacaaagccctattgctaaattcctgactaatgatgtggttaacagcatcttagcggcaacaaatgcaacagatggcgacttaattttctttggtgcgggtcgtcaaggtaccatgagtgatgctatgggagcgttgcgcctgaaagtcggtcgtgatctggaattaactgatcttaacgcatggaaaccactgtgggttattgatttcccaatgtttgaagaagatgaagataccggcagcctaagtgcaatgcaccatccatttacttcaccaaaagatctcacaccggcagagctaaccgcacatcctgtaggcgctgtagctaatgcctatgatatggttattaacggttatgaagttggtggtggctcagtgcgtatccatcgtaatgaaatgcaacaagcggtatttagcattttaggtattactccggatgagcaacgtgagaaattcggtttcttattagatgctctgaaatttggtacaccaccgcatgcagggttagcatttggtttagaccgcttagtgatgttattaacaggaacagataatatccgtgatgttattgcgttcccgaaaaccacggcagcggcttgcttaatgaccaatgcaccaagttttgcaaatgaagacgcgttaaaagagctggctattcaagtgacagaaaaagaagttagcacagataacgagtaa

SEQ ID NO: 295970 - DNA, 399 bp, Proteus mirabilis
atggttagctcgctttatatcgtattgggcgcactattattgattaaattgtccctaaatgttgtaaaacttagaacacaatatcgagttgcatacggtgatggtggtttttatgagttacaaaccgctattcgcgtccatggtaatgcagtggaatacatccctatttctatgatcttattacttatcatggaaatgaatggcgcctttgtttggatggtacatatttgtggctccattttaatagccggtcgtcttcttcactcttacgggttgaaacaccgcgagatacgctggcgtcgctctggtatggccgcaacctatttatcaatggtcttaatgatccttgctaatatttacttccttccttggatacaaattttttccttctactattaa

SEQ ID NO: 295971 - DNA, 750 bp, Proteus mirabilis
atgtctaattcaaaatcagcaccacaagacaacttatttgcgacacctattgctaatcttggtgactggcgctttgatgaaaaagtcgctgaagtgtttcctgatatgatcaaacgctcagtgcccggttactccaatattatttctatgataggcatgttagcgggtcgttttgtcacccctcacagccaagtttatgacttaggatgttcgttaggtgctgctaccctttccatgcgtcgtaatatcgatgtagcgggatgtaaaattattggtgttgataattcacctgcgatggttgagcgttgtcaacgtcatattgatgcttataaagcagcaacacccgttgaaattattgaaggcgatatccttgatattgacattaataatgcctcgatggttgtccttaatttcaccttacaatttttagcccctgataatcgccaaagattattaaatcgaatttaccaagggttaaatcctggtggggttttagtgttatcagaaaaattcagttttcaagataaacaaattggcgaattactgtttaatatgcaccacgactttaaacgtgctaatggctacagtgaattagagattagtcaaaaacgtagtatgttagaaaatgtgatgctcactgatcctgttgaaacacataaatcacgcttacatcaagcaggttttcctcatgctgaagtttggttccaatgttttaattttggctctctgttagccattaaaggcgaataa

SEQ ID NO: 295972 - DNA, 1563 bp, Proteus mirabilis
atgacgatcgcctgtcaattttctcagcttaatattgaattcaatcaagaagcgcttttcccaccgctgactcattcactggcttgccaaagaaatgctttaattggtcagaacggtaaaggaaaatcggtgctgttaaaattgttagcacaaaaactattgccttcatcaggccatatcatgtggcgtatgccttttattcatgtcgatcagcttactcgcctaacaggtaacaccattgctgatgctttaggtatagatactttttttcaagcatttaaacgggttgataacggcagtgcttcattagaagattttgagttacttgaagataagtggcatttgcccatgacttggcaaaatttacttcattcagcacaactgccggtttcacttgatacacctattccccacttaagtggtggtgagcaaacgcgtttagcattatgtcaggcttttttacatgacgatcattttctattattagatgaaccagataaccatctagatcatcaaggtcagcaatggctcgttgaacaattaatgcagcataaatcaggtgtattatttattagccataatcgacatttattatcttatgctgaaaatatatttgaactgagtgaaaaaggcttacaagaatatggcggtaattattcgctttatgaaacacaaaaaaatgcgcaaatagcctcaatcgaagctgcaaatgagcgtatcaatagtcaaataaaacaggaaaaacgccaacaacatgtaacattacaaaaagcattacagcgacgtaaacaaggtgaaaagataagaaacagcggctctcaatcactgttacttcttgatatgcaaaccaatcgagctgagaaaaaacagtcatcaatagctaaacgacatcagcgcgttatggatgatatgcagtcacaaaaacaacagttagaacaagagttaactcatattcatcagcaaaaattaatattaaactatcaaggtgatggccaacggttaaatgtatttgccacagagcttgttttaccttttggcaagcaaactccctactccttttccgcttatggtggtgaacattggcatatacaaggtaaaaatggcagcggtaagtcaaccttattaaaatgtttaatgggcaagctatccccgttatccggcgaatatcgtctcaacccaaattattgctatcttgatcaacatttaactttattagataaatcattacccgttgctgaagcgttatatcaataccagccattaatgaccattgagcagtggcgcacaaaactgggtatgttacgtattcgaggtaacaagtctttatttcctttagaaacactcagtggcggtgagcaattaaaagcaacactattagcattaatttatagtcctcaaccccctgccgttttattattagatgaaccagataattatttagatttagactctaaacagttattggaaaatttattatttcaatatcaaggaacattattattaatctctcacgatgaagattttgttaaacaatgtggtataacaaatacattattactctaa

SEQ ID NO: 295973 - DNA, 522 bp, Proteus mirabilis
atggccataattgctacacctgccctagcagaagatactggtacaccagcaccaacagaagttacagttaatggtggtactattaactttgaaggttctgtcgttaatgctgcttgtggtgttgatagtagttcaagtaaccaaactgttcgtttgggtcaattccgtgtcgctgaattcactaaaaaaggtgatgaaacaggacgtattccttttagcattaaattaaataactgcgatattactgtttcatcattagcagcaattacctttaacggtacagcttctgatggtgatgcaactgcattcgcattacaaggcagtggcgcagcaaccaatgtagcgttaaaaattaccgattcaagcagcaaaaatgttgttccaggacaaccttcttcaactcaaaaattaatcgaaggtgaaaaccaattaaattataacgcttctcttatttccactgatgatacagtgaaggcaggtagcgcaaacgttacaactaactttatggtgacttactcttaa

SEQ ID NO: 295974 - DNA, 678 bp, Proteus mirabilis
atgaaaaagatatttgcttttattatttttttattcccacttattgcttattctaatggtgtttcattaggtgctacgcgtattatttataattctaatattaaacaaactaatcttgttgtgactaattcagataaagagaatagttttctaattcaatcatgggtatctgataatcaaggtaataaaaataatgattttattgttacccctcctttatatattcttgacgctaataaagagaatgctttaagaattatgtatacaggtgaacctttacctgcagatcgcgaaagtttattttggatgaatgtcaaagctattccttctttagatgaaaagcttgccaatgaaaatacactacaaattgccatccagagtcggataaagcttttctaccgtcctagtggattgtccgcttatactgaaaaatatgccaatgaagtgactttttcctataaaaatggggagttaattgcccataatccaacaccttatcatattactatggtcaatttagccgtagccgacagtcaacttccttcaagtattatgattaacccattttcacaattaacattaggaaaagttaatcagaatgctaataccatttcattccaaaccattaatgattatggcgcacagactcctgttttaaaaaaagaaatcgttcattaa

SEQ ID NO: 295975 - DNA, 2532 bp, Proteus mirabilis
atggttaataagaatactaataaagatatcgtttattttctctttccaagtgtcattgcattgtcattgacgctgtccttttcatcatatagcgcaaaccgatttaatcctgcatttttggctgactctcctgatgccgtcaccgatttaagttattttgaagcaggcaaccgcattaaacccggtgattatcttcttgatattgtttttaatcatgagtatctgcgtagtgaaaatattcattttattagtcaagataaccatgttattccttgtttaaatcgagattattatcaatcactcgggatcaatattaaactatttgctgattttgagaaattctcggcaaatgaatgtattgatattgaaaaaatcattccagattctgttgttaattatgatattgagaaacaagctttaaatattcaagtcccccaagccgcgttagatctgaaagcgcgcggttatattccaccagaaaaatgggataacggtataacagcaggtattttaaactacacctttagtggcgctaatagctggggaaattctcataataatagctactacttaaatctacgtagtgggatcaatattggtgcttggcgattacgcgattattccacttggaattcgtcaaacgggaaaaaccaatggaaccatatcaatacctatctgcaacgcaatattgtgtcattaagaagccaattacaaattggtgatagttatacctcatcaacactttttgacagtgttaatttccgaggtatttcattagaaagtgacgacactatgttacctgatagccaaagaggatttgcacctgtggtcagaggtattgctaaaggcaatgctaaagtggtgatccgccaaaacggttatgtgatttatcaaacctttgtttctccgggtgcttttgaaatccgtgatctctatccaacgtcaaatagtggcgacctctatgtcaccattgaagaaaatgatggtagcaaacacagctatgttgtgccttattctgctgtacctattttacagcgagaaggccaaaaacagtttgtcatccaagccggtgaaatacgccaaaataaccaacataaaaaacctcgctttatacaaggtcatcttatttatggcttaccctatgacaccactgtctatggcggtgcattagcaacaaaagattaccaatcttatgccctaggagcaggtaaaaatatgggtaccctaggtgccttctctaccgatatcacctttgctcatagccaattgccaaataactcaacatcagatggttattctttacgttttctttatgccaagtcgttaaaccaatttggcacaaactttcaattgctcggttatcgttactctacttcgggtttttacacattagatgagacattaaatacacgtatgtccggttatctgtatgaagataatcaaaaaaaaccgttgagttattttaatttgcataatcgcaagaaagggagcctacaaattaatttatcacaacaactgggggattatggctctatttttatgatgaccaactggcaaaattattggggaactaatgagaaaaatgtcctagtacaaaccggctacaatggcaatattaaagggctctcttataacgtcatttatagttataacagaatgatgaatagtggtcagcgtgaccaaacattgtctgtgggtctttctatcccattacaattgctaatgccgacaagttatcaatccatcaatagcacttatctcacatataattacagccacaataataacggttactcgacacataatgcggggattgctggtacattattggaagacaatacccttaattacagtgttcaacaaggttatagcaatcaaggcggaaactataccggtagtgcggcgttgggttatcaaagtcgctatggcaatttaaatgctagctataactatcatcaagatgctcaacaaattaactatagcctcgctggaggtatgctactccatagtggcggattaaccttaagccaacccttaagcgctaatgccattttagtagatgctcgtaatactgcggatgtaccgattgataatgcgacaggggtttatactgactggcgagggtttgccgttattccctatgctaccgcttatcgacaaaatcgagtggcattagacaccaccgcattacccgataatgttgaaattgagcaaaacattaagcaggtgatcccaacacaaggcgccgtcattaaagttcagtttgatgctaaaaaagggtatcgcttattactgacgctacaacaccaaggtcgcccactcccttttggggcaatagcaactgataaacaaaatcatctgtccggtattgttggcgatgatggcttactctacttatcgggtgtccctgattcaggaaaattagagatccgctgggggcataatgcctctcaatactgtcaagtgaactatcaattacccgcctctcaacttgatgaaccttttgtgaaaatgacacaggagtgccaataa

SEQ ID NO: 295976 - DNA, 519 bp, Proteus mirabilis
atgcacaaattaatgcttattgtagcgttgtcattactgtttaccactaagggatctgcttacgatacattggtacacattaatgccagagtaacaggaaacacatgtacggtagagacaaactcaaaacgtattaccgtaaaattaggccaaatcgccacaaaagattttatttctacgacgataactcaacaacgtacgcctgttatcccttttagtattaaattagtcgattgccaacctgaagccagtgctgtgaaggttagttttaatggtcgtgccgatcctattgataacgccttactcgccattgatgcaacgggtgcgaagggagttgccatttccattatggataactcaggagcttccatcgatattaacgataaaagccagtcttataccttattgcctaaccaagataataccctgcaattttatgctcgctatgtagcgactcaacttcctgttcaagccggatcggcgaatgcaacagcaacctttttactggagtaccaataa

SEQ ID NO: 295977 - DNA, 1074 bp, Proteus mirabilis
atgacacgctctttttctttcttcacattgctggtttctcttctttgtatcccgagccaaatggcatgggctattgcagatccattagtggtaacccctccacctatgaattttgatggtgccgccgatggtactcccgcaggaacgcccatcacgtcaacttggataggtgaaacctctgtccataatggtttcaaatgtgagaagaaatttttgcaaaaatgttgggttgaaaccctctatgctaatgctactggttcaaaaattagcgggatctactattacgaaggtagtaatcgttatcctgtttattcactccccggagttaaaggtatcggctatgcttttggtttaaaagataacaatgatagtgttgcttacgtacctattgatgttgataacggttcgggtgcaacggtgatttatcctgcagtaggctctaccgttaaccataatgtggatcgcgtttcactgaaaggcaaagtcgtctttgtggtgacagataaacatcttgagactggcgtttataacattccatatacagttatcgccaatacatggtctgaatatggtggaggccataaaggcaataatacctctatcgtagcaattaaccccgtcactattactattaaagctcgaggctgtaccgtaaataccaaaaatctcacctatgaattaggtgatatctcaatgcgagatatggcagccattggttcaacatcaaaaagtcaggctaaacccatctctgttacatgcgatagtaatgtgcatttatatgccagcatgaccgatcagtctacctattctaataatacagatatcctcacactgacatcagactctgatgcttctggtattggtattcaatttttctttaatgataatccaactcccgtggtgtatggccctgatatcagtgcgataggacaacctaaccaacgtttactccatataacaacttctaacaacgaaaactacatattaaacctgtcaactcgctatatcacgactgggacactaaaaccgggtaaagcaaacggattagccagtctcactttttcttatcaataa

SEQ ID NO: 295978 - DNA, 318 bp, Proteus mirabilis
atgattgatagcagcaaaacaattaattttcgtataggacaacgaatacgtcacttgcgaaaaaatttaaaatattcggggaaactatttgccaaagagttaggcataagtcagcaacaactttcacggtatgaacgaggaacaaataggatcagtattgagtttgtttatttaattactgaaaagtttgatgttcatatcagctatttcttacaaagtaactatatgattaatattgagcaacaacgaaatatacaagaaaaaaacagcctgctgattgccgaggcttgtataaaaaatggcactaatcgcccttaa

SEQ ID NO: 295979 - DNA, 1044 bp, Proteus mirabilis
atgaaaaagtggtcctctgtacttgctgccagtgtaatggcattaagtattggtacagcatcggctgatgatggtaagacaatctatttctataactggacggaatatgtaccgccaggattgctggaacagtttacaaaagaaactgggattaaggtgatttactccacctatgaatctaacgaaagcatgtataccaaattaaaaacctataaagatggtgcttatgatttggtggttccttcaacttattttatttctaaaatgagtcatgaggggatgctacagaagattgataaatcgaagctcagtaattttgataatcttgacccaagtttattacataaatcattcgatcctcaaaatgactactcaatcccttatatttggggagcgactgcgatagggattaatagtgatgaagttgatgtaagtagcattacttcatgggctgatttatggaaaccggaatataaagatagtttactgttaacggatgatgcacgtgaagtattccaaatggctttattaaaattaggctattcaggtaataccacagatccaaaacagattgaagaagcctataaagagttacaaaagctgatgcctaatgtactggcttttaattcggataatcctgccaatccttatatgcaaggagaagtgaatctagggatgatctggaatggctctgcatttattgcgcgagaagccggtgctcctattgagttggtatggccaaaagagggcggtatcttctggatggacagcttagctattcctgcaaatgcaaaaaatgttgaaggtgcgcataagcttatcgacttcttattacgccctgaagttgctgcaaaagtggctgaaaatatcggctatccaacacctaatttagcggcacaaaaattattgccaaaagctatcacaaaagatagctcactttaccctagtgaagagattatcagtaaaggcgaatggcaaaatgatgtgggtgaagcgacggttttatacgaaagctattaccaaaaactgaaagcgggtcgttaa

SEQ ID NO: 295980 - DNA, 780 bp, Proteus mirabilis
atgataggacggttattgcggggtggatttatgtccatcatttacgcgtatctttatatcccgattatcattctgatagttaactcttttaactcatcacgtttcgggatcaactggaaaggctttaccactgactggtataccattttattaaataatgacagcctgctacaagctgcagggcattcattaacgatggcagtcacctcagcaacctttgcgacgttgattggttcattggctgcggtggcgctttatcgttatcgttttcgtggtaaaaagtttgttggtggtatgctgtttgtggtgatgatgtcgccagatattgtgatggcgatttcattattggttttatttatgctattaggcatttccttagggttttggtcattactggtgtcgcatattaccttttgtctgccttttgtggtggtcacggtctattcgcgactcagtggttttgatgtcaaaatgcttgaagccgctaaggatctaggggcgggtgaatttactattttacgtaaaatcattatgccattagcgatgccggcagtagcctcgggttggctattaagctttacgttatcgatggatgacgtggttgtctcttcttttgtgactgggccaagctatgaaattttaccattaaaaatttactcaatggtaaaagtaggtgtttcaccggaagtgaatgcactggcaaccatccttttagggctatcattagtattagtattaattagtcagttgatcttacgagatagaactggcaaagcgtaa

SEQ ID NO: 295981 - DNA, 861 bp, Proteus mirabilis
atgaagaaaacacgtaaactatttcaaaacatcgttattactggtgttgtgggttggttaatggtgttcgtcttcttaccgaatatcatgatcatcgccaccagttttttaacccgtgatgatgcgaatttagtcgagatggtttttacactcgataactattatcgcttatttgatccaatgtatgcagaagtattactgcactctattaatatggcattggtagcgaccttagcttgtttaatattaggttatccttttgctttttttctggcaaaaatgcctaagaaaatacaaccattactgctgtttttattaatagttcccttttggactaactcacttattcgtatttatgggttaaagatttttcttagtacgaaaggctattttaatgagtttctattgtggatagggcttatcgataaaccgctaaggattatctataccccagaggcggtagtattagggttggtttatattttattaccttttatggttctgccactctattccagcattgaaaaactggataaaccctgtttggaagcagctcgagatctcggtgcgaataaattacagacctttattcgtattattatcccattaactatgccggggatcatcgcaggttgtttattggtaatgttacctgccatgggcttattctttgtggcggacttaatggggggcgcgaaaaacctacttattggtaacgtaataaagagccaattcttaaatattcgcgactggccatttggggcagctaccagtatctgtttaacactggtgatggggttaatgctatttgtgtattaccgagccgtaaaactactgcataagaaggtagaaatagaatga

SEQ ID NO: 295982 - DNA, 1116 bp, Proteus mirabilis
atgactgagaaaacatctctgacaccactagtcgaattaaaatccttaagtaaaggtttcgacggaaaacaaatcatttcccgcctcgatctgactatcaaccatggcgagtttttaaccatactcggcccttcaggctgtggtaagacgacggtattacgtttaattgcgggcttagaagacgcggatgatggacaaattatcctagatggacaggatattacccatattccagcagaacagcgttttgtaaataccgttttccaaagttatgccctgtttccccatatgaccgtatttgaaaatgtggcttttggtctacgtatgcagaaaacacctgctgcagagatcaatagtcgcgttatggaagcgttacgtatggtgcaactggaggactttgcccaacgtcgtcctgctcacctttctggtggtcaacagcaacgggttgcgattgcacgggcggtggtcaataagccgaaggtattgttgttagacgaatcattgtctgctctggattacaaattacgtaagcagatgcaaaatgagctaaaagccttacaacgaaaactggggatcacctttattttcgtcacccacgatcaggaagaagcactgactatgtcagataggatcgtggtaatgaaagaagggcgtattgagcaagatggcacgcctcgagaaatctatgaagagccaactaacttattcgttgcgcaatttataggtgaaatcaatatctttgatgcacgtgtcctacatcgtattgatgagacacgtattagagcggatgttgaagggcacgaatgcgatatttatacgcaattacctgttactcaaaatcagcaactgaaagtgttactcagaccagaagatctgcgcgttgaagagatacacgatcttgaaaaccttccgggacttatcggttatgttcgtgaacgtaactataaaggcatgacgctagattctgttgttgaaatggaaaatggcaagatggtgatggtgagtgaattctttaatgaagatgatccggatgttgatcactcgttagaccaaaagatagcggtaacttgggttgagagctgggaggtcgtgctggctgatgaagaaaacacgtaa

SEQ ID NO: 295983 - DNA, 225 bp, Proteus mirabilis
atgggttataaccttgctgaacttacacaagaagaaaaagataaaattaatgtcaacctagccgcttcaggggttgcctttaaagagcgttataatatgccagtagtggctgatgcgatagcaagagagcaacctcaagctttacaaagctattttcaagaaagagtgaccttttatcgagcacgaagccaacactattctcgcttaccttttgagtcgaaataa

SEQ ID NO: 295984 - DNA, 396 bp, Proteus mirabilis
atgaaattaagcaaattagttggtcaaacagggatacttggtgcaggtctttttcttgcggtttcttttggagcctctgcagaaagtgtcacaaatgtgaataatgataataatgttgtgcgctcagccccttttgctagttgtgttaatcttgataaagaacaacttgccactagagtgaaaaatgattatttactcaatcgattacctcgctggcaggatgataaaaaagcgctaggaccaaaacctgtggcgaatattaatgcgaacgatgttatcaaaagagataatagctatcatgttatcttggatgtaagaggtgctcgtaccgatctacgttacaatgttgaagttaattgtgatgagaataaaattacctatatatcaagtaaatag

SEQ ID NO: 295985 - DNA, 183 bp, Proteus mirabilis
atgtttctaggaatgcctacattaacacatgaagaacaacaaaaagcagtagaaaaaattcaacatctgatgtccgaaggtatgagtagtggtgaggcgatccaattggtcgctcaagaattaagagaaaaacacacgactcgtgaatcagtctctattgtgtttgacgatgacaatgattaa

SEQ ID NO: 295986 - DNA, 1428 bp, Proteus mirabilis
atgatacagaatacttgtttaaatggtcataaaatggatatgcaattacagcaacgtgaattaacttatacccctgatttagcattacgggtatttgcacctatcgcctctttgtcttggtctagtttactgcattcaggttttgccgaacatcaccataatcgttttgatattgttgtatccgatcctgctattaccttagaaacacgcaaacaaattaccactattaaagagaaaaccggtcgagtcaaacgctctaaaaaagatccctttacgcttatccaaacagcattagacgcttttaattttcatccagtcagtgatgaaaggcttccttttctaggtggcgcattaggtatatggagttacgatttaggtcgtcgcattgaaatattaccagaattagcaaaaaatgaacttaatttcgctgatatggctatcggtatttatgattgggcattaattgttgaccatcaactgaaaaaagccacattaataagctaccaagatattgacgcacgtctccaatggctagcaaagcacgctgataataacacaatagaaaaaaaagaaccttttgtcttaacttctccatggcaatcaaacatgagtagtgatgaatacaatgaaaaaattgctaaaattcatcaatacttactttcaggggattgctatcaagtcaatttagcgcaacgtttttgtgctaattatagcggtgatgaatggaatgcatttttaacactaaatcaagcgaataaagcgccattttctgcttttatgcatttacctcatcattttgttatgagtatttctcctgaacgttttattcatttaagtgatcataaaattgaaacacgtccaataaagggtacccttccccgtaaagcgcatcccgatgaagatgatgaacaagcgcaattgttggccaattctcgtaaagatcgtgctgaaaacttaatgattgtcgatttaatgcgcaatgatattggtaaagttgccacaacaggatcagtcaaagtacctgaattattcgttgttgaacgctttcccgccgtgcaccacttagtcagcaccattaccgctgaacttccagaaaatttaaacgcaactgacttattacgtgcggccttccccggtggctccattactggcgcacctaaaattagagcaatggagattatcgaagaactagagccacatcgtcgccatggatattgtggtgccattggctatattagtttttgtggtacgatggatactaatatctcaattagaaccctactgacggaaaaaaataaaatttactgttgggcggggggtggaattgtcgctgatagcgttgccgaacaagagtaccaagaaacctttgataaacttggtcaaatattaactgttttaagtgaagtttctcccgatgacacttattga

SEQ ID NO: 295987 - DNA, 561 bp, Proteus mirabilis
atgacacttattgatacctttatcaatcgctttcaacttactttacccgagccggtaaatcagcctattgatgctaaaaaatcggcagcagttttactgccgattatcaataagcctaatccaacgatcctcttaacagagcgcgcatcaacgttgcgctctcatgccggacaagttgcgctccccggagggaaacgcgatccacaagataaaagcctcattgaaacggcattacgtgaagcccatgaagaggtcgatattccgcccagtatggtttctgtgatcggccaattagccccattacgcagttcagaaggttatttagtaacccccattgtcggggtgatcccccccaatttatctttacgtcataatcccacagaagtcgcttctgtctttgaaatgccattaagttatgtactcaatactcagcgctatttaccgttagattttcgtcgtgccggtaaaatgcatcgcatctatttttacccttatgaagggcatttggtgtggggactaaccgcagctattttacataacctcgcgttgcatattacttaa

SEQ ID NO: 295988 - DNA, 1362 bp, Proteus mirabilis
gtgattagcgttttcgacatgtttaaagtgggcattgggccatctagctctcacaccgtaggccccatgaaagcggggaaagaatttgtcgatgatttagtcagccaggatctgattgcgtctgtcactcgcgtagctgttgatgtatacggctcattgtcattgacaggcaaaggtcaccacactgatatcgcaattattatgggcttagcaggtaatgcacccgctactgtcgatattgacagcattcccggttttattcgtgaagttgaagaaactggccgtttaccattagcaaatggattaaaagttgtcgattttccagctgaaagtatgcattttagcaatgataatctttcattacatgaaaatggcatgacaattcatgcttttgcaggtgacaaagaaatttatcgtaaaacctactactctattggtggtggatttattgttgatgaagaaaacttcggcaaatctgtgcttgacagccaacctgtttcttatccttatgcaagcgctgaagagttattaaaacattgtaaagaaaccggattatcaatctctagcttaatgatgaaaaatgagctagatcttcatactcaagccgaaattagtgcctattttgctgatgtttataaaaccatgcaagagtgtatcgagcatggtttaaataccgaaggcgtattaccgggaccacttcgtgttcctcgtcgtgctgcgtcactaaatcgtttattaacttccagtaatagcctgtctaacgatccgatgaaagtcgttgatcttatcaatatgtttgcactggcagtgaatgaagaaaatgccgcaggtggacgagtggtcaccgcaccaacgaatggtgcatgtggtattgttccagctgtattggcttattacgatcgctgtattgaaaaggtcacgcctgaaatttatacccgttatttcttagcctcaggagcgattggtattctttacaaaatgaatgcttctatttctggcgctgaagtaggttgccaaggcgaagtgggcgttgcttgctcaatggctgccgcaggacttgctgaattactcggtgctagccctgaacaagtctgtgttgctgctgaaatcggtatggagcataacttaggtttaacttgcgatcctgttgcaggacaagtacaagttccttgtattgaacgtaatgcaattgcctctgttaaagcggtaaatgctgctcgtatggcattacgtcgtaccagtgaaccacgagtttcacttgataaagtgattgaaaccatgtacgaaacaggtaaagacatgaacgcaaaatatcgcgaaacctctcgtggtggattagcaataaaagttcaatgtgactaa

SEQ ID NO: 295989 - DNA, 585 bp, Proteus mirabilis
atgagtttttacgccacaattattctcgcccttgctctttctatggacgcatttgccgtcgctgtctgtaaaggcgccaccttacataaacctcattttcgtgaagccctccgcaccggttttatctttggtattattgaagcaagcaccccgattattggttgggcattaggtttatataccagtcaatatattattcagtgggatcactgggtcgcctttggtttattggttatcttaggtggacgaatgatttatcagagtttaaagcgtggtgatgattgcatttgtgaagaggctcctcaacgtcacggttcactctctttaattgcgacaggtattgccaccagccttgatgcgatggcaattggtgtcggcttagcctttctacaagtcgatattgtccataccgcgatgaccatcggtatgatgactatgattatggcaacactgggtatgctgatcggtcgctatattggccctgtgcttggcaaaaaagctgaaattatcgggggtatggtgttgattgctatcggctttaatattctttttgaacatcttgatctgtttatgtacgcacattaa

SEQ ID NO: 295990 - DNA, 813 bp, Proteus mirabilis
atgtcttatcaatgtccactttgctcccagccacttgctcttaaagcccatagttgggtttgtgacaatcaccatcaatttgattgcgctaaagaggggtatgttaatttactccctgtacaatttaaacgttctaaagagccgggggatagtgcagagatgattagtgctcggcgtgattttttagatgcgggcttttatcaaccaatgcgagacaaagtggctcaattagtggctgaacatttaccggaagataatcctcaggtgttagatattggttgtggagaagggtattatacctatcagatatatcaacaactaaagtcaaaaaatccacaagtctatggcttagatgtggcgaaggttgccattaaatatgcagcaaaacgctatgctcctattcagttttgtgttgcgtccagccaacgtctgcctttttgtgatgcgtcattaaatgcagtggtacgtatttatgccccttgcaatgccagcgaattaacacgagttattgctcaagatggatatattattacggtgacacccgcaccacgccatctttatcaactcaaagcgttgatttattcaacagtgcatcttcatccactaaaagatgaaatatttgctgggttcaagctaatagcacagcatcaagttgcttataatatggcgttaacaggtaaacaagcggttgatttattacaaatgacgccttttgcttggcgtgcgagtgaagaggtaaaagagacattagataaaacagagcaatttgcttgtgaaactgattttctaattcgtgtttatcagcgtgtttag

SEQ ID NO: 295991 - DNA, 414 bp, Proteus mirabilis
atgagaaaatcaagcgaagaattattaaaatgtattgcaacaatattacaatgggtgctgaattgcggattacttattctagccatcgtattagtcagttttttgatcaaagaaacttatgttatcgcctctttattatttaacttagctgctgaagaatcttcttatcagttattagaaggaattttgatctacttcctttattttgagtttatcgcattgattgtaaaatattttttatccggtggtcatttccctttaaggtattttatttatataggtattacagctattgtgcgtctgattattgttgaacataaagactcggtagatactttgattcagtccggtgccattttattgctcgttatcgcgttatttattgcaaataccgaaaaattaaaacgaagctaa

SEQ ID NO: 295992 - DNA, 444 bp, Proteus mirabilis
atggctaaaacaatactggtagcaattgacttattagaagatgatagaattcaccgtatggttaaagatattcaatttctagcaagaaaagctgatcactattttcattttgtcacagtcatgcctaatttacgttctcttgaagcttatgggcttgattgtgatagcccttcagttatagagaaaaaacatcaagccgttattttgttaactgaaaaactagcacactgtgttcaacaacaattccaattacctaaagagcagtatcaatgccatgcccttatagggacaccaaattataatattctcgaactcgccaataagatggatgtagacactattgtcattggctctagctctcgtaatagacataatatattgcttggctctactgcagattatattgttaacaacaccaattgttctgttttagtgatccgttga

SEQ ID NO: 295993 - DNA, 819 bp, Proteus mirabilis
atgcttactattacggcactactagaaaataagacaagcgatcccgctcttagccattatcctggcctttcactgctattagaagacactgaaagcgaaagtaaaattttatttgatactggtaaagatctcacttttatcaataatgctaaaaaaatggcgattgatttgacgtcattaacgacaattgttatttcccatgggcactatgatcattttggtggattaactcatttaaatgaggatttctttattactaagccacatattattgcccatcctgatttattttcagtacgttattcagcactttttatggggcgccagtctattaaatttaagcgccttactccattttttaaccgacagcagctagaacagcagttttcatttcagttaacagcgacacctaaagctatcgataaaagatttatctattctggccaagtgacagagcgtcaaatacataaacgttatggcgttattgtcagtgaaagtagcgaaacggatgattatgtacttgatgatagttttctaatttggcaaggtcagcaaggactggtgattatcacgggatgtagccattctggtattgatgcgattattcgccatgcgaaaaaaataacaggaaatgacaagatccaagctattgtcggagggctacatcttcgctgtgcctcactggcggcgttaaaaagagcgaaaaaagcaataggtcaccatgttgaggtttatggttgccattgtaccggtgcgcttggccgtagctatcttaatgccaaagattttaatacagggcaaagattattttttaaatga

SEQ ID NO: 295994 - DNA, 435 bp, Proteus mirabilis
atgtataagactattttggttcccattgatatcgatgaagataacttactaaataaagccattacattagtggagaacattgccaaaagagaagatccctatgtccattttttgtatgttttaccaaagttgccacaatcttcttattatcgcttagtgatgaatggcgatcaacttgaccaagtatgcttaaaaaaatcagcagaaaaagagttaaaaaaaattattgctcgatttgatttaccggaagatcgtattgaaacgcatatctgtattggtaaaccacgggatggcatattgcagatagccgatcaggttaatgctgatttaattgttgttagctcacataatcctgaagcagacagctatcatttaggctcaacagcggcagatattacccgttatgcgaaacgttcagtgatggtagcaagatag

SEQ ID NO: 295995 - DNA, 486 bp, Proteus mirabilis
atgttagttgtcactccattaaaaagtctgacttttaattatgctgaaggccaaaaatcatttaaccaacaaaatggtgcatttgatattgctattcaaggccaatctggcgcaaccgattttaaattatcatcaaaactaattgctaatacgttagcaagaacaactgatgattcaacattaacagttggcgttaaatggaatggggaagacctttctaaaacaactgatgtcgtgttaattgatacatcaaaagggttaacctcaggtttagataatttagctgctgatggtatttacaatggctctgagcgcgctacagatcgtggtgaattcacttttgtaattgccagtgcacaagcagcaggagcaacagccgattttaaatcactggctgatggtgtctgggatggtgatgtaaaagtgcaatttaccgccacttgggatggtgacttttctaccgttaaacctaatccagaaccttaa

SEQ ID NO: 295996 - DNA, 2496 bp, Proteus mirabilis
atgcgtaagagtattatcgctttatcaatattaggtattattttttcgaatacgattaatgctaatgaaataaaaagaattaaagtgggcggatatattattcctccggcatttgttaatgctttagaggaaggtatgtcggtgcccgttttcttacgacttaatgatgcaaataaacaaaaccaaagtgaaaagaaaattgcagatgcgattattgttatcgataatgataaaataaaactatcaagtattcaattaatcgaaaataatcaaggcgcaacactaaatcagttattagttgataaaattgaaggtaaaaaaaatgctatctttaatgaaaataatagtatagctattgatagtaatgctattcttcaattaaatgtctcttcatttaatttatcattagatgttgataagtcagcttttgcacccaaagaacatgctagacaatccatattaggaaattcatctgttaattcattttctgctgtggccaactatgatttaggcgtctttcaaagtcgtgttaaaaacgcccaagattcatccagtagctactttaatttagacacgttattagctaaagctgaacaccattttaatattaatgcatctgcctatagtataggtaaatccaattccaatattgaactctatagagcaatgtatgaacgtgattttaatggattgcgttttgctatcgggttaatgagcacttggaatttacagtccttagccagcttaacagtattgagcagcagtaaaatttatgcagcatcaatcgggaataattcatcaagtagggtggtgaataaacagcaatcattaactccgatttatgcttttttaaatagtccaggtgaagttcgtatttatcgccaaggtaaattattaaatattcaaaatttcccgatgggtaattttgaagttgataccagcatgttgccttatggtatttatgaagtaacgattgaaaccgttattgatggcaaggtagtgacaacacaacatcaaaccattaataagtcttttggcaccgctaacggtaattttgaccaattaaattgggaaatttatggtggctatattgattttgataaacgtcattatatcaaagagggtggcgcttataaccaaactcccgaaaaaagttatttaatcggtagctcttttgcttataactttcctctgttatccggtattcgttttcaaatgtctaactatggatttgataaatttattgtacaggagacgaatatcagtgtagcggtaaataactatctttctattgcttggcaaggaatgttagagaatcatggtagtcaccgtaatattagtacgctttctattaatatcccagaaggctatggttcattatgggcatctaaagagaaaactatcgtaagaggtgatttaccgctatatgaggctgacagttactcttatggaggaactgtcaatttcgataagataatggatagaacgggttcatttactatcagcaataccaaagataagcgagttggtagtgattctattaattatgaatatgcaaatacattattttcgggacgttatggcacggtaggattaagagctggggttcagcgttatcattatgataatcaaaatagcactaatgaaaaatttattaatcttgatttctctttacctctttcaacgtggttaagtactgggatctcttcaaccaatggcaatgtaaaagccaatatttatgtgaataagaattttgaaaactccgtgatcactaatgcgggcgtttctgtttctaagttagtacatgataaagataatggtgaatctgacttctcaacactaggttacgcttcttatgatacgaagtataactctggtacggtgaccattaatcgccctgataataaacgactcaatggtaatttaacttctcgtggctctatagcttatagtgaagggatgatcacacccagtggtcaacaaggtaaatctggcattattatcaattcagacattaaaggtagtggcagtatgctcgctaaagttaacgggcaaaattacccgattagtggaaaaaatacctttattccattatctccttattcagattatgacatccaattaatgaatgatggcaaatcgaaagacagctttgacattatttctggccgaaataaatccgtcacattgtatccaggaaatattgccttttatcaaccggaagtgaggcaattagtcacggttttcggacgtctgaaatcccctaatggtgaacttttaaaatatgcttcaattcgaaaccatattggtcgaactaaaacagatcaaaatggtgagttttcaatggatgtagatgtccgttatccggtgatctcgttactacaagaagatcagcaaacaatctgtgaagcagacttagatcttaaaggtgcacaaggggctatgtgggtcggagaggtaacttgtcaacctcagtctagtttcgtaaaaagataa

SEQ ID NO: 295997 - DNA, 1533 bp, Proteus mirabilis
atgaatagcaaaatattttttttactcgtagcaccttgtcttttaaatttatcgctgtctacaaccagtcaagccgctacggtaactaatagttacgtttttattgagaataatgtggataatgaatattttattaccccaagaacaaccgatccgcgtttttcgggtgccaataaatatacgcgttattcaaaatcttcacagctcagtttaggttatatggggtataccaatacatccattcaggccaatcaatatgtcgatatttggctagaaaattctcaaatagataagccatttgtgggtaaccgatgtatgaggcgttattgtacagatgatagtggctattggcctgcgcaatatataggtaaagatggggcttataaaatagttcagactaatactaacggtgaatcggcttatgctcgggggatatttagtgattcggcatacctgtattttcgccaattgcctgtaggcactatagagacatatagttatagagcctgtatgacaaaaacagactatgatcccagtaaaggcggatcttgccaaagtgttggtggcagaatgcttgcatcacatgaatttaatatcactaagtcagggcatatcacgttaacttcaacaggtgctttacaagaaatatttattgatagtaacggtaatcccacgattggcttaggctctcagttttgccgagtgggtattgtatcaaaccaaaatggtattatttgtcaggtgattgatcatgaaactactggggatatatttaccaatattaggcttaatttaaaaattaataatacactgatcccttttacgccagcggcaaatacaataaaaattggccccgatgatggcagtaataactggtataattataatacaacatatcccgctaattattattttaaagttaataataaaaatgtttctatctttttatctaatactacagccgtgcctcaatctgggtattatgagttcaccccctcaaatacacttattctgaaaccgagagattatggcataagcattattcctgctgattttaaccctcatcaatctaaaacgggaaaagtgggtaatgaagagccacccattgagtttaattatattgttaccaccagtggccctagacaagcagactctattactgcatctgtagaaggaccacaaacaacattaaaagggcaatcctattgtttattctcctccagtgataaccgacttaatgtgccttttccggcttatctctcatttaaaaatagtgatggcacggatgcaaaatatagagcgagttgtgatagtcatgaaatttcattaaaaaatgcgttatggacagaaacaccatgggatagacctgatgaagacttaggctctttttatagaacgaacctagatttatcttttccaatgaatgatgctaactcatttttcactttagatggtattgattggctaggaacagtctcagccagtggaatggtaacagttaaggctatatggactgggcctgatattaactaa

SEQ ID NO: 295998 - DNA, 579 bp, Proteus mirabilis
  misc_feature (541)..(550): n is a, c, g, or t
atgttgttagtcttcttttatcaccatgcatatgcactttatattagtgcagatatttcctctatggagtcgggggaacccttcttttctaagccctatattaatgatactaaaaaaaccaatttatatacatttagtgtttaccaaattgataggccgggttatcaagagcagggcacacctattcagaatggagaaattctttttactccccttaaaaaaattctattacccggggagcaggaattttttaaaattttctatcgaggagaggcggatgagaaagaacgttattataaaattattattagtgaaacgccacttgatataagaaatgatgaagggcaaaaaaaacaaccactgttctaccccacagtaagtttagaaacctattttgttgttagacctaaagatccagatttcaaatatgatttaaatattaaccaaggaatattaaaaaatacaggcaatacttattttagggttttgttacatcaaaattgtgatggtgatgatgactcagagccttatgtattttatnnnnnnnnnnttttatttattacccaatcaacaaattaa

SEQ ID NO: 295999 - DNA, 348 bp, Proteus mirabilis
atggctgtgatccccaaaaactatgcaaaactagaaagcggttaccgcgaaaaggcgctaaaactctacccttgggtttgtggacgttgtgctcgtgaatttgtctattcaaatctgcgtgaattaaccgttcatcatattgatcacgaccacaccaataatcccgaagatggcagtaactgggagttactgtgtctgtattgtcatgatcatgagcactcaaaatacacagaagcagaagagtacggctctaccgttgtagcaggggaagatgcccaagatgatgttgggcaagcaacctataatccctttgctgatttaaaggcgatgctgaataagaaaaagtga

SEQ ID NO: 296000 - DNA, 540 bp, Proteus mirabilis
atggcaaaacttaccttacaagagcagatgctaaaagcgggattagtgacaaataagaaaatggctaaagtacaaagaacggcgaaaaaatcgcgggttcaggccagagaagcgaaagaggctgtagaagaaaagaaacgtttacagcttgagcgtgataaacaactcagtgaacagcaaaaacaagcaaccttattaaaagagtataaagcgcaagttaaacaacttattgagatgaatagaattacccctgctaagggcgatattgattttaaatttaccgataataatgtgattaaaacgcttgaggtggataaagtaacacaatctcaattaattaatggtcgtttagctattgcacgtttagtgattgatagcgccggaaacaatgaatatgccattattcctgcgagtgtggcagataaaatcatgcaaagagatgcagattgtatcttattaaacaacacattaagccaagcagaacaagacgaagatgatccttatgctgattttaaagtgccagacgatttaatgtggtga

SEQ ID NO: 296001 - DNA, 699 bp, Proteus mirabilis
atgtcgacgattattgatacctttattgcccccacttgccatgacaagattgagtatctttatcaagatgaacatctactggtaataaacaaaccttcaggtttactaagcctttcaggtaaaaacccgcaaaatatcgattctgttcattatcgcttagtaccattgtttcccgagtgcacattagttcatcgtttagactttggcacatcgggggtgatggttattgccctgaataaagcgattaaccgtgcactttgtcaacaatttagccagcgaaccgtcactaaagcttatgacgccctattatgtggccatttgcaacatgatagtggtgttatagaagcgcctatcgcgaaagatccacaacactttccacgtatgtcgattagcaccacacaaggcaaagctgcgcgctcttactatcaagttatcgaacggttttatcagactcttgctgatggcactcgcttacctttaacgcgcgtgcgactcacgccagaaacaggcagaacacatcaattgcgtatccattgccaatatatagggcaccctattttagggtgtgatttgtatggtggcctattattatcaggaacagagcataccccacggctaatgttgcatgcctgtgagttacattttattcaccctgttagtgagcaaccgatggatatttatctaccttcgccgttttaa

SEQ ID NO: 296002 - DNA, 477 bp, Proteus mirabilis
atgaatggaacaatcacaaaatggtttgaagataaaggttttggatttatcaaagatgaaaatggggataatcgctattttcatgtgattaaggttgccaaccctgatcttattaaaaaagatgcaatagtcacgtttgaacccacgaccaatatgaaggggttatcagcctatgcagtaaaagtgatcccagacagtaaatatatctttattgccggagagcgcgttaagttaacgtcaattaagtcttatcgtgtttatagcgaacaagtacccgttaaaacgcatattgataaagaaaatacaatattatcggttggtatgctaatgaacagtattaagcctaaatctgagtcggcagcagatcaaacgcgtactttgaaaaaaattgatatcattacttatcacggcaaagtattaacctttactgatgatgaagtcgatattgatgcaacagtcaaagtgattaaggcttaa

SEQ ID NO: 296003 - DNA, 1053 bp, Proteus mirabilis
atgatagaaaataaccgacaccccttcgcttgcacaacacttgcgattactgacaagaaaaaacgtgtttatcatggtcggacaatggagttttcttctgatgagccaacgtctatcttagcttattatccacaaggtcatacttttcagcaaaatgcccctgatggaacccccggattaaagtacagcgttaaatatccttttatggctattaccgctcctattaacttatcgggtaccaaagatgtacttgaaggtgtaaatagtcagggactctcttttagcttaaatatgctacctaactctaagttagatgatctcgatccccaatattacgcaagctctgttcctattgctgctattggtgagtgggcattaggacaatatgcgacggttaaagagttaaaagagattatcccccaaacccatttttggtcacaaaagctattattgttacgtaacttaccaagccctttccattacgcattttatgataaaaccggtgattgtattgttgtcgaagtctctgatggtaaattacatatttatgataatcctacctattgcatgaccaatggccctattttcccgtggcatttaactaatttaaacaactacactcatctttctaatatcaacgtttccagtagcacattaggtcgtattaaaatcaaccaacctgatagtggtattgcattagcaacattacctagctcagatacttctgtagatagatttattcgtgcagtttattattcaacctattaccacaaagtttctgatcctgataaacagcttattgagcttgcccatatcatgaatcgcttcgatcgccctaaagatgcaaccattgatccactattaggtaatgatacgctaactaaacttcatactagtgaattttctgtctggacggcgctaactgatttagaacgggggatctttttcttcagaggctacaacaacttaaactttcaaaagttcacacttgagtcatttaaaaatgaaagtagcgcggtttttattaaggtcaatttggaagaggcattgtaa

SEQ ID NO: 296004 - DNA, 240 bp, Proteus mirabilis
atgaaagcaaaaattgtactaggtgcggtaattctggcttcaggcctattagcaggttgttcttctagcaacaacgcacaattagaccaaatctcttctgatgtaaaccgtttaaatacgcaagttcaacaactaagtagtgatgttcaatcagctaacgctcaagcaaaagccgcttatgatgaagcagctcgtgctaatcagcgtctagataaccaagtaactacttataaaaaataa

SEQ ID NO: 296005 - DNA, 918 bp, Proteus mirabilis
atgaagaaatggttaaccttattgggtgcatcgctgttagggatgagcagtcacttaacttatgcacatgaatacctgctacctacggatggttcacgtatcattggggaaaatgtttcttacaccgttcctgatgataaacgttctttagaaacgatcgctgcacaatatcaagtgggtttgctaaatatgatggaagccaacccaggtattgatcctctattacccgaagcgggcaaaacactacaaattcccttacagatgatcttacctgataccgtgcgtaaaggtattgtcattaatctggcagaattgcgcctctattactatcccaaagaagggggaaccgttgatgtctatcctatcggtattggccaattagggcgggaaacgcctgaaatggtgacatctgtttctcaattgattaaagatccgacttggacgccgacagccaatattcgtaaaaattatgcggctaaggggatcacgttaccggcagtggtaccagcagggccagataatccaatgggtgcatatgcgttaagattagcacacagtcgtggtgagtatcttattcatggtactaatgccgattttggtattggcttaagagtgagttctggctgtattagattacgtcctgatgatattgaaacactgtttaatgtggtacccaaaggcagtcgggttcaagtgatcaataaaccgattaaatttactgagactgcagatggtaagcaatttattgaagtgcaccaaccactctcacaaaatgaagatgacgatccccagacgatgcccctaacgtttactaaacaatttacggcttggtatgaaagtggcaaagtggataaagcaaaagtggatgcagaaattattcgtcgttcaggtataccggtcaatgtaaccgcatattga

SEQ ID NO: 296006 - DNA, 429 bp, Proteus mirabilis
atggcaattgcggctttgcctgatgaagcaaaattattacgcaatttttctcgttgtcaggattgggagcaacgctatctctatatgatggagctaggagaacgcttaccaccattaacagatgaacaaagaacggcggctaattttattgaaggttgtcagagccaagtctggatagcggttgaattagatgagcataaacagctgatcttagccggtgatagcgatgcaggtattgttaaaggattagtggcattagtgattattctttttcaaggtaaaacggtagagcaagctctcgccactgatgttaaccactatttctcgacattagcactggaaagtcatttgacgccatctcgtactcaagggttacacgctatggtaacacggttaatgaaacgcttttcggaatacactgtagcataa

SEQ ID NO: 296007 - DNA, 1242 bp, Proteus mirabilis
atgatgacacattccattgaaaaagcgcgggatgactttcctattctttcccagcaagtgaaagaaaaacctttagtctatctcgacagtgccgcaagtgcgcaaaaacccgcttgtgtcatggagcgtgaaaaacagtttgccttaacacaatatgccgcggttcaccgcggcattcacacattaagtgcaaacgccaccaccttagtggagaatgttcgtaagcaagcagcacatttcttaggtgcaaagagcgaagaagaaatcgtttttgtaaaaggaacgacagaagggatcaatttagtcgcttacagttatagccatcgtttcctaaatgatggtgataacattatcattactgaaatggaacaccacgcgaatatagtgccgtggtatatgttagcaaaacagtatggttttcatgtccgtgttattcctctgcttgctaatgggcaactcgatttagcgcaattaccccaattaattgataacagaactaagttactggcgatcactcatcagtctaatgtactgggaaccgtcaatcctattgctgaaattatttgccaagctagagagtattcggctcagcaagggggtgagttacatattttagttgatggggcacaaagtgcgatgcatcaagctatcaatgttagtgcgttagattgtgatttttttgtatgtagtggccataaactttatggtccgacagggattggtttgctatatggcaaaaaagcgctacttgatgaattacctccatgggaaggggggggcgctatgataaaacatgtgcatatcaatggtgatattacctacgcggatgcgccgtggcgatttgaagctggaacgcctaatattatcggtatcattggcttaggggcagcattggaatatcttgctcaatttggtatggataagattgctgcatatgaaaatagcttaatgcaatatgcacaacaacaattaaccaaagtaaaatcattaacgctttatggtaatgaagcgcgtcaaggtgtgatagcatttaatttaggtaagcatcacgcttatgatgtgggaacttttcttgataactatggtattgctattcgtacgggtcatcactgtgcgatgccaattatggactattatcaggttcctgccatgtgtcgcgcttcgttgggattatacaataataaagcggatattgatgcactggttaatgcgttgttacgcattgaaaaactattaggctaa

SEQ ID NO: 296008 - DNA, 1308 bp, Proteus mirabilis
atggctggcttattgaccctcaatgagaaacgtgaaaaacagcatcaagtagaacagcgtaatcaacaggcattaaaacaattctctgcgctatatcaacagcgtaaaggggaagataatttaaatgcacgtaatcactggctacaagtggaaaaagtgggttttccagcttatcgacacgaagattggcattatacgccattagatgagacgctcagtcagcaatatcaaatgttgccaccttttgaggtacaagatttaattgagcaacgggcgctctcatttgattgctaccgtatcgtgatggttaatggtgcattttcaccggctgaaagtagtcaagattttggtccataccaagtgacattactggataaccaaagtgaattaccgcaagccattaatggtgaagtgttcttgcatttagttgaaagtttagcgcaacagccgctattcattaccttgaaaaaaggcgtagtggcagataaaccgctttatatccttaatattacacaaggtcatgcagggcaagaagttaacagtgctaactatcgtttccatcttgatgttggcgctaatgctcagatgcaagtgattgaacactatattagtagtgatggtgaaaaccgtcattttaccggggcgagattaaccgccactattggtgataatgcctcgttcaaccatattaaacttggttttgaaaatggcattagccaacattttgcccataacgatttaagcattggacgagatgctcgtgttaatagttatgcattcttgttggggaataaactgagtcgtcatcatactagcgctgcactgacgggtgagaacagtgagctatcaatgaatagtgtggtattacccaaagcgaacgaaattgccgatactcgtacttggctcgtgcatggtgagaaaaattgcctaagccgtcaattacataaaagtattgcaatggatgcaggaaaagccgtatttaatggcatgatcacagtcacccctcaagcgctgaaaacagatggtcaaatgaccaataacaacttgttattaggtgataaagcacaaattgatactaagccacaacttgagatctatgctgatgatgtgaaatgtagtcatggtgcaacggttgggcgtattgatgatgagcaactattttatctacgttcacgaggtattgcgttaagtgaagctcgcaaaatgatcattcatgcatttgctgccgaattaacagaatcattagaaaatagtgtgatcaaaactcatgttctagagagaataaatcaacgcttatcagaggtataa

SEQ ID NO: 296009 - DNA, 747 bp, Proteus mirabilis
atgttagatattaaaaatttacatgtcagtgttgaaggcaatgaaattcttaaaggattagatttgcaagtacgtgccggcgaagtgcacgctatcatggggccaaacggttcaggtaaaagtacattatccgcaaccttagcaggtcgcgaagagtatgaagttgatgaaggtagtgtgacttttaaaaacaaagatctactggaattagagcctgaagagcgagcgggtgaaggtatctttatggcatttcaatacccagtagagatccccggtgtcagtaaccagtttttcttacaatcctcagtcaatgcggtaagagaatatcgaggccaagagccgttagatcgctttgattttgaagattttattgaagataaaatcaaactattggatatgcctcaagatttgttaactcgttctgttaacgtaggtttttctggtggtgagaaaaaacgtaacgatattttgcaaatggctgcccttgaacctgaactgtgtatcttagatgaaaccgactcaggacttgatatcgatgcgttaaaaattgtcgctaatggtgtcaatagcttacgtgatggtaaacgcgcctttatcgtggtgactcactatcaacgtatccttgattatattaaacctgattatgtgcatgtgctttaccaaggaaaaatcattaaatcaggtgatttttcattagcacaaaaattggaggaacaaggttatggctggcttattgaccctcaatga

SEQ ID NO: 296010 - DNA, 1497 bp, Proteus mirabilis
atgtctcagagcaatgttgaaattggtgatgaagttcaaggctggctcagtgatcatcactataaagaagggttctataccgatatctcaaccgatacgttagataaagggttgaatgaagcggttgtgcgagctatttcagctaaaagaaatgagccagagtggatgctagagtttcgtcttgatgcttatcgtcattggctagagatggaagagcctcattggctaaaagcagattatccatcgctgaattatcaagattatagttattattcagcgccatcttgcggtgcttgttgtgccaatggcagttgtgctagtggtaacaatgaagcagtctcaacacaagaaacccaagattatttaactaaagaagttgaagacgcatttaatcagttaggcgtgccagtaagagaagggcagtcagtggctgtagatgccatttttgactcagtatcggtttctaccacttatcgtgaagagctagctaaacatggtgttattttctgctccttcggtgaagcgattcaagaatatcccgaattagtacgccaatatttaggtacagttgtttctagccacgataactattttgcggctcttaatgcggcggtcgcttctgatggtacctttgtttatattcctaaaggtgttcgctgccctatggaattatccacctattttcgtattaatgcggcacaaacaggccaatttgaacgtacgattttaattgcggatgaaggaagttacgtcagttacatcgaagggtgttcagcacctgtacgtgatagctatcagctgcatgctgccgttgttgaagttatcattcataaagatgccgaagtgaaatattccacggtacaaaactggttctctggcggtgatagcgaaggcggaattcttaacttcgtcactaagcgtgccctttgtgaaggtgagaacgctaaaatgtcgtggactcaatctgaaacaggttcagcgatcacttggaaatacccaagtgttatcttaaaaggagataattcaacggctgaatttttctcagtggcactgaccaatggtaaccaacaagctgacacgggaaccaagatgatccacatcggtaaaaataccaaatcaactattatttctaagggtatttctgcgggtaaaagtcaaaatagttatcgcggtttggtgaaagtgttacctggtgcgcagaatgcacgtaactacacacaatgtgactcaatgttaattggcacagagtgtggtgctcacaccttcccttatgttgaagtcatgaataactcagcacaattagagcatgaagcgacaacgtcacgtattggtgaagatcagttattttactgccgtcaacgtggattaagtgaagacgatgcaatctcaatgattgtcaatggattttgtaaggacgtgttctcagaattaccgctggaatttgctgtagaagcacaaaaattattagcaatcagcttagaacatagcgttggttaa

SEQ ID NO: 296011 - DNA, 369 bp, Proteus mirabilis
atgacaaacaatgttgaaactttttctctaaatgatactgcttggcaaggcattgtgctgactgatagtgcagcgaaacatatttgccaattagtggagaaaaaccctgaaagtcagggactttccttaagtattaagccatcaggttgtacgggctatggttatgttattgagcttgcagcaggccccacagaggacgatcttgtctatgaacataatggcgccaagttatttgttgcattaaaagccatgccattcattgatggtttagttgttgattatgtccgtgaaggacttaatcagatgtttaaatttaataatcccaaagctcagaacgtctgcggatgtggtgagagctttggggtataa

SEQ ID NO: 296012 - DNA, 486 bp, Proteus mirabilis
atgtcggggtttaatatcgcgtatccaacttcattctcattaaatagagatgatacagaacactattttcaattattacctgatcatgtccaagatgtcacatcacagatgttagtttatcaagccaaaccagtatgccagttatcagaagttcgtttagtttattttaaacttgacgatatgatgagttatgatattgattcaggagcacagggtatcgttgataatatttccactattgatggtatgaaagaaacttcaacaacaataaagcctttcacagtgtcagaaatgccagctcgacaaattttctttgaaggaaagttgtctaatcaaaaagtgagctatgaaggggtattaattgcggatactaacacaaatcgtgtatggcaattacaatttattgctgaaaataaaagtaataataatcaagaagttattgattgtactaataggtatgtgaattcaattagtatcaatcaataa

SEQ ID NO: 296013 - DNA, 147 bp, Proteus mirabilis
atgctgagcacagtttgtcacaaatacaccaaactacatggtcggtttggtgatgcgcttccgcgtgctggcgaactgtccgttaagctggtggctatagagatttttgaaactgaaatgaattacaaatatattggggaaaattag

SEQ ID NO: 296014 - DNA, 1857 bp, Proteus mirabilis
atggagcaaaacccgcagtcacagctgaagctacttgttacgaaaggtaaggagcaaggctacctgacctatgctgaggtcaatgaccatctgccggaagatatcgtcgattcagatcaaatcgaagacatcatccagatgattaacgacatgggcattcaggtcatggaagaagcacctgatgccgatgatctgatgttggcagaaaattcaaatgacactgatgatgatgctgtcgaagccgctgctcaggtactttctagtgtagaatctgaaattggccgtacaaccgatcctgtgcgtatgtatatgcgcgaaatgggaaccgttgaactgctcacccgggaaggtgaaattgatatcgcaaaacgcattgaagatggtattaaccaagttcaatgctcagttgctgaatatcctgaagcaatcacttatcttcttgaacaatatgatcgtgttgaagccggtgaagcgcgtctttctgatttaattactgcctttattgaccctaatgccgaagaagtggcagaaagtgatgatgtcaatttaggcaaagacgacgatgaaatcgacaacagcgccgatgacgaagatgaagacgaagatgaagatagcgacacagacagtgatagcgatgatgataacagcatcgatcctgaacttgctcgccaaaaattcaccgagcttcgtgaacagtacgaaaaaacgcgtcaatctattaaggccaaaggtcgtaatcataaagataccgaactggaaattttacagttatcagaaattttcaaacagttccgcttagtgccaaaacagtttgattatctggttaacaacatgcgtgaaatgatggacagagtccgtgctcaagagcgtcacatcatgcgtctttgtgttgatcaggtcaaaatgcctaagaaaaacttcattactctgtttacaggaaatgaaactaatgacacatggtttactgccgctcgtgcgatgaataaaccttggtctgaaaaactggcaggtattgaagaagaagtacaacgtagcttacaaaagttacagcaaattgaagttgaaacaggactgacaatcgaacaggttaaagatattaaccgtcgtatgtctatcggtgaagcaaaagcacgccgtgcgaaaaaagagatggtcgaagcgaacttacgtttagttatctctatcgcgaaaaaatataccaaccgtggtctacagttccttgacctgatccaggaagggaatattggtctaatgaaagcggttgataaatttgaatatcgtcgtggttataagttctcaacttatgcaacatggtggatccgtcaggctattactcgttcaatcgccgatcaggcacgtaccattcgtattccggtacatatgattgaaacgattaataagctaaaccgtatctcgcgccaaatgttgcaagagatgggacgtgagccttcaccagaagagcttgcagaacgtatgctgatgcctgaagataaaatccgtaaggtactaaaaatcgctaaagagcctatctccatggaaaccccaattggtgacgatgaagattcacatttaggtgattttatcgaggatactaccctcgaattacctctggattcagcaacatcagaaagcttacgttcagcgacacacgaagtattaggtggtttaacactgcgtgaagctaaagtcctgcgtatgcgctttggtatcgatatgaataccgaccatacattggaagaagtgggtaaacaatttgatgttacccgtgaacgtatccgtcagattgaagcaaaagcgttgcgtaaattacgccacccaagccgttctgaagtgctacgtagcttccttgatgaataa

SEQ ID NO: 296015 - DNA, 1806 bp, Proteus mirabilis
gtgctttcttatgagagcgcggcttattctcgttcaacaacaggcgtaaaagggcttatggctggacgaattccacgttcatttatcaatgatttattagcacgaaccgatatcatcgatcttatcgacgctcgtgtgccgcttaaaaaacaaggcaaaaatcattcagcgtgttgtccgtttcataatgaaaaaacgccctcttttacagtaaatagcgacaaacagttttatcactgttttggttgcggtgcgcatggcaatgctattgattttttgatgaactacgacagacttgattttgtcgaaaccattgaagagttagcagcaatgcatgggttagaagttccttatgaatcaggaactggcagtagcccgattgagcgacatataagacaaaatctctatcaagtgatggagaaattgaatcagtattacaaaagcaccctcaatacccctgacgctcaggaagcaagaaattatcttgcgcatcgcgggctaagtgaagaggttattacccgcttttctatcggctttgtacctacgggttgggacaatatcctaaaacgttttgggcaaaatcccgataatcaagccctgttacttgaagcaggaatggtaataacaaacgataaaggtcgcacttatgaccgttttcgtcagcgcgttatgtttccgattagagacagacgaggtcgtgttattgcatttggtggacgtgtattaggtgatgatttacccaaatacttaaactccccagaaacagagattttccataaaggccgccaactttacgggctttatgaagcacaacacactcaccctaacccagctaagttattagtggttgaaggttatatggatgttgtggcattagcgcagtttggtattgattatgctgtcgcctcgttgggtacatcaacaaccgcagagcatatccagttgctgtttagaactacggataacgttatttgctgctatgatggtgatagagcaggacgagatgccgcatggcgagcattagaaactgcactgccttttttaaacgatggccgttctttacgttttatgtttttacctgaaggcgatgatcctgattcactggttcgccgcgaagggaaagaggcatttgaaaaacgaatggaacaagcacactctttatctgagtttttatttgattcgctggttccacaagtggatttgagcacccaagaaggcaatggcaaactctatagtttagcgcgcccattaattgatcagatcccaagtgagactttacgtctatatttattaagagagcttggaaatttaacgggaaatcccgatattgagcagatggatcgtttatttggtagaaactcgctacatcacgaaacatcgtatcaaccgacaaaactacgtactacaccaatgcgtattttaattgccttgttgatacaaaatcccgagttttgccaattagtgccaccgcttgaggggctaaatacagaaaaaatagcgggtttatcgctttttattgaattagtttctctttgccaagcgcagccaggcttgaatacaggtcagattatcgaactctatcgagagaataaattcggtaaacaacttgaaaaactggcgatgtggaacgatatagatatagatgagatagctgaaaaaacatttacagatacgttagatcatctctttttaaccgcaatggatgaacgtttaaacgccctcattgccaaagagagaactgaaggtctaacacaaaatgaacgcgaagaagtccaattgataatacaggctcgcgttaaaaagtaa

SEQ ID NO: 296016 - DNA, 216 bp, Proteus mirabilis
atgccggtaatcaaagtacgtgaaaacgagccatttgacgttgctcttcgtcgtttcaaacgctcttgcgaaaaagcaggcgtattagcagaagttcgtcgtcgtgaattttatgaaaaaccaacgactgagcgtaaacgcgctaaagcatcagcagtaaaacgtcacgctaaaaaattagctcgcgaaaacgcacgtcgtactcgtctgtactaa

SEQ ID NO: 296017 - DNA, 1023 bp, Proteus mirabilis
atgcgagttttaggtattgaaacatcttgcgatgaaaccggtatcgcaatttacgatgataaagccggtctgttagcgaatcaactctatagccaaataaaactgcacgccgactatggtggtgttgttcccgagcttgcttcacgagatcatatccgcaaaacagtgccactgatccaagccgcccttaaagaagcaaatttaactgcaaaagatattgatgcggtcgcttatactgcaggaccagggctggtaggggcattgctggtgggggcgactattggtcgttctctggcgtttgcatgggatgtgcctgctattccagttcaccatatggaagggcatttattagcgccgatgcttgaagagaaaacgccagattttcctttcgtggcgttacttgtctcgggggggcatacacaattaattagtgtaacagggattggggaatataccctgttaggtgagtctattgatgatgctgccggtgaagcatttgataaaacagccaagctattggggcttgattatcccggcggccctgttttatcaaaaatggcacaacaaggtgtagaaggacgttttgtttttcctcgccctatgacagacagacccggactcgactttagtttctctggtttaaaaacctttgccgctaatactattcgtcaaaacgatgattcagagcaaactcgagcagatattgcgcgtgcttttgaagatgccgtagtagatactctggcaataaaatgtcgtcgagcattagagcaaacaggctttaaacgcttagtgatggcggggggtgtaagtgctaaccgtactttacgcgccaaaatggcaatgataatggaacaactcggaggggaagtgttttatgctcgccctgagttatgtaccgataatggtgccatgattgctttggcggggatgatccgttttaaaggtggtaccgaagggcctttaggggtgacagtgagaccacgttggcctttagctgaattacctgctttagcggataaataa

SEQ ID NO: 296018 - DNA, 1407 bp, Proteus mirabilis
atgtttagcacctataatattgatgttttaacagaacaaaatcatcaatatttaccaatagaaaacaccctatcattacagaatatattttccatctcttggcacccatcattatggaaatctttacccgccaagcaactccctgaatacccagatatacatgccttaaattattgcaaagaaaagcttaagcattatcccccgctaattttagcttccgaaatcagagcatttaaaaatttattaaaacttgttgcaaatggtgaagcttttcttctgcaaggaggagactgtgcagaatcttttgatgattgccaagccactattatccgtgatttaacattcactttatcgcaaatgtccgcattaattgaacaatcaacgggattgccggtgattaaattaggtcgtatggctggacaatacgctaaacctcgtagccaagcatttgaaacacaaaatggcttaactttacccagctatcgaggagaaattattaatggtcttgatttttcagttaaaagtagagagccagatccgattagaatgataactgcctatcatcactcagcagcgaccttaaatctgttacgtgcgatgaattatacacaatataccaagcaacaatgggccttggatattaacgctcatcctggctctacagagcctgagcattatttccatttgctagaacaactctatcattcacaacatcatattattaataaacagcccgatacctcttcctattatgttagtcatgaagctttgttactgcattatgaggaatcgatgactcgtcaagattccattgacaacaaatggtataattgttcagcacatatggtttgggtaggagaacgaacaaccgatattgatcatgcccatatcgagtacctacgaggtattgaaaaccctatcagtataaaatgcagcaccagaatgtctggagaaaaactgattaagctaatagatactcttaacccgagcaatgaagttggaaaaattatcttaatcattcgcgtgggtaaagatgctattcatgcatatcttccggaattagtaagaacggtaaaagaacatcaacgagcggttatttggcaaatagatccaatgcatggcaatacacaatcagcaaatgacagtatgaaaacccgacatttcaatgatattgccgaagaaactcgtgcttttattcatattttacatgagatgggcatacaggctggggggatacatttagaaatgaccggacaagaagtcactgaatgtactggaggattacaacaaattcgatacactgacctaagtcatggttatcaaactttatgtgatcctcgtcttaaccggacacagtcattagagttagcgttcttggttggacggcattggcataattcactttaa

SEQ ID NO: 296019 - DNA, 399 bp, Proteus mirabilis
atgagcttatatttatctagtgaaatgatctcttatgatatggatctaaatagaaacgaaggtgaagaaagtaaaattcaagctaaatttattcatggctctaattttacaatggcattttggacatttaaaactaatgccattattcctgaacataaacatgaacatgaaactgccacatccatactaaaaggctctttgaaactgacggtaaataaccgcattgtttatttacatgctggcgactcttttattattccctcatgggccgttcatcacgcaattgctttagagccttctgaggttattgatgtctatacccccgttagagaagactatgttgcaaggcaaaatggcgtcattaaaacctatttagaaacatctcaaccccaaggataa

SEQ ID NO: 296020 - DNA, 525 bp, Proteus mirabilis
atgataaatattcatacattgggtccttcaggaacaaactgtgagaaagccgcttattattggctaaataaaaataatcaacaaggaaatattattcttcaccctacattagaaaccgcagtaaaagaaatggaggtaagccaaaatagtattctattaggttgtattgtttatccttttttacacaatattgtttttaataatctctcttttatcaaattaacagattgttttgttatggatacccataacatgctatttgctagccgatttaataatattaaggagataaaaaagttaggttctcatcccgcaccacaagatctatttagaaaaataacagaactcgataatattgaaagagttctttttaattcaaatagtgaagcagcacttcaatgtggtttagggcgagtagatggctgtattaccacacttagtgcagctaaaaaatatcatttaaatattttatatgattttggccctgtccctatgggattttctattcattcaaaattaaattaa

SEQ ID NO: 296021 - DNA, 699 bp, Proteus mirabilis
atgctacaaaaaatatctgccaataaaattgcattaataaaaagaatgcaacttagtactcctacattagtcgatattctcgatagtttaggaaaaaccattgtattaaatagtcaattaaaaagtattaacctagaaaacttttattctgttggacaagcttatactgtgcaatggaaattaattagaaaacaaaaatccattttaaataaacaaccttctacgtgggaacaagttagttcttttttagtccctgaaataacagatgcaaaaggattattctatatagccggaggacatgaactaataaccgaagcagcacttgcaggtggcatgagttgtacttattttgaaaaattaggctttgaaggagttattttagggggagcggtacgagacaagaaagatctcaccaatctaaccattccagtcattgccaccaatcttactcctacagatacacaaggcgcttattttgtcagtgagactggcactcaatgcaccattgagcatgccacaatctgtagtggtgatttagtgatatccgaccctaatggcaccgtgattatccctttttcactcgtcgataatgttctagaagaagcgattaagatagatagcattgaaaataacatgctagaaaaaatcaaacatggacaacgtttaccagaacttatcaatataacgggacgtatataa

SEQ ID NO: 296022 - DNA, 1668 bp, Proteus mirabilis
atgatccatgcttttattaaaaaagggagctttcaggattccgtcagcctgatgataatttcccgaaaattaagtgaagcccctgaggtggaagaaatttccgtcatgatgggaacaccagcgaataaatctctccttgatgtcaccggtttttggcatgacatttttaacgaagcgacaccgaatgatatctgtgtttcgattaaagctgaatcagacgatcccgctattatcgagactatctccagtgcgttagaagaagccttagctgatattgctaacggtcaaaaaagtggtaataaattaactactgtacgtagctggcgtacggctaaacaaaaaagtcctaacgctaatatgttgcttatttctattgccggtgagtatgcggcggaattagctgatacgggattagaagatggctgtaatgtgatgctattttccgataacgtctctattgctgatgaaaaagcattaaaagaaaaagccgccgctaacggattgatagtcatggggcctgactgtggtacggcaaatattgctggcgcacctttagcctttgctaacattgcaccgaaaggctctattggtatcgttggtgcatcagggacaggaattcaagagatcacctcacaaattgtattacaacgccaaggggtttctcatgcaataggtctggggggacgagatctcagcgagcaaattggtggcattagtgctatcacggctattaatatgctggcggcagatcctcaaacccgtgtgattgcttttgtttctaaacctcccgcgcctgcagtacgtgaaaaaattattgcagaaatgaagcgtcataataaaccgatagtggcgcaattcttaggaacaacaccagagaaatatcaagacgataatatctattttactcgcaccttagacgaaacggcgcgtattgcggctacgttagcacgtgttgaagatagtgctgctcagttacccaaagtggcaggtaaaaagattattggattatatgcgggtggaacattagcggcagaatgcgcgatgttgttatctgagcaactcaatgtggcggtagataacgaacataagcaaggtacgatgctcgatgcacaagggcataaaattattgatatgggcgatgatttttatacccaaggcaaaccccatccaatgatagatccttctactcgcaataaatttattagtgaattaagtaataagcatgatattggcgtattactggtcgactttgtgattggttatggtgcaacgtcagatccagcaggtgcattaattcaagaaattaaaaaattaaatgaaaaacgtggtgaagctaatccactgatcactatcgccactattaccggtacgcaggaagatcctcaaaaccgtagtgagcaacaaaaacagctacaagatgcaggtattattgtgatggataccttgccagaagtcgtactgttagccaaagaattaatccagccacatccagtagaagccgctgctgaaatttcaccacttttaaatgggatctccgtgatcaacgccggattacgcagttttgctgacgatctgcaatccagtggtacgcctgttgttcattatcaatgggcacctgtcgcaggtggtaataaaaaactggctgaaatattaaagaaattgaaataa

SEQ ID NO: 296023 - DNA, 1266 bp, Proteus mirabilis
atgtactcaactatcgaacaagcgaatgaagcagttatcgaacgtatccgtgaagcccgtcctcactggtgtgatgtgagtttagcaaaagaagtagtaccaactttagcaacaggaaaaaaattactgcatgcaggacctcctgtaacttggcaagaaatgagtggccctgtccgtggcgcctgtattggtgctagcttatttgaaggttgggctgaaaatgaagcgcaagccttggctatgttagaggcgggggagattgagtttattccttgccataatgtcaatgcagtagggccgatgggcggtattacttctgctcatatgccaatgctagtgattaaaaaccatgttcacggtaactatgcttactgcaatatgaacgaaggtattggtaaagtgatgcgttttggtgcttatggtcctgatgtacaagaacgtttgcattggatgcgtaatagcttagctccggtattaaaagcagctttagccaccattgagaatgggatagaccttacggcaattatgggtcaagccattacgatgggggatgaattccaccaacgtaatattgcagcttctgcactattgttacgagagctggcgccaattcttagcacattggatttagatgcggctgagataactaaagtgaccaaattcctcagtattactgaccaattcttccttaatttagccatggcttattgtaaagcggcgatggacgcaggagcacaaattaagcaaggtacgattgtgacggtaatgacgcgtaatggtagtaattttggcatcaaaataagtggtatgggtgatcaatggtttacagcacctgttaatacgccacagggattattcttctctgggtttagccaagcagatgccaaccctgatattggtgatagtgctattactgaaactttcggtattggtggtgcagcaatggttgcagctccgggagtaacccgctttgtcggggcatcgggtggtatggatgcagcacgtgaagtgacagaagagatggctgaaatctaccttgctcgtaatatgatgctacaaataccgacttgggatttccaaggtgcgtgtttaggtttagatgctcgtcgagttgttgaaacgggtattacaccgctaattaatacgggtattgctcataaagagccgggggttgggcaaattggcgcaggaacggtacgtgcacctttaggctgttttgaaaaagcgatagtggcactggcagaagaattaggcattgaagcttaa

SEQ ID NO: 296024 - DNA, 825 bp, Proteus mirabilis
atgcaaattcaagcacttcaaaccagtcagcatatctttgcttttgaaggtgagtttaaatgtgtcggcatttatgaacatgctttgaattttatttgccctcagcaacgcttaatcacttttcatcggcaaggaagaggattaagcccgatggggtggctactgaaacaagccgattttgattctttggctaagcagtgtcatcccgctttgaaaatgcggatgaaaaacaatcaaatcgcaatcgcagataatatgacattgattgccggtgatagtgaaaatttgcgtttacaagataaagcgacattagatttacgatggttagagagttttttttctctattatctccggtgatagcgacaggactctatgggccattaaaaaactatcgtcaaatcgcccgacttgatgaaattaagttattaacaaagttattttatcatcaattgtctggaaaagcggttaattgggcgatgtttattggtaaaggtccagggttaacaccgagttcagatgatatgctggtgggaatgttatttgcgcattatttagcacagccagaaaaatcgattgaacatttttttaatgaaacaccaccattatcgtcattaactacgatagtgagtcaacattatttggaatacgccacacggggaatattttctacctatcttattcaactaggtaaaaaaataaaaaataaagagattatttttaaagatatgttggaaatactctctatcggtcatcattccggtgcagatactttactgggattatggattggttatcaaattaaacaacaacagcgtatagattaa

SEQ ID NO: 296025 - DNA, 906 bp, Proteus mirabilis
atgaaaacaattgttattgctttaggcggaaatgcattattacagcgtggcgaagttttatctgctgaaaatcaatataaaaatattgaattaatgtcagagacaattaataaattagcgcaagagtaccgtgttgttttagtacatggtaatgggcctcaggttgggttgttagcattacaaaatcttgcttatcaagcggttccagcctatccgttggatatcttggtcgcggaaagccaggggatgattggttatatgatgatgcagaaaatcaatcaaaataatcctacgcaagcaattactacagtaatgactcgtgtttctgttgatattaatgatgaggcttttagagagccgagtaaatttattggtcctatttatgaggaagcagaaaaagaagaattaataaataaatatcaatggacatttaaaaaagatgggcaatattatcgccgtgtcgtaccttcaccagcacctcaaaaaataattgatatagaggcagtaaagcttttattagataaaggtcatattgttatttgtggcggtggaggaggtattcccgttaataatataaataatgaatttattggtagtgaagccgttatagataaagatttaactgcagctttaatttctcgtgagttaaatgcagagcactttgttattttaacagaggctgatgccatttataaaaattggggaacaccagaacaagctgctattcgtgaagcaacaccagaagaacttgcaccaatggcagtcgctgatggcgcaatgggaccaaaaatcatggctgtcagtgattttgtaaatgccacaggacaacaagctcatattggcgcattacaaaacattcaacaggttattgaaggtcagtctggcactttaatttataagtcttaa

SEQ ID NO: 296026 - DNA, 1245 bp, Proteus mirabilis
atgaacgatgcacaagtgaatgaaagtaaaggcaaagtcccttattgggtcaagctgacgattattttcttttttggttggattgcactgtatggtagccgtgccattgtcggtcctttaatggtgaatattggtgctgagtttgatcttaccaaagcgcaacttggctcaattatgagtattttctttattggttatacagcactgaacattccatcaggcataattggtgactatttaggtaagaaaaaagtcttagtcacgggtgttgtactctttggtggatttaccattatcgcagggatgatgccaacttatgtcacctttatgtttgcatgggtgatggtcggggtattccaaggattctattatggtccacaatatggtttatcttcagaagctattccaaaacatcgtattacgctaggtagtgccattatcaatagtggtatggcgtttggtttatccatcggttactacatctctagtatttctgtcggtgagatggggatgagctggcgtgcaccattctatattattggggtacctattattatcattggtttgatgatgttatggataataaaagataaacctaaaacgaaagctacggatacggctcctaatgcaccaaaacagaaaacaaaactgacgtttaaagatttatttggtaaccgtaatattaaccttgcttatattactatcttctgttcaatctatgggttctttgttttagtcacttggttaccctattatcttgaaaccgagcgtggtattacaggaacacagatctctaccattgcatcactcatgccttggtttgctattcctggctcactcttatttagctggttctctgataaattaggccgtcgtaagcctgtgctattaattatgttaccgttatctttagtggctattcttgctgtacctatgtcagattctatgccagtactgattggtgcactgatcttatacgggatcgtaggaaaaattagtactaatccagtattagtggcggtagtggcagataattcaccacgccatgcattagggacatcttttggtgtgtataactgtattggtatgctaggttcagtatttgcccctacattaacgggttttttatcagataaaacaggaagtatggattccggcttctattttgctgctatcctgatttgcataggtattgtggcaagcttatttattaaagaaaatcctgacgccacagcgaccaactaa

SEQ ID NO: 296027 - DNA, 915 bp, Proteus mirabilis
atgttagatcaagagatgatccgtacttttattcaagtagcagattgccaaagctttactaaagcggcggagatgttacacaaaacatctgcggccatcagctatcggatcaaaaccctagaagagaatattggtacacagttgtttaatcgtacgacaagaaccgtcacattaacgccggcaggggaatatttattagagaaatgtcgccagtggattgtttggcttgaatcaatgcctatcgagctacagcagatgaatgcgggagttgagcaccaagttaatattgttattaataacttactctatgatcgtaccgccgtggccagtatgttagcctgcctgcaccagcgttttccttctacccaatttcatattactcgacaagtttatatgggagtatgggacgcgttaattaatgaagattaccattttgccattggtgtcacaggtaatgaatcactgaaaaataatattaatatttgtgctatgggggaaattcaatggcaatttgtcgtggcaccaaatcatccattagccaatgttagtggggtattaagtgatgatcaaatgcggatatactctgccgtcaatgttgaagatacttcacgccatctttccaaacgcaccgcttggcgtctatctggacaacatgaaattaaagtgcctgatttacatactaaactagcatgtcatttaaaaggtgtcgggatcggttttttaccattaagtctatgtaagccactgattgatagtggacaacttattgcaaaggaagtgaaaaatcgtcgccataattctcccctatcactagcttggtgcgaagataaaaaaggtgccgttgtcagctatctggttgatttgttccgacaagggcatcccagtgtgcaatctttttacgatccccttaactaa

SEQ ID NO: 296028 - DNA, 822 bp, Proteus mirabilis
atgatcacttggttacttcttgctttatctttattgttattagggttccatcgcaaacttgcacttactactttagctataaccaccattagcgcatttataacaggtgttatcacttggtatgtacttccggttatattgagcttaattttactctcttatgcatatcgccattacaaaaccaatcgtcttattgccactattgttattcttgcatttatcgccattattgttgggttaacttttcattttattcctggttttaataacttacgctacattaaacatgttccattagggcaatatagcccccctttctctttttatttcaatgccgataaagcattaatcccttttattttaatgatttttattcctacattatttaggacggaaccagtaaaaaaagccaataaatatcaatgggttttactggctatggcgatccccgcactgttattattcgcaatggcattgggtggactcactattgaattacatttgccacaatggctacccgcctttatgttagcaaatattttctttgtctctcttgctgaagaagcactatttagaggagccatacagcaaagtctatctcgctatttatctccctatcttgcgctatttattaccgctattttatttgggttagtccattttgccgggggaatattactcattatcttcgcctcattggcaggtattatttatggcttagcgtggatgtggagcggtaggctttgggttgctacactctttcattttgcactgaatctcactcacctgctctttttcacttacccttttaaaatcgcgtaa

SEQ ID NO: 296029 - DNA, 783 bp, Proteus mirabilis
atgtgtatcatttctgccgtcgctattagtattggaacaataggctcagttatcctcttcgccttaatttcatggcttgcattacgtgaattggttacattaaccccgactcatcgaggtgatcacgaagcacttttttggtgtttctttgtcgtgctgcctatccaatatattctcgtcggtgtgcaatggtataatttgctagccatctttattccggtttatgccttcttattaattccaacacgtatggcgctttccggagatactcatcactttctcgagcgcatggcaaaagtgcaatggagtgtcatgatagctatctattgccttagctacgctccagcattattaatgttaccgatagaaggctttgaaggacgtaatattaacttattactgtttttgatgatcgtggtacagacttctgatgttttacaatatgtgtttggtaaactatttggcaaacatcctatcgtaccgaaattaagtcctaataaaaccatcgaaggtttctttggcggcattatttcagcaagccttatagggatgatgttatggtgggcaacacctttcacatggtgggctgcttttttactctctttagtcatcacactcgcaggctttgctggcggtttatgtatgtcagccataaaaagagacagtggcgtaaaagatttcggtactatgattgaaggccacggcggtatgatggatagaatggattccctgtgctttgccgcccctattttcttccacgttattcgctatttctacgtgtaa

SEQ ID NO: 296030 - DNA, 180 bp, Proteus mirabilis
atgatcaatgcactaaagaaaattgcagcacaacacgaaactgaaaattttgaagatggctcgacaggacgagcatatcgcaaagcagcctttatttttaataagggagactctcttttttcaacccatccttcgattgaaaatagaatagcagtgctcgaaggaaaaaagactttttaa

SEQ ID NO: 296031 - DNA, 183 bp, Proteus mirabilis
atgtctcattatgaggaagtgattaagcaggttgatgaggccattgccagtgctagcatacaaacgatgaacgaattgctggtggaattaggtaaagataacacaatagcttttgctcagcgttatgaacagcaagagcgtctacgcacagctatttttcatcatggtgaaaaacagcgctaa

SEQ ID NO: 296032 - DNA, 1230 bp, Proteus mirabilis
atggcagtggcaagcgaaacagcaaaagaaccaacggtactttctcgtcgtaaattgttatgtattgccggaatggggtggactttcgatgcaatggatgtggggcttctcgcctttttattaacggcgttaaaagaagattggggattaacagcagcgcaattaggttggattggcagtattaattctatcggtatggccgtaggcgcttttgtctttggcattatggccgatagaaaaggtcgtaaaccggtatttatcttaacgttgctgctatttagccttggttgcggtttaactgcattagcaagttccttaatggtggtattaattttacgcttttttattggtatgggattaggtggagaattacctgttgcttccacattggtgagtgaaagtgttaaagcacatgagcgtggtcgtattgttgttttattagagagtttttgggcggtagggtggttaattgccgcgttaatagcgtattttattattcctgattatggctggcgtatggctatgttattgagcgcactacccgcagtttatgcactctatttgcgttcaaagttaccagaacccagttccacacagtcattattacaaaatcgtttatctcttcgccaatcaatggcattgatttggtcacctcaatatcgccgttcaacactgatgttgtgggtattatggttttgtgtggtgttctcttattatggcatttttttatggctaccgagtgtcgcaatgttaaaaggctttagtttaattaaaagctttcaatatgtgttgatcatgacactcgctcagttaccgggctattttaccgcagcatggtttattgaacgttatggtcgtaagtttgtgttaatcacctatttagcaggcaccgcgattagcgcttactattttagcgtagccgattccacaaccacactattagtatttggtatgttgttatcattttttaatttaggtgcgtggggggcattatatgcctataccccagaacaatatcctgatggtatacgagctacaggcgctggaacggcgacggcaataggccgtattggcggaatattagggccactgatggtaggctatttagtgcaatatcaatttgacataagcactatttttcttatttttagcctttccattgtgatagcgatactagcggttatgttattaggtaaagaaaccaaaaatagaccacttaattctatttaa

SEQ ID NO: 296033 - DNA, 771 bp, Proteus mirabilis
atgattcagttgtattgggtagccctcaagacgatttggattaaagaagtgacccgttttggtcgtatctgggtacaaactttaattcctcctgttatcacgatgtcgctctattttgttattttcggtaacttaattggtaagcgtattggtgatatgggcggtgttgattatatgcagtttattgttcccggcttgattatgatggcggtgatcacaaactcatatgctaatgtctcctcttcattttttggcgctaaattccaacgtagtattgaagaattattagtatcgccagtaccgacccatgttgttattgccggatttgtgggtggtggtgtcgcccgtggtatttgtgttgggatattggtcactctggtttcactattttttgtaccactagagatacactcttggacaatggttgtggtgacattattaatgacctcgattgttttttctctcgcaggattgttgaatgccatttttgcgaaaacctttgatgatattagtattattcccacctttgttttaacgccattaacttatttaggaggtgtgttttattcactctccttattacctgcattttggcaaggtgtttctaaattaaacccgattgtttatatgataagcggtttccgttatggttttttagggatcactgatgtgtcattaacggtgacaatcacggtactatgcctgtttattgccgtgttttatatcgtagcctggtacttaattgaaaaaggtcgcggtttaagaagctaa

SEQ ID NO: 296034 - DNA, 942 bp, Proteus mirabilis
atgacttatgcattggagttaaccgagttaacgaaaacttaccataatggtgtcaaagcgcttaaaggaattaatttaaccgtagatgcgggggatttttatgcgctattaggccctaatggtgcaggaaaatcgaccaccatagggattatcagctctttggtgaataagagcagtggtaaagtcaaagtatttggctatgacactgataccgatatggttaatgctaaaagacaactcggattagtgccacaagaattcaatttcaacccttttgaaaccgtattacaaattgtccttaatcaggctggctactatggtgtaccacgaaaagtggcattagagcgtgcaaaaacatatttaacccaattagatttatgggagaaaaaagatgatagagcacgttttttatctgggggaatgaaacggcgtttaatgattgcgcgtgcattaatgcatgagcctaaattgctgatcctcgatgagccaacggcgggagtagatattgaattacgtcgttcaatgtggacgtttttacaacatttaaatgcacagggcaccactattatattaaccacacattatcttgaagaagcagaaatgctgtgtcggaatattggtattattcagcgtggtgaactggttgaaaacaccagtatgaaaggtttattaagtaaattagagtctgaaacctttattttagacttagcggcaaaaagtccgttacctgaattacaaaattaccaatatcgtttagtcgatacatcaacactagaagttgatgtgaaaagagagcaaggattgaatggggtttttgctcagctcaatgcacaaggtattcaagttttaagtatgcgtaataaagctaaccgccttgaagagttatttgtgcatttagttaatgaagatcatacagaaacagaaaaaggagagagggaatga

SEQ ID NO: 296035 - DNA, 654 bp, Proteus mirabilis
atgatgagaaaaattgaagaactgttagccaacaataaacaatggtcaagttctgttacagaagaaaacccgcaattttttaaagagctgagtaaaggccaaaaacctcatttcttatggattggttgttcagacagccgcgtccccgctgaaaaattaattaatgccgcccctggtgatttatttgtacaccgcaatgtggcaaaccttgtgatccacaccgacttaaactgtctttctgttattcaatatgccgttgatgtcctacaagttgagcatattattgtttgtggtcattatggctgtggtggtattgaagctgctattgaagggactgaactgggcttaattaataactggttactgcatatccgtgatatctggtataaacatagctccatgttaggtgaactcgcaccacaagatagattaaatttactctgtgaacttaacgtgatagaacaagtttataaccttggtcactcaactattatgcaagccgcatggaaacgtggacaaaaagtgatgatccacggttgggtttacggtttaaacaatggtgaattacacgatttagatatcacctcagacagtcgtgaaaaactagaactctcttatcgccaagctattgcaaaattaagccatccacgttga

SEQ ID NO: 296036 - DNA, 543 bp, Proteus mirabilis
atgaaacatattgttgatgtcatgatctctgaagaagagatcaaacagcgtattgctgaattaggtcgtgaaatcacagaacattatcgttctcgtcaagaaaaacacgatttggtcttaattggcttattaaaaggctcttttatttttatggcggatttatgtcgtgaaattgaagtgccacatgaagtcgattttatgacagtatcaagttacggtaatggaatgacgtcaacaagagacgttaaaatcattaaagatcttgatgaagacattcgtggtaaagatgttctgattgttgaagatattattgactcaggtaatactttaaaccgtgttaaagagattttaagtttacgtgagcctgcctctattgctatctgtacgctacttgataagccatcacgtcgtgaagtggatgtgccagtagagtggattggctactctattgaagataagtttgttataggttacggcattgattatgcacaacgttatcgtcacctaccttatattggtcatgtaacgctactagatgaataa

SEQ ID NO: 296037 - DNA, 1581 bp, Proteus mirabilis
atgcaacgtcgtgaatttttaaaattaggggcaacattaagcgccgtcacactattaccaagttggagccgtctcgcattcgcccaaactaacacgccttcactcgctattccacctcaaattagcccagacaaacaacaaaagattgttcttaatatccaacaaggtgtttcccagtttactgctacagcaagtacaactacttggggatataacggtagcttattaggcccagcattaaaattaaaacgtggtgaacctgttactattgagatcaataacacgctgccagagactacgacggtgcattggcatggtcttgagataagtggtgaacaagatggaggtcctcaagcaactatcgcaccgggtaaatcacgaacagtaacttttacgccagatcaagcggagtcgacatgttggtttcatccccatactcatgggatcaccggaaaacaggtggcaatggggttagggggattagtgatcatcgaggatgacgaaacggccaagcgaaagttacctcaccgctggggagtggatgatttaccggttattttacaagacaaacgcttagacagtaacggtcaaattgactatcaacttgatgtgatgagtgctgcagtaggttggtttggcgacatgatgctcactaatggtgcgattcaaccgcaacacattgtaccaaaaggttggattagattacgtttcctcaatggttgtaatgcacgtagtcttaatttagccaccagtgatggccgaccaatgtatgtaattgctagcgatggtgggttattagcggaaccagtcaaagtgacagaactccctattttaatgggggagcgttttgaagtactggttgatacctcagatggacgtgatttcgatattgtcactttacctgtccgacaaatggggatggtattagcgccatttgataatgtattacctgtattacgtctactgccttcagcagaaaaagcggtgggtattttacctgatcaattagccttaattcctgcattaccatcactaagtcatattgcgacacgttcattacatttacgtatggatatgcgtttagatatgcaaggtatgatggcgctaacggagcgttacggtgataaagcgttagcgggaattcaccatggtatgagtcatatgcgtcagggcaatggaaatggcatgatggggggcggcatgaattgtggtcatggctctgcggatgttgatatttataatgcaaatagcatcaatgggatcccattctcaatgaccgaacctgcatttaatgttaaacaaggggtttatgaacgctggctggtttctggtcgtggcgacatgatgttacatccattccatgttcacggaacacagtttcgtattttatcggaaaatgggcgtaaacctgaaaaacatcgccaaggttggaaagatattgtcagagtggaagggcaaattagcgagatccttgtaaaatttgaccatttagcgacaaaggaacacccatttatggctcactgtcacttattagaacatgaagatacaggaatgatggcgggctttacggtgagtcgataa

SEQ ID NO: 296038 - DNA, 351 bp, Proteus mirabilis
atgaaaaaaatgttcgctttgttctgcactattattctttcttttgccacgcttttttcttctagtgcaaaagcactcacttatactcaagcagaagacttagctgatttaaccgcggtatacctgtttttaaataatgattgtggttatgagcagatctcaaaacaaaaaatagaacgagcgctgattattttttcacaatctcagcagtgggatgtctctaattattcaatgctcccaatgagcaagcttaatgaagatagttatcaggatttaaaaaatatacaaattgctcataacaaaaaatgtcaactactagcccaaaaatcacttagcttactaaactattaa

SEQ ID NO: 296039 - DNA, 963 bp, Proteus mirabilis
atggcgttgatgtttgggccaatcgtcgtggttattattgcttatcgttttaaatggcagctctctgttcctaagcatacactgacttttatccaactgaccttaggcacctctgttggattgatgtttaaccaagtacatttagggagtgcggataatttagtgcttcttttgattatcctcgttatttgtttagccattcaatttgttgtcagtttcttatggtttcatcgtcatattggttggacaaaagaagaggctatgttaggcgctgtacctggcgcgatggcggctattcttgctttaacagatcataccaaaacaccaccacaaaaaattgttatttctcatactattcgtttaatcgtattgattattatggctggatttattgttggctcagataaagcaacccttacggagtttacattacctgaaatgacactgttgtcatcgatgtggttattattaattgtcgcgttagggctagtatctgggcttttattacagaaaattcattttccagcaccgtttatgttgacatcattaggcagtgcaatattggtacaatcttttgtcagtgagccgattgcttttccaatgctattaaatgaactcagtatggtgttaattgggatgaatattggcgcacattttgtggtttttccttttgcttcgttaattaaaaatgctttttcctctgtgcaggtggtcattatcaacgttattttaacggtgatcgttgcattgagcgcagcttatttaacaggggctccctggacaacgctggtattagcttgggcaccgggaagtatggaagcaatgacatttgccgcgatcactatgaatgtcgatgcggcttttgtgatgtcgaatcatatattgcgcatgttgatcattcaaagtattccttctattgccttgttttacagtgaacgaaagcagaaaagaaaacgtgagtaa

SEQ ID NO: 296040 - DNA, 1251 bp, Proteus mirabilis
gtggggctggttattttagtctttatttttaatttacctccgggtaaaccgcctgtcgatgtaatgttagtgattattgctgttgtctctgcatctgcaacattacaagcatcaggtggtttagatgttatgttgcaaatagctgaaaaattattaagaaaaaatccgaagtatatttctattgttgcacctctcgttacctgtaccctgactatattatgtggtactggacatgtggtttataccattttgcctattatctatgatgtatcgattaaaaataatattcgtccagaaagaccgatggcagccagtaccattggttcacaaatgggaattatcgcaagtcccgtatctgttgcggtcgtcaccttagtggcaatgttaggtaatgtcacttttaatggtaagcatcttgagtttttagatttattagcgattaccattccatcaacctttattggtattttagccattgggatttttagctggtttagaggtaaagagttagataaagatcagcgcttccaagatcttatttccataccagagaatcatgattacgtttatggtgatactgcaacattgttagataaaaaattaccaatgaaaaattgggtagcaatgtggatattcttaggtgcgattgcggttgttgctgtattaggtgcattttctgaattacgtcccgtatttaataataaaccattatctatggtattagttattcaaatgtttatgttattagcgggcgcttctattattattatttgtaaaactaatccctcacttatttctaaaaatgaagtttttcgctccggtatgatagccattgtggcggtctatggtattgcttggatggcagaaaccatgttctctgcacatatgaaagaaatagaagctgcattaggacaattagttcgtgagtatccttgggcttatgccgttgtcttattacttgtttctaagtttgttaattcacaagccgccgcattagccgcaatagttcccttggctttaggtattggtattgatcctgcctatattgttgcttcagcaccggcgtgttatggctattatattcttcctacttaccccagtgatttagccgctatccaatttgaccgttcaggaacaacacgtataggtcgttttgttattaatcatagctttattttaccgggattaattggtgttactgtttcttgtatttttggctgggtatttgctgctatgtatggttttttataa

SEQ ID NO: 296041 - DNA, 1158 bp, Proteus mirabilis
atggaaaaactcgatttattagcaatcagagataaaatcactgcgctagattctgaactactttcactattagctcaaagacgccaattatcgactgaagttgctcaatttaaattaaatacccaccgccctattcgagataaaaaccgtgagcgtgaactgcttgagctattaatcgaaaaagggaaaaacgttggattagatggcttttatatcagccgtatttttcaaatgatcatcgaagattcggtgctcacgcagcaagccattttacagcaacaccttaatgcgactgcaaatgaatctgcaagaattgcttatttaggccctaaaggttcttattctcatattgccgctcgccaatatgcagcccgccattttgatacttttgttgattgcacttgccataaatttgaagatatttttacactggtagaaacaggacaagcagattacggtttactacctattgaaaacaccagttctggtgcaattaatgatgtttatgatttactacaaacgacctcgttgtcgattgttggcgaaattcgtattccgataaaccatgctttattaacagcagttaagagtagcctagaagaattacacactatttatagccatccacaaccattccaacagtgcagtcactatttaaatcaataccctcactggaaaattgaatattgtgaaagcacagctgcggcaatggaaaaagttgcattagcacaatctccccatgtagccgctattggcagtgaagctggcggatcgctttataatttaacaccacttgctagtaatttagctaatcaacaaattaatgttactcgttttattgtgattgcccgtaaacctattgatgtatcagaacaagtacctgcaaaaaccacctttttaatggcaacggggcaacaagcaggggcattagttgatgctttaattaccttaaaacaatacagcattattatgactaaattagagtctcgcccaataaatggtacaccttgggaagagatgttttatattgatgtacaagctaatttacgggatatcaatatgcaaaaagcattacatgacttatcaaaaacatctcgttcactcaaagtattaggatgctatccttcagaaaatattgtacccgttgaaatacaatag

SEQ ID NO: 296042 - DNA, 336 bp, Proteus mirabilis
atgattataaatatcactagcaaacaaatggacattaccccagcactacgtgaacacattgaaagccgtttaactaaacttaacaaatggcaggtaaatttaatcaaccctcatattattctcactaaggatccaaaaggttttagtgttgatgcaagtattcatactccgaatggacaacttgtagcaaacgcacaacatgttgatatgtatgcggcaattaatgatctcttggcaaaattggaacgtcaattaaataaagttcagcataaaaatgagtctcgacgtgcggccaatagcttaaaagaagaaaatttactcgtaaatgaaatataa

SEQ ID NO: 296043 - DNA, 738 bp, Proteus mirabilis
gtgatgagacgcatgaaatacctagtggcagcggccactgtaagcctgttactttctggctgttctagttcagacaaagacgcaactgctgatatgtctccttctgagctttatgcaacaagccaagaaaaattgctagatggcaattatggagcggctatcaaacaactggagtctctcgataatcgctatccttttggtccttactcacaacaagttcagcttgatctgatttatgcttattataaatcagctgagttaccaatggcgatttccgctattgaccgctttatgcgattaaacccaacccatccgaatattgactatgttctatatatgcgtgggttaaccgctcaggcattagatgatagtgcattacaaggattctttggtattgatcgctcagaccgtgatcctcagcatgcaagagtggctttcaaagactttagccagttagttcgctactatcctgatagcctctacacagcagatgccacaaagcgtcttgtttttcttaaaaaccgtttagcgaaatatgaactctctgttgcgaaattctataccaaacgaggggcttatgtcgcggttattaatcgagttgaacaaatgatgcgtgattatccagataccgaagctacacgtgaagcgcttgtgtatatggaaaatgcctacaaaaaactaggtttaactcaagaagcagataaagttgcctcactgattgcagccaaccctgcttaa

SEQ ID NO: 296044 - DNA, 978 bp, Proteus mirabilis
atgtctcaacaaatacgacttaatgctacagtcgcagattcacagctgggtcaacgcttagatcaggctttggccgaattgttccctgattattcaagatcacgcataaaagagtggatcttagacaatagagtgcaggttaacgataaaatcatcaataagccaaaagaaaaaatgcttggcggtgaaaaaattgaagtcgatgccttaatcgaagaggatgttcgttgggagcctcagaatattccgttaaatatcgtctatgaagatgatgatattttggtgattaataaaccaagagatcttgttgttcatcctggtgcaggtaatcctgatggcaccgtattaaatgcacttctttatcgttatccagagattgttaatgttccccgtgctggtattgttcatcgtttagataaagatacaacaggtttgatggttgttgcaaaaacagttcccgctcaaactcacttggtagaagcattacagcgtcgcgaaatcacccgtgaatatgaagcggttgcaacaggaaggatgacagcaggagggctggttaatgagccaatttctcgacatcccaccaaacgtacccatatggcagtgcacccaatgggaaaacctgcggtgacgcattatcgtgttatggaacatttccgtgcccatacccgcttacgtttgcgtctagaaaccggtcgaactcaccaaattcgtgtccatatggctcatatccatcatccattaattggtgatcaactgtatggtggtagaccgcgtcctttgaaaggggctagtgaagaatttcgtgagacgttacgtcgctttgaccgacaagcactacatgccacaatgttacgcctttatcatcctattaccggaattgaaatggaatggcatgcaccgttgcctgatgatatggtagaacttattcgcgtactaaaagtggacgcagaacagtttaaagatgaaatggactggtaa

SEQ ID NO: 296045 - DNA, 732 bp, Proteus mirabilis
atgacctcattgatttatcctgattggccacagcctgacaatattggcgcatgtagcacattaagaactggcggtgtcagtttgccaccttatgacagccttaatttaggggcacatgtgggcgatgatgcgctattggtagaacaaaatagacgtatcatttgtcaacaagctcaattacctgaaatgccattatggttaacacaggttcatggtattgaggtggttaatttggataatcaagacaatcataccgttgaaggcgatgccctttacacctctagtgctaataaggtgtgcgctatcatgaccgcagattgtttacctgtgttatttagtacccttgatggaacggaagttggcgctgcccatggtggatggcgcgggctttgccaaggtgtattacaacagacactcgctcaatttaaagcctctaatgagaagattatggcgtggttagggccagcaataggccctaatgcttttgaagtaggggcagaagtccgtctcgcttttgtagaaaaaaatattgcctttgatagcgcatttattccccacaatggcaaatacttagctaatatttatatgttagcgagaataattctgcaggaaagtggggtaaatcagatttatggtggggacttttgtactgttagcgataaatcacgctttttctcctatcgacgtgaacatactaccggacgtatggcctcattaatctggatcaaatag

SEQ ID NO: 296046 - DNA, 2577 bp, Proteus mirabilis
atgcgtctggataaattaaccaataaattccagcaagctctcgcagacgcccagtcattggcacttgggaacgataatcaatttatagaacccatacatttactgagtgcgttatttaatcaacaaggtggctctattcgcccactattaacatccacaggtgttaatgcctcacaatttaatgaaagaattaatgatgcattatctcgattaccaaaagtggaaggtgctggtggagaagttcatccttcaaacgatttaattaaacatcttaatttatgcgataagttagctcagaaaaaagatgatgaatttatttcatcagaactttttcttttagctgccatggaaagtggtggtcaggttgctgacatgctaaaagccgccggagctaacaaagccagtttagaattagccattgaaaaaatacgtggtggagaaacagtgaacgatcaaaatgcagaagaccaacgtcaagcattgaaaaaatatactgttgatttaacagaacgagcagaacaaggcaagcttgaccccgttattggacgtgatgaagaaataagaagaacaatccaggtattacaacgtcgtactaaaaataacccagtattaattggtgagcctggtgtaggtaaaaccgcgattgttgaaggtttagctcaacggatcgttaatggagaagttcctgaaggtttaaaaaataaacgtgtgctttcacttgatatggggtctttattagcaggggctaaatatcgtggtgaatttgaagagcgtttaaaagcggtattaaatgatttatctaaacaggaaggtagtgtcattctgtttattgatgaattacatactatggttggtgctggtaaagctgatggtgcgatggatgcaggaaacatgttgaaacctgctttggcacgtggtgaattacactgtgtcggcgccactacattagatgagtatcgtcaatacattgaaaaagatgcagctttagagcgtcgtttccaaaaagtttatgtggcggagcctacggtagaagataccatcgccattttgcgtggtttaaaagagcgttatgaattgcatcaccatgtacaaattacggatccggcgattgtagcagcagctactttgtctcatcgttatatttctgatcgtatgttgccagataaagcaattgacttaatcgatgaggctggggcaagtctacgtatgcagatggattcaaaaccagaagcattagatagactggatagaagaattattcagctaaaacttgaacagcaagcactgcaaaaagaatctgatgatgcaagtaaaaaacgtttagctatgttaaatgaagaacttgcagaaaaagagaaagagtattctagcttagaagaagagtggaaagcagaaaaagcagagcttactggtactcagcatataaaagcagaattagagcaagcgcgtattgcactagagcaggctcgccgtagtggtgatttggcaaaaatgtcagagatccaatatggtcaaattcctactttagaaaaacaacttgctgaagccaataaaactgaagataagcatatgaaactgttacgtaacaaagtaacagatgctgaaatcgctgaaatcttagcacgttggacaggtatccctgtgtctagaatgttagaaggggagcgtgaaaaactgttaagaatggaacaggaattacatagacgcgttatcggccaagatgaggcggtaaatgcagtctctaacgcaattcgtcgtagccgtgctggattatcagatccaaatcgcccaattggttcgttcttattcttagggccaaccggggttggtaaaactgaattgtgtaaagcgctcgctgattttttgtttgatagtgatgatgcgatggtgcgtatcgatatgtctgagtttatggagaaacactctgtttcacgtttagtgggggcgcctccaggatatgtgggctatgaagaggggggttacctaacagaagctgttcgtcgccgtccttattctgtcatcttattagatgaggtagaaaaagcgcatcctgatgtgtttaatattttattacaggtattagacgatggccgcttaacagatggacaaggtagaaccgttgatttccgtaataccgtagtcattatgacatcaaacttaggctcggatttaattcaagagcgcttcggtactcttgattatccggcaatgaaaactattgttatggatgttgttggtcaccactttagacctgaatttattaaccgtattgatgaggtagtggtattccatccattaggtaaagagaatattgccgctattgctcaaattcaattacgtcgtttgtatcagcgtttagaagagcgtggttatcacgtgactattacgggagcagcattagaaaaactgggtgaagttggattcgacccaatctatggtgctcgtccattgaaacgtgctatccagcaagaggttgaaaacccattagcgcaagatatcttgtcgggtaaattagttccgggtaaagaaattatcttggacttagatgacaatcagatcattgcaaaacagtcataa

SEQ ID NO: 296047 - DNA, 378 bp, Proteus mirabilis
atgtcaattcttgatgaatgggcggagcgccacattgaaaaggcgttgaaaaatggtgaactctcttctttgccaggagaaggtaaacccttggtattagatgataacagtcatgttcctgagtctttgcgggctagttatcatttgcttaagaatgccggctttttgcccccagaaatgcaagatagaaaagatgcattatctttagccgaaatactaagttcactttcagaaactggcatcaaagatgaacagttacaaaaaaaactcactttactcgaattaaaattacaacaggcaggaatggacacacagtttctacatacggactatgcaacccaattaacagaaaagttagcaacacataaacacaaataa

SEQ ID NO: 296048 - DNA, 1575 bp, Proteus mirabilis
atgcaaacaaaaaaacagggaggaagtcgttttctacgcacagtggaatggcttggaaatgcactcccccatcccgttattttatttattattttaattgctattttacttgtatcttcagcggttggtgaatacttcggcgttacagtacaagatccacgaccagaaggcgctaaagggcgcgctgaagatggttatattcatattatcagtttacttgatgctgatggtatacgacgtattcttgctaatattgttaccaattttacagggtttgctcctttaggaaccgtactggtggctttactcggtgtcggaatagctgaacgagcgggattattatcagccgttatgcgtttagtggttatgaaagctccacgcaaaatgaccacattagccattgtatttgcaggtattatgtcaaatactgcagctgaattaggatatgttgtcttgatcccgctatcggcaattattttccattcgctaggtcgtcatccattagcggggattgctgctgcgtttgcgggagtatctggcggatattcagctaacttactgttagggactatcgatccattattatcaggtattacacaacaagcagcacgcattattgacccaagctatattgttggtgcggaagcaaactggtactttatgtttgtcagcacctttttaattacatttttaggctacatcatcacagaaaaaatcgttgagcctcagttagggccttataatggtaatgaattagatgatgaagaaactgatctaaaaaatgctgcgcaagttacccctcttgagaaaaaagcactatgggcagcaacaggaacatttattgtgatggccatcattctggcattcactgtcgtacctgaaaatggcatattaagaaaccaagaaacaggtttaattggtaactcaccattcttaaaatccattgttgtattcattttcttattttttgctatccccggtattgtttatggttggatagctaagactatgcgttcagataaagatattgtcgatgccatggcaaactctatgagcacattaggtctttatttagtaattattttctttgctgctcaatttgtggctttttttggctggacaaatatagggcaagtgatcgctgttaaaggtgcggctttacttaatagtattgatatgccaagtgggttgctatttttgggctttattttaatttgcgcctttatcaatttaatgattggttcagcttccgcgcaatgggcagtaacggcgcctatttttgttcctatgttaatgctggcaggttatgcgccagaaactattcaagcagcttatcgtataggtgattcggtgacgaatattattacgccaatgatgagttactttggtttaatcttagcggttgccacaaaatataagaaagatacgggtattggaactatgatctcgatgatgttgccatattctattatcttcttaattggttggtcactgttattctacctttgggtatttgttttccacttacctgtagggcctggatcgccaatttattattcaccgcatgcgggataa

SEQ ID NO: 296049 - DNA, 324 bp, Proteus mirabilis
atgatgatgaattttgattttgcgaatatagatgtaaatgcttctgtaggtaaaaagatccaaaaaaaacgtaaagagctgggttataccggtatgcaactggctaaaaaaattggtgtcagccagcaacaattttctcgctatgaacgaggtatgaacaaaatagatctcagacatttagtgctgttagctctttatttgaatacacccatttattggttttttgaggattgttacgtaaaaaagccttcattaaataataaaggaatagataagcgcaattatgttattgctcaagcaacacctgatgcttttcattattga

SEQ ID NO: 296050 - DNA, 828 bp, Proteus mirabilis
atgtttatatttaaacgatttccggcgatatttatcttaatagcggggcttttctcagcacctgcgatggcctctattttttcttatataacagaatcaacagggacaccttctaacgccacttacacttatgttattgagcgttgggatccagaaacctcaggaatattaaatccttgttatggttggcctgtgtgttatgtcacagtgaaccataaacatacagtaaatggtactgggggaaatcctgcatttcagattgctcgaattgaaaaactacgtactttagctgaagttcgtgatgtagtacttaaaaatagatcattccctattgaagggcaaaccacccacagagggccttcattaaactctaatcaagagtgtgtgggattattttatcaaccgaattcaagtggtatatcacctcgaggaaaactcttaccaggttcactatgcggtatcgcaccaccaccagtgggtgcttgtaaaatatctgaaggtgcggtgaaccttaactatggtgatattgatgaagctagtttaagtggtgctaagcgctctgaaacaatcaatgtaacctgtaatttagcaatgaaagtgttggttatcgcatctggctctgatagtgggcgggtacctctgcgtgcagataagagtttatatgctgatttatatctaaacaattatcctggtgaaaaaggcgttacggtaaatgtcccagcaggcggttcagcgccagtctctgtgagttcaacgctacgcacgaatggacgggtagctcctggtcgtttctccggttccggttcaattattttaaccatgccttaa

SEQ ID NO: 296051 - DNA, 549 bp, Proteus mirabilis
atgaaaataaaaacattatcgatccggttcatattgggtctatctgtatcaatagggttaacttcagcggcttttgcaataccggacaacctctattttcacggcatattagttgatgagccttgtaccataaaaccgggtgatgaaaccgtggtactcgattttggcaatattcctgataaaaacctttatgcctataaaagaacgccaagcaagttatttcaattacgtctgtcagaatgcgatctctcaatcggtaaaagcgtcaaaataacctttaaaggagaggaaaatcaagcaatggcaggagaaggatttttggcaataagtccggacagccaagcttctggtattgcggtgggattagagtctgaaaatggtaatgctctacctataaataaagaaacagacaagatgtcattaactgcgggtgacactattttgaatttttatgcctttattcaaggtgagccggatgcgattgcgaataagtcgattaaacgtggtccttttagtgcaatagccaccttctatttgaattatgactga

SEQ ID NO: 296052 - DNA, 486 bp, Proteus mirabilis
atgaataaattgcaatctatttgtctgattatattactaaattctacagcagtaatggcggccgactcgcctaatttaaaattattcggaacattattagtgccacctccttgtgttatcagcaatgacgaacgaattgaggttttttttggtaagaacgtcggtattaataaagttgatggtattaactataccgaatcggtgaattataccttggtatgcgacgctaatttaaaaggttgggatttgggattatcaattatcggacctaaaacccagtttgatgaggcggcgttgcaaaccaatattcccgatttaggtattcatttaactcaagatggtaagccttttaagctaaatgagcgtattgcgatttcaccagattcgcctccggttattcaagctgttccagtaaaaagaccgggaagtacattgcctgaaggggcatttgaagtctcagccaccttattagcagaataccaatag

SEQ ID NO: 296053 - DNA, 546 bp, Proteus mirabilis
atggttatggaacagtggtttagcccaagcaaggcagtgttggtttttattctggcaacatttactggaggcctgagttctactgctgttgctaacttacctgcaggagcagtaataagagcgacccccgggattgtttatatcaatattactggaaacgtcatcgctccacctccttgcttaatcaataacggcaagatgatcgaggtgaattttggtgaagtaatgagtacgcgtattaatgatagcaattataagcaacctatcgaatataccgcgacttgccaaaaaagaccgactaacgccatgaaagtctatataacaggtaatgcaacagggttcgatagtaatgccctacaaactaatattacgggattaggggtacgcattctttatcaaggtaaattattaggattaggctcagcggttaaatttacctatcccaatttgcctaaactagaagcgatccctgtgcgtgataatagagaaacactagttggtggagattttgttgccaatgccacacttcatgtagattatcagtaa

SEQ ID NO: 296054 - DNA, 759 bp, Proteus mirabilis
atgatgttattaaaacgctcatgcattgttgcaaccactttgttaatgggaatggcatttactcatcaagctgttgctgccattgcgctagatcgaactcgtgtcatttttaatggtgccgaaaaatcgattagtttaaatgtcagcaatcaaaataaggacttgccttatcttgctcaaggctggatggaaaatgaaaacggcgaacgtattgaaagcccactgattgttttacccccgatccaacgtattgaaccgggtgataaaagtcagattaaggtgcaatcattacctgatatagccaaattaccacaagatagagaaagtgttttctattttaacctacgtgaaattccaccacgtagtaataagcctaatgtactgcaaattgcattacaaacgcggatcaaattattttatcgtcctgcatcaatctatgcctcgcaaacggatttaaccaatccttggcaagagcagatcactttaactaaaaaaggtgatcgcttcgaagtgaataatccaacgccttactatgtgacattagtcgatggattaaccagtttgaaaggaaaaagcttggatggctttgaaccattaatgatcgcacctaaaagtagcggcacgataaatctgagtgcttccatgtttggtgcttcaccggtattgagctacatcaatgattatggcggtcgccctcagatgaaattcacctgtagtggcaatcaatgcaaagtaacagaaacggcagctggaaactaa

SEQ ID NO: 296055 - DNA, 2394 bp, Proteus mirabilis
atgccagggcgctacgaatttgttgttcgtataaataataatgaacttcccgatatctacaacattaattatgttgtacctgcagatgatcccaaaggaagtgaaccttgcttacctcctgaattagttcgtcaattaggactaaaaccagagtggcttgataaaattcgttttaacgataatcaaacttgccttgatacatcatctattcccggaatgacaataaatgccagtttaggtagtggtaatttattattaacgatacctcaagcttatttggagtattcagcaccaaactgggatccgccttctcgttgggatgacggtatttcagggatactttttgattataacgtcaatgccaatgtgactgatcctgctaaaggaaaacaacgtcagcaagtgacggggttaggtactttaggggcgaacttaggtgcttggcgttttcgcgctgattggcaagcgagctaccaacatacgacagggatccctcaaagtacagaaaacagctggaaatggaatcaatactatctctatagagctatccctcaatgggaagcgcgctttgtcatgggagagacttactcgcgctccgatatttttgatagtttccgttttaccggggttcatctcgcaactgacgacaatatgttgccacctaatttacgtggatatgcgccagaagtcacaggtgtagcaaaaaccaatgccaaagtgacaattagccaacagggtcgagtgatctacgagacgcaagttgctccaggaccatttcgtattcaagatattaatgatgccgttagcggtaaattagatgtacgtgtcgaagagcaagatggctctgtacaagagtttcaaatggatacggcaagtattccttatttaactcgaccaggacgagtgcaatataaattctcggcaggtaaaccttctaatattgaccataataccgaaggccccgtttttggtatgggggaattttcatggggggtgagtaacggttggtcactttatgggggctcaattgttgcgggtgattataacgccttgtctgcgggtatcggccgtgacttaatggcttttggtgctctctcttttgatgctactcactcttgggcaaaaattcctcgtgatgataagcgttataacggtggctcttatcgattaagttattcaaaacgttttgaagctattaatagccaagtcacctttgctggttatcgcttctcagaacgcgactttatgaccatggatcagtatttagagcgtcgctatcgcgatggtaatgctgataataacaaagaactttataccattatgtttagtaagcaatttcctgactggggattgagtacttacttaaactatagtcaccaaacatattggaataagccaactaatgataattacaacttatcgttagcgaaaagcgcggatattggtcgttttaaaaatatcaattttagtctctccgctttccgtaataaatttaatggcaccaatgataatggcgtttatatgaatgtcagtatgccttggggtgatcgtgcgaccatcagttacaacactgtcattaataagagcggtaactctcataatgtcagctattacgatcgaattgatgacaatagcagttatcgtgttggcgctggggtaagtagcaatggtaaaccttcagccgatgcttattttatgcattatgctgatgcggccttagtcaccgccagtgcaagtcatatcaatggtgaatatacctctgccactttatcgctacaaggtggtgccacacttacgccgaaaggtggagcattacaccgcgttagtcgtacaggtagtactcgcttacttattgatacagacggtatcgctaatattcccgtgaagaattttggtgcgatttcccataccaatatgtttggtaaagcggtattgccagatattaatgattactaccgtagtagcgcgagtatcgatcttaatcgattacctgaaaatgtcgaagcattacgctcaattcagcaattaaccctaaccgaaggggcgattggttaccgtcgatttgatgttatcgaagggcaaaaagccatggcggttattcggttaaaagatggaaccttcccaccatttggcgccagtgtcacaacagaaaaagggcgtgagttaggcatcattaatgatggtggaaatgtttatctaaccggtattaataccggggatgtattgagtgttcgttggagtggtaaagagcagtgcaaagtacttattccaacattggtggagaatgtgcaaatttcatcactgttattgacctgtagtgatgatggcacagcaacctctactttcaatcaaagagaagtctccttacctaaaacgaagtttctatctcgttaa

SEQ ID NO: 296056 - DNA, 267 bp, Proteus mirabilis
  misc_feature (196)..(205): n is a, c, g, or t
atggttagatcattcaaaaccgtttgtttagagaagcgagaaaagagaaaaaagcatgctattcggcctgttgctatattgatctatttaattgttactggggcatccagtctttcaaattcagctttagcgaatagcgatattgagtttaatgctgatattttagatcttaaagataaacaaaatatcgatttannnnnnnnnngatttctctcgagctggctatattatgccagggcgctacgaatttgttgttcgtataaataa

SEQ ID NO: 296057 - DNA, 501 bp, Proteus mirabilis
gtgagtgttgatagcaaaaagttcacactaataggactaatccttgtattagctattcttttatttgtcgcttggaagtggatatttccacggccacaatttgcccatgtggtttcagcaacaccgattaaatcaaccgtttttgtgacagaagagtattgccatcgtattggactgcctacacaatttacaccagaaaaattatcgcgttttcatcccgcagagcaagagtgccgtgttttctatatgatagaagcgctaaacaataaaagtattgctcacttcccttatgctcaatttagagaatgtattcccatttaccgccaagaaaggcgagttatcggttatgatgtgctttacacaattgatggtacaccgggtaaagtgagaacgacatttaaaccgggcgatatcatcgcgctagatagcgatggccgacttgttttggagcaagagccatattgttctatgaatgaaaatattccttgccgtaaagagtaa

SEQ ID NO: 296058 - DNA, 3456 bp, Proteus mirabilis
atgtcctcagaatatcgttatcaacttcctgtaaaacaagggaatactcgccagctgggtcagctgacaggtgccgcttgcgccctagaatgtgcagaaatcatcaaacgtcatgctggattagtcgttcttgtcactcgtgatatgcaaaatgcactgcgtttacaagatgaaatccgtcagttttgtgattatcctgtagagacattatctgattgggaaacattgccttacgacagtttttctccccatcaagaaataatctctaaccgcctttctacgctataccgtattccatcacttctcaagggaattttaatcttacccgtcaatacgttaatgcaaaaagtctgcccaacagattatctcgcaagtcatgcattaataatgagtaaaggagagcaactttctcgcgacaatttacgcaaaacatttgatgaggcgggttatcgtcatgtagaacaagtgttagagcatggcgagtatgcaacacgcggcgcattacttgacctattcccgatgggcagtgaatttccttatcgaattgacttttttgatgatgagatagatagcctaagaacttttgatgttgatacgcaacgcaccttaacagaagtcgagcagatcaaactattaccggctcatgagtttccaactgatcctaatgcgattgaactctttcgtagccaatggcgtgaacgttttgaagtaagacgtgatcctgaacatatctatcaacaagtaagtaagcaagtattacccgcaggaattgaatactggcaaccgctcttttttagtcagccattatccaatttatttgcttatttcccacaaaacaccttaattgtgacgcaagatctgcaagattgcgctgataaattttggcaagatatcaaccaacgttatgaaagccgtcgtgttgatcccatgcggccattactgccaccagatgatatttggcttaatgtcgaaacgctcaatcaacagttaaaacagtggccacgtattcaacttaaaacgcaagcactgccggaaaaagcgggttataccaatttaggttatcaaccactgcctgatttatcagtcaatgcacaaagtaaatcaccgcttgataatctacgccgtttccaagagcaattttctggcagtattgttttttcggttgaaagtgaaggccggcgggaaaccgttcaagagctcttatctagaattaaaattgcccccaaacaaattattgaattagcggatgctaaagagaaagggtgttattttattattggctctgcagagcatggctttattgacaattatcgtcagttagcgctgatctgcgaaagtgatatgttaggtgagcgagtccaccgtcgccgtcaagataatcgtcgcaccatcaataccgatacactgatccgcaatctggcagaattaagtcccggacaacctgttgtccatcttcagcatggggttggtcgttatcaaggtatgaccaccttagaagcgggtggcgtaaaagcagagtacttgatcctctcgtatgcgggagatgacaaactctatgttcctgtttcgtcactgcatttgatcagtcgctactctggtggggcggatgaaaatgcgcctcttcataaattagggggtgatgcttggactcgtgcgcgccaaaaagcagctgaaaaagtgcgtgatgtggcggcggaattattagatgtctacgctcaacgagccgttaaatctggttttgcgtttaaattagataaagaacaatatcacactttccgccaaagcttcccctttgaaaccacacccgatcaagagatggcgattaatgccgtattaagtgatatgtgccaagccattgccatggataggctagtatgtggtgatgttggttttggtaagacagaagttgctatgcgtgcggcatttcttgcaataagcaacaataagcaagtggctattttggtgcctactaccctactggctcaacaacactttgaaaactttcgtgatcgctttgctaattggccggtcaatattgagatgatctcacgttttcgtagtgccaaagagcaacagcagatcaccgaaaaattagcagaaggcaccattgatatcgttattggtacacataaattattacaaccgggcattcaatggaaagacttagggttattaattgttgatgaggagcatcgcttcggtgtacgtcataaagagcgtattaaagcaatgcgtgccaatgtcgatatattaaccttaacggccacccctattcctcgtacgctaaatatggcgatgagtggtatgcgtgatctgtcaattattgccaccccacccgctcgccgtttatccgttaaaacatttgtccgcgaatatgatgatctggttgttagagaggctatcttgcgtgaaacattacgtggtgggcaagtgtactatttatataacgatgttgaaaatatagagaaagcgcgtgataggctagcacagttagtacctgaagctcgtattggtattggccatgggcaaatgcgtgaacgtgagcttgaacgtgtgatgaacgattttcaccatcaacgatttaatgtattgctctgcaccaccattatagaaacgggtattgatattccgagtgccaataccattattattgaacgtgctgatcactttggtttagcgcagctacaccaattacgtggacgcgttggccgctctcaccatcaagcctatgcttatctattaacccctcatcccaaagcaatgactaaagatgcccataaacgcttagaagcgattgcctccctagaagatctcggcgcaggttttgctttagccacacatgatctagaaattcgtggtgcgggagagttattaggtgaagagcaaagcggtcaaatgaataccgttggcttctctttatatatggagttactagaaagtgcagttgaagcattaaaagagggtcgagagccatcattagaagatctgaccaatcagcaaaccgaaattgaattaagaatgccggtgctattgcccgatgactatattcctgatgtcaatgtaagactctctttctataaacgtattgccagtgccaaagacttaaatgaacttaatgatctaagggcagagcttattgatagattcggcaccttacctgatgcaggacgcaacttattacgtaatgcggctattcgattaagcgccatgagtttaggtatatctcgcattgaagcccatgacaaaggtggctttattgagtttggtgaaaaaaataatgtcgacccgacttatttaatcggtttattgcaagagcaaccgagcgtcttccgtttagatggccctaccaaattgaaatttatgataagcctaaccgatcgagaaaaacgactcacttttatcgacgatatgctcaccgcttttagtgaacacaaaataaacgcattgtctgtttag

SEQ ID NO: 296059 - DNA, 1164 bp, Proteus mirabilis
atgcggggtcgcgcagtcgacaaatttggtcgattcgtctcatggctatccgctttagggattatgctgggtgttgcggcattgatcacagtgacttctgtgatgaatggctttgaacgctcattacaaaacagcattttggcctatattccacaagctgttatcacaacacccaatgggcagctacccaaacaagatagtactgcacaaatgttattaaaacgagaagatgttatcaatgtcgttcctttagttgaaggggatgtggtattacaaagtaaagataatatcggtgttggcgtgatgttagggattgataaagcacaagatgaacccctaacacagtttattcgctatggcgatttctcgttattaaaaccgggagaatatggtgtgatcctcggtagtggtttagctaaacagctaaaaaccaaagaaggggatagcattcgccttattgttcccggcgtaagccaactcaccccaatgggccgagtgcctagccaacgactgtttactgtcaaaggtattttccaaagtggtggtgatgctgatgcttctcaacttctggtcaatcaacaagatgcggcgcgtttgatgcgctatcaacccggcaatattaccggatggcgtctattcttctcaaccccccttaatattgaaaaatacagtgctgaacctttgccagcaggtttaagttggaaagattggcgtgaacgaaagggcgagtttttccaagcagtgaaaatggaaaaaaatatgatgggcttattattaagcctaattattgcggtcgccgcgtttaatattattacttcgctttcattactggtgatggaaaaacaaggtgaagtggcaatattacaaaccatgggcttaaagcgttcacagataatgtctatctttatgctacaaggggcaggggccggtattttaggtgctattgccggaggtttgttaggggcgttactatcaagccaactaaatgtgattatgcctgcggtaggacttattcctcatggggtagaattacccgcgactttagagtggagccgagtctttatgattggttttgccgctattgtgatttcactattatcgactttatacccgtcttggcgggccgcaactattcagccagcagaggcgctacgttatgagtaa

SEQ ID NO: 296060 - DNA, 705 bp, Proteus mirabilis
atgagtaatacccctttattacaatgtcatgcactttgtaagcagtatcaagatggtgctatttcaacacaagtcttaaaatccgtctctttcgcgatcaatcaaggtgattttatggcgattgtcggcagctcaggttcaggtaaaagtaccctattacatttattgggtggtttagactctccaacctcaggtgaagtgatatttaaagggcaatcgctcaataaattaacttcaacggcaaaagcggatttacgtaatacgcaattgggttttatctaccaattccatcatttgttacctgattttactgcattagaaaatgttgcaatgcctttaatgattggtggaatgagtgcagtaaaggccaaacagaaagcgatgtctttacttgatgccgtaggattaactgctcgtgcgcatcatcgtccttctgagttatctgggggagaaagacaacgtgttgctattgctagagccttagtaaacgatccggcgttagttttagccgatgagccgacaggtaatcttgaccaaaaaaatgcggaaggtattttcgaattactcatgaaattaaataaagaaaagaaaactgcctttttggttgttactcatgatttatctctcgcggcacgctttcaacgtcaacttgaaatgaaagatggtcaattagagtctcaagaagcgatttcaggagtggaataa

SEQ ID NO: 296061 - DNA, 1248 bp, Proteus mirabilis
atggcgcagttgccacttgctttagttaccgcattacgtttttcaaaaggacgaaaacgtgctggtatggtgtcattaatttcgattatctcaacgctgggcattatgttgggtgtagcggtattgattatcggattaagtgccatgaacggttttgaacgtgaattaaaaaaccgcattctttctgtggttccccatggacaaatttattcggtagaacaaccctttatatcttggcaaccggcactatcgcggattgaaaatactgagggtgttgttgctgctgccccctatattttattaaccggattacttgaaaaaggaaccgaattaaaagcggtacaagtgatgggggttgaaccgaataaacaaagtgatatcagtttattaccgagctatgtgcaaaataatgcatggcaacattttcaagcgggtcaacagcaaatcattattggccaaggtgttgccgatgctttgaaaatcaaacaaggtgattggttaactattctgatccctaacaatgatgatccgaaaaagctattacaacctaaacgcattcgtttacaagtcagtggcatatttaaactcagtggtatgctcgatcaccaattagcgttaattccattggcagatgcgcaacagtatcttgattacggcaaaggaattacgggtattgaagtgaaaacaagcgatccatttctagctaatgaaattattcataatgcaggcttaaatagccaagcctatgtttatgctaaaagctggatcagcgattatggttatatgtatagcgatattcagatgatccgcagcattatgtatctctcaatgattttagtgattggggttgcttgttttaatattgtctcgacgctgattatggcggtaagagataagagcggagatattgctattttacgaacgttaggtgcaagagatagccatattcgcaatattttcttatggtacggactgttgtcaggcatgatcggatgcgtggccggtgttattatgggggtagttgtctcactaaatttaacccctattgtctcggtaattgaatccatgacagggcatagtgtgctatcaggagatgtctattttgtcgatttcttaccttcagaaatacatgcaattgatgttttctccgtatttttgacgacggttattttgagtttgattgccagttggtatcctgctcgtcgagcaactaaactcgatcctgctagaattttaagtggacagtaa

SEQ ID NO: 296062 - DNA, 858 bp, Proteus mirabilis
atgatgaaacttaaacttcgtcatcgtcggcttaggaagtttcgtaagataaaaagtttacgtagacaacattcacgttgtcgttattttcatttaacccataaaacggaacatgaaatgaatttacccaaagtagtggtgctaaccggggcgggcatttcggctgaatcaggtataaaaacctttcgatcagaagatggattgtgggaagagcatcgcgttgaagatgtggcaacgccagagggatatcaccgcaaccctaagctggttcagcagttttacaatgagcgccgtcgtcaattacaacaaccttcaattcaacctaatgaagcacattatgcattagcaaaacttgagcaatatcttggaaaggacaatttcctgctggtcacgcagaatattgataacttacatgaaaaagcagggagtaaacatattctccatatgcatggtgagttattgaaagtccgctgtccgcaatcaggtcaagtttttgaatggaaaggggatttatcaacgacagattattgccattgctgccaatttccctctcctctacgtccgcatattgtttggtttggtgaaatgccaatcggcatggatgaaatttatcacgctttagcacaggcagatctctttattgctattggcacttcggggaatgtctatcctgctgctgggtttgtccatgaagcacggttgacaggggctcacacggttgagcttaaccttgaacctagcttagtggagagtgagtttgaagaaaaacattatggccccgcgagccaagtggttgatgcatatgtccataaattgtttgatttaattaatgatcctaaagctgatttgacgcaataa

SEQ ID NO: 296063 - DNA, 660 bp, Proteus mirabilis
ttggactttcattaccgcatttttaatgctgatgggagtgaagtcgcacaatgtggcaatggtgctcgctgttttgctcgatttgtaagactaaaagggcttacaaataaaagagaaataaaagtcagtacccagtctggcagaatgaccttacatgttatggataatgaagatgtttgtgtcaatatgggagagccagagtttgaaccacaaaaagtaccgtttcgtgctcaaaaagtagaaaaaacctatattatcagagcgatggaacgaacagttctatgtggtgtggtgtcaatgggaaatccgcactgcgtgatccaagtggaagatatcaaaactgcggaagttgagtcattgggctcagtattggaacaacacgaacgctttccagagcgcgccaatattggttttatgcaggtggttgatagaaatacattgcatttacgggtatttgaacgtggtgctggagaaactcaagcttgtggaagcggtgcctgtgccgctgtcgcggtggggatctcccaaggtttattagatagaaaagtgaaagttaatttaccgggtggatcattatcaattgaatggaaaggtacaggaaacccactttatatgacaggacctgctgtgcatatttatgatggaacaatccagctataa

SEQ ID NO: 296064 - DNA, 711 bp, Proteus mirabilis
atgacggataagaatgagcagttttgttaccctgagaaaaacgaactcaacgatcaaaccatcattgattatctcaaggagcatcctggtttctttatccgtaatgccagctatattgagcaaatgcaagttcctcacccagtaagagggagtatctcattagttgagtggataatgtcacgtcagcgaacacgtatccattatcttgaagaggatatgcgtttgttgattgagcaagctgcagaaaatgaatctctatttagccaattactaaggcttatctctgagttatcccgctgtaattcattaaaggaaatgctggaacggttaaatctttgggcgaaggagttagggctttactcagtacaactgcgtcttttcaccgatcgttggcaattacaacctcctttagatgctcaaacactcgcactatctcgtcaaacatttgagcatttccgtattcagcgtatgggcgataataatcactatttggggccattaaatggccaagaaatcatgttattaatgcctaatgttcgtcgttctggctctgtggcactctcattattagggcattatggcgatttaggggtgatcatttttaatagtcgagatagccaacattttcaagaaggtatgggaacggcaatgttggataaactcgcacagatattacctgagttattaactcgctggatcgcaagacaatga

SEQ ID NO: 296065 - DNA, 387 bp, Proteus mirabilis
  misc_feature (309)..(318): n is a, c, g, or t
atgagccaaattattgacgtccctgaaacactctcattagccattgatagcttcttaagttatatcgaagttgaacggcgattaagtccggtaacggtagaaaattaccagcgacaattaatgaccattgcacaaatgatggttgcaataaaaatcaaccaatggtcgttactagaaagccaacatgtgcgtatgttattggctaaaagccatcgcagtggattacaacctgcaagtttagcattgcgcttttcagcattgcgtagcttccttgattggcaagtttctcaaggaatgttaccagtaaannnnnnnnnntcaaggaatgttagcagtaaaccccgccaaaggggttcgaacacccaaatcaggtcgtcacttgcctaa

SEQ ID NO: 296066 - DNA, 630 bp, Proteus mirabilis
atgttagcagtaaaccccgccaaaggggttcgaacacccaaatcaggtcgtcacttgcctaaaaatatggatgttgatgaagtcagtcagttgatgaatatcgacttaaaagatcccctctctgtaagggatagaacgatgctggaagtgatgtatggcgctggattacgtttatctgaactgactaacttaaatatcaatgatattgatctccaagaaggcgaagtccgagtattaggtaaaggcagtaaagagcgtaaagttcccttgggaagaaaagccgtagagtggttacagcattggtttgccatgcgggagctgtattctcctgaggacaccgcggtttttatctcaacgaaaagcggtaaacgattatctgttcgcagtgtgcaaaaacgttttgaactttggggggtgaaacaaggactcagtagccatgttaatcctcataaactgcgccactcttttgccactcatttacttgaatcaagtggtgatttgcgagcagtacaagagctattaggccacgctaatttatcaaccacacaagtttatactcacttagattttcagcatttagcgaaagtctatgatgctgctcatccaagagctaagagagaaaaatcataa

SEQ ID NO: 296067 - DNA, 717 bp, Proteus mirabilis
atgcacttttatcgcactctgatgccgattgcagcgatgacttttgatttagacgatacgctgtatgacaatgttcctgtgatggataaaacagaagaagagaccttagcgtttatccgtcagtatgatgagcgttttcaccattttactgaacatgatgtagatgcttacaaacagccactattagaaaataatcctgatatttttcacgatatcactcagtggcgttggttagcggctaaaaatatgttgttagactatggctatagtgaaactaaagcacagcaaggtgctgatgaaattatggctcattttgcttattggcgtagccgtattaatgtccctaacaatacccatcaagtgttgacacaactggcggaaaaaatcccactaatcgctattactaatggcaatgctaatccattaagctgtgggttggggcaatattttacacatattttaaaggcagggcctgatgggcgctctaagccttatcctgatatgtttgataaggcggcttcgttacttaaactccctcatcagaatattttgcatgtaggcgatcatctagtgacggatgtagaaggcgcggttaaaagtggattacaggcgtgttggattaatttagataatcgcagtttgtttaccgaaggtgaaacgcgtgttatgcctcatattgagatcactgaattagctaaactggttgaattaatttag

SEQ ID NO: 296068 - DNA, 2157 bp, Proteus mirabilis
atggacgtctcatatctgctcgaaggccttaacgataaacagcgcgaagccgttgcagcaccgcgtgtaaatatgctggtacttgcaggtgctggtagtggtaaaacacgcgtattagtacatcgcattgcttggttattatctgttgaacaagcctctcctttttccattatggcggtaacatttactaataaagctgcagcagaaatgcgtcatcgtattgaggacttgattggtactagtcaagggggaatgtggataggtactttccatagtctcgcccatcgtttattacgggcgcattatcttgatgctggtttacctcaagacttccaaatcattgatagtgatgatcaataccgtttaattcgtcgtatcgtaaaatccatggctcttgatgataagcaatggcctcctcgtcaaggtatgtggtatatcaatggaaagaaagatgaaggactccgcccacaacatattcagacctatggtaaccccgtggaaaccacatggttaaaagtctatcaagcttatcaagaagcttgtgatcgtgcaggcttagtggactttgcggagttgttattgcgtgcccatgaattgtggctgaataaaccacaaattctagaacactatcaacaccgttttaccaatatcttagtggatgaattccaagatactaaccgtattcaatatgcttggatcaggatgttggcaggacagactggtaaggtgatgatagtcggtgatgatgatcaatctatttacggttggcgtggggctcaagttgaaaatattcaaaactttttaaatgaatttcccggcgctgaaaccatccgcttagagcaaaattatcgctccaccagtaatattctaaaagccgctaatgccttaattgctaataatagcgatcgtttaggtaaaaacctatggacagaaggggctgaaggcgagccgatttcactctattgtgcatttaacgacctagatgaagcgcgttatgtagtagggcgtattaagcgttggcatgaagagggaggcgcccttgcagattgtgccattctttatcgtagtaatgcccaatcgcgcatcatggaagaagcgctattacaagcgaatatgccttatcgtatttatggtggacagcgtttctttgagcgtcaagagatcaaagatgccctctcttatatgcgtttaacagcgaatcgtcacgatgatgcttcttttgaacgtgttgtgaatacgccaacgcgtggaattggtgatagaaccttagatgtggttcgccaagtagctagagataaccaaatcacattatgggaaagtgcattacaggttattgagcataaaatgctagcaggccgggctattgcggcaattgcgcgctttttagaattaattgagacgttagcaaatgaaacagcggatatgccgttgcatgtgcaaacagaccgtattattcgcgattctggcttaaaagcgatgtatgagcaggaaaagggtgaaaaagcacaagcgcggattgaaaacttggaagagctggtgacggcgactcgtcaatttagctatcaagatgaagacgaagatttaatgccattgcaagcttttctctctcatgcggcattagaatcaggagaaggacaggctgatgcgtatcaagatgctgttcaattgatgacactacactcggcgaaagggctagagttctcacaagtgtttattgtcggggttgaagaaggcatgttcccaagccagatgtccttggatgaaggtgggcgcttagaagaagagcgtcggctagcttatgttggtgtgacgcgcgccatgaaaaagttaacacttacttacgctgaaaaccgccgtttatatggtaaagaagtgagccatcgaccttcgcgctttattggcgagttaccgaaagagtgtgttgaagaagtacggttacgggcgacggtttcacgtcccgtgaatcatcatcgtttaggtacaccgattgttagtaatgatacaggttactcccttggtcaacgggttaagcaccctaaatttggtgaaggtactattattaatatcgaaggtagcggtgaacactgccgattacaaatagcctttaatggtgaaggtattaagtggttggttgctgcttttgcacgattagagtga

SEQ ID NO: 296069 - DNA, 405 bp, Proteus mirabilis
atgaaaattacttctgtattatttgatacttattatccaattaagcctgtgacaaaaatcactgaggatttctctgttgataaaatgccccctgtggagcctatttatgagcagcgttttgatacttaccatcctagtgctcctgccaacccgtttgaagaagatctctattgtcgattattacgacatcaacgtgattttgtgccgcgcatgaatctctatttaagtggggtgatcggtgctatccgtattgcaactaattctacatcaacattctttagacgctcacaacgccgtatagaagcgatagcaatgggttgtaatacaaaagaagagcactcaagccctgccagaaaggggtatctttctggcgctttcattagtattgataatttagctcaatag

SEQ ID NO: 296070 - DNA, 894 bp, Proteus mirabilis
atgagccagaaaaacactttaaaaggcgttttatgtgccctaggcgcctatttgatctggggtattgcccctgtctattttaaaagcattcaagaagtgcccgcagaagagatcttaacacaccgtattttatggtcattcttctttatgttgcttttaatgtcgatcactcgccattggccctatttacgccaacttgttcgccagcccaaaaaagtactaatgttagcacttactgcggtgattattgccagtaactggcttatctatatatgggcggttaaccacggatttatgttagaagccagccttggttactttattaatccattagttaatgtgttattcggtatgatttttttaggcgagcgctttcgccgtatgcaatggttcgccgtaagcttagcctttactggcgtctttatccaattatggcaattcggctctgtacctgttatcggccttagtttagcagtcacattcggcctatatggactattacgtaaaaaacttggggtagatgcacaaacgggtatgacaatagaaacactgtggctgtttcctgttgctttagtttatatcctcttttttacccattcacccaccagcaatatgttagaaaatagctggtcgctaaatacattactgattgctgcaggggttatcaccaccgtacccttactgctctttaccgaagcagctcaacatttgcgtctatctaccctaggatttttccagtatataggacccacattgatgtttattctcgccactatggtgtatggagaacaaatcgatgcggagcgtttagtgacctttgggtttatttgggtcgcccttatcttatttactttagatgcactctacactcagcaacgtttaagacgaagttag

SEQ ID NO: 296071 - DNA, 468 bp, Proteus mirabilis
atggagaaaatattaacactggaagaagcacaagcgttgattggacatgtttttgtctatcaaatgccttttaatcaactgataggtttagaattaattcgcttcgaacaagattatgctgagatccaatttcgctaccaagacaaactggttggcaatatcgcacaacgcattttacatggtggcatgatagcctcggtgttagacgtaagtgcaggtttagtctgtgtaggtaatgccctaacacgtctagcccctatatcccaagagcaactcgaacaaaaactggccaaaatgggcactatcgatctacgtgttgattatttacgcccaggacgaggggaatgttttaccgcaagtagtcatatactacgtagtggtaataaagtttctgtggcaagggttgaattacacaatgaaaaacaagttcatatcgccagcggcacagcaacttatattgttggctga

SEQ ID NO: 296072 - DNA, 876 bp, Proteus mirabilis
atgcgttacatccgttctttactcacggtgattttaacctaccctgtatggggagtggcggcggagatatcacctgtatcatctccaacaccgttggttcagggcagtattatttccggtctattacaagagtatgattcaccctttgtactttacccttatgaatctaattatattatttacacaaaaacctccgatatgaataaagaggcgattgctagttatgattggggtcataaggctaaaaaagatgaagttaaatttcagataagtcttgcattcccgctgtggcgtggcattgccggggaaaattctgtattagcggcttcctatacgcaacgctcttggtggcagctaagtaataaaaaagagtctgcgccgtttcgtgaaaccaactatgaaccacaactatttttaggttgggcgacggattatcaatttgccggttggacattaagagaaattgaaacgggatttaaccatgaatcgaatggccgcgcagagcctacttcacgaagttggaatcgtgtttatgcacgttttatggcgcaaaaaggtaatttccaactcgatctgaaaccttggtaccgttttaatgaaagtgctaaaaatgatgataatcccgatattaatcgctatatgggatattaccgcttaaaagcgggttatcgtttaggcgaaagtacgtttactttaacagggcgttataactggagtagcggatacggtgctgccgagctaggctggagctatcctattaccaagcatgtacgcttttatacccaactatttagtgggtatggggagtcgatgattgattataatttccgtcaaactcgtatcggtgtcggcgttatgctcaatgatatgctgtaa

SEQ ID NO: 296073 - DNA, 501 bp, Proteus mirabilis
atgcttgcgtcatggccagaaaacgggaatgtggtaatatcttctttattatggccattgattgtatgttttttaattttttattttagaaagcatctattaaagctaatagatactttctttgatggcaagttaaatataaaaatttcaggatttgaactaaatttgaaagaaaattcaatacaacaaggtcacattattctagatctacaatctaaacttgttgaaatgggaaagaaaatacacacattacatcctaattcagaaaaaattttactgcctaatattccaatgaaaaaaaaggtcttatgggttgatgataacccttcaaataatagctatttgattgaaacactaaaaataaatcatatagatgtagatacttcactttcaacaagtgatgccattgaaaaaataaaaagcaataactttgatgttataatatcagatatggggagacccgaagacgatcgaactggcataactcttacaaaaaaataa

SEQ ID NO: 296074 - DNA, 429 bp, Proteus mirabilis
  misc_feature (82)..(91): n is a, c, g, or t
atgttatatccagcctttattgaaattgatgaagatggtagcgcaagtggctggttccctgatattgatggttgcatctttnnnnnnnnnntctttgcgggggacagtattgaagaagctcacgcagatgcgaggagcgctattgatgcccattttgaattgttaagcgagaagggtttagatatcccctctccaaaatctcaacaagagcatttaattaattctagtggtgattacaataatggaatatggcttttagttgatgttgatatggataaatacgacggacgagcagagcgtattaatatcacattgccacatcgattattgagtcgcatcgatactatcgtaaaaacaaatcctgaatatgggagtcgtagcggatttattgccacagcaacccgtaaagaactccaaaagaatatttaa

SEQ ID NO: 296075 - DNA, 813 bp, Proteus mirabilis
atggtgtgtattttattgtctataataaaggatttgccatgtagccgtttaaaagaaaaaattgcagagcagatttcaccgccacagaggtcagcattcacagctgacttatatcctgcgctggcgcgagaacaaggctttgatgggattgatttaccccagcccacaattgcaggtgttgcgatggatagcattgatagctatgtgccctcatttaaaggggaacaagtttacggtgtgccagagtcacaggcctcatggtatgcctcacaaatgtttatcggcaacaatatgtgtgcggttatcgctaaacactggctggtggataaagcctgtaatatgcccgcgcgtgatgcgatacgtcagggttacgatattgattgtgataacgacgatgatcgtgctatcagtaaaaagcatcgcaaacgagataaaaaataccgcattacacatcagcttaaagagcaggttcactttgggcatgtatacggtgatcgtttagcattattcgttgtggagacatcaaatccgaaagagtggtatgaaaacccgtttaatatcgatggcgtgaccaaaggcatgtacaaggggattaaacagattgatccacaatgggtaacacctgatttaacggacgccaatgttcaagatcctgccagcatggatttctacgaaccaacctataatgtgattggtgggcgcaagtatcacaaatctcactttattaagtttgtaccgtttcctgtgccgaatatcttgaagccaatgtataactactttggtgtttctattcctgagcgcatttatgagtga

SEQ ID NO: 296076 - DNA, 552 bp, Proteus mirabilis
atggacttaaaacaatgcgataaaaaacaattaaaggaagagtttaatcgacttacagcattaacaagttataaatcaacaatgggtgtttttgatatatttactagattacctgaattattaaataatgatgaaacagttttatgtgttaatagcggaatcgtaaaatctaatatttggttgatcattcctacaaataaacgagttatttttctacataaaaagagtggccttttccataaaaaaattgattcatcttccgtaaattatgatgcaattacttcaattgattcatcttctggattgacaggaggtaaaataaaaataaatactcctggtactatttatgaaattggtacactacaaaaaaactcagtacaaccactagttgatattatcctatctaaaaaaaataactcttcatcgcaatcttcaaataacagtggtgatgacttgctatcaaaattagaaaaattaggaaaactaaaagaaagtggcgtactgacagaagaagagttccaagaacaaaaaagtaaattacttaatttataa

SEQ ID NO: 296077 - DNA, 276 bp, Proteus mirabilis
atgattaagcttgaaatcaataatgcggaatatattgctcagttagaagaggctcgtttatctgtagataacccgcgtggctatctgtttatggacattgtcttttctgatccaaggtttgataagaatacgtttgaaatgaagaatgttcgtagggaaccgatgaggacgtatatgacggaggctgtggcaagggatttgtttgagaagttggagaggtatttcaatcataaaaatatggtactaacatcaaaaaacataaaaaaacttatgtag

SEQ ID NO: 296078 - DNA, 1734 bp, Proteus mirabilis
atggtaacgagaaatcagtcctatcgtgaaaaagtatcccaaatgatcagttggggtcactggtttgcgctgtttaatattattctaagtcttttgcttggaagccgttacctgtttattgctgattggccaagtacctttgcaggtcgtctttacgctattgtcagttggatgggccattttagttttatcgtgtttgctatttatatccttattcttttcccgttgacctttgtggtagtttcgcaacgattacttagggtgatatcctgcgccttagctagcgcaggattgacattacttatttttgatatagctgtttaccagcaatttcaacttcatttgacccagttggtttgggatttggttatcaatccagatgaaggtgaaatggcgcgagaatggcaacttatctttattggcatccccattatctttcttatcgaaatgctatttgctacatggagttggcaaaagctgcgcagcttaaaccgccagcgatggggaaaaccattagcctgtgtatttattagttgctttattttatcccactctatgtctatttgggcagatgctaatttttatcgccctattactatgcaacgtgcaaacttaccactgtcttacccaatgactgcacgtaaattccttgaacggcatggttttattaatcaatctgagtatgagcagcgtttaatgagcgagggtaatcctgcggcacaaagtatcacctacccgcttgcacctcttgattattctaaagatgaaagctcatataacttacttatgattgtggttgatggattaggtaatgaagacgttgccaaactaccgagcttgcaacaatttgctgataataacctctctttctctcagcactattcagcaggcataaataacgaaacggcgctgtttggattattttatggcatttcaccgtcttacttggatagtgtgttaagtagccgcaaaaactcagcgctctttgacgctttaaattatcgtcactatcaattagcactattttcaactaacggatttaaatcgccattatttacacaagcggtgctggctgattactcactacctacttcacgtagtgaggataacgacacaacgattaatagttggcgttcatggttgttaaaaaataaacaaagcacaccttggttctctttcttacaaatcaacggtgataagcatacatcagcttctcaagcacagttaaatagtcaattagagaccatttttactactttaaaagaaagcaacatacttaataataccgttgtggtcgtaacgtcaaattatcatcagaacaatgataaacaagatagccaatggcttgttagcaaagacacttttaatttaagtcaatcgcaggttccgctggtaatacattggcctaatattacaccacaaaaactagataaactaaccagtcaccaagatataatgacaacgctaatgcaacatgtattaggtgttattagccctgcagataactattctcaaggcgaagatctatttgctaatacgcgtaatcacccttggatttttactggtgataatgaaactctagtggtctttttacaagataatacgttaatgatagataaacatggcagatatgctttgtttgataaatcaggcaaagagatccaatccgccaaacctgatttacgcctattattgcaagtactggctgagcaaaaacgatttattgagcgttag

SEQ ID NO: 296079 - DNA, 228 bp, Proteus mirabilis
atgccacaaaaatcccgttatagtgatgaacaagttgagcaattacttgcagaacttgtcagcgttcttgaaaaacatcatactcctacagatctttctttgatggtgttggggaacatggtgacaaacttaatcaatacaagtattgcccctgctcaacgaatgctgattgcagactcttttgttcacgctttacgtgcttcaattgatgaaggcaatattcactaa

SEQ ID NO: 296080 - DNA, 264 bp, Proteus mirabilis
atggacaaattaaacgatattactcaactttataataatccaccaaaagatgtaaaacataatatagtcaatcatcgttttacggatatgatgctacaaactaaaactgttgcaacagaagcattagataaattagcttatcttgcaggtattaaaaatgcacctgctgatgataagtatttaaaattaaacaccactagcttagatgcgttactaaaaagtgcgaagtcacttggttatgatatcgaagtcgtcagtctttaa

SEQ ID NO: 296081 - DNA, 1293 bp, Proteus mirabilis
gtgaataaggatattaatgaacttaataaagatattaatattgtcggattacattggattgaacgctggcgagtgaataatggaaaacatcagtcttatgttattcctttcgcaacaacctatcctattaatattgtttatcacggtaaaagcgaatttaaatatgggcagtatggcattcatcttggccagcaagatacactcacctttttaggtgataaaaaacaaaagatactggctaaatttattgattgtcgtaaaaactcaccgacatttaaatcagaattaagtttggagataaccccatcatccgcaagaacacttattattcccccaggagttgctcatactttttcccatctagaaaatgtttttaccttaaatagctactctctttttttacctactattgagcaattagcaaatgaaacattaaattggtcacctaataatgatgtgataaatctgccggaagatatcgatattaatgagattgaaggctatgagccgatgacagaagaagcttcggcgctggtctactatcgagttgctgagatacaacagcagtggttaagccaacatcgatttttacactctgaaactcgtaaaattcgcttagataatggcgatgaaattaatgtaaggttgcgagagaaaatagccgatgttcaaaaacagtcattacctacatccactattttaggtgttgaatttcgtgaaatggcgaccctgcatacgggcaaagagagtggcattgtcccattaacgcgacaatcccctatgtatctagtcgaacatggtcaggaggcttatgatttcgactcttatggattacatttagggcaagaagatcatttaacttttttaggaaatacctcgggtaaaatcactattaagctggtggatatgcgtgaagattcgcctacgctattttatgaagatgaaatggtttttgatccggcacccaatattgaattagtgatcccctgtggtgttgcccatgccttatttaatatggcgaatatcattactgtgaatcgacctgttatctatttggacgaagaaaaagaatatattccgggtcatgacgtgattgattggaaaatcgctaataaaaattatcaagcttatcgtgttaataaaatagcagcagatttaatctattatcaatttcttgtttctaaacaacaagcgttaatgaaacataagcccacccatcataccccaaaatcaattattgtttatgatgaaaataatcagcctattaaagtattaattaaagaaaaggtgtaa

SEQ ID NO: 296082 - DNA, 1194 bp, Proteus mirabilis
atgcgtattgtctttttctatatgctttttttggtattaagtgcagatggtctaatggtttttttgacacctgttattgtttatcaattaacaacaagcattgaatatgcgggattgacatacgctttatggtggttaccacgtatttttttaataccgcttattggtcaatatattgatggtctaggtgtccgtcctgtttctgttatttccgatagctgtaaaattatcggttgtttatttttattaatagtagatttttcctctgatttagttattgcaattagttttggattagtgggtagcttaatttctattggtaattcacagacactgatttcatatgaaaaaattattgccttgatgagtcgccataaagaacatcatattaatataatgtctcgaatggattttttgggcatgatcattggcccattaatcggcatgttatttattgattatggttaccattatttactgattattccctgtctattttatttcattaacgccgtgttctttttgttcttttacctagtaccaaaacagagccaatctgacactcagttacatagcctaacagagacattacaggtgacgaaaaggataatggtgatttttacgtctcctattttggttttttctattttaattgctatcggcaataatatgtttgatggattaattgagtcgagtggggcggcgttgatcgaccaatcgatgaatttacccattaaatattatggctttattgatatttctgcggggatctgtggcgtgataggaacttatttatatggttatctaacccattatttaaatcgaaaattattaatgtctctatcaatttgtatcatcacaataagttcttttctattggttatttttcaacatgatatcacggcttttattctcttttatgccctatccattattggtaaggttttttcagggaatattttacggatgttaagaatagaaattattcctgtgacacaattagccagcatttcctcactgattatattgtttaatcaactgattttgcctattgttgggggattgctctttttctctacagggaatatttcgacagtatatatattgatgataatcgctatggcgatcaccttggtgagtggcgtaatgcttattatgcggttaaaccataaaaaagagataatcataaaataa

SEQ ID NO: 296083 - DNA, 528 bp, Proteus mirabilis
atgagcctgaatcatgttcctgctggtaaagaactaccagaagatatctatgttgttattgaaattccagccaatgctgatccaatcaaatacgaagttgataaagaaagtggtgcactgttcgttgaccgttttatgtcaacagcgatgttctacccatgcaactacggttacatcaacaacacattatctttagatggtgatccagtagacgttctggttccaactccatacccattgcaaccaggttcagtcattcgttgccgtcctgttggcgtactgaaaatgactgatgaatcaggtgaagatgcaaaactggttgcagtaccacacaccaaactaagtaaagaatacgatcacattaaagatgtgaacgatctacctgaattattaaaagctcaaatcaaacacttcttcgaacattacaaagatttagaatctggtaaatgggtaaaagttgatggttgggaaggcgtagaagcggctaaagctgaaattctgtcttcttttgaacgcgcaaaaaaataa

SEQ ID NO: 296084 - DNA, 1008 bp, Proteus mirabilis
atgaaaacattaggcgaatttatcgtcgagaaacaacaagattttccccatgcaactggcgaattaacggcattactgtcagccattaagcttggggctaaaattattcaccgtgatattaataaagctgggttagtcgatattcttggcactaacggtgtttctaatgttcaaggtgaagcccagatgaaactggatctttacgcgaatgagaaactaaaagcagcacttaaagctcgtggtgaagttgcggggatcggttcggaagaagaagacgatatcgttatctttgaaggtgatcgtgcggaaaatgccaagtatgtggtattaatggatccattggatggttcttctaatatcgatgtaaacgtttccgttggtactattttctctatttaccaccgtattacgcctattggccaaccagtgacactagatgatttcctgcaacccggtaatcgccaagttgctgcgggttatgtcgtttatggctcatctactatgttggtttacactaccggttgtggtgtacatgcctttacttacgatccttctttaggggttttctgtttatctcacgaaagtgttcattttccgcctaccggaaatatgtattcaatcaatgaaggtaactacattaaattcccattaggggtaaaaaaatacatcaagtattgccaagagcaggatgcagcgactaaccgtccttatacaactcgctatattggctctttggttgcggatttccatcgtaacttgctcaaaggggggatttatatttacccaagtacggcaagtcatccaaatggtaaattacgcttactttatgaatgcaacccaatggcattcctcgcggaacaagcgggtggtaaagccagtaatggtaaagatcgtattttagatatcaaaccaacagagttgcaccaacgcatgccattctttgtgggtactaaagcgatggtcgaacaagcagaagcatttatggctcaatatccagacgaagaataa

SEQ ID NO: 296085 - DNA, 1380 bp, Proteus mirabilis
atgcacattcatattcttggtatttgtggcacctttatgggaagtcttgccatcttagctcgagcgaaagggcataaagtaactggctctgatgcaaatgtttatcctccaatgagcacattattggaaaatcaaggcattgagctaatcgaaggttatgatccacaacaattagaaccttctcctgacatggtgattattggcaatgcgatgactcgagggaatccttgtgttgaagcggtacttgaaaaaggattgccttacacatcagggccacaatggttacatgactatattttgcctgagcgttgggttttggccgttgcgggtacccatggtaaaacgactacggcaggtatgctggcttggattttagaagattgtggttatcaacctggttttttaattggtggtgtgccgggtaactttcaagtttcagcacaattgggggaaagcccgttttttgttattgaagctgatgagtatgacagtgctttctttgataaacgttctaaatttgttcattactcgccacgtacgcttatcttaaataatctggaattcgaccatgcggatatttttgatgatttaacggcgattcaaaaacagtttcatcatttagtccgtattgtgccgggcagtggcaaaattatcatgcctgataacgatctgaacttaaaacagaccattggtatgggatgttggagtgaggaagagtataccggtgagacgggtgattggcaggcgaaaaagatcagtaatgacagtagccactttgcagtgttccataaaggtgagcaagtcggtgaggtttgttggggactttcgggtgaacacaatatgcaaaatggcttaatggccattgtggcagctcaccacgttggtgtattaccggtagatgcatgcgcagcactcaataaatttattaacgcccgtcgtcgtttagagttacggggtgaagtaaatcaagtgagtgtttatgatgactttgcccatcatcctacggcgattttagcaacccttgaagcgctacgtagtaaagttggcggtacagcacgtattattgcggtattagaacctcgctctaatacgatgaagatggggatcagtaaagatgatatcgccccagcattgggacgtgctgatgaagttttcttatttcagccacctaacattcaatggttagtcagtgatattgccgagaagtgtgtacagcctgctcgttggagcacggatattgacacattagtggagatggttgctaaagaagctaaaccgggtgatcatattttgatcatgagcaatggtggctttggtggtatacatgaaaaactcctggcgaaattagccacaccaaaatcatctgtggatcaatattaa

SEQ ID NO: 296086 - DNA, 471 bp, Proteus mirabilis
atgcgcactccttctaagcaagaagacttggttaaagcatttaaagccctgctgaaagaagaaaaattcagttcacaaggcgagattgtaactgcattacaagaagctggttttgataatattaaccagtctaaaatctctcgtatgctaacaaaatttggcgcagtaagaacgcgtaatgccaaaatggagatggtttactgcctgccaacagaacttggtgtaccaacagcaagtagcccattgaaaaatttggtacttgatattgaccataaccactcagtagtggttattagaaccagccccggtgccgcacagcttattgcacgtttattagattctttaggtaaagcagaagggatcctcggaagtatcgctggtgatgacactattttttctacacccgcgccaggattctcaacagaagaactacgagatgcgattttaaacctatttgatcaggaattataa

SEQ ID NO: 296087 - DNA, 939 bp, Proteus mirabilis
atgaaagtagcagttctcggtgcagcgggtggtattggtcaggcactggcacttcttcttaaaaatcagcttccagctggtagtgaactctctttatatgatatcgctccggttacaccgggtgttgcagcggacttaagtcatatacctactcaagtaagggtaaaaggttttgctggcgaagatccttctcctgcattaaaagatgcagatgttgttttaatttctgccggtgttgcccgtaaaccgggtatggatcgctctgatcttttcaatgtaaatgcagggatcgtgcgtaatcttattgaaaaagttgcacaaaactgccctaaggcgcttattggtatcattactaatccagtcaatactacggttgctatcgctgctgaagtactgaaaaaagccggtgtttatgataaaaaacgcctatttggtgtgacaacactagatattatccgtgcgaatacttttgttgctgaattaaaaggcaaagatccacaaacaacgaatgttccggtcattggtggacactcaggtgtcactattcttcctttgctatctcaagtagccggtgtgtcatttactgatgaagaagttgctgcattaacaaaacgtattcaaaatgcggggactgaggttgttgaagctaaagcaggtggcggatcagccacattatcaatgggacaagcagctgcgcgctttggtctttcattgatccgtgctttaaatggcgaaaaagatgttattgagtgcacctataccgaaggcgatggtgaacatgcccgtttctttgcacaacctgttcgtttaggtaagaatggtgttgaagaatatctaccaatcggtcaattaagtgattttgaaaaacaatctcttaatggcatgttggatgtattgaaaaaagatataattcttggcgaagaatttattaataaataa

SEQ ID NO: 296088 - DNA, 267 bp, Proteus mirabilis
atgatttcaaggaaatctgattggcatcctgccgatattattgccgcactcagaaaacgaggcacaacactggcagccatctctcgccaagctggtttaagctcttcaacactggctaatgcactgtcacgcccttggccaaaaggtgagaaaatcattgctgactttctaggtgtagcgccttcggaaatttggcccagtcgttattttcatcctgaaacaggagaattacttgaacggaagatacgcgacaaaaccaataattaa

SEQ ID NO: 296089 - DNA, 1653 bp, Proteus mirabilis
gtgactgaaaagaacgatactgctttaacacaagcaaaaattaataaactgaaaagctggtctccagtttggataatacctcttgttacgttattgataggagcttggatactttattatcatttcagtcatcaaggtcctgaagtcacattaataacctataatgctgatggtattgaagcaggtaaaactaaaataaagagccgtagtgttgatattggcttagtcgaaagtgtgacattagatagtaattttagtcgagtgatcatcaaagctcgtctcgataatgaaatgaaagagctactgcgtgctgataccgctttttgggtggttaaaccacaagtgggaaaagaaggtgtcactggtttaggtactctactctcaggtgcttatattgagctacaacccggtttaacaggcaaagagcaggatgaatttaatttattggactctccaccactggcctctccggatgcaaaggggatacgcattaatttagtcagtgaaagagcaggccagcttaatgcaggtgatccggtattatttaggggttatcaagtcggctcggttgagacgagtgaatttaatattgaaagccgagatatgcactaccagctttttatcaaagcaccttatgacaaaatggtcacgtcgaatgttcgtttctggaaagattcaggcattgcatttgatatgtcatcatcaggggttcgtgttgaaatggcttcgctttccacgctgtttagcggtggggtgagttttgatgtgcctacggggtggttacctggtgaagctatagcccctaaaacagaatttaaactttatgataacgaaaagagtattcaaaattcgttatataccgattaccgtagctatattatgtttttctctgattctataagaggattacaagccggagcgccagttgagttccgtggtattagaatgggtacggttgttcaagtaccctattacacccaagaaatgcaacaatcgttagataaagatttccgtattcctgtgcttatccatgttgagccggaacgttttgcgaatgatgtaggtgaaagttttgatttcgtaaaagagctttcttctgctgctaaaaatggattaagagcatcgttaaaatcaggcaatctattaacaggtgcgctgtatattgatctggacttttatcaagatgttgaaccttggaaagggccacaaactgttgcaggattaccacaaatacccacagtcagttctggtttaacgcaaattcagcaaaaagtgatgacttcattggataagatcaacaatcttcctgttgagccaatgttgaaagagatgactgcgacattaaccgaaagtcaaaaagcggttgctgaagcgaaggaaactctgaaatcattaaatgctatgattggtagtgatgacttccaaaaactgcctaatgatattcaacagtcattaaaagagatcaatcgcagtatgcaaggtttccaacctggctcaccggcatacagtaaaatggttgataatatgcaacgcttagatcaagtgctcagagagatgcaaccgctattgaagaccttaaacaataagagcaacgcattaatttttgaagcacaacaaggtaaagatcctgaaccaaagagggctgaaaaataa

SEQ ID NO: 296090 - DNA, 1287 bp, Proteus mirabilis
  misc_feature (1274)..(1283): n is a, c, g, or t
gtgtgttcgggtcaacattcttgtcatgaagaacaacatgagcaaatattgtgccctcagtgcgatctggtagtgagtgttcctgaattagcccaaggaaccaaggcgacctgtccacgttgtcacactttgctaacagcacgttggcgacaacctttttatcagcctgtagccttggcgattagtgcattatttatgttgttaatggcttgccaatttacttttgtcagtatggaagtggcaggaattaccaataacattactttaatgcagatcccaaatgtgatgtttagcgaaaattatgttgagttaggcgctttctttttactctttgtacaagtggttcctgctttctgcatgatagcgattttactgctttgtacacccattaagctgccaagaaaattacaaatttggctatcacgaattcttttccaattaaaatcgtggtgtatggcagagatttttttagccggtattttagtcagttttgtcaagttaatggcgtatggtgatatcggcttagggttaagcttcctaccttatgtactttactgcttattacaaattcgtgcatttcaatgtttagatcgccatacattatgggaaaaactagaatcgcgacccgcttatcctaaaattgaatcaggtaaaacaggtttaaagcaaggagtaagattatgtcgttcttgcactgctattttaccggctgatcaatatgaatgtagtcgttgtgaagtaaaagggtatgcgagaaaacctcatagtttgcaatggacgctctctttcttaattacttctttaattctttatattccggctaacctattgccaattatggtgacggaatcgctgggtaataatctttactcaaccataatggctggggttatcttactttgggaagatggctcatatcctgtggcaatggttatttttattgccagtattatggtacccagtttaaaaatggtggctatcggttggctatgttgggatgcacataaagccaaaggaaaacgtgatccggcgagaatgcactttctctatgaagtggttgaatatgtagggcgttggtcaatgattgacgtttttgttatcgctgttttagcttcattagtcagaatgggacgtctgatgagtatctatcccgattttggtgtagtgctatttgcattggttgttgtattaacgatgttctctgcaatgatgtttgatcctcggttaacatgggataaatgtactgccgatgatgataaacccatgattaaggnnnnnnnnnngtga

SEQ ID NO: 296091 - DNA, 1932 bp, Proteus mirabilis
atgccgttaattagtttgactggggcttatttagcgtttagtgatgcccctttattagataatacagacttgtttattgatgaaaatgaacgcgtttgtttagtcggtcgcaatggtgccggaaaatcgaccctattaagagtgttagccaaagagcagcccttagatgatgggcaagtggtgtatgaacaagatctggtgactgcacgtttacaacaagatccccccagagatatcgaaggcactatttttgattttgtcgcgcaaggcgttgcagaagatgcgcaatatattaccgaatatcatcgtgtttcaaaggtaatagaaacggacccttctgaaaaaaatcttaatcgattagctcagttacaagaagtgctcgataaccgtaatctctggttattagatagccgtattgctgaagtactggaaaaattagggttaaatggcgaagctgagctttcctcactttctggaggatggttaagaaaagccgcattagggcgcgcattagtaagcgcaccgaaagtgctctttttggatgaacccaccaaccatctagatatagaaactatcttatggttagagaaatttttaaaggatttccaaggtagcattgtctttatttcccatgaccgatcatttattcgtaatatggcaacccgcattattgatttagatcgcggaaaactatcctcatggccgggaaattacgataaatatctggaaagtaaagaagaagcattgcgtgttgaagagcaacaaaatgctgagtttgaccggaaattagcgcaagaagaagcatggatacgtcaagggatcaaagctcgccggactcgtaatgaaggtcgtgtacgggcattaaaagcattgcgagttgaacgaagtgaacgtcgcgaagtattaggcagtgctcgtatgcaggtcgaagaagcaacgcgctcaggtaaaattgtgtttgaattagaagatgttaattatagcatcggtacgcgtaggctcgttcgggacttctctgcaaaagtacaacgaggagataaaattgccttagttggccctaatggttgtggtaaaaccacactactcaaattgatgttaggggatttaaaagcagatagtggtcgtattcattgcggcactaaattagaagttgcttattttgatcaacatcgtgccacacttgatcctgataaaacagtgatggataaccttgctgaaggtaagcaagaggtgatggtaaatggtcgtcctcgtcatgttttaggttatttgcaagatttcttatttccaccaaaacgtgccatgacacctgttagagcactttcggggggcgaaagaaatcgtctattgcttgctcgtttgttcttaaaaccaagcaatttacttattcttgatgaaccaactaatgatcttgatgttgaaacattagaactattagaagagctggtggatgcttatcaaggcactgtgttgttggttagccatgatcgtgaatttgttgataatagtgttacggagtgttggatctttgaaggtgatggcgtaatcaatagctatgttggtggctattatgatgcgcagcagcagcgggcacagtctgtttctcttaaaaatgaagcgaataagtcacgtaatgcaccagaaaaaactgaaaaagagactaaaccaaaacagaacgccaaaaaggctacacgaagtaacaataagttaagctatcatttgatccgcgagcttgaacaactgcccgctaaactggaacgtttagaagaggaattaggttgtttacaagaagaagtggctgcagctgatttctttacacgtcctcatgaagagacagaaaaagtgctaaaagcattagctgataaggaaaatgaacttgaaacagcttttgatagatggcaagagttggagatgatgcaaaacggtgaataa

SEQ ID NO: 296092 - DNA, 1200 bp, Proteus mirabilis
  misc_feature (1126)..(1135): n is a, c, g, or t
gtggataaacgtgtattagatatggcaagagccaacgcacgtcgtgcggatgtggccgatttaattacttttacccaaggtgatgcagcaaaactgactaatccagtatccacgggtgttaaagggacgattattagtaacccgccttatggtgaacgtttagaaagtgaacccgcactcattgccttgcatagccagttaggacgagcggtaaaagcccatttcccaggatggcgattatcactttttagtgcttctcctgaattgttaagctgtattcagttacgtgctgagcgtgaatttaaagctaaaaatggcccgttagattgtgtacaaaaaaactatttattatcagaaacaccttcgacgattaatacacgactggcggaagattttgctaaccgtttacgtaaaaatgagaaaaaactcgcaaaatgggcaaaacaacagcaaattgagtgttatcgcttatatgatgctgatttaccagaatataatgttgcggtagatcgctatggcgaaaaagtggtgatccaagagtatgcacctccaaaaaccattaatgaacataaagcacgccagcgtttatttgatgtgattagtgccaccatggaggttttagcattacgctctgatcaactaattttaaaaactcgtcaacgccaaaaaggtaaacaacaatatgaaaaaatggcagagaagggggatttctttttagttgatgagtttggtgccaaattctgggtgaatttaaccgactacctcgatactggactgtttttagatcaccgcattgcacgcaaaatgttaggtgaaatgagcaaaggaaaagactttttaaatctctttgcttataccggtagcgcgtcagtccatgctgggttggggggagctaaaagtaccacaacagtagatatgtcacggacttatcttgaatgggctgagaaaaactttcaagcaaatggattatcaggtagacaacatcgtttaatgcaggcggattgcttacagtggctaagccaaagtaatgaacagtttgatgtgatttttatcgatcctccgacgttctctaattcaaaacgcatggaaaatacctttgatgtacaacgtgatcatattgaattannnnnnnnnngcgaatattgggttaacagcaaaagagataacacaaaaaacgttatcgcaagattttgcacgtaa

SEQ ID NO: 296093 - DNA, 1185 bp, Proteus mirabilis
atgatcaacgtatcacgcctttatatacaccctgtaaaatcaatgaaagggactcgtctttctcaagcctttgcccgtgaaagcggcttcacgtttgatcgtgattttatgataacgacccctgaggggacatttatcaccgcacgtaaataccctttgttgctgtgttttattcccactgtaatgacaaatggtatttatattcaagcacccgatggtgaaggaattgccattacttatcaggattttcaatcttcattacaaccaactgaagtgtggggaaatcattttaccgcttatgttgccccagatgaaataaatcaatggttcagccgctatttaggcatggatgtacaacttcgctggacgggtgaaaaatcaacacgtcgagtaaaaaaatctcctgaaaccgcggtttcgttcgctgacggttacccttatctattgattaatgaagcctcatttcagtctctgcaacagcgttgcccagcttcaatcaatattgagcaatttcgcggtaatatcatcatcacaggtgcaaaaccttttgcagaagatagctggcaaacaatccgtattggctctgtcgtcatggacttagtcaagccttgcagtcgctgtattatgaccactatcagtatcgataaaggcattaagcatcctaccacagaaccgttagcaacactgcaaacattccgtacagatgaaaaaggcgatgtggattttggtcaaaatattatcattcgccaatcaggtattattcgtgttggggataaagttgaaatattagcttataaagaagcgaaatcttatttacaaacaacagagcaaacaaccgaaccagcaactgacaatgcggttacagcagcctccgctcaagagccaaaacaagctgtcactattgaatttaatggcatcagctttgctgggaataatcaagaggtgttgttagagcaactggaaaatcacggttatgctattccctatagttgtcgtgcggggatttgtggctcttgtgttattcaattagatgaaggtgatgtcaatgcattaaaagcaggtgccataaaacgttctggcagaatactcgcatgtagttgtgttcctaaaggcaatgatggcgacggattgtgcccccgctttaaatcgagtccattggggttttcgtcattggttaggacataa

SEQ ID NO: 296094 - DNA, 1095 bp, Proteus mirabilis
atgcctgatggtgtacttcgtcgttatattaaagactatattcagtcacacagtggcgatcaggttgattttgcttggcaaggtggtgaaccaacgctggcaggattagctttctttgagaaagtggtcaaataccaaaagcaatttgctaacggcaagacaattaccaatagtgtacaaaccaatgcgattgccattaatcgccaatgggcacaattctttgctgataaccactttctattaggcgtttcaattgatggcattgaagccgttcacgataaatatcgtatttcagtcaatggtagcccaacatttgaacgcgtaaaacgcgccatcaatttactaaatgagtatggtgttgaatttaatacattaaccgttgtaaatgatcaaaactggaataaaggaaaagagacttatcaagctttaaaaaatttaggttcaactttttttcaatttattcccatagtcgaagtggatagacgtttcccacacactcatggcggacattatgctcccggtcctaacgcacaattagcggctttctctgttcccgctgaaggttacggaaaatttatgaccgatatattcaatgaatggatacaccaaggtgatgtaggaaaaatatacattcgcttatttgatagcttattagggacatggatgggatatcctgcatcaacatgtattcaatctaaaacttgtggtcaagcattaattattgaagccaatggtgatgtttactcttgtgatcactatgtttatcccgctaataatttaggcaacatacaactaacaagtcttgcacagctcgcaacatcaaaaacacagcaacgctttggccaaaataaatacgataaacaaaccaacctttgcaaacagtgtgaagtgcaaagcttatgttatggcggttgtcctaaacatcgcattattgcgatagaaggcgaaaaatatcgccacaattatctatgtcactcttataaaaaaatatttcatcacacggcaatcggcatgcaattaatgcgtcaagcgatagctcgtggaggccttgccagtgatgcacttggggcgatgcaaaaaaactatctcaagtga

SEQ ID NO: 296095 - DNA, 1611 bp, Proteus mirabilis
gtgaccttaccttttgttaaaaaaagcatactcgcggggatcattgccacgtcatgtttaagccttccaatatcagcccatgctggtggcacacctgaaaaaccgaatgtactgttaatcgtaatggatgatttaggcacaggacaacttgattttgtactggataccttagatgtagatgcgttagctcagcgaccaacacctcctcgttataaaggtgatatcaataaaatgatagaagccgcacgtattgcgatgcctaatgtcagtgatatggcagaaaacggtgcaaaaatgactaatggatttgtagctcatcccgtttgtggcccttctcgtgcaggtatctttacaggacgctcgcccgccagttttggtacttacagcaatgatgatgccattttaggtataccccaagatatcaaattgttaccttcacttttccaagaaaatggctatgccactgccagcattggtaaatggcataatgcaaaagttatccgtaaaccgaaaataaatgaaaataaacaaacccgtgattatcacgacaatatgatctcaacccctgaagcgggttatgcgcctcatgagcggggctttgattacgcctttagttattatgcatcaggtgttgccttatggaattcgcctgcattttggcgtaatggtgtcaatgttcctgctccgggttacaccacccatctattaacggatgaaacactaaaatttattgatgaacataaagataaacctttttttatcaatctttcttatagcgttccacacataccgttagagcaagcatctcctgctaagtatatggataaatttgatacagggaatgtggaggcagataaatattttgccgccttaaatgcagcagatgaaggtattggacaaatcattgcgaaattaaaagaaaatggtgagctagaaaatacattaatttttttcttatctgataatggtgcagttaatgaatcccccatgcccatgaatgccatggatagaggatttaagggccagatgtttaatggtggagttagagtaccttttattgcttatcaacccggaactattcccgcgggaacaaaaagcgatgcgatgatctccgcacttgatattttgccaaccgcgttacaagtcgctgatattcaaattcctgatagcctgcaagtagaaggtaaaaatattatgccattgcttaaaggtgaaacaacgcgttcgcctcatgcttatctgtattgggctggccccggcactaagcattatagtgaagaaaaccaagagttttggcatggttatcaccaatggatcacctatcaacgtcaaacgcctccagtaaaccctaacttagagaaactgtctaaaggtgcttgggcagtgcgtgatggtgaatgggcgctctatttttatgatgatggtaaaaatcaaccacagctttttaacgataacaccgatcctagcgaatcaatcgatttggcaaaacaaaatccacaaaaagtggctgaactaaaaaatgcgtattaccagtggatcaaagataaacctaaacctgttatttgggggcaagaacactatcaaatactagtagattcagccaaaccttaa

SEQ ID NO: 296096 - DNA, 1476 bp, Proteus mirabilis
atggttattgaaattgcatctaaaccacggcctaaactgccttatgagcaccctgatgtaaaaatttatcaacgcttatttaaagaaaacataatccggcgattagtcagaaaatcggcttatcaccgtcatgataatgctattgctgatttttttaaggatgaaacacactctcttttttcgctctgtgaaagacttactcagtatattacagaagcttttcatcactatcaggtttggggttattcccatgcctattaccccggtagtcctggccaacaaaccgtcagaaccgatgcgctagaaggggttagtcgagtacttcctttacttgccgcatggacagtaaatagcaaaaaaagcacattactaggtttaaaccagcaaatttaccatttaccctcaatgataaaacaaagctttattcatggaacagatcctcttcataaaggctattggggaaaacttgaaaattacgatcaacgaatttgtgaggcatctgatctcgctcttactctttggatcagccgtgaatgggtttgggatacgttatcttcggagatcaaacagcaaataattaactggtttgaacaagttaatcactgcgaaattgttgataataactggcattttttcccactaaccgtccaatttgttattaaagcactgacaggtaaagataccattgcccattggcgttatgaaagattaaaagaattttatgtcggtgatggatggtttcgtgatggggcaaaaggtaattatgattactacaatgcgtggggattttattattctctttattggctagcgcaaattgatccacaatttgatcatgattttattactcaatccctgaataattttaatcaacactacctttattttatcaccccaaaaggtattcctttttttggtcgtagtgcttgttatcgtcttgctgtttctgcgccattactcgcaggcgttgatttacaatgcccttttgtcaaagttggagaggctaaacgggcttttgaaagcagcttacgttattttatttctcaaggtgcactcaaaaatggcgctcccactcaagggctatttaatcatgatgctcgtttagttgataattacagtggtccagcaagctctttttggtcattacgggctgtcattatcgctctttattgtgctgatcgtattaatttatggcaagcaccatcacttcctttacctatcgaaaaaaatgactttcgtttcgaaatacccgctatccaagcatcaattatcggggtgaaagcaacacaagaagtcagtgttatttttcgagaggattatacacaacaacaatcacctttaactcgccgtttagaaaaacaaacgcgagtacaaaaaatcacagaaactgtaattggacaatcaagacgccctaaaaacaacctattacgcaaaggagtcaccagttacagttctaaaatgacacatttcttctga

SEQ ID NO: 296097 - DNA, 855 bp, Proteus mirabilis
atgtatctggtttctactcgtaatatgctcaataaagcacagcatgaaaactatgctgtgcccgcttttaacattcataacttggaaactatccaagtggtaatggaaactgcggctgaaatggcatcacctgtgatcttagcaggcacacctagcacgtttgcttatgctggtagtgattatttaatttcgatttgccagcaagcggctgaacaatatcgcatcccagtagcactacatttagatcatcatgaaaatattcctgatatttgcaataaagtgatttcgggggtgcgatcagccatgatcgatgcttctcattttccttttgaagaaaacattcgcctggttaaagaggtcgtcaatttctgtcattattgggattgcaccgtagaagctgaattaggtcgtcttggtgggcaagaagacgatttaatcgttgatgcgaaagatgcgctatttaccgatcctgattcagcagtacaatttatcaaagccacgggaattgactcattagcagtggcgattggtacagcacatggtatgtataaacatgaaccacatcttgattttgatcgtctacatgccatccgccaaaaaacagagatccctttagtactacatggcgcgtcaggtattcctgatactgatgtacgtcattgtatcgacttaggtatttgcaaagttaacgtagcaaccgaacttaaaattgctttctctaacgcaattaagcagtactttttagataatcctgatgccagtgatcctcgccattatctagtgccaggtaaagcggcgatgaaagcggtggttgcagataaaattcgcgtctgtaaaagtgatgggaaactgtga

SEQ ID NO: 296098 - DNA, 972 bp, Proteus mirabilis
gtgaaaataaatagaactgtcgccattattggcgaatgtatgatagagctaagtggccaaccttttttgccacaacaacagcgttttgggggcgatacattaaatacagcactgtatttagcgcgcctcattcctacattacatccgcaatatataacaggtttaggcactgataattacagtgccttaatgcaaaaagcatgggaaaaagaggggatcaactgccagtcagtgatcaccattcccgaaaaacttcccggtttatatgccattgaaattgatacttgtggtgagcgtagcttccattattggcgtagtgatgctgctgcacgttatattgcaacggacaaccgttttgcaacacatctagataccttgcccgacgatagtgttatctatcttagtggtatttcactggccattttaacgccgaaaggaaaagaagcgttaatcacgcaattaatccgccttaaacagcgagggctcaccttaattgtcgattcaaactttcggcctcgtttatgggatctaatacctcatgcgcaagagtggttcgaaaaactatatcgactcagtgatatcgctttagtcaccggagatgatgaacaagctctctggcaacaacccagccttactgagcaaaaaattgtcgaacgccttcatcaatggggcaataaaaacgtcattgttaaactaggagcaaaaggggctttctggtctgatggtgaaaataccggttatatctaccccaaaccgatacagcatgtcatagacactacagcagccggggattcttttaatgctggttttattgctgcatggctacaaaactaccctttgcctacatgttgtttatggggaaatacattagcaggattagttatccaacatcatggcgccattattccccataacatcactgattcattctattcactcatcaaggataaccatgagacagtcaattgttga

SEQ ID NO: 296099 - DNA, 582 bp, Proteus mirabilis
atgaaacaggttgccgttttattggctgatggttttgaagaaggtgaagcggttgtttttattgatatcatgcgtcgccttgatattcatgtagatgtactttcttgcatggatacactggtattaaacacctattttaacactaagatcagtgctgattacctattaaccgaaaaattcacacacagttatgacgcagtaatgatgccgggtggtcctaaaggtacagatcgtctatgtgcaaattcactcgtgattgattttattaaacgccatattgcacaagacaaatacatttgtgctctatgctcttccggtgcaaaagtattagcagcacatcatcttcttgaaggtcgttattacagcactggtgataaacttgctgataaatatgatgatggtcattatcttgaccaagatgttgttgttgatgggaaatttatcagtgccaaaggattaggtgttagctttgaatttgcctttacggtagctaaatatttgctcagtgacaatgtagaaaaagtagattggcaagctaatcacatttactttaaacattggccgttgtcttaccttgactaa

SEQ ID NO: 296100 - DNA, 627 bp, Proteus mirabilis
atgcagaacctaaatgttgatgtaccaacattacctgcttatcaatcacagcaattaattagcgcagcaccaaatgcgccaggtggaaacgttgctttacccggcggaattttctttcgtgaacaagcggatggaacgtatgcaacttctcctcgtgtcattgttgctccggtagtaaaagaatcatttacttacggctataaatatttacctctgctggctttacctgatttcccagtacatatttcgttaaatgagcagttgattaattcctttatgcaatcaacacattgggatcttaatgaagagtcgccatttgaaaaatatcgtgatatgaccgctctgcctgatctgccagaattaaatgcctcactggaaaaactgaaaaaagagttcccagcatttaaagaatcaacgttaattgatcagtggagtggtgcgatggcgattgcaccagatgaaaacccaattatctctgatgttaaagagtatccaggtctagttattaatactgcaacaggttggggaatgactgaaagccctgtatcagcagaaattacagcagatttattattaggcaaaaaaccagtattagatgccaaaccatttagtctgtatcgtttctaa

SEQ ID NO: 296101 - DNA, 660 bp, Proteus mirabilis
atgcagaaaaaaacatcaccacagatcctttgccaaaaaatcgctgatattattcgccaaaaaattactatcggcgaattacctccaggagagaggctttcagaagctactttaagcgagcagcttgaaatatctcgtaatacattaagagaagtatttcgtatattaacccaagaaggcctattaacctataaacctaatcgtggtgtgtttgtttctgtaccagatatggcatcaattatggatatttatcgcgtaagaaggctgattgaatgtgatgctttacgacatgcctatccaatgcacccagccatttcccgcatgcaagataacgttaatcaagcaaaaatgtttcaacaacaaaaagattggaatagcgttggaacctgtaatatgcatttccataccgctatcgtcgagctttctgatagccctaggttatttaaacaatatcaacttattttagcagaattacgattagcctttggtttactcaatgatccccagttattacatgctccttatattgagaagaatgagcatattttaacgctattgatgaatgggaaagcgcaagaagcggcaatcgaaatggaaagttatttagaaatatccgagcgaaccgtattagccgctttttctcgccacaacatctgttaa

SEQ ID NO: 296102 - DNA, 1251 bp, Proteus mirabilis
atggctacacaagatcctgtgaatacaacatcaccatcatttataaaaaataggcgttcatcattaattgcagcgatttttttaatggctacatctgcaattggtccaggttttattacgcaaacagctacctttacagcgacgatgggagcagcctttgcatttgggatattagcttctatcgtcattgactttgttgtgcaacaaagtatttggcgagtcattaccgtgactaacatgcgcgcttctgatattgcgaataaggcaattcccggtagtggatacttattagctgtattggttatttttggtggtttggtattcaatgtcggtaatattgctggggctggtttagggcttaatgccatggtaggactggatcctaaatggggtggggttttaagtgctttactggcgatttatatcttctcttcacgcaaagcgagtcattttattgatcgcatgatcattgttcttggcatcgtgatgattttattaacactttttgtaatgtttgcgtctaatcctcctataggtgaagcattaaaacaaacagtactgcctaatacgattaattttgccactataacaaccatcgtcggaggtacggttggtggttatatttgttatgcaggagcacatcgtctgctcgataaaggtacaacaggtattgaaaatatcgatgcggtatctagcgcggcaactaaagggatattagtggttggattaatgcgttatatcctatttttagcaattttaggtgttgtcgcaagtggagtgacactagatatttccagccatgcggctaatcctgcttctcaagcattccaacatgcagcgggcttaactggactgcgaatttttggtcttattttatgggcagctgcgttgactagtgtgattggtgctgcttatacgtctatgtcgtttataaccgtgtttaaaaagggtattacagagcgtcaacgcaatattgctaccattatttttatcgctatttcattggcaatttatatggttatgggaacagctcctgctgccttattagtctttgctggtggcttcaacggattgattttacctattggtatgacgttatttatttttgttgcatggcgtcgtcaagatcttatgaatggctataaatatccaatgtggttgcaatggtcggcaattttagtctgcgctttgacttggtatatggggatcatgtctgttggcgctattttcaattacctcaatattgcttaa

SEQ ID NO: 296103 - DNA, 786 bp, Proteus mirabilis
atgataaaagcggtagatttaaatagtgatttaggtgaaagctttggtcaatggcgtatgggcaatgatgctgcagtgcttgaaattgtcagcagtgccaatattgcttgtggttttcatgccggttcaccagaaggcattttaaaaacattaaaagcagcgaaacagcatcaagtcgcgataggtgctcatgttgcttatcctgacttagtgggttttgggcgacgcaatatggatattgccagtgatgaattaaccgctgatgtcatttatcaaattggcgctttgcaaggtttagcaaaagctgtcggtatgaaggtgacttatgttaaacctcatggtgcgctttataacaccattgctcatgataaacgccaagcattagcggttattgaagctattttagctattgatccacaacttatattagtggctttagcgggatcgccactgatcacacttgcgaaagagaaagggttacgtgttgttgccgaagcttttgctgatagagcttatcatgctgatggcacacttgtttcgcgcaaacaagagggggcagtattacacgatcctcaattggtggctcagcgtatgttaaagctagtacaaaaagggggcgttgaatcgatagagggtacttttactgctatacaggcggattctatttgtgttcatggtgatagtcctgatgcggttaatctcgcaaaaagtgtcaaagagatcttaataacacacggtattgcgataaaacctttcacatctgcaataggaataaaggaggcgtaa

SEQ ID NO: 296104 - DNA, 1578 bp, Proteus mirabilis
ttgcgctttttacctgttaatttatctcacatattagttgagttgacttcattaaaagagacattggcgttttatgaagcaattaagcaagccaatattgctgagatagaagatattgttcctgcggcaaaaacactattgatccaatatgtaccttggttaattacggcgaaagagttagtggcaatattgcgcaatatcgagataaaagcgatcgcgatgcgtcaaagtcacttattaacaatccccgttgattatcaaggagaagatctgcatgaggtggctgaattattggggatcactgcgacagaggtgatccgcagacacacagaacaaacttatcaagttgcttttacggggtttgcaccgggatttgcttatttaattgctgataaaactgagctttatgttcctcgacgtaaaacaccacgtacacgtatccccgcaggctctgtaggattagcgggagaatttagcggtgtttacccacagcaaagccctggtggctggcaattaattggtactacagagataaaaatgtgggatctctcacgtgaacagccggcatttttattacctggtgatactgtacagtttgttgatgtacaaaaagcgccagtgacggtttcattacctgagaaaaaacaatctattaatgctttatcctttaacaaggataaagggctatatgttatttccgcaggtctacaaaccttatttcaagatgaagggcgtttaggtgctgcatcaatgggggttagtgcatcaggagcacttgataaatgtgcgttacatgcagcgaatcgcttagtgggaaacccgccttcattagcagcattagaaataacacaaggtggattaatactaaaagcgcaacaagactgtgtcatagcgctgtcaggtgcagattgtacgatcagcttaaaacaaacgaccggagatatagcctttttttctacctatcaaactattgatatacgtagtggagatgaaatcacagtaggaatacctacagcgggggttcgtagttatctggcagtgagagggggttttgaattaagcccagtgttaggtagttatgcgtttgatactttagctcagattggccctcgagccttacaaaatggcgatattcttcatctaaacgatgataacgcatcaacgggcattattagccaagagcaaccgagtttcagtttaccaaagcaagaggatatcgttacccttgatattgtgttagggcctcgtacggattggtttacagaagatgcgataaaaacattaacctcacaattatggcaagtgacaccacaatctaaccgtatcggattacgtctattgggggataaatcgcttgaacgtcagcaacaacaagagttatcgagtgaaggaacttgcattggcgccatacaagtaccgattaatggtcaaccggtattatttcttcatgatcaccctctcactggaggataccccgtaattggggcagttgccgaataccatctgtcattggcggggcaaatccctattaacgctaaaattcgttttaacccaattactttatttcaagaatattga

SEQ ID NO: 296105 - DNA, 1746 bp, Proteus mirabilis
atgataacaactaaccaaaagcaacgagtgaagcatcgagtgttgattgctaacagaggtgaaatcgcagttcgtattattcgtgcttgtcaggattatggtgcaacgtccattgctatttatgcagatgatgatatagatgcattacatgtgcgtcttgcagatgaagcctatggtttaaagggtaactcaccgaaagaaagttatttagcgatagataaaatcattgaaattgcccataaaagcaaagccaccatgatccaccctggttatggcttcctttctgagcgagctgatttcgctaaagcggtacagcaagcgggactcctttggattggcccagatccacagactatcgaagtattaggggataaagttcaagcgcgtaaaattgcacaatccgtaggtgcaccattggtgaatggtactgctgatccggttagtgatgctaaagaggttctggattttgcgaaacagtatggcttgcctatcgccattaaagcggcatttggtggtggtggacgaggcctaaaaattgcccatcatatggcagaaattgaagagctttaccattcagcggtaagagaagcagtaaccgcatttggtcgtggtgaatgctatgttgagcaatttcttgataagcctcgccatattgaggcacaaattattgctgataaattaggccatgtcgtggtagttggtacacgagattgttcattacagcgccgtaatcaaaaacttattgaagaggcccctgccccttatttaactgatgaacaacggcaacgtattcatcaatcagcaaaagacatttgtgctaaagcaggttatatcggtgcggggacggtagaatttttattgagtgcgaacgggacaatctcttttcttgaagtgaatacacgtctacaagtagagcatccggtgactgaagaaacagccggtattgatttagtgattgaacaattgcgtattgctgagggattaccgttaagtattaatgaaacccctgagcctcgtggtcatagttttgagtttaggatcaatgcagaagatccggcaaaaggttttttacccacccccggtttaattagccaatttagtcaaccggctgggccgggcgttcgtgttgatagtggtgtggcggaaaatgaccaagtatcacgtcaatttgattcaatgatggcaaaacttattgtaacaggggctagtcgtgaacaagccattgcgagagcgcgccgagctttagctgaatttaacatcgcaggcgtagccagtgtattgccttttcatcgcgaaatgatggaacatcctgattttattgataacttcagtgttcacactcgttggattgaaagcgattttcaagcaaaaaacagtcattttcctcgtagtataccagcagaaaatgaaccactagtacgtacctttattgaaatagatggtcgccgtcatcaattagcgctacccgcacaattactttctctctcggccgttatacccacggctattagcgagcacaaagagtgtcaggtgcgggaaaatgcggtcactgcaccgatttcagggatattacatagttggttattatccgatggtgataaagtcaatcaaggggatgttattgccattatggaggcgatgaaaatggaagtacaggtagttgctacctgtcatggtgtattgcagcaaaaggcgaaagccggtgactatttttcagcagacagtctattagctgagattaactag

SEQ ID NO: 296106 - DNA, 528 bp, Proteus mirabilis
atggaaagctcatttacgccaacagaagaactactaaacactcgcgctacacaacagaaatcgcttaacaaagatattccttaccaagaaattttgttaactcgcctgtctatgcacgtccagagcaaacttcttgaaagtcgtaataatatgttaaagtctcagggcattaacgagacattatttatggcacttatgattttagatacaacggaaaatcgtagtattcaaccatcagaattgagtgcggcgttaggctcatcaagaacaaatgccactcgtattgcagatgaattagaaaaacaaggatggattgagcgtcgtgaaagtcataatgaccgtcgctgtctacatcttcatttaactgatgctggagaagagtttttaaatagcttattaccaccacagcacgaatgtttaaagaaaatttggtcagtattagatgaaggtgaacaaaaacagctagaaaccctaatgcgtaaattattattacaacttgatacattagcggataatcagcaggaataa

SEQ ID NO: 296107 - DNA, 426 bp, Proteus mirabilis
  misc_feature (408)..(417): n is a, c, g, or t
atgacaacacaattcaacaataacaataacaataataatatcgataaaaatagtgctctgctggtaatggattttcagacgaccattcttaataattttcttccacaagatcgtgctgaagatgttattcgtaatacatcatcattaatttccgctacgcgtgcagcaggcataccgattatctatgttagtgttgagtttcgtgaggggtatcctgaggttagtcaaaacaatataattttctcatcgattaaagacaatggaatattaatcaccaatagtgaaagttccgctattcatgatgatatttttccgcaggaaaatgaaatcgttattattaaacgtagagtgggggctttttcatttactgagcttgagatggttcttcgtacacaaggtattgaaacnnnnnnnnnnaaaccttga

SEQ ID NO: 296108 - DNA, 1242 bp, Proteus mirabilis
atggtataccaaattggtataccagaaaagaatatttctatgactcaattatataacagcttttggcgtcgaaatctgctcgtttgctttattggttctttttcaactgtttttgcaatgaccttgatgttaccgttcctccccctatatgttgaagagcttggtgttcaaggtcacgccgccattgtccaatggtctggcgtggcattcagtgcaacctttatcactgctggcttaattgctccagtatggggaaagctcggtgacaaatatggacgtaaatcgatgctcgtaagagccagtcttggtatggcggtgaccgtctcacttatgggaatggtaacaaatatttggcaacttgtcggtctaaggctattagttggtttggcggggggatactcatctggagcaactattcttattgcagtacaagctccaagagagcgtgttgcttgggcgttgggcattgtttcatgtggtgtaatggcgggtaatcttattggccctctagctggaggttggttacctgacttgttcggtattcgaaacacgtttttctgtgccggtgcactgatctttttgtcctttatcatgacccttacgcttatccgtgaagatacgccgaaatacataaatactacgacaaaaatgcaagtgagttggtcgcagttaccagcacgatttgtgatagttagcatgctttgtacggggttgttgctgatgctggccaatatgtcgatagaacctattattacagtttatgtgcgtacactcgttaatgatcctgctcagataactagggttgcaggttatgtcatggccgctgctgccttaggtagtattatttcagcctcttggcttgggaaattagcagataggatagggcatttgcgtattatcacgctggcactagctatagccggtttattgctgatccctcaggcctttgttacctctggttggcaacttattattttacgttttcttatgggattagcattggggggattgttgccttgtattgcggcagtaatacgtcatcacgttccagaaggaatgataggcagtatccttggctattcggtcgcagcccagtttgcaggtcagttcatcggcccgttaataggtggcgttattggtggtcatataggtatgcgcgcagtttttctggcaactagtgttgtcttattgttgggagccgcttggaattttaaattacatcgtaattcagttatacgctga

SEQ ID NO: 296109 - DNA, 651 bp, Proteus mirabilis
atgagccaagtgttagaggttgaaaaacaattaagaaaactgatactcaacatggaactaggcccaggagaacggttaactgaacgctgggctgaagcgaaatttaacgcatcgagaactcccgttcgagccgcattacaaaagttggaatcagagggacttatatgtcgtgatggtatacgttggttagtggcaccaatcgatgccgatgaaatcgaacaattatgtatttaccgagaaatactggaggtagcagcattaaaactttcagtcagccagatcaccgaagaacagttgaacaatttggaacgcctgcttaaagaaaccacggtagattcaccagaagagagcatggaaaatgctggaacacgattccatagagagttggcacgcctttgtaataacgcatttattattgaagggataaatgatgccctacgtaggctttcgcgagcacgatggcttgatagagcgccgtctaatccagcgtgggatgagcatcgtcaaatatttgtcgcacttcgttcgagagatacggacaaagccgtagaactactcgccactcatttgtgcgaaagtagactccgtttactagataccattacatctagtaaacgtagcctaagagcaagaggcattgcgatatcctga

SEQ ID NO: 296110 - DNA, 1176 bp, Proteus mirabilis
atgagtgtaaatgaggaaaaaaatccacctcaggctcccattcgcaataaaaaacgaactcgccgaaatgttttattgctactgacttttatctttattctcgcggggctcgcttataccgcttactggtttatggttcttagacatcatgaaaccacagataatgcctacgtaacaggcaatcaaattatggttatgccacaaatttcaggctcggtaacgactgtctatgtggacaatacagactacgtaaaagcaggtgaaccgctagtccaattagatgatagtgatgaaatacttgcattagataaagcaaaaaccgctttagcaaatagtgtccgtcaaatgcatcagcaaatcatcaatggtcgtcaattaaaagcgaatattgttttacgtgaaactgaattggcaaaattgcaaaatgatctgcgtcgtagagaagtattaggcgagcgaaatgtcattggaaaagaagaactccaacatgcaagagaagctgttgccacggcaaaagcggcattagatgtagcaaaagagcaatataatgctaatcaagccattatcttaaccacgcctattgcacaacaaccttctgtattacaagctgcaacagaagtgcgtaatgcatggctagctttacaacgaacaaaaatactaagtcctgctgaaggttatgtctcacgtcgtagcgttcaagttggtgcacaagttgcaccgggtaaaccgttaatggccgtcgtacctgtcacaggtatgtggatagacgctaactttaaagagacgcaactggccaatatgcgtatcggacagcccgcgaaaataaccactgatttttatggtaaaaaagttatttaccatggtcgtgtacagggattagatatgggaacaggcagtgcattctcactattaccggcacaaaatgccagtggtaactggataaaagtagttcagcgcttgccggtacgtatttcccttgatgaaaaagaagttgcagaaaaaccgctacgtatcggtttatccactgaagtgactgtggataccgttaatcttgatggaaaagtattatcacagagcgaacgtcaagcaccggcttatcatactgatgcactcactattgatatgtcagaaatcaattcattgattaatgaaatcattgaacaaaatgcaggatga

SEQ ID NO: 296111 - DNA, 1518 bp, Proteus mirabilis
gtgattaaagaacccttacaaggaggaaaacttgctataatgaccatcgcacttgcgctggccacttttatgcaagttctcgattcaacaatcgctaacgtagccatcccgacaatagcgggtaacttaggtgcatcaaattctcaaggcacttgggttattacctcatttggtgttgcaaatgctatctcaattcctattactggctggctggcaaaacgtattggtgaagtacgcctctttatgtggtcaacagcactatttgccttaacatcatggctgtgtggtatttctcaaagtttagaaatgctgatctttttccgtgtacttcaaggtttagtcgcaggccccttaattccgttatcacaaagtttgctattgaataactatccaccagcaaaacgcaatatggcattagcgttatggtcggttaccattgtcgttgcacctattttaggccctattttaggtggctatatcagtgataattaccattggggatggatcttctttattaacgtaccttttggtgtgttaattattatgtgcatctcaaatacattagcgggtcgcgaaaccaaaacggaaattaaaccaatagataccattggtctcgtactattggtggttggtgttggtgcactacagatcatgcttgatcaaggtaaagagctggattggtttaattcaactgaaattattgtacttactattattgctgtagtggcgttaagtttcttaattgtgtgggagttaactgacgaacaccctgttattgatctttctctgtttaaaagtcgcaatttcactattggctgtttaacccttagtctcgcttatatgatctatttcggtactattgtgttgctccctctcctgttgcaagaagtctttggttataccgcaacatgggcgggtttagctgcagcctctgttggtttattaccgctgatcattacaccaatcatcggaaaatttggtggaaaagtcgacttacgctatatcattagctttagctttattatgtttgcggtatgtttttattggcgagcttatacttttgaacccggaatggattttgccacagttgcttggccacaattctggcaaggtttaggtgtagcatgtttctttatgccattaaccacgatgaccttatcgggattacctccggagaaaatggcctcggcatccagtttatctaattttttaagaaccttagcgggtgcaattggcgcgtcattaacgacaaccatttggacacaaagggagtcattacatcatgaaacctttgttgaaaaaattaatccactcgatcccgatgcacaattggcttttcaacagatgagagaattggggctttctgatgaacaaacctcggcttatttagctaaaacaatcactgaacaaggtctgattatttcagcgaatgaaattttctggctagcggcaggaatattcattttaatgctggtggttgtttggtttgctaaaccgccattctcaccgggtaaataa

SEQ ID NO: 296112 - DNA, 1104 bp, Proteus mirabilis
atgaacgattcttatgaaggtaaaaacggcaaagtaaaagtgatgtatgtccgcagtgaggacagtgccgataataaacctaaaaaaccatcccgccgccctaataatgctcgtggtgatactgaccgtagtcatcgtcgtgatgataaacgcggtgataacaaattttctcgtcgtgatgaacgtggtgcaggtaagtcttcaggacgtaatccatcacgcagtggatcaagctccttacgtgataacgatagtgaaggtggtaattattctccatggaaaacgatttctcgtccgggagatgagccattaaaagagcatgatggaattactggtaaaagccaaatagatcccgaacagcttcgccgtcagcgtttagaagagacgcgtatctatggtgaaaatgcttgtcaggctatgtttaaaaaccgtccagaagccattgttcgagcttggttcttacaagaagtaacacctcgttttcgtgaagcgttaaaatggatggcggcaaatcgtaaagcttaccatgttgttgaagaagaagagatggttaaagcggcgcgtactgatcatcatggtggcgtttgtttcttaatcaaaaaacgtgttggtcatgatgcacaaacctatttaaaagatgcaccaacaaaagattgtgtcttagcgcttgaagatgtgggtaatccacataatgtcggtgctattatgcgtagctgtgctcattttggtgtgaaaggcgtcatttctcccgactcatcagtgctagaatctggtgcagcagtacgtaccgcagaaggtggtgccgagtatattcaaggaattgatgctgataattttgctcagacattagagcagtttaaacaggctggctataccttagtgacaacctcaagtcacaaaggaagtgtgccgctagcaaaagctcagttacctgaaaaaatggtattaatcttaggtcaagagaaggatggcttaagtgatagcacgttaaaacaaggggatatgagcatttacattggtggtacaggccatattgaaagcttaaatgtctctgtggcttctggcgtgttattggctgaatggtggcgtcaacatcacggctaa

SEQ ID NO: 296113 - DNA, 465 bp, Proteus mirabilis
gtgagaacgctttattttactgcgctgacaacaggcattctttctgccatttgggcatttgttgctagccaatttgacttattaagttgggctggttttttaggttgcacggcttatttcgcctaccctaaagaaggttttaaaggcttagtcgtgacgattgcgactattatgagtggtgttatttgggcattagcgattatttatggtagccaactgtttaatgatagtgcgatttttggctacgccgtcaccggtgtaattgcctttgtaatgtgcgtacaagctaaaagcacattactggcttatattccgggtacttttattggcgcatgtactatttttgccgcacaaggtcatttaacacaaactatcccttcactcattctcggtattttatttggttactcgatgaaaatgagcggactgtggatcgcgaataaatcacagaagaaagccatttaa

SEQ ID NO: 296114 - DNA, 930 bp, Proteus mirabilis
atgacaacaacacaatctactgattacaatattattgtcatgtcagatccacaaccttggcgtctagatctggataataatgaccccaataatgatcaatcccgttgggaaaccaccgtaaaaagcgttagagacagtattcaagcattacaccgtgaaaaatcttttgcttttggcattataaatggtgacttaacagaatttggccgtcgctcccaacgtgaaagttttcgtgcactgtttgctccctcacctttaggatttaatacctatgttggacttggtaatcacgattatcaaaacaatgtgggggactgtgcagagccgagtaatgccgattacagtatgaatgcctgtgcaagaggcatggtttttgatatgcactaccgtattgaagagtatcgtaattatgcgacttcaggtaattttagatacgatagtagcgaatattcaggcagtaaggcttactcttgggaatatggtgatatccattttgtgcaattacaaaattatcccacttatcatgtggtgctcgatcactggtcagcttcaactattaatgtcacagattctattgattggttagaaaaagatttaattcaggcgcgaaatagcaataaaaccatcatattaaacttccatgatggaaaccaacacttcccagaaaaatcatctcaagaagagctgaccttctttaaatatatgctagaacattacggggtaaaggcggtatttgttgggcatacccattatgttggtcaagataaccgttatggtggcagtgagatcttcggcgatgtcccagtttataatagtggtgcgctatttaaaggagattatttagccgtagaaatccgtggtacagaattatctatcactgtttataacggcttatcaggtacacctcaattaatagaaaaatggaattaa

SEQ ID NO: 296115 - DNA, 1902 bp, Proteus mirabilis
  misc_feature (1840)..(1883): n is a, c, g, or t
atgcatttaaatccgttaaaaatatcaataagtccttcgtcactcccctgcactcaacctttaacctgcattgaatatgaggacttaaaggatgggatgttagatatgattaatcgcaacagtaatatattacccactgttgtggatgaatttaatcaacaagatccgcttaatgcgcctattatggtgggtgaagtggtcgtgggtcatatcattggtctaatacccgttgttgggggggtactttcaaaaattacttccgcactttttggcctcatgaataaaaatatgaaagatagctctttagctgagcaaattattgcccatgtctctcgtattattgatgctaaaatcactgataacaatataaaaatcattaaactcaccacagaaggtattagcgacgtttatcaattattttcagattctctcgctcgttaccttgaccccaatgtgcattattcagaaacacaactacgagatttacgggaacaagttcttaaccgttttgatgatgtgatttcgacaattattgctcaacaaccattagtattaaatttagcacaatcagcaggattgcccttttattgccactgttgcgcactttttgtcgccgcccattgcgatatattaaccaataaagaaaaacttgctctggaagaggattatttcaaaaataatctaaaaacattaagaaacagcattgataaatttaacgccaatattcataaagccatttatcagcagacctcccaagtttttaaagatgattataataaatgtaatacttttttagtgggtatctatacttctggtttatctttctatcaaacttgggttaaacgtagttttgaaattgaatttacaaccccctttgctcgttggaatagcttagagctttatggaaatgactatagccatgatccaaaaatcagttattacaagacttacgttgagatgggaaaagatatattacatagaacatccatgctacaaagtattgaatcctactctcatattgatgcagtgatccgtttaaaacagaactacttaacacctgaaaaagaggtagatagttttcaatatgaaggctgtaatggcgtggcaggagatagccatgatgttataaaaaacgacacattttttaccccagacagtcagaaagcctatctgtcaccaacgcaaattttaccctccgttcgctatatttctgacacaccttggggagggttaaaatatatggtacttgatgatgttaacaataatagttttactatcggtcaaggtaatcgagataataaatcgtatcttaatattcctggctactgctttaatggcgtaaatctttatttaagtcgtcacaatggaaaaagctgtcaagctgactcaggagcttggttaaccgaatctgcacctatatttcgtttttatgatggttatgcatccttacctcttgacactaaaaatcatttacccacagcaaaaaagagctatgaactcgatttaaatcatggatttatgactcaattaagcaaagctcaatatggctatagtgatatgttagtgggaaaaaattgtattttattaaatcacgatgcctatttttgcttaccatccgaagagccgattggcaaagtgggtttatcacaaaaaatcaccttgttattacagtgtgcaattacgcaggaacaatcgttagccatagtggcaagaacgggcgatgcgacccagggcactattattggttctgctgaatttaagctcaccacagatcaagataatattatttataaaataaccccattacttaatcatcctatttccgataataaaagttatnnnnnnnnnnnnnnnnnnnnnnnnnnnnnnnnnnnnnnnnnnnnatttatcttgtatttttag

SEQ ID NO: 296116 - DNA, 804 bp, Proteus mirabilis
atgttggcactttctgtcagacagccacttaatatttattattggctcattgcgatatcattagtttatatcagtttattgagttgggttcttaattcatggtctataacagaaagtgcgcatcatattgatcagcaacagcaaaatacattatcggtctatcaggtgatgttttcgccacctaaacaatctactaccatgattgaaccgagaataaagatcgagtcacaacaaccacctattgcactaccaagaagtgagaacggtgaatttattgaaacgcccaaacaacccgcaaaaaagcgtcaacaacaaccggccccaataacacctaaagcgataaaacaggtaaaaaaacagccagtagtagacaaaacagtacctataaaactacctgatttaacaaatcacaacatagttcaaagtacatcacaaccatcagcagaaaacttaacacagcataccgcgagttcattggcagggagtagtcgtgcattaagtgaacatggtattgggcagggagagtctgaaaatcactatatcagtttattgcgccgagaaattgagcgtcataagcgctatcctgcgcaagctcgtcgtatgcaagatgaagggctggttgttgtgcgtttttcattaaccaatgaaggctatatttcatccgttgcacttgaacagacctcaggggtggcatctcttgataatgctgcacttgccgcggtaaaacgggtaaaaccaattggcccgaaacctaataacttatctgatcctttaactatctcgttaaaatttcaattaaattga

SEQ ID NO: 296117 - DNA, 1008 bp, Proteus mirabilis
atgagccaagccaccttacaagatagaaaagtgatcctcgaagtcaacgatctaaaagtttatttcgatgtacaagataataaacagtggttctggcaacctaaaaaaagcctcaaagccgttgatggtgttaccttacgtttatacgaaggtgaaaccttaggtgtagtaggggaatcaggttgtggcaaatcaacttttgcgcgtgccattattggcttagttaaagcatcgggtggtacagtcacttggttaggcaatgacttattaggcatgggcaataaacagtggcgcgatgttcgtcaagatattcagatgatattccaagatccacttgcctccttaaacccaagaatgacgattggcgatattattgctgaaccactaaaaacctatcatccgaaaatgaaacaggctgaagtggttgaaaaagtcaaagcgatgatgatgcgagtggggttattaccaaacttaattaaccgctatcctcatgagttttctggtggacagtgtcaacggattggtattgctcgcgcactgatcttagagccaaaactggttatctgtgacgaacctgtatcggcactggatgtttctattcaagctcaggtagtcaatctactgaaagatatccaaaaagagatgggattatcgctcatctttattgcgcatgatcttgcggtagtgaaacacatctcagatcgtgtcttagtgatgtatttaggtcatgcggtggaattggggacttatgatgaagtttatcatcacccattacacccttataccaaagcattgatgtcagcggtgcctattcctgatccggataaagagcgtaacaagcatattgatttgttagaaggagagcttccttcaccaattaatccaccatcaggctgtattttccgtacacgttgtccgatggctgatgaagaatgtgctaaaacgcgccccttattagagggaagtttccgccatgcggtatcttgtttaaaagtcgatccgctttaa

SEQ ID NO: 296118 - DNA, 987 bp, Proteus mirabilis
atgacaaattcaacaaataagccattgttaagtgtaaaagatctctgtgtcacctttggtactccagatggggatgtaactgcagtaaataagctcaactttgagctatctgcaggggaaaccttaggaattgtcggtgaatctggctctgggaaatcgcaaactgcgttcgccttaatgggattattagctaaaaacggtcgtactgctggaagtgcgcattttaatggtcgtgaaattttaaacttacgccaaagtcaattaaacaaaatgcgtgctgaagaaatatccatgatatttcaagatccgatgacctcacttaacccctatatgaaagtcggcactcagttaatagaagtgcttatgcttcataagggtatgagtaaaaatgatgcatatgcggaatctgttcgcatgcttgatgcagtaaaaatgcccgaagcccataaacgtatgggcatgtatccccatgagttctctggtgggatgcgccaacgggtaatgatagcgatggcactattatgtaagccaaaactattaattgctgatgagccaacaacggcactggatgtgactgttcaggcacaaatcatgacactgctaaacgagctaaaaaaagagcttaatactgccattatcatgatcacccatgacctcggggtggttgcgggtatttgcgacaaagtactggtaatgtatgctgggcgaaccatggaatatggtaatgcgcgagatattttctaccaaccatcacacccatattctattgggttgctgcaagcagtacctcgtttagatggtgaagatgaacgtttggcgaccattccgggtaatcctcctaacttattgcgtttacctaaaggttgcccattccagcctcgttgccaatatgcaacagagcagtgtttgaatagtgaacctcaattaacacaatttgctcagggaagattacgagcctgttttaaagcggcggaggagttagtatga

SEQ ID NO: 296119 - DNA, 909 bp, Proteus mirabilis
atgttatcgatgaaagaaaatagcgaagctctggggaatttctcggagcagctagatgttgaaggtcgtagtttatggcaagatgcccgtcgtcgttttatgcacaataaagcggcgatcaccagcctagtactactattttgtattttactttttgtcattttcgcccccatgttatcgccttttgtttatgacgatacggattgggaaatgatgtcaatgccacctgattttgcctcagcgcactattttggcactgactcatcaggacgtgacttattagttcgtgtagcaattggtggacgtatttcactgatggtaggtattgcagcggcatttgtcgcggtgattgttggcaccctctatggcgcgatggcaggttatataggtgggcgcgttgactcagtgatgatgcgtttactggagatattaaactccttcccatttatgttctttgttatcttactggtgaccttttttgggcaaaatatcttactgatctttgttgccatcggcatggtatcttggctcgatatggctcgtatcgtacggggacaaacacttagtttaaaacgtaaagagtttattgaagcggcgttagtctgtggtgtgtcatcacgtaatatcgtccttaaacacatagtgccgaatgtattaggtgttgttgtggtatacgcttcattactggttcctagcatgatcttatttgaatcatttttaagtttcttaggattagggacacaagagccattaagtagttggggagcactactgagtgatggtgcaaattcaatggaagtttctccttggttattacttttccctgctgcatttttagttgtcaccttgttttgctttaactttatcggtgatggtttacgtgacgcgttagatccgaaagatcgttaa

SEQ ID NO: 296120 - DNA, 921 bp, Proteus mirabilis
atgctcaaatttatttttcgtcgctttttggaagcgatcccgacactttttattctaataacgatttcgttctttatgatgcgcttagcgccgggtagcccttttactggggaaaggaaattaccccctgaagttatggccaacatcgaagcgaaatatcatttaaacgatcccatttacaaacaatacttcgattatttaattcaattatcgaaaggggatttagggccttcttttaaatataaagactacagtgttaacactttagtcggtaaagcattccctgtttctgcaaaattagggctatcggcctttgtattagcggttatttttggtgtgggggcaggcgtgatagccgcactgaatcaaaataccaaatgggattataccgtcatgacatttgccatgacgggggttgtgataccgagctttgtggtggcgccattattagtgcttatctttgcgattactttacgttggttaccggcggggggatggaatggtgggcaaatccagtacatgttactgccgatggttgcattatcgctctcttacattgcaagtatttcgcgtatcacacgtagttctatgattgaagttttacactcaaactttatcagaacagccaaagccaaaggcttgccaatgaaacgcatagtgctacgtcatgcgttaaaaccagcattactgccagtgatctcttatatggggccggcatttgtggggattattacaggctctatggtcattgaaaccatttttggattaccgggtattggtcagcttttcgttaatggtgcattaaatcgagactactcattggtattgagtttaaccattattgtgggtggtttaaccattttatttaatgccatagttgatattttatacgccgtaatcgatccgaaaattcgttattaa

SEQ ID NO: 296121 - DNA, 1638 bp, Proteus mirabilis
atgataaatgtaactaaaaaaagtgcgctagcgatcgccattggtactatctttggttttacggcgctcaatgctactgcggctgttgtgcctgatggggtaaaactggctgataaacaagagttagtgcgtaataatggctctgagccacaatcacttgatcctcataaaattgagggtgtacctgaatcagcattagcacgagatctatttgaagggatcacgattgtagggcctgatggtgaaattctaccgggctctgcgactagctgggaaaataaagattttactgtttggacgtttaaaattcgtgaagacgcgaaatggtcaaacggtgaccctgtaacagcgcaagactttgtttatagctggcaacgtttagcagatccgaatacagcatcaccttatgaaagttatctacaatatgcccatattgttaatattgacgatattatcgccggtaagaaaaaaccgacggaactaggtgttaaagcgcttgataataatacattagaaatcacattatcagaggccgtaccttatttacctaaattgctagctcactcctcgatgtcgccagtgaatcaaaaagtgattgaaaaatttggtgaaaagtggacgcaacctgcgaactttgttggcaatggtgcttatgtactgaaaaattggacggtaaacgaacgtattgaattagagcgtagtccaacctattgggacaataaaaatacggttatcaataaagttacttttttacctatctcatcagaagtcaccgatgtaaaccgctatcgtgcgggtgaaatcgatatgacttatagcaatctgccgattgaatttttccaaaaattgaaaaaagagatcccagatgaattacgtatcagcccatacttatgtacttattattatgaaattaataatgagaaagctccctttgacgatccacgagtacgtgaagcactaaaactatctatggatagagatatcatcacctataaagtgaaaaaccaaggtgatatccctgcttacggatttacaccgcctttcaccgatggcattaaagagagtaaaccagagtggttcgcttcttggacccaagagcaacgtaatgaaaaggcgcgccaattattagaagaggcgggttataacaaagccaatccattaaaattcaagttactgtataacacctctgatctacataaaaaagtcgcgattgcggcctcttctatttggaagaaaaacttaggtgctgaggtttctcttgaaaaccaagagtggaaaacgttcttagatacacgtcaccaaggtaattatgatgttgcacgtgcaggatggtgtgcagattataacgaaccttcttcattccttaacatgatgctgtcttacagcagtaataataccgttcactataaaaacaaacaatttgatgcgtatatgaaagaatctttacgcgtgaaatcggatgatgaacgtgcagaaatttatcaaaaagcagaaggtgtattagataaagattctgccattgttccactttactactacgtaaacacccgtttggttaaaccttatgtcggtggttattctggtaaagatccactggataatttacatactaaagacttgtatattattgctaaataa

SEQ ID NO: 296122 - DNA, 1413 bp, Proteus mirabilis
atggggcctaatggcgaaagtatgccgggggttgccgctaaatgggagagctcagaagacaataaaacatggactttctatttacgcgatgatgcgaaatggagtgatggtacaccggttactgcagatgattttgtttatagttggcgtcgattaactgatccccaaactggctcgccttatgccagttatcttgaatatgcctatgtggaaaatgttgcagatattctgacaggtaagaaatccccagagagtctaggggtaaaagcaattgatccacatactttgcaagttacgctcacacaaccggttccctatctggtggatatgctaaaccacacctcattaaaaccagttaaaaaagagattgttgaaaaatatggtgtcaattggactcgcccggaaaactttgtcggtaatggggcgtatttaattgataattgggtggttaatgaaaaaatcactttaaaacgtaatccgctttattgggataacaaaaacaccattattgaacgagcgacttttttacctattagttcagaaaccagtgatattaatcgctaccgtagcggtgaagttcaaatcaccaatagcgctattcctcctacgctttatcgaaagatgaaacaagagcaaccggaggctctacatattacgccttacctatgtactttcttttatgagcttaataataaacgtccaccttttgatgatccccgtgtgcgtgaagcggtaaaattaagtttagatagagaaattatcgcggaaaagatcatggggcaagggcaaataccggcttattcttttactccaccttttattaataatggcaagtttaaaccccctaaatgggctggttggacgcaacaacagcgtcatgaaagagcgcgtgaattattaaaagaagccggttatgacagccaaaacccattatcttttacattgttgtacaacacatccgatcagaataagcaacaagctattgctgccgcttctatgtggaaaaagaatattggtgctaatgtcactttacaaaatcaagagtggaaaacgacgttagaaaatcgtaaccaaggtaattaccaagtggcaagggcaacatggtgtgccgattacaatgaaccaacatcatttttaaactctttcctctccactagcagtctaaatactattttatatgaaaatagtgattatgatgctgcattaaagaatgcgttactggccactgataatgaagcgcgtcaccaactgtatcaacgtgctgaagccttgttagacaaggactccgctattgtaccagtctattatcgtgtgagtgtcagaatggtcagtcctaaagtgggcggatttaccggtaaagacccctttgattatacggacttaaagcgctattttataaaggcagataaataa

SEQ ID NO: 296123 - DNA, 474 bp, Proteus mirabilis
atgctagctgaggcaacacacacaaacctctctttagttgatgaaattaatcaaagactttgtgaatttagagatgagcataatatgtcaacaggacttgttattgctcaaggtaagaagctctatttagtgagatataatcgtagttttaaacatgtcgatattgattttctgccaaatacacccgttccacataaattgagtgcggcaggcgcgacttatgcagtctttagtcatttagaaattgatgctgatttatcaatacagcaaaaaaacagtatacatcaacaaggttttgctattcgccaacaacccgctgaaggtattcctggggctcaatctattgcatgtcctgtatttaataggaaaggtgaaatggtcgcagccgcattgaccatgggatttattaaacctgaaaaccaaatagaattaggtaatgcattaaaagcaaaaattcgccatgtattatcttaa

SEQ ID NO: 296124 - DNA, 1269 bp, Proteus mirabilis
atggtgaaaaataaaactctgtttaaatcacttctcacaatccccgttaaccaccataaacgtacaacgttaaaatggttaggcggtagtttactgcttgccagtatgggcgcaaatgccatcgaaaaaaacaagtgttcaccaacacttcgttatcaacgtgctattaactacttaggaaaacatcaagctggggttatcacgccagaacaaaagcatgcttcatttattgcacttgatttaacagtaacaacccctgaggaagtagaaaaaattttccgaaccttaacacagcggattgcttttttaacacaatatcatgaacttaaagaaagtcataatcctcaccttccccccgcaggatccggtattctaggtagccaattataccctgatgaattaaccatcacagtggcgttaggggatagtttttttgataatcggtttggttttcaagctcataaacccaaacgccttgaagcaatgaaacccttccccaacgatcgcttagatcctaaatggtgtggcggtgatctgttacttcagctttgtgccaatagtcaagaaagtatcatttatgcattaagagatattttaaaatatctttctgggcaagtgcatgcacgatggaaaatagatggttttctacctgctcgtgatattgataatcaacaaacgccaattaatttatttggttttaaagatggcacaggtaatgcccctgccactgacactcatttaatggatgatttagtgtggatcaccgataaacaaaatgaaccgcagtggtgcttaggaggtagctatcaagcagtgagacttattcgttttgccttggaattttgggatagaacacctcttgaagatcaggagaataactttggtcgtcatcgtgcaacaggcgcgccgataggaatgaagcaagaaatggactcacctgaatttgcacaagatcctcatggcgacaggatactctttgattcccatatgagacgagctgaacccagaacccccgaacgttatagcgccaaactgcgtcgtcgcagttatagctactcattagggctaacgccgtcaggacaattagatatggggcttgtctttgtctcatttcagaataaccttaaaaaaggctttattgatacgcaaaagcgtttaaatggtgaaccgttagagcgctatataaaaccttttggtgggggttattacttcgtattacccggcgtcacacaagcaagcgatatattagctaaaggactatttacttaa

SEQ ID NO: 296125 - DNA, 924 bp, Proteus mirabilis
atgccaaatagcgccctattgaaaggtgatcatattgtcatcttgctattgatatcgctatgctctttttctgtttctgcaaaaaaaatcattcaaggcattactcaagatagtgaaaatattgttgttgctaaaggggatattcccactcctgaaaaatttacaaccaatattcttaactatcggcagaaagctgttgatcagttgaccttagttgaaactgcattaaaaaatgtcattgttaacagtgaaaaaaatcaactgactgatgcccagctcgcctatcaacaagcgcattatcactatgaggtgatccgcccgattattgcattgtttggcgctactgaacgcctattaaataatcgggctgatttctttcttgaaagagaaaactcgccccgttttagtggatttcatttggttgaatatcaactctttaaattagaggatatgcaatcgtcagccgagtcagccaaggcactgttaagaggcattagtgatctaaaaaaacgcttagcgattgaagatattcccattgctaaattagtgcaatctgcaggtgatagtttagagctgattttaaccgacaaattagccggcattgaaaatcaatatgcaaaaagtgatctgggtgatgggtatgccaatttatacggttcacgcctaatcattgagtcgctatctaaccatattccacttcaggaatatcaatcactacgcaaacagtatgacactattagcaaactatttttaaaatatcagcgagatgaagaactattccagcctttagatacgctttctgatagtgagaaagcagtgctctttgcacaaataacacaattagcggagcaagttgcacaattacgtaacgtgctcaatattgatgtctattattactataaagaagcatatggtgaaaaataa

SEQ ID NO: 296126 - DNA, 837 bp, Proteus mirabilis
atgggacaagttctatttgttgtttggcgagaaagttttgaagctctgctggtggtagggatcatttatgcatggataaaacgctctcctacccctaaacaaggtatgaaatatctctggggaggagtaatagtaggaatactactctctattcttttagctcttagcatttatggggtatttagctccttagaagatatctggcaatctctgtttatggttatgatggaaatcattgcctgcctattaattgttcagatggtctattggatgaacaaacaaggtaaatcactaaaagccaatatcgaaaacgaattgacacaaaaaacgcaacaacaaagtgtctgggggattttactgatcatcgccattgccattgcgagagaaggcagcgaagtggttgttttcctatcaagccatattatggctctcacagcacaaaccgcgttgtctttcttgattgaagtcttcattggcctattgatagcgggactaactctatggttatttttgctaacatcaaaaatgatttcttggcgtaaattctttgttattaccggatttttactgcttttcctcgccgtttccttgctattaaaagcagtagaagagatagctaatctacttattgaaatggatattgaattacctgactttttgatttatccactatgggatcttagccatattctggatgattcaagcatttttggtaatttcttagtttcattctttgcttatcgctcacaacccatcggtttaagtgttgttacttttattgtgttttggttggtggtcgcactgttatttaaacaaggggatcgtcatgccaaatag

SEQ ID NO: 296127 - DNA, 348 bp, Proteus mirabilis
atgattaaacatctctatcaatacacgctattactgctattaatgatagcaagctctactttagccgcagaaaaatacaccgttgaattagaaatgaaagagggggaactgatccctcgagttttaaatgttcctgctaaaactcctatacggatcaaaattcgcaataccggtagtagccccgttgaatttgaaagcactcaattacgtaaagaaaaagtattagcgcctggggcgagttctgtcgttgtgattgcgcctctaaaacctggacgttacaccttctttgatgattttcatctgtctcaccctcaaggtgaaatcgttgcgactgaaaaggctgaataa

SEQ ID NO: 296128 - DNA, 558 bp, Proteus mirabilis
atgaactctcgttatgtgcgtgctctcacgttgttatcattaattcccacttctgtcttcgctcttgagtatcccgtaggtcaaccaatcattaaaaatggcatggaaattcaaggtgtctatctacaacctatcacgatggacacagaggaaggccatcatgcaatgaagcacctacctgctgataaagctgatatccatttagaagcagatattcatgctgttgaagataatccgaatggttttgctgaaggtgattggatcccttatctcactgttgaatataccgtgactaaattagatgcaccggagaaaaaacagcagggaacttttatggccatggtcgccagtgatggtcctcattatggtgaaaacctaaaattagatggcaacggccaatataacgttacctataaaatttacccgccttcttacaataaagatgtcgtttttggtcgtcatatcgacaaagagacgggggtagccgcttggttcgagccttttgaagtgtcatgggattttaactatagcggtactggtcgtaaaggcagttactaa

SEQ ID NO: 296129 - DNA, 324 bp, Proteus mirabilis
atggaatatccacttgtaccagcacaaatatggttccatgaaatagactcatatcgtagtaatattttttcatgggagacgatagagtatccgttagatgattctggtgaagattgtgtaaaatccacaatagttgcattactcaatttaatttcaaaatatttttctaaaataccaaattggtttatcctgaaaaagtcaaaattagcatctaataattcattattagatatggcaacgcctaataacggggatgacttatcaattggtttaatgaataaaactggatggtggactgaattttgcatcctgcttattgtgtaa

SEQ ID NO: 296130 - DNA, 495 bp, Proteus mirabilis
atggtcaaggaaacttttaaaggtaataacccaataagagcaattatcataagatacttagaacacctttttactaatctgaacgatgatgaaatgaataatcttaaaaccctattaagaggtgtattccttacatctggggcactagtaacaacaggaggagttcgtgtttacatagccacagccgcatctgaacttatatataatacggtactaagaaatgccattgcccacaagttaattagaggtggtggaaatatagcaatggcttttgtgggagggtatggcatcatagagatggcttctcaagcaaaggaaagattacgctatagcaatcctactctgtattatgaccttgttttaatgaatttagaaatggggtattttatagtagaaccaaatatatcaaaatggttatatatgataggatctgaaaagaaaagtgttgatgaagtttatcgagcaataaatggattagtatcagatatagcgtaa

SEQ ID NO: 296131 - DNA, 1503 bp, Proteus mirabilis
  misc_feature (720)..(729): n is a, c, g, or t
atgcgttgtcaacggggtgaaataaaactgttatatattgcacctgaacgcctaatgatggagagttttcttcaccatttagtgcaatggcagcctgctttattagcggtggatgaagcacactgtatttctcaatggggtcatgattttcgccctgaataccgaggaattggcttattaagacagtatcttcctgatgtccctattattgcgttaacggcgacagctgataatacaacacgtcatgacattattaatcagctcgcgttacgcactcctttagttcatattagcagttttgaccgcccaaatattcgttatactttagttgaaaaatataaaccgctcgatcaactttggctgtttattcgtgggcagaaaggaaaatcaggcattatctattgtaatagtcgcagcaaagtagaagagaccgctgaacgactaggtaagcgaggattaagtatcgccgcttatcatgcgggtatggatattgccacacgagcgaaagtgcaagatgcttttcaacgcgatgatttgcagattgtggtcgcaacggtcgctttcggcatgggaattaataaacccaatgtacgttttgtggttcattttgatattccgcgtaatattgaatcttactatcaagaaacgggacgcgcaggacgcgatggtttacctgcacaagcggtgctgttttatgatcccgcggatatggcttggctnnnnnnnnnngatgagaagccagaaagtgaacaaaaagcgattgaatcccataaattaaatgccatgggggcttttgccgaagcacaaacttgtcgacgtttagtgttacttaattactttggtgaacaccgccaacaagcttgtggtaactgcgatatttgccttgatccacctaaacaatatgatgggttagtggatgcacaaaaagcgttatcttgcatctatcgtaccggacaacgttttggcattggttatattgttgaaattttacgcggtgccaataatcaacgcattcgcgataatggtcatgataaattgccagtttatggtattggtaaagcccatagccatgaatattggatgagtgtgatccgccaattgatccatttaggtatggttgcgcaaaatatcgttcatcgttctgcattacaattgactgagatagctcgaccgatattgcgtggtgaggtgtcattacccttggcagtaccacgactattaagcccaacaaaaagccgttatcagcaaacaaaaaatagtcatcgacagtacgataggaaattatttgcgaaactacgcaaattacgtaaatctattgctgatgaagaaaatattccaccctttgtggtatttaatgatgtcacactgattgaaatggcggaacaatgccctgtctgccctgatgaattgttgttgatcaatggggtaggacaacgaaaactagaacgatttgggccagcatttatgacacttatccgtgatcatattgaggggttcgaatag

SEQ ID NO: 296132 - DNA, 1005 bp, Proteus mirabilis
atgacaaccacactttttcagcacatgtggttatctcgtgaaaagcaattctctgcttttacgaatggtatcttattggacttttggaaccaacgacaggaaggcgaatttaccggagtcgatggcgtgagcattcgctatgctcattggcgctcttcatcacacaaaaaagcgttggtgatctgctctggtcgtagtgaaagttatgtaaaatatcctgaagtggccttcgatttttatcatcttggttatgatatttttcttctcgatcatcgggggcaaggattatcagggcgcttattagatgatccgcaaaaagggcacgtagaaaaattcagtgattatgtcgatgatttatcgacatttattgatactatcgttttgccttatcactatcagcactattttgcgttagcccattcgatgggcggcgctattttagccagctacctattacgtaaacctgatattttccaagccgccgcactgtgtgcgccgatgtttgggattaatttaccaataccacgctgggtggctaattttttagttaaccgtgcagaacaaagtgtttcagaacgaaataattacgcggtatcaacgggcaaatggtttcctttgccatttatcttgaatgtattgactcatagccatgaaaggtatcgtcgatacttacgttactatgccgatttccctcaattacgtttaggtgggccgacctatcattggatgaaagagagcctagaaacgggggattggctgattgaacatgcaaaagagattaacacccctttgctagtacttgaagctgagctagataaagtggtggataatcggggagtaagggctttctgtgatggttatagtcagtccagaacaagagaagaaaagcaaaaattgccacttgtgattgaaggtgcgcaccatgaaatcttgttcgaaatagataagctacgctcacaagcattaattgaaatctgtgagttttatgataagcatttattttaa

SEQ ID NO: 296133 - DNA, 801 bp, Proteus mirabilis
atgtattcgatagttgcttctgatcttgatggcaccttgttatcacctaaccacttattaactccctataccaaagaaacgttacatctgcttattgaaaaagggatccattttgtgtttgccacaggacgtcatcatatcgatgtggcacaaattcgtgatgggcttggtattgacgcgtatatgatcacttcaaatggggctcgagtacacaatacgcaaggcactcttattttcagtcaagatcttgaacctgaaatcgtttatgacttagccctaatggtgtttgatcacccagatattgcaacgaatatttatagcagtgatgactggtatatcaataaagaaacgcctgaattaaaagaattttttaaagaatcggtatttaattaccgtctatttgagaaaacaggcttcccaacaacgcaggtgtgcaaagtcttttttacctcagaagatcatgaattgttagttgagttagaaaagaaaattaatcaacgttggggcaataaaattaacgcaagtttttcgttgcgtaattgcctagaaattatggcgggtggggtatcaaaaggagaggcactacaaaaagtcgctaagttgatgcaacattcagtaaaagatgccattgcatttggtgatggtatgaatgataaagagatgctacagatggcgggtaaaggctgcattatgcaaaatgcccaccagctactaaaagatctattaccggatatggaagtgattggctcaaatgttgatgatgctgttgcacactatttacgtaagttgtatcaggtttaa

SEQ ID NO: 296134 - DNA, 1020 bp, Proteus mirabilis
atgaataaatatataactttgggttgtctgtctgcacttttgtatacatcaaccgcttttgctgaatatcgtgccgatacaaccactagaacggtgagttataacaatccaatttatgtttcaagaaccgcgcctattttaacagagctggcaacgattgacttaggcactatgtatggctggacttggtggaatatcacaggcccagtacaagcggggatctacttgcccggctatatttcagcttccagccctaaagtaggcagtgcctatgtgcgtgaattagggactagtggtatcggttataccctacacgggactattactgtcggttgcaccggctccgcttatgtcgatggactatataatgttgatggcaactacagtaatcgccttatttgcacaagtaacttaaaccgtagtagttataccgcttctttaaaaatgacgttatataaactgcgtaacaatatcaaatcacaaaccattccaagcacatgggttgctatgctgattttgtatcacaatgggggatttatcaccagtgacaatactggccgcactgaaccaaaggtttaccttaatccccttaatattgtttccagtggctgtgaagttatcaataataatattaatgttcctttaggctctgtggcaaaatcgagctttaatggcgttggctctgttagccctgatagtctacaagatgtgaatatcgatttagattgtgatcccgtttcacccattaagataaaattcgatggcaccccagatgctagccaaaccgcaggcacgattagccttaataatgccaatgatagcaatacagccaaaggctatggcattcaggtgaaataccaaaaccaacccattgagttaggaaaattgataacggtgagcgaaaagaataacagtggtaatttttctattcctttagaagcgggttacatacaaacttctgagactaccaccgcaggcaaagctgatggaacactgcaatttaccctgcaatatcattaa

SEQ ID NO: 296135 - DNA, 2526 bp, Proteus mirabilis
atgactttttctatgatagcagtatctacaaaacgattacccatcaacatggcagataatctttatcgtcgtggagtgttagctattgctatcacgactgttttattcccttatactgttcttgctgaagatatttttaatcctgaagcacttaatttaggtatcgaaaatcacgttgcagatattaacagcctgaattacctgtcctatgcaggaggacaacttcctggtgtctattctgtcgatatttatcttaacgataaacttatcgataatcgtcaaattcgttttatttttgatgacgataaaaaagtgctggcgcctgaaatcagtaaacaggatttactcaattggggagtcaaagggtccgttacagacgcgtttagccaacaacctgatagttgtaaaataacggatattgctcgtgttattcctaatgctacatataaatatgatttttcacgtgcgcgattatcattttcgatcccacaaattgcattatataactatgggcaaggttatatatcccccacagaatggaatgatgggattaatgcagcctttattaattacacctatcgtcagaataaatattggtatcgagaccaaaaagacagtgacaatatctttttaggattacgcagtggtattaatctaggcgcttggcgtgtacgtaatcacagcacttacaacaaaaatagtgataacgccgcagaatggaacagtctacaaacttacgttgaacgcgatatccgccgtttaaaaagtcgattaacactaggtgaaaccgcatcaagtaatgatgtgttagaaagtgttccttatcgtggtattaaattagcctcagatgaaagcatgttgccacaaagtcaacgtggctttgctcctgttgtaagaggaattgcacaaagcaacgcaatggtgactattcgccaaaataatagtgttatttatcaaacctctgttccccccggtgaatttgaaatatcagatctctatcccacctcttatagtggtgatttacaagtgactgttgaagaagctgatgggagcaaacgtacattttcccaacccttctctgcagtccccatgatgcaacgagctgggaacttaaaatatagtctcgacttggggaaatataatgctgatagcgcagagcgaaaaccgacctttttacaagcttctgccatttacggcttaccttataatttttccctttatggaggtacgctactttcagcagattatcaagcttatgcgataggtgccggcgtaaatatgggttatttaggggcgatttcagccgatataactcatgcaaataccacgcttatcgataaccataaagcacaagggcaatcttatcgtgtccagtattcaaaatatttaccggataccaaaacaggattttcattagcgtcttatcgctactcaactaaagattattatgatttttcaaccacgaatgaacgcttttcacagctttatcgtaagaaaaaacagtttcagatctcagtatcgcaagcattaggagagcttggttacctctctttaaatggttatcagcaatactattggtatcaagatagagtcgatcgcaatatcaacctaagctttaactctaattatcgctcactcagttatagtatttcttatgcctataataaacggcaagaaagtgaattaaccgatcaaattttatcgattaactttaacctaccgttcaatatgaccaacaataacaattggttaagttatcgttataacaccagtaaacaaggtgattcgataagttctgtgagtttaagtggtactcgtctcgaagataacaatcttcagtatgatatttcgcaaaactataaccatactcgccaagaatatagcggtgctatcaatggtagttatagtgcttcaggtggcgaaatcagtgctggttataactatgataaacgtttccagtcagtgaattggggagcaactggcgcgttattaatccatcaagatggaataaccccatcccgcactatctatgactccgctattttaatcaaagcggaagatattgatcatttgaaaattagcagtgcacaaagtttatataccaatgctcaaggttatgccgttatccctaacgtttcccgttatgaacgcaatagagtaacggttgatcccgcttccttaaagggaaacaacgatgtggaactcacttcaacaacagtgatcccaacgaaaggcgcgattgttttagccgattttaaagctcgcaagggtgcaagagtattagtgaacctctcttataacggtaaacctttaccattcggtagccaagttgaaattagccaagatggacaagtgatttccagtgggattgtggctaatgatggtgaggttttcctaaatggtgtacctgcaagtagtcaactacaagccaaatgggggaatagtgctacggaacagtgccaagcaacattaaacgccgatctatcgctcgagaaaattcaatttttacaactggactgcagatag

SEQ ID NO: 296136 - DNA, 276 bp, Proteus mirabilis
gtgattaattctcaatttaaattgtttctccgtgcccatgatattgaaccacttgattttgataaggtgaaattatctaaacaaaataaagggttagtaataaataacgatacgccgtatcacctgacaattaaacatatcttagtgggtgataaacgctacccatttaatgattttgttaatcctcaccaagaagtggtcttgctaaaagaaaatcatattccgcagcaatttatcaatgattacggtgcgactgtagataaagtattaaattaa

SEQ ID NO: 296137 - DNA, 1131 bp, Proteus mirabilis
atgaacagaaaactctctctatggttagcaattgcgttaatgatgtttccacaaattgcagaaaccatttatagcccagcacttactgatatttcaaatggttttagagtcagtgccaatgaagcagggcaaacactttcgctctacttttttgcttttgcactcggtgtcattatatggggtcgtttatgtgatgtcattggccggcgcccaacaatgttagcagggttatttatttatgccattgcttgtattggtgtctttatgaccgataatttttctgtattactgatattacgtatgctttctgcttttggtgccgcagttggctctgtaggaacacaaactattatgcgtgatgtttatagtggtgaagaattagccaaagtattttccgttatgggagcggcaatcgcattaagtccggctattggtatgttaagtggttctttactggtgagctatgcaggttatcaaggggtatttagtggccttgctcttctcgccgtcgttttattgctgtggagcactattgcattaccagaaagtcgccctgcaacaataaaaaccgcaccactagcggaaacagcgataaaaatgctgaaagataagcaaattgccaagactatacttttaattgctttttttaatatcagtctatttgcttattaccaactagcaccttttatgtttgataatcaaggttatagtgcaagtacttttggctatagtggtattgtattagcaataggtgtcggtattggttcttacattaataaagcattattaagccatcattggcaatgtgagaaattagtattacttgcaagtattattgcagtaattagtgctgtaagtgtttatttattgcgcaatcacattagttttattattccaatgatgacaagtgtcgttgcctatggcattgctattccaaatatcttagcaacggctttagcgcaatataaagatcgcttaggcacagcgggtgcactattaggtttattctactatttacttattggtggtggtttagcactggctggatggggacaaagtttagcgattaccttgctgatttgtagtataggtgctttgttactctctttctctcgccaaacagcaaaataa

SEQ ID NO: 296138 - DNA, 3729 bp, Proteus mirabilis
gtgataaaaaaaatattagatattctccctatttttgggaaaaaagacgtcgatattactgaacaatatcttcaaggctctcttgtcctactggctatatttgatgaaagtttacctaagcgtgcattagattatgtacttacaggtacaaaccctgaaattctatttgaattaaataaactagatgcagcgaaagccgccgtttattttcatcgtgcgggaacattagagtggtggtatgccagtaatgttgatacaggaaagtacggtaaggttatcacccaaggccttaatgcccgccataaactctactcaaaggttggtgaaagtttttccttagagcaagtggcccgttttgccaaagtcatcgctgccgcatgtcaagatatcaatattaaagtaacaacaacgcaagtccccacttgggttatctacctgttagttgatgcgttttataccacttacgataatgcacgtaaccttaatttagaacatcgtaaacattggagtatggagtttatcgccaatatggtcgaagcagaggccaatattgccggtgaaaacgcgttatttgcaatttttgatagaaaagatgtctctgaatattatgccgctaatcttaagcgtatttatgaactgtgtgatttaaaagactatctactttcacatcaagaatttgttagaaaagaattagttgaaaaactttcagcgaatggcttagtcgagctaataaattatctaaataaaaatacgatattacgcaatacttttgcagatattattgttttacttgccactagcagtttaagaaccgtcaaaaaaacggctgaacctattttaaataccttacctgctgaaatcgtaaaagaaaatttaacccatgttttaatgaatggtactcccaaacaacgtacacaagccgctgatttattcgcgcgccaaggtgaaaaccgtgatgtgctggcagaagcattaaaacatgaaacctcaaaagcagttatcaagagcattgaaagtgcgctacaacgtttttgtgttgctgataatgcaaataccgttgaagccattaaagcgcctgattttactcccttagaagacacaccattacccgatagtgcccgcgatattctggtcaataacttcaatgaaatgttagtaaaagcaaaagaaaatgctgaacgtgaaattgaagaaaataaaacgtctaaacactcttataattgggcacaacgccattataaagatctctctaaaattgatgaaaaacagtgtcgcgcattagtggataaactcaatagcggacaaggcactattcaagtcaatgagatccaaataattaaacacaaaaaccgtattcctaatttacctgaatacacctttttccatgccgtgcgcgtgatcaccaataaccgccaacatgcggatcacttttcctctcactattttaatagtgatattcctgaacgtttattgagtgatattgaattacgacacgttgaaaatgtattagaacgatgtcatttcaaacgtgcaacgcgtatcacagcggcgctgtgcttagaatcttatcaagatggcttacgtcgtttccgtaaaccagaacaagtttggcctttcttctctcaacatactgattatattgcagaagcgctaaacttaatgccaaatcaaagtgaacaccgctatcgccaatttgaaacttcacaaggtattgaagtattaagccgttttccaaccattcctgcacaattcgttccgcgtatcatggaattggctctaggtgaaaataaaacacaccgagtttcagctcagaaattattagaaaccttaccgaatattcacttaagtgcacaagaaggcttaacttcaagtaaacaagaaattcgagtcaccgcgattgaatggttagcacgtttaaataaccctgactcattacctgcccttaatgccttactgaaaaaagagaaacgcgaagtagtacgagccgctctgctcactgcgttagaacaattaggtgaggatatttcaagctatttatcgccaaagacattattagcagaagctgaaaaaggtctcaaagccaaaccacccgcaagccttgcttggtttaacttcgaagcgatccctacattaacatgggaaaacaaaaaagcggttgatcccgcgattattcgttggtggattattctagccgtcaaattaaaaatgccagggggtaatgcgttattacaacgttatatcagcctactttgcgttgatagccaacataagctttcaagctttatcctgcacacttttgtcgctcaagatattaaaggaccaacacttgaagaagcgatggctgaagcgcaacaaaatgccccttctcgattaacacaatacaaagattgggccaaacgttatcctgaatattatgctaaatatgaaacctatactttagagcaagtcgtcgaagaaattaaaaacgaggtattacgtcgttatttaggttcggcaatcagcgataaaggaatgctcgcgcttatttgtggaattgaggggcatattgcagtatcagtattacgtaactatatgcgtgatcactatcagcgtcgtgcgcaaatcgaagcgatgattgatgcggtagcttcaagtaatgatcctattatcattcaacttctgctttcattatcacgtcgttatcgcacagcatctgtgcaggaaaaagcgcgtaatttagttacgcaaatagctgaacgcaatggttggagtgctgatgaattagccgatagaaccattccaaccgccggctttgatgattcaggaacattagtactggaatatggtgagcgtactttcaccgccaaaatggatgcaaaacaaaaaattgtcctgtttaatcctgaaggtaaggaagttaagtcattacctgcagcacgcaaaaatgacgatccagagctgattaaagaagcgaaaaaacttttcacttcaagtaaaaaagaacttaaacaagttattgaattacaaagtgtgcgtttatatgaagcgatgtgcgcgcaacgccaatggctaagcgctgattggcaagagtatattttagctcaccctattatgcataaattgattgaacaattagtttggcaagaagtaaaagagggtgaagttatcaataccttccgcccttctgatgatggtgctttacttaaccttgaagatgacgaagtcaccttacaaaatgattctttgattcaattagctcacgccgccctagttaatgaagatgagcgtaaagcctggattgcacacttcaaagattacaaagtgaaattcttattttcacaaatggaacataagatccctgatttagatctgacacaaacagaagttgaagaccgaaaaggttggatcacagacaccttcaccttacggggtattttaaccaaaatgggctatcagcgaggccctgctgaagatggaggctcgttctctcactattacaaattcttctctagcttaaactactacgtcaatatcggttttagtggtagctatgtaccagaagaaaatattccagcggttttattcgatttaagttttgagaaggatcagcaaaattactgggatcgcaataatattgagttaaagcaagtaccaccgattttattagcagaaagctacgcggattatctaaaagtcgctgaagcttgtgcaggatttgatcctgaatgggaaaagaaaacaccttggtaa

SEQ ID NO: 296139 - DNA, 972 bp, Proteus mirabilis
gtgcgccaatttattttaggtgatgatactttaggtatcacacctaagtttttcggtgatgatgccttagttgatcgtgcaattgttacattattaggcaaacagggcttaatgctggttggtgagccaggtacagcaaaatcaatgctctcagaactttttgcggctgctatcagtggtgattcaggattaaccatccaaggtactgcagggacgacagaagatcatatcaaatactcatggaactatgcgttactattagcagaaggcccaacagaacgagcattagtcggctcaccgatttatcaaggcatgttacaaggtaaaattgttcgttttgaagagataactcgctgccctcctgaaattcaagatgtgctggtttctttaatgtccgaaaaacagttaatgatccctgaaatgggcgacggtgcgcgtattagtgcaaaacccggatttaacttgattggtaccgcaaacttgcgtgaccgaggtgtacatgagatgtctgccgcattaaagcgacgttttaattttgaaacagtaaaacctattcgtgatccagcttttgaaatcagtttgatccaatcacagcttgaaaatgagttaggtgctttagcgacagaaatcaccgtccctatggatgtggtggaattactggttaccacattccaagaattacgttcaggtaatacgcaagatggtggcaatatcaaaacacctgatgcggttatgtcaacagcagaagccgtaaatatcgcttatgcttgtgcgttagaagcgcattatttaggtgatggcgtgatgaatgccggtgcgattgcacgtcaattaatcggcgttgtattaaaagataatcctgatgatattaagcgtattcgttattacatggacaacgtcgccagagaaagggccagaaatagtaaagagtggaaagcgttctttgatgcatcaaaagacttttggcaataa

SEQ ID NO: 296140 - DNA, 531 bp, Proteus mirabilis
gtgatcgatgatgatggctaccgcccgaatgtggggattgtaatttgtaatcggcaagggcaagtgctttgggcccgtcgctatggacaacattcatggcaatttcctcaagggggaattaatcctggagaatcaccagaacaagccatgtatcgtgagttgttcgaagaagttggattaagtcgtaaggatgttaaaatccttgcctccacgcgtaactggttacgttacaagttacctaagcgtttggtgcgttgggacacaaaacctgtttgtattggacaaaaacagcgttggttccttttgcagttaacaagtaacgacaaggacattaatgttcagcagagcaaaacgccagagtttgatggttggcgttgggttagctattggtatcctgttcgtcaagtcgtctcttttaagcgagatgtatatcgtcgcgtgatgaaagagttcgcaccagtagttatgccattacaagaacaagtgtctatgtctcgtccttcctatggatatcgccgtaaaaggtattag

SEQ ID NO: 296141 - DNA, 1014 bp, Proteus mirabilis
gtgttaataaattctcttcgttcaactctcttattcagtgcactaggtttgttcagtgcttttgccgcaaatgcacaacaaaccaaacccacacttaccgtctatacctatgactcttttaccgcggattgggggcctggtccggcaattaaaaaagcatttgaacaacaatgtgattgtgagctaaaactggttgccctttcggatggggtttctctccttaatcgtttacgtatggaagggagtaaaagtaaggcagatattattttagggctagataacaatcttattcatgcggcaaaacagaccggactttttgcaccaagcaatattgatacatcaaaactggcattacctgaaaaatggactgatgacacttttgtgccttatgactacggttatttcgcttttatttacgataaaaatcgtattactcatccccctaaaagcatggatgagttgttaaatagccaacagccgtggaaaatcctttatcaagatccacgtaccagtacccccggcttaggcttaatgttatggatgcaatcactgtatccaaacaataccgctgagcagtggcaaaaattggcgaataaaacactgacagtaaccaaaggctggagtgagtcctatggcttattcttgaaaggagaaggggattttgtgcttagttacacctcatctccgggctaccatattttggctgataaaaaagacaattatgcggcagctatttttgatgaaggacactatttacaggtagaagttgcagccaagctaaaatccagcaaacagccagaattagctcagcaatttatgcaatttatgctaacccccgctttccaagaaaccatcccaaccactaattggatgtatcctgttattgatatgccactacctgaggtctactccgttatgcctaaaccgcaaaagtcattacaatttgatgctgatgtggtagccaaagagcgccaaacatggactcgtaattggcaatctgcggttagccgctaa

SEQ ID NO: 296142 - DNA, 1581 bp, Proteus mirabilis
atgggtaaatggcttatcccggggctatgcgcctcgggattattacttaccgtcgcccttctctccttcggtgctttatggtttaacgcgccaagtggtgatttatcgactatttttgctgatagttacctatggcatgtggtgcgctttactttttggcaagcatttttatccgcgctattttccattttaccggcaatttggttagcaaaagcgctctatcgacgccagtttgttggcagaacgctctttttacgcttatgtgcaatgagtttagttctaccagtgttagtggcgctatttggcattttaactgtgtatggtcgcatggggtggctggctcaaatatgccaatggttagggattgattaccattttacgccttatggtttacaaggcattttactcgcacatatttttttcaatatgccactggctaccagaatgttgttacaagccttggaaagtatttctaccgagcaacgccaattagcatcacaattgggaatgaatggctggcaacgttttcgttttctcgagtggccctatttatggcgacaaatcctgcctactgcatcactgatttttatgctctgctttgcaagtttcgcgactgtattagcgctgggaggtgggcctgcggcaacaactgttgaattggcaatttatcaagcattaagttatgactacgatttacatcgtgcagcgctattagcattaattcagctattttgctgcttaggattagtacttgttagccaaaaattaaagggaacactctttgtcggtagtcatcaaaaactaagctggcgtgatcctagcgactcattaatcaataaaataacggatagtttaattatcgtacttgctatgctctttttacttcctccgttattagcggtgataagtgatggcttaaacagtcaattattaggtgttctacaacagccggtactttggcaagcctttacaacatcattaattattgcacttggcgctgggggactttgtgttattttaacgatgatgttgctctggagtagtcgagaattacgcttacgccattttaaaaaggccggacaagcgctggaaatgagtggactcattattctggctatgccgggcattgtattagcgacgggcttttttctattattaaacagcacaaccggattacctgaatccccctatcttttagtgatcctcactaatgcgcttatggctattccatatgctttaaaagtacttgaaaacccaatgaatgatattgcagcccgctataatctattatgtgcttcccttaatttgcgaggtattaatcgtctacgttggatagagctacgcgctttgaaaaagccactatcacaagcactggcttttgcttgtgtcatttccattggtgattttggtattgttgccttatttggaaatgaaacttttagaacattacctttttacctctatcagcaaatcggtgcttatcacacacaagatggcgctgtcaccgcgatgctccttttgctgttatgtttcacgctttttagccttatcgaacgcgtttcaggaaaatcctatgattaa

SEQ ID NO: 296143 - DNA, 702 bp, Proteus mirabilis
atgattaagttagagcagctttcttatacctatgagcaccaacatctgacctttaatttaacggtaaaagcgggggagcgtattgctattttaggtcccagtggtgcaggtaaaagctcattactcagcttaatagcgggttttctgccctcagagtcaggctcgttatttttaaaagggaaagatcataccaaaacagcccctgcccaacgccctatctcgatgttatttcaagataacaatctttttcctcatctcacggtaagacaaaatattggtttagggctagatccagggctaaagctcactgtggcacagaaagcactattagaaagtcgagccaaacaggtttctttaagtgattatctagagcgtttaccttcacagctatcaggaggtcaacgtcaacgagtggcaattgcccgttgtctggtacgtgaacagcctattttattgttagacgaacctttttccgcccttgatcccgcattacgtatcgaaatgctgacattattagaacaaatttgtgatgaaaaaaatctcactttactcatggtgtctcacagcttagaagatgctcataaaatcgcaccaagagcgcttgttattgataatggcaccattgtctatgatggaaatacagcgtcattaatcaaaggcgaagtggatcaatcactgctgttagggataccttttaattaa

SEQ ID NO: 296144 - DNA, 453 bp, Proteus mirabilis
atgaatacgataagtgagagacttagtgctgaagatattgcattagcaaaattaagtagccaagagctatccgctgttatggatattaatggcaaaacgcagaagctatccattatagataagacgggtaataatcatattgtacaaataccaaatagtgcattacgcctaatgattgaaattcttactcaactagggcaagggaatactgttagtatcacaccaatccatgctgagctaacgacacaggaagcggctgatatactcaatatgtcccgtcctacatttgtaaaattattagatacacgagcgataccctactctagaaaaggaaatcgtaggaaagttgcttatgctgatattgttgcttataaaaatgaattggagcaaaaacgacttgatgcccttgctgaattatcgcaattagatcaagaaatggatatggggtattaa

SEQ ID NO: 296145 - DNA, 570 bp, Proteus mirabilis
atgacaaactatactgttttgcttgatgcctgtgtcatgtatccagcccctcttagaagttatttaatgtatcttgctaatactggtttatttagagcacgttggagtaatcagatccatgatgaatggatcactaatttattagtcaacaatccaacattaacagctgagcgactaatacgaaccagagatttaatgaatgcacatgttcctgattgtttagtagaaggctacgaaccgcttatttgtggtttaaagctacctgatcctaatgatcgtcatgtgctagcagcagcaataaaagggcaggctcaagctataattacatttaacttaaaagattttccgcaaaaataccttaattcttttgatatttcagctatccatcctgatgaatttttgagtgacatgtttgaattaaatcctagtagctgtattaaagcggcgcaacaacatagacaaagcctaaaggatccaccaatgaccgtagagacctttttaggctgtttacaaaagcagaaattacctcagtttatttcccatttacgggcattccagatattattataa

SEQ ID NO: 296146 - DNA, 3042 bp, Proteus mirabilis
atgctaataaaaaattctttagcttatgcgattacactaagtttctgcttatccttacccgcacaagcattaccttctctttctcatgaaccttttggcgatctttatctttttgaagatgaaatgccaaataccttgagcacctcaaatgaccatcagctatcactaagtaaagagcatgctaaagatggcgtacagtcactcaaatggcagtatcaaccccaatcaacattaacacttaataatgaagttaattatcaagatgataaaaatacagcaacaccactcacttttatgatgtggatttacaatgaaaaaccacagtcaacgccccttacattacaatttaaacaaaataatcaagtagcattaagttttaaaacggaactgaatttcacaggttggcgaggtattgcagttccttttcgtgatatgaaaggctcagcaacaggcaaattagataaattagtcattactgcaccagatcaagcaggtacgcttttttttgatcaaataattatgagcgtacctttagataatcgttggcctattcctgactatcaaattccatatgttaataatgcagtaaatacaatggtgagtaaaaattggagtgcattattgatgtacgatcaaatgttcacagcgcattatcctacattaaattttgcgactgagtttcgtgatgatcagcctgaagtggcatctatttatcaacgttttgaatactatcaaggtgtcagtcgtgataaaaaaatcaccgctgaaatgatcgacaaaaatttagcattatggaaaaaattagccttagaacaacatgctgatggctcaataaccgcaaaagcccttgatcatcctaatcgccagaattttatcaaagtcgagggggtctttagtgaagaaacccaaaaagcattacttgatgccaacatgctaagagatgtaggcaaaacgcttcttcaaacagcgatttacttgcgtagtcactccttatcagcaatcgatagaaaaaaattagaaacgctctatttattaggcactcgttacgttcttgaacaaggtttcacacgggggagtggttaccaaattattactcacgtaggttatcaaacaagagagctttttgatgcatggtttattggtcgccatattctagcaaaacataatctgttagcaccgacacaacaagccatgatgtggtataacgcaacagggcgcatatttgaaaaagataatgaaatcgttgatgcaaatgtcgatattctcaatacccaattacagtggatgataaaaagtttattgatgttgccagattatcaacagcgccaacaagccttagcacaattgcaaagttggctaaacaaaaccattcttagttctaaaggtgtcgctggtggctttaaatctgatggctctatttttcaccattcacaacattatccagcttatgccaaagatgcatttggtggcttagcgcctagtgtttatgccttaactcattccccttttcgtctttcatcaccagcacatgcacgcttaaaagatgtattattaaaaatgcgtatctataccaaagaaacacaaattcctctggtattaagtggcagacatcctacggggttacataaaataagtattgatcccttcaaatggatggctcttgcaggtacgcccgatggtaaacaagagctagatactacattagcagccgcttatgcaaaattagcaaacaaagatagctttgaaggtattaaagcagaaaatgaaccggtaggtgcatgggcaatgaattatgcttcaatggcaatccagcgtagagcatcaataacagcgccacagcaaagctggcttgctatcgctcgtggttttagtcgttatttagtgggtaatgaaagttatgagaataacaaccgttatggtcgttacttgcaatatgggcaacttgaaattattcctgcggatttaactaaatctggttttagtcatgcaggttgggattggaatcgatatccaggaacgactacgatccaccttccttatgatgaactagaagcaaaactaagccaattgccaagtgcaggcatagaagaaatgttgctttcaacacaacgttattctggtgccaatacactaaataataacagtatgtttgccatgaaattacatggtcacagtaaatatcaacaacaaagtctaagagcgaataaatcctatttcttatttgataatagagtgatcgcattaggctctggtattgaaaataatgataaacaacatacaacagaaacgacactgttccagtttgctgttcctaagttacaatcaattataattaatggtaaaaaagtgaaccaactcggtactcaattaaccttaaataatgccgatacattaattgatccggcgggtaacttgtataaattagctaaagggcaaacggtagaatttagttatcaaaaacaatactctgttgatgacagaaattcacagcaaacagaacaattgtttgcaacagccgttatctctcacggtaaagcccctaaaaatgcaaattatgaatatgcaatagccatagaagcacaagataataaagcgcctgaatacaccgtattgcagcataataatcaacttcatgcagtaaaagataaaatcacgcaagaagagggatatgctttttttaatgccaccgaagtcaattcatctcaagctttattattatcaagtgattcccccactatggtaatggtaaaaaaacaaaaacaacaattaacgctaagtattgttaatcctgatttaaatttatatcagggtattgaagctgaccaaattgataataagggtaaccaggttgaagtgagtgtttattctcgccaatggcttacagccgatcctcaaccaataagtagtacagttactgtaaaagggatttggaaattagccacaccacaattaggtgttaatattagatatcaaaataataatacgctaattacaacaacgactatacaagcaataccaataacagtttatttaattaagtaa

SEQ ID NO: 296147 - DNA, 3066 bp, Proteus mirabilis
atgccgatatttcgttttactgcgcttgcaatgacattggggttattatcaaccccctatcatgttattgctgccaccagcaatcctgcatttgatcccaatcatcttatgcaatcagaaatctatcattttgcacaaagtgatccattagctgatttttcatcagataaaaattcaacactaactttatctgataaacgtagcattatgggaaaccaatcccttttatggcaatggaaaggtggcagtagttttactttacataaaaagcttatagttcccacagataaagaagcctctaaagcatggggacgcgcttctacacctgttttatcattttggctttacaacgaaaaacctattgatggttatctcactgttgatttaggggaaaagctcaatgccaccagcgaagcccaagctggctttaaagtaaaactaaatttcactggctggcgtgctattggtatctctttaaataacgatcttgaaaatcgtgagatgactttaaatgcaacaaatacatcatccgatggtactcaagatagtattggtcgctctttaggtgcgaatgttgacagcattcgttttaaagccccttctaatatcagtcagggtgaaatctatatcgaccgtattatgttttctattgatgacgcccgttaccaatggtctgattatcaaataaaaacacgattatcagagccggaaattgaatttcacaccgtacaacctcaattacctgtaacaccagaaaatttagctgcgatagatcttattcgccaacgtcttatcaatgaatttgttggtggtgaaaaagagacgaatcttgctttagaagagaatatcagcaagctaaaaacggattttgaagcactgaatattcgccctctttcggatggaggaatgcaaggtcgacatcttatcaccgataaacaaactatcatctatcagccagaacagcttaattctcaagacaagcaactttttgataattacgtcattcttggtaactacaccacattaatgtttaatattagccgtgcttatgtgctcgaaaaagatccaacacaaaaagaacagctaaaacagatgtacctcttgatgaccaagcatctattagatcaaggatttgtcaaaggtagtgccctagtaaccactcaccactggggatatagttcacgttggtggtatatctctacattattaatggctgatgcactaaaagaagctaatctacagacagaagtctatgattctctactttggtattcacgagaatttaaaagtagttttgatatgaaagttggcgcaaatagctctgatttagactattttaataccttatctcgtcaacatttagcgctattattacttgaacccgatgatcaaaaacgtattaacttagtcaattcttttagtcattatatcactggtgccttaactcaagtaccaccggggagtaaagacggtttgcgtcctgatggtacggcatggcgacatgaaggtaattatcccggctactctttcccagcatttaaaaatgcctcacagctgatttatttattacgagaaacaccttttgctgtaggtgaaagtggctggaataacctaaaaaaggcaatgatttcagcatggatctatagtaatcctgaagttggcttacctttagcgggaagacacccctttaactcaccttccctacaatctatagcacaaggttactattggctcgcgatgtctgcccaaccagcgccagataaacagttagcatctatttatttagcaattagtggtaaatcgcgaaatgaatctcccactatttttggtgaagagataacgccagcgtcccttcctcaagggttctatgcctttaacggtggtgcctttggtattcaccgttggcaagacaaaatggtgacattaaaagcctataataccaatgtatggtcatctgaaatttacaataaagataaccgttatggccgttatcaaagtcatggtgttgctcaaatcgttcgcaatggctctcaactttcacaaggctatcagcaagaaggctgggattggaatagaatgcctggcgccacaaccattcatcttccgcttaaagaacttgatagccctaacccacacaccttgatgcaacgaggtgagcgaggatttagcggcacatcagcccttgaaggaaaatatggcatgatggcgtttgatcttctttatcccgctaatcttgcgcgttttgatgctaactttaccgctaaaaaaaccgtcttagcggcggataaccatttaatttttgtcggtagcaatattaatagcagcgataaagatcaccctgtggaaacaacgttattccaacatgctattacgcctgagttaaacactatttggattaatggccaaaaaatagaaggttttccttatcaaactacgctaaaacaaggagattggataatcgatagtaatggtaacggttatttaattactcaagcagaaaaagtgaatgtcagccgccaacaccagacttcggctgaaaataaaaatcgtcaacccacgcaaggaaattttagctccgcatggatcgaccacggtattcaacccaaagatcatagttatgagtacatggttttcttagatgcaacaccggaaaaaatggcgcaattagccgagaaattccgtgctaacaatgggttataccaagttattcgtaaagataaagatgtacatattatttacgataaactcagtcaaataacaggttatgcattttatcaaccagcagtcattgacgataaatggatcaaaaaagtcgataagccgtccattgttatgacacatcaggaaggaaatatactgacggtgagtgctgtaacacctgatttaaatatgactcgccaaaaagcggcaacccccgtcaccattaatgtgacagtgaaagggaaatggcaacccacagctcaagacagtgaggtaaaatataacgtttctggggataataccgaacttattttcaccagttactttggcattccacaagaaattaaactctctcctctctcttga

SEQ ID NO: 296148 - DNA, 513 bp, Proteus mirabilis
atgccttatgccggttggtatagtgatacattattcttaaacggtaatttaaatattggttattacactgtcgatagtgagagggatatcggtggtaatacgggatggcaaggaaataccaaagcaaaaggtgactactctggtgtgcaattaggctatcagattaacgctggcacctatttggattttgattttatccatattaaaccgatgctaacttaccaatatcaatggctcaatattgattcttgggaagaaacaggctctacattatctatgcgtacttatggccaacgctacgcagttaatcaattaggtggctctgttgctttatggaatgactaccaaacctcttatggcaaattaaccccttctcttaaccttcgttatatcaaagatattgcaggtaataacgatattaatcaacgccacagccttacctattttaatactggaggaagcaccttcgatattaaaggaaataccgttggtggtgacatcattagtccttga

SEQ ID NO: 296149 - DNA, 507 bp, Proteus mirabilis
atgagtactgctaaattagtcaaatccacaccttcagccctgctttatacccgtaataatgttgatgacagtgttaaactgcatactatcgaactactgcagcaaatggtgactcagtttatcgatttgtctctcattaccaaacaagcacactggaatatgcgcggtagaaactttattgccgtacacgaaatggtagatggtttccgtgataccatcaatgaacatactgatgagtttgctgagcgtttagtacaattaggtggcacagtccttggtacacctcaaactgtcagtaaaaaaacacctttaaaagcctatccactcgatattcatgatgtgcaagatcaccttaaagcattggctgatcgctatgcggtagtcgctaatgatattcgtaaagcgattgatgaagttgaagatgaagatactgctgatatgtttaccgcagcatcccgtgatctagataaattcttatggtttattgaagcaaatattgaaaactaa

SEQ ID NO: 296150 - DNA, 2109 bp, Proteus mirabilis
atgtccctttctcaatctgtaaaaatgcaaatcagccaatggtataaagcattacctgagcatattgaaggctttattccacgagcgcctcagcgcgaaatgattgctgaagttgcgaagacattttctgatgaaacggggcgacatctaattattgaagcgcctaccggagtaggtaaaacactctcttatcttattcctggtattgctatcagtcgggaagagaaaaaaccactgattatcagtacggcgaatgtggcgctacaagatcaaatttacagcaaagatctgcctttactaaaaaaaattattccagacctgacttttactggggcttttgggcgaggtcgttatttatgtccccgtaatttagaggcaatttgtgcaacagaaggcgagcaaattgatttaatgttcttgctggaagataaagttgatgtcgcaaccagtgcggaaagggagatttgccaagagttaaagcacgattttaccagctttggttgggatggtttgcgtgatcaccataaacgagcattaacggatagtttatggcgcaagattagcacagataaaatgaattgcttaggtcgtaattgccaatactatcatcgctgtcctttttttctggcccgtcgagaaatagacgaagttgatgtggttatcaccaatcatgctcttgtgatggctgcgatggaaagtgaatcggtgttacctgatgcaaaaaatattttattagtattggatgaagggcatcatattcctgatgttgctagagatgcgcttgaagttgaaggggaaataaccttatcggcattaaatatgcaacttgataatatgactcgtcatgtcagccaatatttagcacaatttatcccagtcaaaccacccaaattagccgatcccattcgttttgatgctcatattgcaaaaatgcgcgaagcctatcaagacgttgaacattttacccgcgcgttattgcctgagcgcagtgaaaatgatgaatatttatttccattaggtcaattacctgaacaattactattatgttgccaagacttatttaagctaaccgatggtttaaaaatgttaggtgagtcgattcttaacgacttaactgagcgaacagcaaaagaagatgttgtacgtttacatcgcgcgattttaaccaccagcagaatggttggttatctggaaaatatggcaaaactatggcgacttgcgacattagagcagacatcaaaagcacccgtttcgaaatggcttactcgtcgttatgataaaaagcagtcacatctctatttacattgtgctggtattcgcgttagtgaacagttaacacaattattatggaaaaatattcctcatgtggtgatcacttctgccacactacgttcattaaacagtttttcgcgtattcaagagcttacaggactaagcgaacactttgatgatcgttttattaccttgtcatcgccttttacacatgaaaggcaagggaaactcgttatccctaaaatgcgttatgaaccgacaatggcgaatgaaaaagcgcatttaaaagagatggcacgctattttcgtcaaggaatggtagaaaaccaccatcgagggcaattagtattatttagtagtcaacgggcgatggaaggttttttagaggaagttaaagatctacgtttgagtcttttagtccaaggagatcaaccgcgctatcgtttagtggagacacattgtaagcgtattgatgcgggcgataatagtgtgttaattgggttacaatcttttgctgaaggattagatttaaaaggtgactatttaacgcaagtacatattcataaaattgcttttccacctgttactgatccggttattgtgacggaaggggaatggctaaaatcactgaaacgttatccttttgaagtgcaaagcttaccaagtgcatcatttaatttgatccagcaagttgggcgtcttattcgtagccatcattgccatggtgaagttgttatttatgatagacgtttattaacgaaaaactacggttcacggctattaaccgcgctacctgtctttcctatttatcagccagatatacctaaaacagaataa

SEQ ID NO: 296151 - DNA, 909 bp, Proteus mirabilis
atgacttctgcaaagcgccctatttttaatttagagttagacctactcagaacttttgttgctgttgccgatggttccacctttgccgcagccgctgaatcagtttgccgaacacaatctgcagtcagccaacaaatgcaacgccttgagtcattaataggtaaagagctttttgctcgacaagggagaaataaaacattaaccgaagcaggcactcaactgcttaattatgctcggcggattttgcgcattaatgatgaagcatgtttatctttattgcatgaagaaattgatggaatattaaagattggctctcccgatgatacagcaaacacaatcttacccgatctacttgctcgtttttcaggtgcttatcctcgtttaattatggagattattgttaaacgtagcccttttttaatgtcaatgttggaaaataatgaggtcgatttagccatttctacagaagagcatgtcggttaccctaaaattgtcttacgcgtatcgccttcgttatggtattgcggtaaacattttagatttgatcttgacgaaccgttacctttagtggttcttgatgaaccaagtacttaccgtgatatgatgataaatcaccttgatcaacaaaatattcgctggcgcattgcctatattgccaccaccttatctggtgccagagcggccgttcgtgctggtttaggtataatggcacgctctatcgagctttctggtgatgatttacgtattttgggtgaaaaagagggattaccgccattacctgctattcgttataacctttatcttaatgccaatagcccgagtaaagcagctcagatactatttgattcattaaaaaatgagcagaatgaagtcattaatcacgcagatattacccttcaaaaccactaa

SEQ ID NO: 296152 - DNA, 1380 bp, Proteus mirabilis
atgacattgagtcagcatgtagctaattttattactacaacgacattttcacagcttccaacgcaactgatagctcgagccaaattacatttattagatacattaggtgtagcacttgcagggagtacacaatctagctcgaaacaaggacgtcatgggattactcttttacccgatagccaaggtaagatccccatttggggaagtatgcagacagctaataccactgcagcagccttagccaatggtattgctgcacatgcattagatttcgatgatacacatactgattctattactcacggtagtgctgtattaacaccgatagcttttgcgttaggggaaacattaaacgcctcaaatgaagaaatattaacggcttgggttattggttgggaagttgctgcacgggttggtttagcgagtcacagtggtttccatcaacgtggatttcatgcaacggcgattgctgggatcttcggtgcaacagcatgtgcggcttcattattaaaacttacgtcacagcaggcggtaaatgcgttaggactaacggcaagtcaagcagcgggtatcgctgaatatctgactaatagctcatcggcaaaatgttttcatgccggatgggccgctcaatccggtattattgcagcctcgttagctaaagggggaatgactgggcctgagacaatatttgaagggcgatacagtatttatcatactcatgggatcagcgagcaagcgatccctgaacaagttgcacaaggattaggtgaacaatgggagtttttaaatgtttcaataaaaccttatccggtttgccattttgctcatgctactgttgattgtggacgtcgtttacttaaaagagggatcagtgcggaagaaattgaacaagtagaatgtgtgattgatccagttgctgctgcattaatttgtgagccactcgaaacaaaatgggcgccaaaaacagcttatggggcaaaatttagcttaccttggttatttgctattggttttttggataatgcgttaactttatcatcgctttcagcggaaaacttacagcgtaacgatatccaactattggcgaaaaaagtgagctatcgttatccatcagaaaatgaaattccctttccgagctattttcctggattaatctttgttagattgaaaaatgggcaacaattaactgaaaggatcgatattcagtatggtaaccctgaaaatccgatggttgatacggatgtaatagcgaagttttatgataatgccaagtgtgtaatgaaaaagacacaagctgatcaactgattgaaaatataatgaattttgaaaatatacctatttcattacttacacaattattacaggtagaggcataa

SEQ ID NO: 296153 - DNA, 1368 bp, Proteus mirabilis
atgggaactagtgtgtttgattctgttttattaaaaaacttatggtcaacagaagaaatgagaactattttttctgacaaaactagaatgcaaaattggcttgattatgaagcagcattagcaatagaacaagctgagcttggtttaattcctcaaaaggcggctgaggttattgtacagagtgcaaaacttgaaaaattagatatggattatgtattagaacaagttcgtcttactcgacatccattagtacctactattcgaggcttagaatatgcttgttctgaacattatggagaatatgttcattttgggccgacaacacaagatgttattgatacaggcttagtgctacaacttaaagctgctcatcaaacttttttacgtgatattaaaatattaggtcgttcattactttctttaagtgaaaaacaccgtaatacacctatggttggacgcactttagcgttacaagcgttaccaatcacatttgggcataaaacagcaatttggttgacagagttagcgcgtcattatcaacgacttaaagaggtggaacctcgtctatttgttggcagtgtagtcggtgctgtcgggactaaagcttctttaagcgataaagctgatgaattagaaaaacgcgtattaaaacgcttaggattaggtataccggaaatctcatggcaaccagcacgtgatagatttagtgaatatggtatgttaattggattaattagtggaacgttagggaaaatagctaacgagatcttaatattagcacacaatgaaattgatgagctttcagagccttttggtaaagggcaagttggctcttcaactatgccacataaacgcaatccagctattgttgaaaatgccgcctgtgtaagtaataccttaaaagctaatctttctgtattaacggatatgatgaaacatcaacatgaacgtgatggtgctatctggaagatggagtggaagattatgccagaaatgtgtctgatgttatctgttatcttggataatatgaaaacagtactaggtgggctaaatgttcatgttgaaaaaatgcgtcacaacatggatatcttaggtgggtttatgttagcagaacgtgtgatgtttgctctgtccgataaagcaggcaaacaaactgctcacgaaattgtgtatgaagcgtcaatgtctggacaagaagaggggattactttcgtagaagctattaatcgtgatactcgtattcgtgaccatatttcacaagaagagttaaatgctttgctagatccaactacctatgttggtaatgctcctgagcaagttgatcgtgtagtcgctcaaacaaaagcttccggctggttaaatgattaa

SEQ ID NO: 296154 - DNA, 471 bp, Proteus mirabilis
atgaaccaacatgatagcgatatattacagttaccttttgaaagcggttggcaagatctgacacaactattattttttcaaatagttagtgataacgatattacgcaggccgaaaataaattaagggatatcgggaaagatatcgctcaacgttacccattacctgatagcgaaaatatccagtcattagaatcacatatcaatcaagttttaacactgtttaagtggggctttgtgactatctctccagcaatgagtgagttgctattagtgcactgtgcatggccacatttttcagcaaatgaagaggaagctaattggcgtgcagcgagtgccagtgtattagaagggctatatgaaggctggcttactcatcaagggggaaatgataaaatgcatgtgcaccgtcaagctacagatgcaaaagatgcctttatttttcgttatgcgaatagttcatcagataaataa

SEQ ID NO: 296155 - DNA, 3465 bp, Proteus mirabilis
atggctttttttactgcgcaacaaggaaatgaaaaacaagccagctattggcgtgaaaaactggcacggattgcacctcaagatccgcgtattgcgggattaaaaaatattcgctcatctcaatttagtgaacagcaattgggttacgcgagagaattagcccaaaaagggcaacatgaagaggcaataaaagcctatcagcgcttatttgtcacacatgaaccacctgattcgctatcacttgaatattatcaaactatggctggaataccggcaatgttgccacaagcgattgctgggttaaaacaacgtgctcagcggatgccagataataaagaaacacaaaaagcattaggattaacattaacttataacgaagaaactcgccgtgaagggattgctattttaagtaagatttctggtgatgaaacggcgaaaaatggattaagacaagccttactatggcttaatgtacgtcctgatgatgaagggctgtatcaatcttatctacaaactaatcctcacgataaagctattgcacagcactaccaaggagcaatacaaggtaatgcccgacaagcaggttatgaagcgctaaacacaggcaacctaaagcaagcaacaacttactttaaacaagcattaacggtcgatagtcaagatgctcaagcgttagcaggattaggttatgtggctctacgttcaggtgatttggcaaccggacaaaagttattaaaccaagcctctcagtcagggggggaacaagggcaaaaatggaaacaacaagcagaggatgcgggtttttattctcaattacgagaagtgcaacgacaagctaagcaaggtaatactcagcaagcactggataaattattacctttaactcactcatcgggtgaaaaaggattatcagcacatttattgcaagcggatttattgcgcaaacaaggtaatttacctgctgcttatcagctattatctgaactatatcaacagtatagtcaaaatgaaaaagttatttccgcatattactacttgcttattcaacaaggaaaaaacagccaagctgagcaattagtagcaaaacaacccgcatctttacgacaaaaattaacggcaaatactgatccatcagaaagattacgtcgtgatgcgcaaaaggcgttagaaaatggtcatcgcactcaggcaagacaattattaactcaggcacaacgtaaaaacccgcaaaataattgggtataccttgatttagcccgtttaatgatagccgaaggtgataaaacgcaagcggatcagctcattttacaacttgaacgtcgtcaaacacgtgatgccaattatattgcggctctcttttatgttgaacaaaaacagtgggataaagtttttaccctactgaacagtcaacctcaacaaaatgaggcggaaaaagcgttattagagagagcgcgtttttatcgtcaactgacacaagctgagcgttactataaaacgggcaatcttgttgcgatgcgcaatacgctgcgtcctttaatcaaccaagtggctgattatccaaatgatgtaggggaattagctgaaaaactggtaaatagtggtgcacaagatgaagcgctgcaattgattgaaaatgatctggctaaagggactaaaggctccgtgggaaattatgcagggcatatcaatgtgtttaatgcgttaggacgttatgcacaagcctcgagcttgattaatgatcccgcattacagcaacaaacgccagcagccgagaaacaacgtttagctatactgacaaatgttgcgcaagcggatagtttacgggaaaaaggtgaaatcaaagccgcttatcaaactctcgtcacctcattaaaggtaagtcctgatgatccagacttattaatggctttaagtcgtgtgtatttagcgcaatctatgccagagcagtcaaataaaattctctcttaccttgaaaaacagcaagggagagatagcaaattacttcaagcacaaattgaagttgctctggcgcaaaaagacggtcgtaaagccaaaacactgttacaacaaataccgacatcttcacaacctgcttatctattacaagcagcacaagtagcgcaattaaacggtgaaaatcgtcaggcattggcgttattgcgtagcgcacaatggcaaacgacaaataacacaacaggtacggtgaataccgcagcagggcagttaatggcactagagagtgaaaatagtgtgatgactggctctataaatgaagataaacagatggttgctgttcaacgctccattcgtcaattagagcagcagatatctccttgggtacaaggtggtattgctattcgtcatcgtaatggtgataagggattatcaaatttgactgaaatatcggcaccgattgctatctcaagtgttcctggtgaagattggcgctggcaatttaatattaatcccgtttcaatcaccagcggtacggcttctggagagcgcgctaatcgctttggctcggggcaattgcagcatgctgaacgttttgcgaaaaacagtgataatcatgatgaaaagaacaaaataaacgcagatgatgcgggaagccagcgggcttcaggtgttgaattaggattgattttatctgatcacaatacacgttttgatgttggaacaacacctttgaataaagatagttccactattgttggtggactgacttactcaccaaaaattggccaaaatggacagttaacattaaccgcagagcgtagagcgattaaagatagcttactttcctatatgggacgtaccgatcctataacgggagaaacctggggacaggtcacgcgtaatggtgctaaagcgcaatatgcatgggatgatggcaaagtcggtgcttatattggtgggggatactataactaccaagggaaaagtgttgaaagtaatgaagaggtaaaagtttggcttggctcttatgcaaacttctacaaagatgagcaacaagaagtcaaagcaggtgttcatgtggactatatgaactttaaaaacaaccaaaattacttctcattagggcatggggggtacttcagcccacaagattatgtcgctgtctctttgcctgttgcttatacccgtcgttttgaaaaaggagaggtatcgctaaatggtgcgataggggtacagagttacaagcaaaaggggagtgattattttccaacccatgcttatatgcaaaatgcgttaaacaaacgtcatacgagtgactcacgtattaaatctcgttatgaagagcaagatgaaaccaatattacctatcgtttagggctcgatgctaaatattatttaaataaagagtcagaattagggctcagcttatctcatgatacatcgggtgattatgctgaagataatatgtggttatatctaaaatacaccccagactttttatctaaataa

SEQ ID NO: 296156 - DNA, 168 bp, Proteus mirabilis
atgaaaaaacagacacttaatatgattgttaaagtgatttatgccagttgcttattaggcgttacccattccacgcttgctaatgcaacagatgcgaatattgtcagctcgttaatagagcaagcaaattactggcatggaaaagcgcatgatgaacgaggtatttaa

SEQ ID NO: 296157 - DNA, 2241 bp, Proteus mirabilis
atggcgagtattcatttttgctatgcgacaacaggaatgctagagctagatggtgaagtattaccagagccaacatcttatactcatccgccactacaacccacagtaagtacgcaactatttgatgatgttgcactctccgaggcgcgtaatattgaagagcagttaacattagctcagatggggagtccatcaccaatagtattatccggtcgacgtttattatccggcgtgacatttcgtatggcaaatgatctgtttatcgatagtgcgacactcaccatgaaagtgaaagcttcatcgggattagtgccagccgatcaaacgttacatttgatgctaaatggtcaacctatgggatttttgcctttagaagaaggtgagcaagaacatgagtatatgttagagatccctgaaatgatgttgaccaatataaacaacttgagttttcgccttgccagtcgcgatgctttagatgaaaagcagtgtatgcctcctttagctgatgagctaagtttggtgatttcgcccgattcatcattaaattatcgaggtcgttggattaatggcgggtatagcttggaacgactgcccctaccgttctttgatcctgacagaatgacagcgacctcattacctattgttttagccgataaaccagataatgggcaggtaacagctgccgctattgctgcttcttggtttggtagttttagtcatgatattaaacaaatagatttacctgtattaatgaatcaactacctgatagcgatggtgttttaattggttatgccggacagactattgcaggtattaccttaccatcaggaaaaaatgggcagctcacgatagtcgataaccctgttgatcccgtatttaaattattactgattagcggtgatgatgaaaaaacattacgtcaagctgcatgggcattaaatagtggcaaattaccaccaaatgaccaattaacggttgctgctcaacatattccggtacgtcaggattatgatgccccacgttggttaaataccaatcattccgtaacattgggggagatagctcatggtcgtgatgattttactcgccaaggaataaatcatgctcctaatcaattttcgtttcgtgtctcacccgatctcttttggtgggatggagatgcgctacctttagatctgcaatatgtttttcctcattcagataaaataaatagccgtcgctcttcgctaattgcatctttaaaccatcaatttattggtgcgttatatccttctcgttcagagccattaggaatattaaggcagtggttagggatggagagtgcacagcaaagtagtacgctttatttagatccacgacaaatctacagtcaaaatcaattagagttctattttgatttacgtgaatatgatgatgcaccctgtattttaacggatggccaaggattgattagtcgtattgatccgcaatcaaccttacaatttaaaaatacgtggcactattccagaatgcctaatttagcctatttttcaggtgcatcgttcccatttagtcgccgggcagatttttctcaaaccacattattattgccagaaaaccccacaactgaagagctatatactttagttaatttaatggcgagatcgggctattcaaccggtacacctgtttcttatattattggagagttaggtagtaacggctttttgccaagtgctttttcacaaaaaaccttctcttttataaataaccaacttgagatccaatctccctcattgatagataaagctaaaagttggttagccggtgatccattatcaccaagtagtgatgcggcaaattatcttgctctgttaaatgattggcggggaatgatgagttttatctctccttgggctaaagatcgtgtggttgttttagtgactgcaaaaggtaatgactcaattaaaaacatcattggtgatttgaaccatgcaaatgtcaatgccgctattaaaggggatctgactttaattagtggtcaagatacggtgatgagcttccatttaggagaacatttttcacagggagacctgcctctattacagcaatttctttggtattgcaccagacatgtctatttgcttggcatgttggcagtcggtttttgtgcgctaacagggagcgtggtttattgctggttacaacgccgctcaacgcgtcgcctgagtgaaatatcaaagcgtcatgttgataaatag

SEQ ID NO: 296158 - DNA, 546 bp, Proteus mirabilis
atgtcaaaaagcgagaacaatcttatctggatagatctggaaatgactggccttgatcctgaacgcgatcgtattattgaaattgccactatcgtcaccgatccccaacttaatattttagctgaaggtcccgttattgccgtacatcaatcggataaattactcgcctcgatggatgaatggaatactacaacacatacggcaagtggtttagttcagcgggttaaagaaagtcagtatgacgatgtggctgcacaacaagccactatcgaattccttgaaaaatgggtgccacagggtgcatcaccgatctgtggtaatagtgtggggcaagatagacgttttctatttcgctatatgcctgaattagaaaaatattttcattatcgttatctcgatgtcagtacactaaaagagttagctcgtcgctggaaacctgaaatccttgaaggatttaagaaaaaaaatactcatcaagcgttggatgatattcgagaatctattgctgaattagcctattatcgccaaacctttattaaagagtag

SEQ ID NO: 296159 - DNA, 1059 bp, Proteus mirabilis
gtgacaaaacgtaaattatctaaaggccagcaacgccgagtacaagaaaatcataaaaagcgtttgcaaagcaaagagaaaaaaaatcacgttgaattagacgatacacaattaggcgaagcgaccgaaggcctcgttatcagtcgctttgggcaacatgcagatattgaagctgcagatggctctattacccgttgtaatattcgccgtactatttcatccctagtcacaggcgatagagtggtgtggcgccctgcattacaaacccaagaaaatgtgcgcgtcaatggcattgtagaagctgttcatgagcgtacttctgtactcactcgcccagattattatgatggtattaaacctattgccgctaatatcgatcaaattattattgtttcagccattttacctgagctttcacttaatattatcgaccgctacttagtggcttgtgaaaccttaaatatcgaaccccttattgtattgaataaagtcgatatgttagatgcagaaagccgagcgatggtaagtgagtggatgcaaatttataaagatattggttatcgagtgcttgaagtctcaagctataccaaagagggattagaagcattaactcaagcattaattggccgcatctctatttttgctggccagtcaggtgtgggtaaatcgagccttctcaatactctcttaccaccaatggaagaaagtattctggtcaatcaagtctctgacaactcagggcttggacaacataccaccaccgcatcgcgtctttaccattttcctctaggaggcgatgttattgattcaccgggggtacgtgaatttggtttgtggcatttaacacctgagcaagtgaccaaaggttttattgagtttcgacctttcttaggaggctgtaaattccgtgattgtaagcataatgacgatccgggttgcttgatcaccgaagccgtagataaaggtgaaatcgcaccaacccgatttgaaaactatcatcgtattttagaaagtatgagtcaggtgaaagtgcgtaaaaatattaatttagactcttaa

SEQ ID NO: 296160 - DNA, 912 bp, Proteus mirabilis
ttggacaagctaaaaattaaactacagtatctattgcctaaattatggctaacacagctagctggttggtttgccaataaaaaagcgggtagcgttactcaatttgctatcaaaatgtttgctcgcgcttataaagttgatatgaatgaagcgaaagagagccaatttcaggcttatgcaacatttaatgagttttttattcgtgcattaaaagatggcgctcgccctattgttgaaggagataaccaactggctctccccgcagatggcgctgtcagccagcttggtcagatccaagacgatcaaattttacaagccaaagggcactcttacacccttgaagcgttgctagcaggtaattttaccttggccgaccagttccgccatgggcaatttattacaacctatctttcaccacgggattaccaccgtgttcatatgccttgcgatgggttattaaaagagatgatttatgtccccggcgatctcttttctgttaatcctttaactgcggcaaatgttcctaacttatttgctcgtaatgaacgtattatttgcctttttgacacccaatttggtcccatgatacaaattcttgttggagcgaccattgtagggagtattgaaacggtctggtgtggcatggtaacaccaccacgtgaaggtattattaaacgttggacttatcctcaagcggataaagttggcgctatatttctgaaaaaaggtgaagagatgggacgctttaaattaggctcgaccgttattaacctcttccctgaaaatagtgttcaattaaataaagatctgatgaacggctctgtaacattaatgggagaacaactaggctctatcattaatgccacaggcactgatcataaggcctgcgataataataccattaatgaataa

SEQ ID NO: 296161 - DNA, 2301 bp, Proteus mirabilis
  misc_feature (2264)..(2273): n is a, c, g, or t
gtgcgcctgataatcagtctactttttagcttttttctgactatctcattcaatacttcggtgtttgctgcggatgttgataaattacgtcaagatatcaaacaacttgaaggcagtactaatcctcaagatattgaaactgttcaggcgctacaaggcaccatcaattggataaatgatggtgaaaaagctcaagttaatgcggataattatcaaaagactattgatgaatatccgcagatcactcaagagttaagggctaaattactcgaagagagtcactcagttccaacaattccagaaaaaattactattcctgagcttgagcaaaaaatcattcaagtgagtagccaactgatggaacaagctcggctacaacaacaagagcaagataaaagccgtgaaatcagcgaatcactcaatttactccctcagcaactttcagaagctcgtcgtttactaagtgatgcaacggcgcgtttagcggcaataggggcatcaaacaccccactagcagaagcacaaaataaattaacccaagctgaagtcacagcacgaaaagcgatggttaatgagctggaaatggcgcaactttctgctaataatcgtcaagaaattactcgactgcgcttggagctatttaaaaaacgttatcaacgacttgatgtacaactgcaacaattgcgtagtttactgaatattaagcgccaagaagtggcagatctcgctttagaaaagacagagatgctcgccgagcaagggggcgaactccccgagtttctgactaagcaaatcgagactaaccgtcaactttctcagatcctcaataaacagacgcaagaaatgagtgagttaaccgaaaaacagcgtctaacaacacaacaaacccaacaagtaagacagacactcacaaccattcgagagcaagcccaatggttaagtggctctacggcattaggtgaagcattaagaacacaattggctcgcttacctgaaatgccccgctctcaagagctggatagggatatcgttcagttacgtgttgaacgattaggctatgaagagatgctagaaaacctaggcaaaatccaacctcctgaaactgccgatggctcaaagctaccagaagctcagcaatatatttttgactccctcattcaagcgcgccaagagttactcaattctcttttatccggttatgactcccaaatcctagagttaaccaaactcaaagtagccacaacacaacttgcggatgccttaaaagagacaaaagatgccacaaaccgctatatgttctgggtggccgatatcagcccaataaaactcaattatccggttttattaattaaagatattactcgcctactctcattagatactttctcacaattagggcatgctgcggttaacatgctcaaaaaccaagatacctttatctatctactggtcaccctatctattgtcggttttagtcttcgtacccgtaagcattacaatgcgtttcttgaaagagtcagtaatcgcattggtaaagtcactcaagatcatttctcattaacggtgcgtaccgtattttggtcaatattaatcgccttaccactaccgctattatggtctgccgtaggatatggtttacaaagtgtcgaatggcgttatcccatggcgggagcgattggttatggtgtaactgccgcagcccctgtgctatggctatttatgataagtgctacctttgctcgccctaatgggttatttatcgcgcaatttaaatggaaagagagtcgtgtgaaaaaagcgatgcgcttttatcaactgtcgattttcgtcattgtgccgttaatgatgtcgcttatcacctttgaatactatagtgacagagaatttgcgccaacggttgggcgtttttgctttttattattgtgcattgctttaagttttattacctcaagcctaaaaaaggcacatgtgccgctttacttagataaacatggctctggtgataatgtgataaataccattttatggtggttcttacttgttgcccctgttcttgcagccctcgcggctatcttaggctatctctcaacctccatcgtattactgggtcgcttagagatgtctgtggcgatttggtttgccttgctgattatttatcatattattcaacgatggatgctgatccaacgtcgtaagcttgcctttgaacgagccaaacaaaaacgggcagaaattttagctcaacgagccaaaggggaagatgnnnnnnnnnnagcagtggtgagagtaccgctaacttag

SEQ ID NO: 296162 - DNA, 1026 bp, Proteus mirabilis
ttggaagatcaagccattgaccttgatgcgattagtgcacaatctattggtctagttcgttctattctgaccatgattgcacttgtgtccatgattttactctggtcagagctcaatacagccttctcttttgtcgataatatccgactatgggatgtgacttcctccgttaatggcgtcaatactatccagcccattaccatggggtctatcttagtcgctatattagtgattattatcacggcacaattggtaagaaacctgccagcactgcttgaactggcaattttacaacacttagatctaacacctggtacaggttatgccattaccactttaacgaaatacagcatcaccctaataggcagtattgttggtttctcattattaggtattgagtggtcaaaactacaatggttaattgccgctatgggggtaggtcttggttttggcttacaagaaatttttgccaacattatctcagggttaatgatcttgtttgaaaagccaatccgtattggtgataccgttactatccgtaacttgactgggaatatttctaaaatcaatacgcgagccaccacgctcaccgattgggatagaaaagagatcattgtgcctaataaagcatttattacagagcaatttattaactggtcattatcagactctattacacgtatcgtaatgaccatccctgcgccagctgattgcaatagtgaacaagtgactaatgtattattagaagcctctaaacgctctaccatgattttagacaaccccgctcctgaggtttacttggttgacctacaacaagggatccaaatcttcgagttacgtgtttatgccgcagaaatgggacatagaatgccagccagacatgagatccatcaaaatattctgctagcctttgcagagcatggcattccattaccattcccgccgttccaagcacgggtagatatggtgggtaataccattagtacttcaatgcatgcaacaccaagagaagtaggcggattgtag

SEQ ID NO: 296163 - DNA, 576 bp, Proteus mirabilis
atgttatcaactaaaaatgataatggttatcatcgttctcattggaaaggcgattcaattaccgcactctctctagcaaaagatagtaacggtactagcggatgggtatttattggtgatcattttgattatttattaataagaggtggagataacgcagtaaatattttaagagatcctcttatccaccatgataaattgagcgtagaaaatccagttgaatttattattgataatcaaaagaagcaatttaatgggaaaattaaaataaattataactgggtaactcaaaccgataaagaagcagcactaacttacggttttatatgtaaaaaagatataaacacctgttcactaaaaatagataatttacttggaacagttcatcaaaaaaataaagaacaaaaaaatgagtatttactaccttttaaccatccctttaatgttgaattctaccaatacaaagaaaatcttattggtgccagcacaccaagaatattattacccgttactttggcgctagatatagtcacatctcctttacaattgctgatgatcccaatactaagcaagtag

SEQ ID NO: 296164 - DNA, 438 bp, Proteus mirabilis
atgtataagacaattctagtgcccgtggatatttcagaagatgaattaaccgaaaaggctttacaacacgctgtttatattgcaaagcttgaaggggctaagatccatttgtttcatgctattcctgatgtttcacgtttttcaattagttatagctaccattatgatatgttaagctcttttgctaataaagcgattgaacgagttcaagaacaactgcaagaattagctaattctgtagatttacctaaagagcaagttgatttctctgccgcatttggctcagcaagagataaagtgttagagctggcagaaaaaattaaagcggatttaattgtcgttggctctcgtcgtcctagcatttcaactcatttattaggctctaatgcatcaggaattgtggcttacgccaaacaatctgtgttagttgtgcgttaa

SEQ ID NO: 296165 - DNA, 339 bp, Proteus mirabilis
atggaaaaatttacacaagaacttttaaggctcgaccattttattctacgtattctacgctactatataataggtactgtattcttttttttaggattattaccgggcgtgctagggttctattttattgaaggacatacttttatggagtcctcattaaacgcaatatcaatgttaagtggtcaaccggtagagcctgcgcctgcaacaccaacagggcgtttttttattgcgatttatggtttgtttcttcagtgtgtttttattttatcgattggattagtagtgacaccctttattcatcgacaattacataaatggcatcttgaagaggattag

SEQ ID NO: 296166 - DNA, 429 bp, Proteus mirabilis
atgtataaaacaattttagtgcctatcgatattgtagaagaagagttaaccagtaaagcagtacgccatgctgtttatttagccaaagaaacaggagctaatttacatcttatccatgtgcttcctatctcttcagccattattaatgcttattcactgggttatcccgaaattaaagacaaagcgacagtaaaagccgaaaatgatatgcaaatgttggtggattcggtggatctgcctgctgaaaaagtggcttacactgtcacttttggctctccccgtgatgaaattttaacgacagcaaaagatattcaagcagatttaattgttatcggctctcgcagacccaacattagcacacatttattaggctctacggccgcaggcgttgttcgttatgcagatatttctgtgttagtggttcgttaa

SEQ ID NO: 296167 - DNA, 891 bp, Proteus mirabilis
atgaacagagagcaactattacaagcaatatctcactatcctgcactcgctcagcgaaatatgggaaatacacataaaggcacttttggtacattagccattatcggcagctcagaaggcatgagtggtgcgattgttttggcgggaaaaagtgcgcttaaagcagggtgtggtaaagtctttttgggctttgcacaaccacaattgccactgccttttattgatagtgcacccgaactgatgctacaaacagccataacattattagagcaaccacaaatatcagcatgggcgattggctgcggtttagggctctcctctgattcggaacaattgctgactacagtactagcacaacgtaacgagaaaataccttatgtttttgatgccgatgcgctggtgttattggctcaattaaacttatcgcatattaacactaagttaaccgctaattgtgtattaacaccccatccgaaagaggccgcaactttacttcattgtgatgttgctgatattcaaaataaccgtcaacaagctgcaatagaaattacacgccaatatcattgctgggccatagtgaaaggacaaggaacggtgattgcttcacctcaaggagatatcacagtaaatacaacagggaacagtggattatcgacagcagggagcggtgatgtattaaccggtgtcatggcaagttttttagcacaaggtatgccaatcgcagaggctgtgccgagtgccgtatggatacatggtattgccgcagaccaattaataaaacaaggaatagggccaataggattaaccgcatcagagcttattgataccatccgtgcggttcgcaaccaaatgtgggcaacccaccaacagcacagcactgatttattttaa

SEQ ID NO: 296168 - DNA, 222 bp, Proteus mirabilis
atgaatgagaagtttaaaacacaagcagatgttgaaacattagcgcaagaagttgcatgcctaaaaacgcttgtgacttatatgttaaaagcattaggtcaagcagatgctggacgcgttatcttaaatattgagcgagctatttccgaagttgctgatgaacaacaagcagaaaccttccgcaacacattaaaccaaattaaaacagcttatcgtcaataa

SEQ ID NO: 296169 - DNA, 363 bp, Proteus mirabilis
atgaaaccacttctgttatccctgcttttacttcctgctgttgcatttgctaacccaagtaaaatggctgaagattattgcaatacattcaaagatatctcagtaaaagcttatgatactaatgaagcgcctgagaaaatcgccaaagacgcattagcaacattgaaatctcaaaactttgattttgcaaaactagatgcaacggaagctgatttttctaatggcaccgttgaagttgttaaatctttacgtgatgcaaaagcagaaattggttcacgtgaagagttccaagaaggcttaacgcaaattgttgcggcatgtaaaattcaaatggattctgttttacaagagcagaaaaaataa

SEQ ID NO: 296170 - DNA, 978 bp, Proteus mirabilis
gtgagcaacgaacaatccatccagcgattaagaagactacgccagtcagagaacctgcgcgcgctgtttcaagaaacgacactcagcaaaaatgatctagcactacctattttcgttgaagaaggcttagaggattatcagccgatcaaaagtatgccaggtgtggtacgtattcctgaaaaacgccttgcttatgaaattgagcgtatcgctaaagcgggtatcaaaacggtcatgacctttggtgtctcacaccatcttgatgaaacaggtagcgatgcttggaaaagcgacggtctagtttctcgcatgtctcgtatttgtaaagatgctgtaccagaaatgattgttatgtcagatacttgtttctgtgaatatacttcacacggacactgtggcgttttacatggtgaacatgtcgataatgatgaaactatccataatttaggtctacaggcggttgccgccgcacaagctggtgctgattttattgctccctctgccgcaatggatggtcaagttgccgctattcgtgctgccttagataaagcaggatttaccgataccggtattgtttcctactcaactaaatttgcttctgcattatatggtccattccgtgatgctgctggctctcgcttaattggtgatcgtaaaacatatcaaatgaatccgatgaatcgtcgggaagctatccgcgaatcattgattgatgagcaagaaggtgcggatatgttaatggttaagcctgctggtgcttatttagatattattcgtgatgttcgtgaacgtacactattaccgttagcagcctaccaaattagtggggagtatgcgcaaatcaaatttgctgcattagcgggtgctattgatgaagatcgcgtggtaatggaaacactaggctccattaaacgcgcaggtgctgatttaattctctcttactttgcgcttgatttagcagaaagaaatctactttaa

SEQ ID NO: 296171 - DNA, 465 bp, Proteus mirabilis
atggataactgtattttctgtcaaattgtagcgggaaaagcaccttgccataaaatttgggaggatgaacatcatcttgcgtttctttcaatcttccctaataccaagggttttacggttgttattccgaaaaaacactatccaagttatgcttttgatttaagcgatgaagccttagcgttattgatcatcgccactaaaaaagtggcaaaaatcctagataaaacattcccagatgtgtcacgcacggggatgttttttgaaggttttggcgttgatcatgttcatagcaaactcagcccaatgcacggtacgggtgatatgacaaaatgggcgcccattgaaaacagacaaaaaattttctttgataactaccctggctatctttcatctcatgattttgagcgcgcaaatgatgaggaattagcgcaattagctgcgcttattcgccaaaatagtcagtaa

SEQ ID NO: 296172 - DNA, 462 bp, Proteus mirabilis
  misc_feature (262)..(271): n is a, c, g, or t
atgttaaaaattagaatatcacgcccctcagaagcaccaaaaatcatacaaatctggaaaaattcagtcgatgctacacatgactttctgacagctgacgatcgccaagagattgaaaaagaagttatcggttttttttccgaaacaccggtatgggttgctactaatcaagaagactgcccactcggctttatgtttttacatgacggtcatctagaggcgctttttatcgatgcatcagcacgagggttagggataggannnnnnnnnngaaaacagttaatatcacacgcattaactcttcatcctaatttaagcgttgatgtcaatgaacaaaatcagcaagccgtcggtttttatcagcatatgggctttcaaatatctggacgttcggagttggataatcaaggaagagcgtacccattattgcatctaagtagagctaagacgatcaccctttag

SEQ ID NO: 296173 - DNA, 165 bp, Proteus mirabilis
atgaaaaagaacgaattagttcaagcaacaagaccaactcgtactcaacttattcgttcggtagcaacctctacggcgattgaaacagggcaggagtcccgtcgccttgaagaagaaatgaaagtgaagcgtgagaagtttgggcatttgaaacttgctacttag

SEQ ID NO: 296174 - DNA, 783 bp, Proteus mirabilis
atgaagaaagttttaaaatgggtgttgattattcttgttgtgctaatcattattggcatatttgccggcaaggataaagatggttctgataaaaaaccagaagcagtaaaatcttctgaacaaaaaatagcaatgacagacaaagaatacaagatggctgagttaatcattaacaatgatgtgatgaattcactgaatggtaatgattcacaaataactacagattatattcgtgttacagctagagagatgcaacagacttatgctagcaatgaggcaagaggagataaaacctataaaggtaagaacattattattacaggcattattaaatccatagactcaagtattggcgatatacctgttgttagcttaaacacaggagaaatgttctctactgtaagacttcatctagcaaaaccatacagagatatggctgctgatttagataagaatcaaaaaataacacttgcctgtgttggtgacagcgtaattataggctctccagggctaaaagattgcaaaccggtacctgctgtcgcatcaaaaataacaaacgagcaaatgaagtttgttaataaatttattaagggaaacaatgaagtacctaatgaaataaagcaaatagtattacttgctaaagtattaggtaaagaaacaggtgatttctctcaatgccaagatattaactctcaatgcatgaatgactcagtaaaagtattaaagagtattagcaaagaaaaactacaagaagaagctaagttacttggcgttgaaatgtag

SEQ ID NO: 296175 - DNA, 2565 bp, Proteus mirabilis
atgactgacagccaaaatttcgaatcccacacccccatgatgcagcagtatcttaagcttaaggcagagcacccagaaatcttactgttttatcgtatgggtgacttttatgaactgttttttgatgatgctaaaaaagcctcacgcttattagatatttcattaacaaaacgaggtcagtcggcaggtcaacctattcctatggctggcgttcctcatcatgcagttgaaaattatctggctaaattagtgcaattgggggaatccgttgccatctgtgaacaaattggtgatccggccaccagcaaaggccctgttgagcgtaaagtgatccgtattgtcacaccgggcaccgttacggacgaagcgctacttgaagagcgccaagacaatctattagccgctatctggcaagataaaaatggcgcttttggttatgccactttagatatcacctctggacgttttcgggtcactgaaatgccggatagcgaaagtatggcagctgaactgcaacgcactcacccagcagaactactctatccagaaacctttgagtcaatggcattaattgagcgtcagcaaggtttacgccgacgtccaatttgggagtttgagtgtgaaaccgccaaacaacaacttaatttacagtttggaacccgtgatttaactggatttggtgttgaaaatgcccgacttgcactttgtgccgcaggttgcttattacaatatgttaaagatacgcaacgcactgcgttgcctcatattcgtagcattaccatggagcgtccgcaagataccattatcttagatgcagccactcgccgtaatttagaattaacccaaaatcttgctggcggttgtgataacaccttggcatctgtacttgatctgtgcgtgaccccaatgggaagccgtatgctcaaacgttggatacacacccctttacgccagcgtgaacaattaattaaacgccaagatgccattagcgccttacaacccctctattttgagttacagccttttttacgtcaggtgggggatttagagcgggtacttgctcgtttagcattgcgatccgctcgtcctcgtgacttatcacgtatgcgccatgcctttcaacaatatcaagatatccaccaagtgcttgatcaggcggatatgccctatattaaagaattacagcagcgtatcagccagtttgatgagttgcgtgaattactggaaaatgccattgttgaaacaccacccgtattagtacgcgatgggggtgtgatagcccctggttataatgcagaattagatgaatggcgagcactggctgacggtgcgagtgactatcttgaaaagcttgaagttcgtgaacgtgaaaaatggggtattgataccttaaaggttggctttaatggggttcatggttactacatacaagtcagtcgtggccaaagcaatttagttccaatgcactatgtgcgtcgtcaaacactgaaaaatgctgaacgctatattattcctgaactaaaagagtatgaagacaaggtattaacctctaaaggtaaagcattagcaattgaaaaaatgctctacgaagagcttttcgaaaaactattacctcatctaaccgccttacaaaccagtgctgaagcgttagctgaaaccgatgttctggctaatctcgctgagcgtgcagaatcactcaattatacacgccctgaattaacagaaaaaacaggtattcaaatcactggtggacgtcaccctgttgtagaacaagtactgagtgagccatttatctcaaaccctctacaactcgcgcctcaacgtcgtctactcattattaccggccctaatatgggcggtaaaagtacctatatgcgtcaagcggcattaattacgctactggcttatattggtagttttgtgcccgcagaaaaagcggtaataggcccaattgatcgtatttttacccgcgtgggtgcctctgacgatctggcttcaggtcgttcaacatttatggtggaaatgacagaaaccgcaaatattcttcataatgccactgaaaacagtttagtgttaatggatgaaattggccgaggcacttctacttatgatgggctttctctcgcttgggcttgtgccgaaaatttagcgaatcgcattaaagcaatgacactctttgccacacactattttgaattaacaacactgccagaaaaactagaaggcactgccaatattcacttagatgcggtagagcatggtgagactattgcctttatgcacagtgttcaagaaggtgctgccagtaaaagttatggtttagcggttgcggcattagccggtgtgccaaaagaggtgatccgccgtgcaaagcagaaattaaaagagctggaaaccctatcaggtcattcaggggcaagccatgtagaaacgtcacaactgatgttattagcagatattgagccttctgaagttgaattagcattaaataaaattgatccggattcattaacaccaaaacaagcgttggaattgctctatcacttaaaagagctaaataaataa

SEQ ID NO: 296176 - DNA, 990 bp, Proteus mirabilis
atgagccaaagtacgctaagagtagacgagttatatactgatgatattgatgagaacatggaagagttcgatgaagcagccgcaacaaaagaggctgaaaatgaatctgacgctcaagatgaaattgaactcattgaaggagtcaatcagcgtgcgttagatgcaactcagctctatttaggagaaattggctattctccattgttgagtgctgaagaagaagtattctttgctcgtagagcgttacgaggtgatatcccgtcaagacaacggatgatagagagtaatctacgtttagttgttaaaatatctcgccgttatacgaaccgagggttagctcttcttgacttaattgaagaaggtaatttaggccttattcgtgctgttgaaaagtttgatcctgaaaaaggatttcgtttttcaacctatgccacatggtggatacgtcaaactattgaacgtgccattatgaaccaaacccgcactattcgtctccccattcatatcgttaaagaactcaatgtctatttaagaaccgcaagagaattagcacataagctcgatcatgagccaagtgttgaagaaattgcgcaaacgctggataaacctgtcgatgatgtcagcaaaatgctacgtttaaatgaacgtatttcttctgttgatacaccgattggtggggattcagataaagccttactagatattatttcagacgaaaatgaagaagggccagaagcaaccattcaaaataataacctcaaggaaaatatcgtaaaatggttatttgaattaaatccaaaacagcgtgaagtattagcgcgtcgctttggattactgggttacgaggctgaaacattagaagatgttggtcgagaaattggtttgacaagagagcgggttcgtcagatccaagttgagggattgcgtcgtttaaaagatattctgcaagggcaaggattatgcatagaggcactttttaagatgaactag

SEQ ID NO: 296177 - DNA, 606 bp, Proteus mirabilis
atgaatgtaattgatgcagtaaaaaaccgtcgtgcaacaaaacagtttgatgctgatttcaaaataccacaagaagagaaaaaagccttacttgaagatgcgttacaatatacgccaagtgcatttaatctgcagcattggcgtcttttggttgttgatgatgttaagcaacgtcaagcattaagaaaagtgggttgggatcagcctcaaataacagactctgctatgctgattgttttatgtgcagatctcaatgtttgggagagtgaagttaaaacaatttggcaagatgctaccccggaagtcagagatattatgtgcagtgctgttgatagttattatcgtaataaaccacaagtacaacgggatgagattatgcgtagtgcgggtttgtttgctcaaacactgatgttattagcacaagagcgcggttttgattcttgtcctatggatgggtttgattttgcagaggtagcaaaaacaattaacttgcctgatcactatgctatctgtttaatgattgccattggtaaaggtaaaggaaaaccttttccacgattaggtaaattatcttttgataaagcggtgacatttgatcatttttaa

SEQ ID NO: 296178 - DNA, 981 bp, Proteus mirabilis
atgaaattaaatgatgaattaactaattctatcgcatcagtcacagaagctgctgctattgcggctatgccatgggtaggtaaacaagataaaaatgcggcagatgctgccgcagttgccgccatgcgagagcgccttaatagccttaatatcaatggccaaattgttattggtgaaggtgaaattgatgaagcacctatgctctatattggcgaaccagtaggcaacggccaaggtgaaaaaatagaaattgccgttgatcctatcgatggaactcgcatggtcgctaccggtgaaaataattctttggctattttagctgcaggttttgaaggtagttttttacaagcacccgatatgtacatggaaaaactggttgtcggtaaaaaagcagcaggtgtgatcgaccttaaccattgccttgaatataaccttgatgctattgcacaaacattaaataaatcattaagccagttaacactagctattttagataaaccgcgccatcacgatattatcattgatttgcgtaatagaggtattaatgtcatcactttgccggatggcgatgtacttgcttctttatatgccacaatgcctaataatcctattgatgttatgtacgggattggtggcgcgccagaaggtgtaattagtgccgctattgctaaagctttaggtggtgatatgcaagcgcgccttattacccgcgatattgctaaaggtaataatgcaacaaacagagaaattgcagcacaagaaatctctcgatgccataacatgggaactgatgttaatattacattgccacttgaaatattggtgcgccatcaggatgttatgtttgcagcaaccgcaattactgccggtgacctattatccggtgtcactgaacaaagcgattatttgcgtacacactcgttagtgattaatggctccacacactcattacgttatatcgaaaattatcatttacgctaa

SEQ ID NO: 296179 - DNA, 1032 bp, Proteus mirabilis
atgaaaggttatattcaaacggtaacgggtccggttaaaaaagcggatatggggctgacactacctcacgaacatttatttaatgatttatctggcgttgttgatgaacctttttatgaattctcacacgttttagtagataaaaaagtcagtgcagatattcagtggggactaaaatacgatccatattgttgttgcgataatatggataaaaaacccattgaagacgttatttttgaattaaataattttaaagagcttgggggtaagacgattgttgatgctacaggttcatcgtcaattggccgtgatattagaaaattaaaacaggttgcagaattaacggggattaatgttgttgcttcttccggcctttatattgagaaatttgaaggaaaacgcctagctgatgatattgatgcgatggcaaaaatgatcgatgatgaattaaatatcggcattgacggcacagatattcgtgctggtatgattggcgaaattggtgtatctcctttctttacagatggtgaaaaaaatagtttacgtgccgctgcactggctcaaaataataacccttatgcctcaatgaatattcatatgccaggttggcaacgccgtggtgatgaagtattagatattcttttaacagaaatggggtgtgatccagccaaaatatcgttagcccattcagatccttctggtaaagatatcgattatcaatgcaaaatgcttgatcgaggtgtttggcttgaatttgacatgataggtcttgatatttctttccctaaagaaggcgcggcacccagtgtgatggatacggttgaagctgtcgcaaccttaatagaaagaggttatggtaaccaaattgtattaagtcatgatgtgtttttaaaacagatgtgggcaaaaaatggcggaaatggttggggttttgtgcctaacgtttttctttcattattagcacagcgtggcattgataaggcgataatagataagctgtgtattgataatccagctaatttattagcatga

SEQ ID NO: 296180 - DNA, 966 bp, Proteus mirabilis
atgagtacaaaaaatttatcaacacccttgctgatggtagcaactgtgttagcagggatgctatcaccaatgcagtctgcggtgaatgggcaactgggacatgtattaaaagacggtaatgctagtgcagttatctcttttgccagtggtttagtggtcatgttttttatcattatgtccaaaaaacaatatcgtcagcaatttgcttctattccgacattaattaagacacgtaaaattccattatggaactggtttgctggcctctgtggcgcaatggtggttttttctgaaggagcatcagccagtgcattaggaatagccacattccaaacagcattaatttcagcactgttattatcaggtttattatgtgaccgctttggtataggtgtggatgagaagaaatacttcaccccatatcgtgtattaggtgccgtattagctgttgttgctactctttttgtcgtttctccacagtggcattcaacctcttttatttacttagctattctaccttttttagcgggtttattagcgggatggcaaccagcaggtaattcaaaagtggctgaagcaacaggttcgatgatggtttctattacttggaactttattgttggatttactgttttaacgattgcgttagtagtacgtatggcgttagggcatataacactggagcttcctgctacatggtggatgtatttaggtgggcctttagggttaatgtctattgcattaatggctattttagtacgaggcttagggttactgatgttaggtgttgcatcaactgcgggccaattactgggttcggtattaattgacctattattaccttcgttgggaaatactgtttatttagtcacaatcatcggtacgttatttgccttagtcggagccattgttactaccattcctgagtttaaagcgactaaatcagtaaaaagagcaggggcataa

SEQ ID NO: 296181 - DNA, 738 bp, Proteus mirabilis
atgaaaatcttatttattggtgagtcatggcacattcatatgatccactcaaaaggctacgacagtttcacttctagtaaatatgaggaaggtgccacttttttattaaattgtttaagggaaaaaggggtagcagttgattatatgcctgcacataccgttcaggtcgcatttcctcagactgatgaagaattagcaaaatatgatgtcatcgtgatcagtgatattggtgctaatactttcctcttgcaaaacgatactttctacaacatgaaagtacttccaaatgcattagggctaattaaacagtttgttgctaatggtggtggcttattaatgattggcggctatctatcatttatgggtattgaagcgaaagcaaactataaaaataccttattggcacaagtgttacctgttgaaatgttagagggcgacgatcgtgtggaagccccagaaggagtattcgcaactccagttaatgcggagcatgccacgataaaaggttttagtgaatggcctatgttccttggttataacaaagtgttcgctaaacataacactgaaacggttttgaatattggcgaagatccactactggtgtttggtcaatttgaaaaaggaaaaacagcttgttttatgagtgactgttcaccgcattgggggagcaaagagtttttagcatggccacattatgctgatatgtgggtcaatattctaaagcaaatcgcacgttag

SEQ ID NO: 296182 - DNA, 1221 bp, Proteus mirabilis
atgaaagcagagcgtcataaaaaaattgttaatctgatcaaaggtcatggtgcagtaaaagtttctgttttagcaaaagagcttagtgttaccaaagaaacgatacgatcagatttaaatacattggctgagaaaggaataattaaaagatgccatggtggggcctttattgaatttgaaacattagacaaagttgccaaaaaagaaatcatacaatttttagaatgtaatgatcaaattgataaaattaatttagcggggcagccggcagtaaataaagtatgtgtattaggttcatttaatgttgatatgattagttatttgcccagactgccagaaaccggggaatctttattggcgaataaatttatcttctcaccaggaggtaaaggatgtaatcaagcattagcggcaagttatgctgatgcacaggtgcattttatcaccaaaatcggtactgatcagtttagtgattatgcagtaaattttatatcgtcatcaagaataaaaacatcaacgatatatcaaactgaaaatcatcaaactggaacagcatcaatctttgtgtcagaagagagtggtgaaaatattatttctatttattcaggggctaatatggatatttcttctgatgaggtaaaaatacaaaaagataaaattatagatgccgatataattttattgcaattagaaactaatattgaagcattaaaggaaattatttcaatcgggaatgaaaataatattcccattattttaaatcctgcaccttacaataaagttattgataagctattgccaatgttagatatattaacacctaatgaaacagaagccagcttattatcaggtattgaagttgttgatttagtatctgctaaaaatgcagccaatgctatttatcaaaaaggtgttaataaagttgtcattactttaggtagtaaaggttcattagcttatgacggttataaatatatttactcaccagcttatcctgcggtggtaaaaaatacagcgggcgctggtgatgcttttaatggtgcactagcagcctcattagcaaaaggaaagcagttttcttacgcgttacgctatgcatcagcttttgcatcactagctgttgagacgagtaatgcttcagaaatgcctgaagatattaatgtcatgcatcgcatcaatcaaacaacatattcacagattgtcactcaatcccctgaataa

SEQ ID NO: 296183 - DNA, 615 bp, Proteus mirabilis
atgagaaataaaccgtttatgagaatgcttaagctcataccggcgtttattgtcgtagctacgttatcagcctgtagttcacaaaacgcgtcttcacgcttagctaattcaacaactgccccacttaataaatcttcaagcacatctatttcccaagcatctcaagatgaatttgaatcattggtgaagaatctcgatataaaatctaagatacttgaccaatatgcagactggaaaggtgttgcataccgcttaggtggcaatacaaaaagtggtattgattgttccgcttttgtccaaagaacttttcgtgatcaatttggtgtcgaattacctcgttcaacctccgatcagcaatttgccggtaccaaagttaatcgttcaaccttaaaagcgggtgacttagtactgtttaagactggtcgcactatgcgccatattggtatttatatcggtaatgataagtttgttcacgcatcaaccagcagtggtgttatcgtttctgaaatgtccaatgtctattggaaaaaccgtttctatacagcacgtcggatcattgataataatacaacaacaagtcttgctgataactattctcaagcgtcattaagataa

SEQ ID NO: 296184 - DNA, 348 bp, Proteus mirabilis
gtggaaaatgtacaactttcggtggttcataagctgccgctgagttatcggtggctagcaggctttacaggaacaagggtagaaattctacctgagaatgatgctagtagacaaaataccttgattggcttaaaactgctaagtcatgatggtatgactttagatgaggcaatacagaacttacaaaagtatctgaataatctcaatattgaaaatgtgattattgagtgggatggcgtaccttgtttatttttacatagtgatgatgagtgcgcagcactttgttgcttaaaaaatgctggggttgcaattgctgagccatttccaacagactactcttatctgtag

SEQ ID NO: 296185 - DNA, 1185 bp, Proteus mirabilis
gtgcaagagcaacgtccgtcgtactttagcctcattttaatattggggcttatttccatgcttatgccactggctatcgatatgtatctgccaagtttacctactatagcacgggattttggcgtgcctggtggccaagttcagatgacattaagtagctatatctttggttttgctattgggcaaatggtctatgggccgatggcagatagtttagggcgtaaaccggttattctaggtggtgtgattgtttttgcgttagcgtcgagcgcttgtgcactatctgactcgatcgatatgctaattggtatgcgttttctacatggatttgctgccgccgctgcaagtgttgtcattaatgctttaatgcgggatatgttttcaagagatgagttctcaagaagcatgtcatttgttgcattagtcatgacgattgccccattattagcgccattacttggtgcttgggtgatgaactggttctcatggcatgctattttttggagtatcgctattgcggcgatcattgctgctgcattaattgcgctctatataccggaaactttgcccaaacagcaccgccaacgctttagcctacgagtgacatttagtcaatttattagcttatttagagcacgtcgagtactttgctatattctggcatcgggattttcttttgcagggatgttttcatttttaagtgcggggccttttgtttatatcgaactacatggtattccattcgaccaatttggcttgtactttggttttaatattattttcttgattgtcatgaccagtatcaatgggcgctatgtgcgccgatttggtgcactgaatatgttacgttttgggttaactgtgcagtttttaatgggcatattcttaatattggtggttgcccttaatttacatttttacttccttgttgtgggagtggctatgtatgttggtgggatagccatgataacctcaaatgcgatggccgttattcttgaagactatccacatatggcgggtacggtatcttctttagccggtactatccgttttggtgtgggggctttagttggaaccgctattgcaatgttacccgctaaaactgagtggccgatggtgagttcgatggcattttgtgttatctgtgccatgagtttcttgttacttgctcgtcgttataaataa

SEQ ID NO: 296186 - DNA, 705 bp, Proteus mirabilis
atgcgattagataaatttttatcccagcaattggggattagccgtaatttagtagctcgtgaacttagagcggggcttgtgactatagatggtgaaatggtaaaaacaggtgcgactaaaatcacacctgaacaagaagttgcttatgatggcaatgtgttgacacaaattttaggcccgcgttattttatgttgaacaaacctattggttatgtgtgttcaacggatgatcctgttaaccccaccattctttattttattgatgagccactagcacataaattacatgctgcagggcgtttagatattgatactacagggttagtgctattaaccgataatggtcaatggtctcatcgtataacggcacctaaacatcactgtgaaaaaacgtatgtcgtaacgttggaacagcctattgctacggatgtcgccgagaaatttaaaacgggtgttcagttaaatggcgaaaaagaattgactaagcctgcgacattggaagtaataacaccgactgaggtaaaactgaccatcagtgaagggaagtaccatcaagttaaacgtatgtttgctgcggtgggtaatcatgttgtcgcgttacatcgagagcgtatcggtgatatcacattagatgatgctttagcgccaggagaataccgaccgctaacagaagaagaaatcaatagcattcatctacctaaataa

SEQ ID NO: 296187 - DNA, 255 bp, Proteus mirabilis
atggttatggcttttacactcagaccttatcagcttgacgcggttaacgcgacaatcacttattttcgccaacataaaacaccagcacttattgtattacctaccggtgctggaaaaagcttagtcattgccgaacttgctaaaagagcacgtgggcgggtattggttctaacacatgtaaaggaattagtagagcagaaccatagcaaatatgaagcctatggtctatctttttcggcagtgtgcaatcggtag

SEQ ID NO: 296188 - DNA, 285 bp, Proteus mirabilis
atgttaactattaatgcaacagtacgtaaagagcagggtaagggtgcgagccgccgcctgcgtgtggctaaccgttttccagctatcgtttatggcggaaatgaagagccaatcgctatcgatttagatcacaacgaagttatcaaccaagaacacaaatctgagttctacgctgatttcgttaacctcgttatcgatggtaaagcaactaaagttaaagttaaagcagtgcaacgtcacgagtataagccaaaaattactcatattgacttcctgcgcgcttaa

SEQ ID NO: 296189 - DNA, 273 bp, Proteus mirabilis
atgaaaaaggccattatcctttcggtatcattagccacattatttcttgctggttgcactgcagatggaaaaatcaaaacctctcaactgacacccgttaactgtgtcggcgtatttaataaaactaatgaacaagtcagctttacggcaaaagatgttgatcagcgcttatacagcccagataagccaatagacagtgttgatggttggattgatgttaaagatgtttctggtcttctctgtgaggatgtgatcacggctaatgaagactag

SEQ ID NO: 296190 - DNA, 1731 bp, Proteus mirabilis
gtgaatattcaggcttttctttcagaaaaaatcagtatggcgatgagcgctgctggcgcccctgctgatagcgaaccacttgtccgtcagtcagctaaagtgcaatttggtgactatcaggcgaatggtgtcatgggagcggcaaaaaaaatgggtatcccaccccgacaactcgcagaaaaaattctggaacaccttgatatcacagatattgcagataaagttgaaatagcaggccctggttttatcaatatcttcttatcacccgtttgggttgcacaacaagccgaattcgcattagcggatgagcaccttaatattaccaaggtaacccctgaaacgattgtgattgactactcatcacctaacgttgcaaagcaaatgcatgtgggtcacttgcgttcaaccattattggtgatgccagcgcacgtactctctcttttttaggtcataatgttattcgcgctaatcaccttggtgattggggtacgcaattcggtatgctgattgcttatttagagaaaaagcaaaatgaaaatgccgcagatatggcattagcggatctcgaagagttttaccgtgaagctaagaaatgttatgacgaagatgaagtattcgctgaacgtgcccgtaattatgtcgttagactacaaggtggtgatgaatactgccgtactatgtggcgcaagcttgtcgatatcacaatgcaacaaaatcagctaacttatcaacgccttaatgtcactttaaccgaagatgatattatgggtgaaagtctttataacccaatgttgccgggtattgttgctgatcttaaagcaaaaggtcttgctgttgaaagtgaaggcgctactgttgttttccttgatgaatataaaaacaaggaaggcgaaccaatgggagtcattatccagaaaaaagatggtggttacctttatacaacaacggatattgcctgtgctaaatatcgccatgaacaattacatgcaaaccgcgtattatattacatcgactcacgtcaacatcagcatttaatgcaggcttggactatcgtccgtaaagcaggctatattcctgatagtatgtcactcgaacaccatatgtttggcatgatgttaggtaaagatgggcgtccatttaaaacgcgctcgggtggcacagtacgtttaactgacttactcgatgaggctcatgaaagagcattaacattaattcgcgaaaaaaatcctgatatggatgaagaggaattaaataatattgctcgtgtagtgggcattggtgctgttaaatacgcagatttatcaaagaacagaaccaccgattatattttcgattgggatctgatgttaagttttgaaggtaatactgcaccttatatgcaatatgcctatactcgtgttgcctctatctttaaacgtgcagaaatagatgaaagcgcattaacccagcctatctcattaacacagcctcatgaaaaacaactggcactacgtttagtacagtttgacgagactatcacgcaggttgcacgtgaaggtacacctcatgtgatgtgtgcatacttatatgatttagcgcagtccttctcaggtttttacgagaactgccctattctatcggccgaagatgacaatgtacgccaaagccgtcttaagctagcacgtttaacagcaagaaccttaaagcaaggcttagagactttaggtattgaaactgtcgatagaatgtaa

SEQ ID NO: 296191 - DNA, 555 bp, Proteus mirabilis
atggtgcttttttccgcaattcctttcttaaataacttaacgcaagagcttcctctatttgcaaaaaatttaactctactggcgaataaactatccctcgaccttgatgcttatcaaaccgatcatatatcgttacgttgtcacgatttggcgttagcagaacagtggcgtaatggcttaagtcaatgtggcgagtgtatttcagataatatgattaatgggcgacctatttatctctttaagctagcctcacctttaacactgttaggccagcaaatatctattgttgagttaccttatccaacagataaaaaataccaatatcaaggttgggaacatattgaacaggtaataaatgttgctcctgaaaaattagttgaaaaggtgatgacattattaccccatcctttacctgaagggattaaaattaaaataagtgaacctaaagctgaaaaagaacgtttacctaatccaaccgttgccataaccgatggtatcgttaccataaagtatcacccatattccttactgaaaattgtagaaagtgagtgttga

SEQ ID NO: 296192 - DNA, 753 bp, Proteus mirabilis
atggcaaaactggagatttgctgctttggtgcagaatgcgcactgatcgcagaacgttcgggggctgatagaattgagctgtgtacaagcccgtcagaagggggtgtaacaccgagttatggaatattaaaacaagtcatagatctcgttcgtatccccgttcatcctattattcgtccgcgtggtggtgatttttgttatagccaagccgattttgctgcgatgaaaaacgatatcagtatgatccgtgatatgggtttttccggtgctgtggttggtatattaaatgaagaaggtcacattgatttacctaaaatggcgattttgatggaattagcagggcctttagccattacgtttcatcgcgcttttgatatgtgtattaatccattgctagcgttagatcagctgactcaattaggtgttgctcgtattttaacctcaggtcagcaagctaatgctgaattaggcttacctctattaagaacactgaatgaaaaaacccaagggccgattatcatggcgggggcgggagttcgtttaagtaatattcagaaatttttagactcgggattacaagagatccatagctcagcgggtaaacaggcaccctcgacaatgaattatcgtaaagcgggggtcaccatgagttcagacagcgaagtggatgaatttacccattattgtgtggatgaagatgtggtgggggcaatgaaggatattatgagtatttatacaacatctgttaattaa

SEQ ID NO: 296193 - DNA, 1590 bp, Proteus mirabilis
atgttaaaacattatttattagccattattatagggtgcagtatatttcctgccttctctgccactatgccatcaaagcaagataatagtcccgcaccagcagcaaaatggaattgctggggaagaaaagaagtgaatatgtctaatcgaaatatcaataataaatcggtcagtttaaagttaagtactgatatttgtgatagaaaagatctaagaccattatttatcgatgtttatctacacaagatatcctttaaaggggcgaaatacgatgggataactattgatattatcgccaatgccactcataaattaacagggaaaacacaagaaataagatcaacagaaaatattaataacatagatgaacatgtgcagagattgcagtttagcgcagtgcgttcgggagattataacgtagatataaaacagatatggcttatttttagggagcatggtaaagcagtaggttcatttcagataacaggggataatgctcgtaatggcgaggcttatatcgaatctcatatcacctataatgcaatgctttctctcattgagaacgcaaaatcagaaacgttaacaacaggaaaaccaagtcatatcgtttttggtggtcattatgaaataccaatgaatgcaggctcaggaacctatacattagccaataacggcaatctactgattattcctaggatccatgaaaaagaaaaataccttattcctcatctattaggtgatactcatcaaggcgaggcagcccgctgcgaaggtaatacaaatgctaaaacacaggatggcacttcacagacagcggagctttataccccagaacaggcatggaacaaactagataaaccgttagtggctttaaatgcaaactattttgatgttcgtcctcaactcaataacaccacttggcagagtaatctttgctcagtgccattagggatatattacgataatatcgcacaaggacccactcatggtactcataacgagcccaatcagttttttgcagggcctaattactttatcaataacaataatgagcaaatcgcattagatgcactgttttgggtgttagatcaaacatctaggatagatatctactatagcaaaaaagtatcagatcctgcgattgaactgtatgccaatgaactctctttatcaggatatcactttattgctatatcaggctccggtttacctgttcgcggattaacaccactccctacccctgattctggcgattcagagacaacccgactcgcaatgggtgctgatgataacaatagccttatttatattttccaaggaggtagttatagagagggaataagccgcaatgatctgcatcatttatattatggccttagcattgcacaatctatggagttagatggcggtggttcagctgcgctggctttaaaggcagatgaattcacagtgagaggtgatacaaggcctgattcatcttgtaacgaagcaggtttgtggtgctctttgataacacaacctgacggaaaacatcgtcccgttccatcttggattggtttggctattaataatctagctattggtcaataa

SEQ ID NO: 296194 - DNA, 1101 bp, Proteus mirabilis
atggaaaatattcaatcaaaaaaagaaaaaatcatgcagttagtgatggtttatacaccttggatcactgtgatatgtgttgttgcgtttattggtatagcgactgcagattgggatcgctggtggagtgatgctcgttatcaaacaacagataacgcttacataaaagcggactcaacgatattgaaatcacgaatgactgggtttatttctcagattaataaagaggattaccaagtagtaaaacgtggtgaggtcattgctgaaattaataagaaagaacaaatattaaatcggcaagcggcattagcagagtatcaaaaagcccaattagctttagataatctcactgaagaaattaaagaatatcaattaaatattgagaaattagctaatcgttatcaagcatcagttattgatgttacccaagctaagcgcagcccaatgttgcgtaaagatttaattaatagtggggcaatcacacaacaaaattatttagatgctcaatctgatttgcaacgtttaatgaaattacaaagtgctgcgaaaaatgagtgggatcaggctaaacaagcactggtattactaaaatctcaagaaaaaatacgtctggcacaaaaagatatcgctcaaacacagtatcagcaggctgaaacggagctttcatacgcgactattaaggctcctttcgatgcgcaattaaataaaataaaagtcaatatcggtagccttgtgactgcgggtagcgaaattgtgactttaacaccgattaacgatgtatacattattgccaatttaaaagagacacaaataaaaaaagtacagccagaacaatctgttgctatcaaagttgatgcttttcctaccgatgttttttcaggaaaagtgagatatatcggcgcacaaagtagtggtgaatcagcacttattcctgctgataatgccagtggtaattttactaaagtagtacaacgtattccggtttatatcacgctcaatagtgataaccgacacttagctaaattaagagcgggtatgtctgtgcaagtgaaaattgacacagatagccttcctatagaggagggggagcgcagtgattaa

SEQ ID NO: 296195 - DNA, 639 bp, Proteus mirabilis
atgaaaagccctaaaattgatcgattaaatgtgttggatacggcgctttctttgctggaaaaagaagggattgaaggcttaacaatgcgaaaactggcagatgcattacatataaaagccgcctctctctactggcattttgataataaacaaacgcttattgagggaatggcagatcgtatagtcagtgaagtcgctgttgattttcactatagccaagattggaaagcggatctaaaacgtctagcaacagagctaagagaagcttttttacaacatcgtgatggtgctagagtttttgccggaacctatgtgatttctgagaatgtgttacgtataaacaatacgcttattactttaattatgcagtctggtgcatctgctgagttagcgagcaatatgtcgatgaccttactctattttattttagggtgttgcattgaacagcaagctatcacgcttattgatagtgaaattttaatgcaaaaacgactcgcttttgaacaaattgtacgtgataaataccctcaaacttggcaagtaagagaaattctttttgctgatgattttgccatgcgttttaattttggcttagagcaattagtcacagggtttgaacaccaattgatgacaccatga

SEQ ID NO: 296196 - DNA, 1407 bp, Proteus mirabilis
atggaaaagagtaaaaaaataaaatgggctatgcctgatgcctttattattatttttggcatcgttattttagcggccatcgccacctatttgatccccgcgggaagttatcagcgggaaaccgttaatggattaaaccgcgttgtccctaatagctttaattatgttgcacaaaatccagcttcattgatggatgtgttttatgcaatccctgtagggttaaaacaatctgccagtattattttcttgatctttatgattggtggcgcgattgccatttatgatcgcacccgtgctattgattcaggtattaatgcgcttattgttaaaaccaaaggtaattatcaagctcttattattacggttgcttttatttttggtatgttgtcatcccttgggcttgcggccaatgccgttattgcgtttatccctataggaatagccctttcgcgatcaatgaaacttgatgctattacgggggttgcagttgtttatttaggctattatgcaggtaatgcggttggtgtattagatccaactattttaggtactgcacaaacattagctgaagttcctcttttttctggtgttatttttcgagttgtattattcgctatcttaattgttgtcactattgcttatattgtctggtatgccagacgtattgcgaatgatccaacgaccagttatatgtatggaatagctaaagatgatcctgattatgaacagccacacactcaatcattagatagcaccttctcattgaggcaaaaattgagtttggtggtatttatagcgtttattggattgtttttatatggcgcttttgaatataaatgggggattgaacatctatcagccatttttattatgatgagcattgttgtggcggctatgtttaaaattgcccctaatgactatatcaaaacctttatgaaaggtgctcaatctttagtgtatggggcattggtggtggggatcgccagagcggttattgttattttagatgaaggacgagtgcttgattctattgtacaagccacattagtgccattacagcaaacctctcacttttggggcgctcaattactttatttctttaatttactatttaacttgctagtcacatcaggaacgggacaagcatcgattgttatgcctattatggtgcctattctcgatattcttgatcttacacgtcaaaccggtgtccttattttaaaactcggtgatggctttaccaatattattaccccaacatcaggtgtacttatggcggtactggcggtaggtaaagtgccgtggacgcgttgggttaaatttgtattccctattttaatgatttgggtcgtgataggtatggctgcaattggtattgctaccgcaataagttatggaccagtgtag

SEQ ID NO: 296197 - DNA, 984 bp, Proteus mirabilis
atgcaacacacaattaattcacaatatgatgaaatggttgattttctaaaggagttagtgaatatcgatagcggctcttatgataaacgaggggttgatacagtcgctgatcttttaattcaacgctaccaaaaattaggttttgttgttgaagtatttgaaaatgaacaactagggaataactaccgtttagttcataaagatgccacaaacccacaaatttttattgctgcacatttagataccgtatttcctaaaggcacagtagcagagcgcccatttagtatcgatggctcccgtgcttatggccccggtgttattgatatgaaagctagccatgttttaacttactatgcgattaatgcactcaaacaaagtggcgatctctcttatcaaaatgttgaaatattgcttaactgtgatgaagaaatagggtcaaaaacatcgcgtcatttaattgaaaaatatgcaaaaaataaagcttatgcattaattatggagcctgctcgtgcgaatggtgccattgttagcgctcgtcgaggtgttggaacttatgagctgttgattgaagggaaagcatctcactcaggtattgcaccagaagcaggaattagtgctattcaagagctttcatacaaaattcaggccctacatgcgctttctcgccatgatgaaggtctttccgttaatgtcggactgatttctggtggtacatctgtcaatacggttgctccccatgcacgagctgaaatcgatgtgcgtatttcaacggatgagcagggtattgaaattgataagcaagtcagagaagtttgtagtcaacctgtgttagcgggggttaaattaacgctaaaaggtggcattaatcgccctccaatggtgaaaacacctgaaagtgccaatttattgaagatatttcaaccgggggaggatctgatgcctcatttactgccggtgtgggcacaccaagtgttgatggtttag

SEQ ID NO: 296198 - DNA, 960 bp, Proteus mirabilis
atgaatggaaaatcaaataatagtttaataaataatgatagtaataaacaaatagctaaaccaataattccgccaccatctgctaaccctactttaagttcacaaatggagacaggagatggcaatgttgctttagatttagttgtgataatagatacaagtggctcaatggctgatgaatcttctgatttaagtcaacaaatagatgatgctgttcaaaaggcattaggacgttgcccatcaagtttaagagtcacttttttaggaatagaaggtacgtgggataatactaagttcgatcgctcagtgactgactatttaatgacacaaggtgtatctgctcacaaactacaagcaagagcgccatttaaagaggctgatggacgagatcatgctggaaataaagaagatttatgccgagccgtcattgatgtgtgtaaatatttcgattggcgagatggcgctcgtcgagcaatttttgtcttaggtgatgaaggtatggaaggtggcggaggtgtattaacacaagccgctgtgcttaaaaacaatgaggcaatagtggttgctagaagcgaaaaagtaaaagtatatacttatcagggaacgcctaatgatgatccctctaatgtggatcgctttcctactattgctgatagagataacatcacgaaagagtatgtgcgcttagcgcagatgacgggaggacgctcttatatatacacaacaggtatcgctaatttttctttagttctgcaagaaattctatgtgacagtttaacattacctaaacttcctgatctgaataaagataattcaacgtgtcgtcatgtttgtgaagagctctctactattatatcaacagttaatacccttgcagaaataatgcataaagcgattgattcatgttgtaaagatgattggggcacacgcgaagtgtttaagcctaattgtgattgttaa

SEQ ID NO: 296199 - DNA, 1674 bp, Proteus mirabilis
atgaagaaatcgcttgtcgctgttggtgttattgttgcactaggtgttgtttggaccggtgcatcatggtacatgggcagtaaaattgaaagccgcttacaggaagaaaccaaacgcactaacgttcaattagcgcaacttgctaaagaaagccaattaggtgcggatattaaacttgaaattcgtgactataagaaaggcgtctttacttctactgctgatcttgcggttgtgatttcagagcatgccaaatcagatgaagataaaaaagtagaagaagtgctctttaagacggatattgaccatgggccattccctctttctgatattgctcaatttaatctagctcctaagttagcagcaatgaataatactttagtgaataatgagaccactaaagatctatttaagttgaccaaagagccatcatttattgatatgcactcttctttatcgtttgatagcagtgtatcaggtaaagttaacataaatcctattaattacagcaaagatggtagccagttaacaacatctgcgtttcagattgatttttcttccgataaaaatgcaacaaacatctcaacagcagtaaaaggtgatgaagtcattgttaagaaaggtaatgatgaaacctttacgctgaaaaatattgcaggctctgtcgaaggaactaaagttaaagacgatcaatatctatttgatacacaaacactgaactttggcgatattacctttacgagccaagataagtcatctaatttcactttaaaagatacttctcttgctactaagagccaaattaaagataaattattctttatcactcaagattatagttttaaatctcttaatgttggtggttttgattttggtgcgggtaaatttgcttactcaattgataaagcagatccagatgcgatgttgctattaacaaaagtttataacagcaccttcttaccttggaatcaaaataaatacgataattcagcgatgattgagcaagctgtacgtgatgttttggaaaaaggtttagtattccgtatcgatgaagcatcacttaccaatagcagtggcgcaagcaagctaaactttaagttagatttaaatgcgttcaatgctgatgcactgaaaaaagaagacaaggcgccttcagttctgtttaatgaattgttcaataatatcgattttaatatcgatctttctgtaccaatgctaacggagttccgtagtaccacacaataccttgatgttatgcgttattctgaaaaaggcttaacagacgaagataaagctgaaattcagaaaacaaccgctaacgacatggcacagttaaaaactgaattacagcaaaatatcaatcaaatttctcaagacgagaaagatgctctgccattgatgctgttatcacaagacggtaataaactgtctttaaacctgaactatgctgctgataaatttactatgaacggtaaaacttacagctttgatgagtttatggaagtaacacaagcccctcaaatgttaggtttagcggcgatgttattcggtgcgggtgcttcttcttatgattatgatgactctgattatcctgaatattcagaagagccagatcaaaatgatgcaatagaagagccacaaattgagatcccagcagcacctgctgaaaacaattaa

SEQ ID NO: 296200 - DNA, 1398 bp, Proteus mirabilis
atggcagccactcgcattgaaaaagactcaatgggacaaatcgaagtaccagctgaccagttatggggagctcaaacgcagcgttctctagaacacttccgtatttcagtagaaaaaatgcctgttgcactgatccacgcgcttgctttaaccaaaaaagccgccgccggtgtcaatatggatctcgggttattacctaaagaacgtgcagatgcaattattgctgctgctgatgaagtgctggcaggtaaacacccaactgaattcccattagcaatctggcagaccggttctggcactcaatcaaatatgaatatgaatgaagtgttagctaaccgtggtagtgagatactaggtggtatccgtggcatggaacgcaaaattcatccgaatgatgatgttaacaaaagtcaaagttcaaatgatgtgttcccaacggccatgcatgtcgctgctgttatcgcattacgtcaggatttactgccggaattaaaatcattactgaaagtatttaaagagaaagcagaagctttccatgatatcgtcaagattggtcgtactcacctgcaagatgcgacaccacttacattaggtcaagaaatctccggttgggcggcgatgcttgagcataatatcaaacatatcgaagattcagttcctcatgtgtgtgagcttgcgttgggaggaacggcggttggtacaggattaaatacacatcctgagtacgcagttcgcgttgctaaacgtatcgctgaattatcaggtcagccatttgtcacggctcctaacaaatttgaagcattagcaacctgtgatgcactggttcattctcatggtgcgttaaaaggtttagctgcctcattaatgaagatagctaatgatgtacgttggttagcatctggccctcgttgcggtattggcgaaatttctattccagaaaatgagccaggtagctccattatgccaggtaaagtgaacccaactcagtgtgaagcgttgaccatgctgtgcgctcaagttatgggtaatgatgttgctatcaatatcggtggtgcttcaggtaactttgaactgaacgtatatcgcccaatgattattgataacttcctacaatcagtgcgtttattggctgatggtatgcgtagctttaacgagcattgtgctattggtattgaaccaaaccgtgagcgtattaataaattattgcatgagtctttaatgctggttacggcattaaatacccatatcggttatgacaaagctgcagagatcgcgaagaaagctcataaagagggcttaacgctgaaagaatctgcactgaaactgaactacctgacagcagaagaatttgatagctgggtacgtccagaagatatggttggtagtatgaaaaaataa

SEQ ID NO: 296201 - DNA, 930 bp, Proteus mirabilis
atgagcaaatatgatgcaatacagcgatttaatctctgttttcaacaacttgaaacagaaatcaatgctcttaccgattttcttcgtcagttaaagcaacttccttctgcggtttttgaattacctgaggtaagtaaagaagatgaacatgatgagataacaaatgttacagtgtcacctagttatgatctcgatgctttagaactctctttaaaattaatgaccaatctctttatctatgataatgccccacatgtcagtagcaagcgtgcgatacgtttaccgggggtactctgttttagtgtcagcaatcctgtatttaagaatgtaaaaacacaagtagagagcattaattcattaaaaaaacaactttcagatattgtgacgaaagagtctggtatttcgaaagaagaacgttttgattttgtccataatcagctaaaaggcttaattacacttaatgcttatcgcaccctcaccctactttctgatcctgatacagtacgttttggctgggccaataaaaacattataaaaaacttaactcgtaatgatgtgttagctcagctagaaaaaagtcgagaagccaatcgcgccgtacctccttatactagtgaacaatgggctgaacgtatcgataaagagataatgaccctttcacaactcccggaaaatgccaaattaaaaattaagcgtccagtgaaagtccaacctattgccagagtttggtattcggagcaacaaaaacaggtacaatatgcttgtcccctaccattattagctttttatattgataaagcgtcggactttaagcccataataggtgaattagctgattatgatgtgaataatattcaaattcgccatcgccctaaagccaaaaagttacaattaattattccacgattgcatttatatcttgaaaaataa

SEQ ID NO: 296202 - DNA, 489 bp, Proteus mirabilis
atgcctcaccattcacattacattttacatgatgagcttattggttttgatatctttaaatatatagatattaaatttattttttccaataataggaaaaggagtgttatttacaggcttattttttgccgagatgaaaattatcattcattaattaataagttatatgccgaaaatataaaaaatttaactattagtgttgttagtttttataatatagagactgaaaactatcaaaattgtgatatgtttgataaaccgccagattcaattaatttgacatcatcagaaactcggtatctttacataacactcattgacattattcttttgatagcacaaactgaaaaaatagatattttgactttccaagcatacagtgaagagctcagaagagtttatattcgattaattaataagtacgctgaatcgaaaaatttaaatgtttacgttgaggaggcttattttgttatacaaacaaatatctaa

SEQ ID NO: 296203 - DNA, 210 bp, Proteus mirabilis
atgtctaaattaaaaggtaacgttaagtggtttaacgaaactaaaggttttggttttatcactccagaagatggcagtaaagatgtgttcgtccacttttccgctattgtttcagaaggttttaaaacacttgctgaaggtcaaaaggtagagtttgaagttactgacggcgcgaaagggccatctgctgcaaacgttgtcgctatctaa

SEQ ID NO: 296204 - DNA, 474 bp, Proteus mirabilis
atgtaccaagattatctcaatacgccgaaaggttttccaaagccttatatatccattactgcagatgatgatggcatcaccagccttaactttgttagtgaaaaagaggcgttagttaattcaaatgccatagttgaccagtgtataaaacagttaaaagagtatttttcgggtaaacgcaccctattttcagtgccactagcgcctaaaggaaccgaatttcaaatacgcgtttggcagactttacagtctattccttatggtgaaatttggagttataaaaagttggcacttacattaggttccgtcaactattgcagagcggtaggaatggcaaattcacgtaacccaatctcgttaattattccttgccatcgcgtcattggtcataatggtaagttagtaggctatactgggggacttgatatcaaacgttggctattacactatgaaaaagtggatattgacgaatag

SEQ ID NO: 296205 - DNA, 225 bp, Proteus mirabilis
atgtctgtgatcctctataccaaaccaaattgtgttcaatgcagtgcaaccgagcgcgcattacaacaacaaaaaattcctttcactgcggttgatctcacccaagacactcaagcattagcaaaaatagtttctatgggatatcgccaagtaccagttgtcgttaatgatgacgaacattggtctggcttctgcccagataaaattcgtcaaatagcgcgctaa

SEQ ID NO: 296206 - DNA, 405 bp, Proteus mirabilis
atgcaatcgactgcccctttaatttatttctctagtcgctcagaaaattgtcaccgcttcgtacaaaaacttaatctacaagcgacaaggataaaagaggatgaaccactacaagccacacaaccttttgtgttgctctgcccaacttatggtggcggtggcgttaaaggcgcagtgcctaaagcggtgatccagtttttaaatattcctgaaaatcgccaattaatacgcggtgttattgcttcaggaaataccaattttggctctgcttacggcttagcaggtgacattattgcacaaaaatgccaagtcccttttctctatcgttttgagttacttggtacgcctgaagatgttaaacgtgtaaaaaccggattaagcacattttggtcagctagcaaataa

SEQ ID NO: 296207 - DNA, 2127 bp, Proteus mirabilis
atgacccactctatagaacaactcgattatcacgccttaaatgccatgctcaatctctatgatgagcaaggcaatatccagtttgataaagacaaattagccacccaccatttttttcgtcaacacgttaatcaaaatacggtgttttttcatgatctaaaagaaaagctcgattttctggtgcaacaacactactacgaagcacaagtattagagcagtacgatttcccgtttatcaaacagctttttaagcatgcctatagcaaaaaatttcgctttcaatcgttcctaggtgcatttaaatactacaccagttacaccttaaaaacctttgatggtgagcgttatctcgaacgctatgaagatcgtgtttgtatggttgccttaaccctagcacaggggaataccaaactcgccactcaccttgtcgatgagataattagtggccgtttccagcctgcaacccctactttcttaaattgtggaaaaaaacagcgtggcgaattggtctcttgttttttattacgtatcgaagacaacatggagtccattggccgagcagtcaattctgcgttgcaattgtcgaaacgtggcggaggtgttgctttcttactgactaatttacgagaagcaggagcccccataaaacgcattgaaaaccaatcgtctggcgtagtaccggtaatgaaaatgcttgaagatgccttctcatatgccaatcaattaggcgcaagacaaggtgctggagcggtttatctccatgctcatcatcctgatatctatcattttctagatacaaaacgagaaaatgctgatgaaaaaatacgtattaagacgctttcattaggtgtcgttattcccgacattacctttgaattagctaaacgcaacgaagatatgtatctattttcaccttatgatgtagaacgagtatatggcgttcctatgtcagaaatcagtattagcgaaaaatatactgaaatggtcaacaatgcagagatacgtaagaaaaaaattaaagcacgggcattttttcaaactttagctgaaattcaatttgaatcaggttatccctatattatgtttgaagataccgtcaatcgcgcaaatccgattgcgggccgaattaatatgagcaatttatgctcagaaatcttacaagtaaatagtgccagtgaatacaatcctgatttaagttatcgacaaattggtcatgatattagctgtaatctcggatcaatgaatatcgctatggcgatggactcaccagattttgcgcataccgtaaatgttgccatcagagcactgacgagtgtggcacaaatgactaaaatagaatcagtaccttctattgaaaaaggcaaccaagcatctcatgccattggcttagggcaaatgaacttacatggttatttagcccgtgaagggatttattatggttcagaagaaggacttgattttaccaatatctatttctataccgtaacatactatgcccttttagcctctaaccaattagcgatagagactaaacagcgctttaaagggtttgaacagtcaaaatatgccactggggagtattttgataaatatttatcaaaacagtggttacctaaaacccaaaaagtccaccagctatttagccaatccaatattcatattccaacccaagaagattggcaaaaacttaagctctcgattatgactcacggtatttataatcaaaacttacaagcaataccaccaacaggatcaatctcttatatcaatcactctacatcgagtattcaccccattgtggcaccgattgaaataagaaaagaaggtaaaatcggtcgggtttattaccccgccccttttatgaccaatgaaaaccgtcatttttatcaagatgcttatgaaattggcgcagaaaaaattatcgatacctatgcccaagcatcacaacatatcgaccaaggattgtcgctaacattattcttttctgatgaagcaaccacaagggatgttaataaagcacaaatttatgcatggcgtaaaggtataaagaccttgtattacattcgtattagacaaacagcattagccggcacagaaataaaaggctgtgtttcatgcgccctttaa

SEQ ID NO: 296208 - DNA, 969 bp, Proteus mirabilis
atgtctgcatcttatttaagtcgtgttaatgcgataaattggaatcgtattgaagatgaaaaagatttagaagtttggaaccgtttaaccatgaatttttggttacccgaaaaaattccactttctaatgatataccttcatggaataccttaacccaagctgaaaaacagttgactatccgtgtatttacagggcttacactgctcgatacgatacaaaatacggtcggggcaccaaccttaatgcctgatgctcagactccccatgaagaggcggtattatcgaatatctgttttatggaagcggtacatgctcgctcttatagctcgatattttcgacactctgcttaacaacagatgttgatgatgcttatcgttggagtgaagaaaatacctatttgcaaaagaaatcagatattattctgcgttattatcaagatagtgatccattaaagaaaaaaattgccagtgtatttttagagtcttttttattctattctggattttatttaccaatgtattggtcaagtcgagggaaattaaccaatacagccgacttaattcgtttaattattcgtgacgaagctgtgcatggttattatattggctataaattccaaaatcagttattaaataaatcatcattagagaaacaagatattaaagactttgctttctcattattattagatttatatgataatgaagttaaatatacagaagatctctacgactctgtcggttggacagaagatgtaaaaaaattccttcattataatgcgaataaagcgctgatgaatttaggttatgaagcactatttccagatgaaataactaatgttagtccagcaatactttcatcactatcgccagatgcaaatgaaaatcatgatttcttttctggctcaggctcttcttatgttattggtaaaacgatcaataccgaagatgatgactgggatttctag

SEQ ID NO: 296209 - DNA, 2304 bp, Proteus mirabilis
atgaactttttgttaattaagcatgagcctcattttcagggaatgggggccgtttcattttcatctcatgcgatttttttattactcactacacttgcttcgtttaatagcgttgcttcacaaagcacagaaaaagcatcacaaactcaacaatctgaaactgtggtgcttgatcctatttatgtttccggaaaattaaattctagtgttgaagcaggaagcacggctttgacattaaaagatatcaatagaattcagccaaataatatcgctgaattggtagataaattaccagggatttcttcatctggctcgccaagacctggtgggcaaactttaaatatttggggaatgggcaatccggaagatgtgaaaatcactcttgatggtacaccgaagacgtttgaaaaatatcgtcaaggttccatatttatcgatcctgaattaattaaacgccttgatgtcgataaagggccacataatatcacccaaggaaatggaggatttggtggctccgtacggattgaaacgaaagatccggatgacttactgttacctgatcagcatattggtatgtttttaaaatatggacatcataccaatgataggcaaaatcgttatagtggtgcgatatatggcaagctaatggatggaacggctgacggtctattttattttaatcgtcgtaaaagcgatgatttacgtcgtcctgatggcactaaatttggttattcacaatcagatcaagattcgtttttaattaaaaccaatgtctatttaacagacgcacaaacattaactttatcagcatcaagatctgtcagtgatggctggacgccttgggctgccaagcgagatgaactggcaaaaccgagccaatatgatgttgataaatatggttttgatggagcgatgaaacgtaagttagtttatcgtgaccaaaaagatgacactgtgagtgtgaaatggaatattcagccaattgattctgacctgattaatttcacattgacttacggttattcaaataccaaacagaatgataaacgccctgataatgcgagttcttatctaagtagtagtatgggtaaccaaagttgggtcaactataaaaatcatcaaattgaagtgaaaaatgaaagtaccgtgatgcaaggagctactgaacatgtgattttagtgggagcgcgttggcaccgtaatgatcgtaatgtgttaatgtttacgcgggataaagcgaaaaatccaaattataattatggctattatgcaccaccttatatgccagaagggacgcaaacaaccacgagtttttatcttcaagattcaattagttatcgaacactaaccctcacgcctggtgtgcgttatgatatagtgaaaaatcaaggagtagggagtcgagcgaaggtttatcaagatcctaatccctattacggtcatgattatagtgatgtaacttatcgtggcattacacctcatttgggtattttatggaaagcgagccccaatattagattttttggtgatataactcatacatggcgtgcgccgttaattgatgaacaatatgaagtgcaagccagtatctctagtttgacaggcacgagtcgccatttagataaagagaccgttaccgcaacacggattggcgccattgttgattttgaaaatgttttccaacaagaagatcagctgcaacttcgaagtacattttttgatactcgtgggaaagatgagatattccgtcgtcgcggtgtctattgtgaaagcggaaaagtaaccggaaacaatgggagttgtcctccttcccttggaaattatcgcaatttacctggctaccatattcaaggtatggaaatagaggcattttatgacagtgctaatctctttggtcgcttagcgtattcgacaatgaaaggtaaacgcgatcaatctcctcgtgatccgtggtttggacaaaaaacatggattgcagaaattcaaccggatgcattacatgccacccttggaatgaaaatcccacaaataaatatggttgctgggtggacaggggactttattggcgctcaacgtcgttcaccgatggatgctgatccggctgctacttattggtcattaccaaaaagtaaaggctatgccattcatggactattcgctaattggaaacctgcttttatcgataataccgagatacgttttactgtcgccaatttatttaaccgtgattattacccttatttaggtgagtcggtatctggtactgggcgagattatcgctttactgtggttaaaagtttttag

SEQ ID NO: 296210 - DNA, 996 bp, Proteus mirabilis
atgcgtaatccagttctctgggcaacagtattgtccgccacactgataagcactcagttatccgctgctgatttacccggtaaaggggtttcggttcaaccggtacaaagtactatttctgaagaaacttttcagacactcattgtcaataaagcactcgaaaaactcggctacacagtgcaacccattaaagaagttgactacaacgtagcttattcttctattgctaatggtgatgccacttttatggcggttagttgggtacctttgcataactcacaatatgaagccgcaggtggcgataacacattttatcgtaaaggtgattatgtggttaacgcagcccaaggttatttaattgacaaaaaaacggctgaaaaatataacatcactaatatagagcaatttaaagatccaaaaattgccaaattatttgatgccaatggtgatggaaaagcagatttaaccggttgtaaccctggctggggttgtgaagaagccattaataatcacttaaaagcctatgatttagagaaatcagtcacccataatcagggtaactatgcggcaatgatggcagataccattactcgttacaaagaaggtaaacctatcttctattatacttggacaccgtactggataagtgatgtattaaagccgggtaaagatgtcgtttggctacaagttcccttctcttcattaccgggagatgacaaaaccgatacaaccttacccaatggtaaaaactacggtttcccaccgagtacaatgcatatcgcggcaaataaaaaatgggccgaagccaaccctgctgctgctaaattatttgaaataatgaaagtttcagtggctgatatcaacgcccaaaacttacgtatgcataatggtcaaaaatcacaagcagatattgaacgtcatgctaacgcgtggatcaaagcacatcaaaaaacctttgatggctgggtagaagaagcgcgtaaagcggctaattaa

SEQ ID NO: 296211 - DNA, 1230 bp, Proteus mirabilis
atgagtaagacaaataaccaagccaatccttgggaaacggacactcaagaagcggcaacagaaaacgccaatacaacacaaaattcagcgcaagaaacgcataacaacacagatacagacaatgatccttgggcaaccacggatagcaacactactgataccgacccttggagtagtagcgctggcggtgataccggtggagctgatgctgatccttggggtacaggaagtggcactgacggcagtgatctctcttctggtactgattggctagatgccatgccaacagaaagtacacctgatcactttaatattatggatccatttaatcatacgctgatcccactagattcttgggtaacggatggtattgactggattgtgctgcattttcgtcctattttccaagggatacgcgttccagtcgatttagtattaggtggctttgaaaactttcttacctcaatgcctgcacctgttgcgattattttattttcactgattgcatggcaactttcaggtaaggtgatgggaataagcgcttttatttcactgatcttaatcggtgctattggtgcatggtctgaagcgatgataacccttgcattagtgctgacctcattactattctgcctgattattggtctccccttagggatatggcttgcacatagtgacagagcatcaaaaattgtcagaccacttttagatgccatgcaaacaacacccgctttcgtttacttagtacctatcgtgatgttattcgggattggtaacgtacccggtgtagttgtcacgattattttcgccttaccaccgatagtgcgattaactattttaggtatcaaacaagtaccggaagatctcattgaagcggctcaatcatttggggcaaatcctcgacaaatgttgtttaaagtacaattaccgctggcaatgccaacaattatggcaggggtaaaccaaaccttaatgttagcactgtcaatggttgttatcgcatcaatgatagccgttggtggtttaggtcaaatggtattacgtggtattggtcgcctagatatgggattagcggctgtaggtggtgccggtattgtgatcctcgcgattattcttgaccgcttaactcaatctttaggccaaaatagtcgcctgaaaggtaatagacgctggtatatgacaggcccgattggtttgatctgccgcctgtttggtaaaaaagccgcataa

SEQ ID NO: 296212 - DNA, 1200 bp, Proteus mirabilis
atggcaattaaactcgaagtaaaaaacctatataaaatatttggtgagcaccctaaacgtgcctttgaattattaggatctggtatgaacaaagaccagatctttgataaaacagggttaaccgttggtgtgcaaaatgccaatctggccattgaagaaggcgaaatatttgtcatcatgggattatcaggctctggtaaatctacattagtgcgccttctcaatcgtctgatagatcccactaaaggcgaagtccttattgatggtgaaaacatcaccaccatgtctgataaagatttacgacaagttcgacgtaaaaaaatcagtatggtgtttcaatcattcgctttaatgcctcatatgaatgtactcgataatacagcatttggtatggagcttgcaggcattagcaaagaagagcgctatgaaaaagccatggcagcattagagcaagttaacttaagctctcatgctcaatcttggccggatgagttatccggtgggatgcgacaacgtattgggcttgctcgtgcactggccaatgatcctgatatcttattaatggatgaggcattctccgcacttgacccattaatccgaacagaaatgcaagatgagttattgagcttacaaggtgataaacaacgcaccattgtatttatttctcatgatctggatgaagccatgcgtattggcgatcgtatcgcgattatgcaaggtggtgtggtggtacaaatcggtacccctgatgaaattcttaataatccagccaatgattatgtacgtaccttcttccgtggcgttgatatcagtcatgtatttagcgctaaagatattgctaaacgtcgcccagaaacactactgcatattgcgccaggttttggtccccgttcagcattaaaagtactggaagatgaagatagaaactttggttatttaattgagcgaggacggaaatttgcaggtattgtttctgtcacttctcttgaagaagcattaaaagcgaagcaacctattggatccgctattttaactgaaccttgtgcgattaatggtgatacaccattaaatgaactgatttctactgttgcgcaatctccctgtgcgatccctgttattgatgaaaaaaaccgttatatcggtttaatttcgaaaggaatgttgttacaagcactggataaggagacaccaaatgagtaa

SEQ ID NO: 296213 - DNA, 729 bp, Proteus mirabilis
atgcacaattacaagccgtggttagttttcaataagctagttatattactatttctatcaattggtattgtcatatcatcatttgctgcgattaatgttgatcgaactcggatagtttttgcagcaaatgatataaaccaatcactaacacttgcaaatgatagtgcgatacctatgttggtacaggtttggtccgatattggtgatattcactcttcaccagatacgaacagaacaccacttattatattaccacctatctttaaaatggctcctggtgagttgaggtcacttcgtttagtgcttagttctcgtgataatttacccaccgatagagaaagtgtattttggcttaacctttatcagataccaccagaaaacctcgcaacacaagatgtgtcacgaaaattaattttaccactacgtttgcgattaaaagtttttattcgccccgcaggattaaaagtaccgacagaaaaggatgaacagcgtctacattttagtgctacctcacatggtgtgatgataacaaaccccacaccgtggtatatgagtctagtgatcatgactagcattgataagcgtagacagcataatattatgctggcgccctatgaaaaaaactatcttgatttaccacaatccgttgttgaaggaactaagatagattatgccgtgatcaatgattcaggaaattggcgagtgtattcaacaactttaacaaactga

SEQ ID NO: 296214 - DNA, 291 bp, Proteus mirabilis
ttggatacacattatggtgaaaaaggcgttgcttctggggttgggatcaaaatctatgataaacaaggtgctgcaattaatttgctaccggacaggatggtgacgggaagtggaagtactcgagggtggtatgcgtataaagatcttactacgttttctggtacaaaagaaaatggttctatagaaacttggcatggtgattttactgcttctttagaagctcttagtggacaaaccgtaaccgtggggagtgttaatgcacaattacaagccgtggttagttttcaataa

SEQ ID NO: 296215 - DNA, 1080 bp, Proteus mirabilis
  misc_feature (1014)..(1023): n is a, c, g, or t
atgttgtattttcaccgaatgttactattagttatttgtttcattagtctgatctttagcgttgtaagcaaagcggtatgtattaaggtaacagataatagttttctatccgatagtgcaattaaggcaggctatactgctcgtaactggtatggtgcctttgatgataatattgggcatttaggcttaccatctgtaattagtgtgagtaccagtaataaatttcaacctgctggtactgtactagcgagctctattgctaattttcttacatcagcaactcgaacaccatatagtgcgaaacagatcctttttcgttgtgagctaaaggatgcagggcaactttatgaattgtattccaccaatggtgataacatatttgtgggagggcgtccggcgaaagaattggaaggagcctattatgatgtagaacgtaatgtcgctgtacgtatgactaatcttagtacaggagagtattatagtcgttattggaaacagcgccaacttacggcagatagttggtttcaagatgatcacgcgatttatattcctgctagcgcatttagcaatatattgtatgagatgataaaaatctcagcctcagatcagtttatttatgcgggtagaattaataaagatacttataaccaacctcgaggttatattgcttttaaagggcctggcttagatacttttgctatccaagaaggagatgatcatgccaataaatatttgggatggccatatgtatggccgggcgcatggggaacttataatcaagttacttatattcgaggtgcaacttgtacaatagaggattatccctcaatagttatcttgcctcaaattactgttagggcactctcttcagggcaaagcagtcaagcaacatttagtcttacacttaattgcgaatcaggagcaatgtcttcaactcaccctacaactaatattgcgaatgtagcaatgggctttttagttaatcaacctacggcggttgcggccgcccgtcgnnnnnnnnnnaggtctaacaacatctggtggtggattaacatggctattggatacacattatggtga

SEQ ID NO: 296216 - DNA, 2565 bp, Proteus mirabilis
atgttaacgaaggttaaatttcactataaaaatatggcctttatgatagcgatttgctttacctgtcaggcggcggaggaagagtactattttgatcccactcttttacaaggttctgcttatagcaaaagcattgccagtattaatggaggtgaaatattggcaggtgagtacattgtggatgtttttgtgaatgatactctcataaaatcaagcctgaaaattattttcaaatccattaataatggaaaacaagtggaaccgtgtttacctttatctttaatgcaagaagcacaagttaaatcgctatcagataaggcggtagatcatggtaaaagttgtcgttctcttagacaatgggtatcacaaggggaatggcattttgatcgagctactttacaattacgacttagcatcccaatgaatgaattaattcatcggccacggggctatatatctccctcacaatgggatagtggtgtactagctctttttttacgtcacaataccaattggacttatactgaaaatacagaccagcacttgcactcacaatatttatggagtggcatcaatgttggtagcaattttggattatggcaggtgcggcatcaaggaaatctacgccataccgatagtcataatcagggtagcgactggtattacacgagtgttcgtacatggttgcaacggccaatttctgcgattaacagtatcatgacactaggagataattacacagatcctagtctatttggtagcttattgtttagtggcataaagttcgcaactgatgaacgtatgtggccacaaggtaaacgtggctatgcaccagaggtgcatggtgtagcggctagcagtgctcaagtcgtgattaagcagttgggaaaagtaatttatgaaactcacgttccaccaggtccattctatattgatgatctttataacacaaagaatcaaggggatttacaggttgaggtaattgaagctaacggaaaaatttcacattttattgttccttattcatcggttcctgattcggtacgtcctggtaattggcactactctttttctttggggaaggtgaggcaatataagcatgttgataaccgtttttttgaaggtactgctcagtttggtattaataacaacctcaccattaatcttggatcgcgattagccaaagattattacgcctggttggggggcgcagtatgggcaactcgccttggcgctattggcatgaatgcaactttgtctcatgcgcgtatacagcatgatgatcgcaaacaaggttggcgtgcagagttaagttatagtaaaacgttttcttcagggactaacttagttttagccgcttaccgctattcaacggatggttttcgtgatttacaagatgtacttggtgtacgtcgccaactgaaaacgggtattgattactattccgatattcttcaccaaaaaaatcgtctttctgcaacaatcagccagccattaggccagttcggtactgttaatcttagtgccagtaccgctgattattaccataatcaatcgcggatcactcagttacaaataggttatagcaaccagtggcgaaagttaagctacggtcttaaccttgcaagacagcgtactactcaggattatggtgatcatttttatcaccatattgatgaattgcaagatcaaagccaaaagcaaaaatatactgaaacaatactatcattgactctttctattccatttgattggaaagacaaccgtacttcggcagcaataaattatagtcaatcacgaaacagtcaatcttcaacgctatctattaccggctctagtggagagcaaagtgatttttcttggtcattatatggtggttatgatcatcatcgttatggtaaggaacatttatcaacaaactttggtgctggctttcaacaaaatactcgcttgggaacactgagagcaggttttgatcagggtaaaaattatcgtcaattatccctaggtacgtcaggaaccttagttttgcattctggtgggataactttaggcccttacactagtgatacctttgccttaattcatgctgatggggcgcaaggtgctgttgtacaaaatgggcaaggagccgtcatcgatcattttggttatgccattttgcccactttatcaccataccgtcgcaataatatctcccttgatacccgccatatgaaccgtgataccgaattgtcagggggaagccagcaagttgttccatattccggtgcaatagctaaagtcaattttgcaacaattacaggtaaggcggtactaatagccgtgaaaaagaaagatggcagtataccgccaatgggcgctgaagtgctcagtgatgaaggggcggtaataggaatggtcggacaaggagggcaagtttatgcccgaattaatcataattcaggaagactacttattcgttggggaaaaagtgttaaccaatattgtcgagttccttaccagattgatttacattcatctaaaaaggtgatttatctaacgacaatttgtgaggataaataa

SEQ ID NO: 296217 - DNA, 759 bp, Proteus mirabilis
atgaaaaaggatgctacttgcgttgcaattcgttatctcgttacgctaatgctatttatttttcccatgactatatcatgggccagtgtgactattattggtagtcgtattatttatccatcaaccgctccttcagttgatgtgcaactaaaaaataacgatgcattcccttatattgtgcaaacttggtttgatgatggcgatattgatcttaaaccagaaaacgcgagtactattccttttatctccaccccaccagtgtttcgtattttaccgaaatcagggcagatagtacgcattgtttatggagctaataaatctttaccacaagatcgtgagtctttattttggtttaatgcgttacaagttcctccagccaatataggcggggaaaaacaaaataaagtcctggtgatgttacgcactcgtattaaactcttttaccgaccagaacagatcggctcaccagataatctagtcaaaaaactccatgtaactatgtttcgtgatactaaaaaagggattggcatcaccgttgataaccctaatccatggtttgcatcaatgagtaacttaagcgttacattaaatggtacgacgcatcaacttgatattgaaatgatatcccctttttctcaccatactttttggttacctcgcaagcttaatctcaaatcactacgaggtactgttaccgtgacactcattaatgatcaaggtgcaaggataagtgagcattatcatgttaacgaaggttaa

SEQ ID NO: 296218 - DNA, 477 bp, Proteus mirabilis
ttggcgttatctgataatactattacttttcagggggaagtttctgatgaaacttgttctgtctcaattaatggtaatcaggcaaaacctgtggttattttaccgactgttagtgccaaggagctaaaagatagtggagataccgcaggacaggtaacatttgatattggtctttctggttgtacaggtaatacagataaacccactaaaatatcgacagtttttgtcggtaatcaagttaccagcaatggcaaccttggcaatacgggaaacgctaccaatgtggaaattcaacttctggatactgctcagaaagttatcaatttaactggtggttttaaaggtgagggagatctgcaattaaagccaggagaaacgcaagccagcgcaacttacactgcacaatactatgctacaggtgccgcatcagcgggtactgttgaagcaactctacaatatgcggtttcttatctgtaa

SEQ ID NO: 296219 - DNA, 201 bp, Proteus mirabilis
gtgaaaattaatggttcaatgcaaatgttaggtaacaacaatcaggcaggaagccagaaatcacgaccatcacctcatcaacacggatggagccctcaacaatctcctaaacataatgaacccccaatggactttgatgatgatattccttttgcaccgattggattaccttatcctcgtatcgctattcatattatttaa

SEQ ID NO: 296220 - DNA, 252 bp, Proteus mirabilis
atgtcaagaatggtgactcttgaagcgtgggcaaggttggaatttggagatgcctctccttgcatgacggtattacaaaaatacgcaaagaataaccttattgcaccacctgcaatgaaagttggccgcaagtggatggttgatagagaagctcgttatgtgggctatctgtctctccctcaaattcctactaaatcaacggaacgacttaagaggataattacagatggctgcccgaccacgaacccataa

SEQ ID NO: 296221 - DNA, 792 bp, Proteus mirabilis
atgaaacctattaatttattccgtcagtattgtggtacgaaaatattaaaagagataaccgcattagatatcgctgaaataatagattccgtcaaagtattaggacattcaagaatggctcaagtcgttcgcatggtgcttattgatgtatttaaagaagctcaacatgctggctatgttccgcctggttacaatcccgcgaaagcaactaaacaaccacggaacagagtgaaaagagaacgcatgacattggacgaatggcgcgctatttatcagcaagctaagaaccaccctccttacctgcaatgtggcatgttattggctttaaccacaggtcagcggatcggtgatatctgtaaaatgaaattctctgatatctgggatgacatgttacatgtacagcaagagaaaacaggcagtaagttggccatccctctctcactaaaatgtgaagctatcaatctctccttaagggatgttgttgctcaatgtcgtgatgctgttgtaagtaaatatctcgtgcattatcggcataccaccgcacaagcaaaacgaggcgagcaagtcacaccaaatacgttaaccacaacatttaaaaaagcgcgagataaatgtgggttaacttgggaaaaaggtacggcacctactttccatgagcagcgatctttatctgagcggctttatcgtgagcaaggaattaatacacaaaaattattgggtcataaaacacaaaatatgactgataaataccacgatgatagaggcaaagaatggcaaattattgctgtttaa

SEQ ID NO: 296222 - DNA, 1254 bp, Proteus mirabilis
atggaaagcaaagtagttgttccggctaatggtgctaaaattacattagatgctaaaggtaagcttgttgttccaaataatccggttatcccttatatcgaaggggatggtatcggtatcgatgtcacgccagcaatgttaaaagttgttgatgcagcggttgaaaaagcttacggcaatgaacgtaagattgagtggatggaagtctacaccggtgaaaaatcaacacaaatttatggtaaagatgtttggctgccagaagaaaccttagatcttattcgtgaatatcgtgtttctattaaaggtcctcttactacaccagtaggtggtggtatccgttcattaaatgtggcactacgccaacaactcgacctttacgtttgcctgcgcccagtgcgttattacaaaggcactccaagcccagtaaaacacccagaactgacggatatggttatcttccgtgaaaactcagaagatatctatgccggtattgagtggaaagccggctcagcagaagcagataaagtgattaagttcctgcaagatgaaatgggtgtaaccaaaattcgcttcccacaagattgtggtatcggtattaagccatgttcagaagaggggactaaacgtttagttcgcgcagcgattgaatatgcaattgataacgatcgcgactccgttacattggtgcataaaggtaatattatgaaatttaccgaaggtgcctttaaagattggggttacgaattagcccgtgaagaatttggtggtgagctgttagatggtggtccttgggttaaaattaagaaccctaaatcaggcaaagatattattgttaaagatgttatcgcagatgcattcttacaacaaatcctgttacgcccagccgagtatgatgttatcgcttgtatgaacctaaatggcgactatatttctgatgcattagcagcacaagttggtggtattgggattgctcctggcgctaatattggtgatgagtgtgcattatttgaagcgactcacggaacagcaccaaaatatgccggacaagataaagttaacccaggctctattattctctccgcggagatgatgttacgccacatgggttggacagaagccgctgacttaatcattaaaggtatggaaggcgcaattgccgctaagaccgtcacttatgattttgaacgtcagttagaaggcgctaaactgctgaaatgtagcgagtttggtgacgcgattatcaaacacatgtaa

SEQ ID NO: 296223 - DNA, 630 bp, Proteus mirabilis
atggcaaatcaatttaacaatagatcgaaactacgcaaatctcacgcactagcaggacaaaaaaaaccttctcgccctagaggtgagcgtaaagtgattatctttaataaaccctttgatgtccttgtgcaatttaccgatgacagcggtagaaaaacgctaaaagattttatccccattcctgatatttatgcggcaggacggttagatagagatagtgaaggtctgttagtattaacaaatgatggcaaattacaggccaaattaactcaaccaaataaaaaaacagggaaagtctactatgctcaagtagaaggcattcccacagagatagcattacaacaatttcgtgaaggacttaacctaaaggatgggaaaacactacctgcaaaaattgaaagggtagaacagccaacgtgggtttggacgcgatttccacctattagagagcgtcaatctattccgactagctggttaaaaatcaccttatttgaaggaaaaaaccgccaagttagacgtatgactgcccatattggttatcccacattacgcttaattcgttttagcatgggaaatattaccttggataatctattaccgggtcaatggaaggagattaattttgtttaa

SEQ ID NO: 296224 - DNA, 453 bp, Proteus mirabilis
ttgtttaaaccacatgtcactgttgcttgtattgttcatgcaaacaataaatttttagttgttgaagaaacggtaaatggcaaagccacatggaatcaacccgcaggacatttagaagcaaatgaaaccctgatccaagcggcacaacgagagttatgggaagaaaccggtttaaccttgccggtacaatattttttgaaattacatcagtgggtggcaccggacaatacgccatttttgcgttttttatttttgatagaagcaccagaacaattagccacacaaccacatgacgatgatattaatggctgctactgggtgaccgcgcaagagataattaatagccaacaattacgttcaccgctggtaaaagaaagtattctttgttatcaacaaaatgaacgttatccactctctttactggatagctttggttcaacatttgcctcttaa

SEQ ID NO: 296225 - DNA, 1104 bp, Proteus mirabilis
atgtcagataacagccaaaaaaaagtcatcgttggaatgtccggtggcgtagattcatccgtctcagcctatcttcttaaggaacagggatatcaggtcgttggtctgtttatgaagaactgggaagaagatgacgatacagaatattgctcagcttctgccgaccttgccgacgcgcaagccgtgtgcgataagcttggcatagaacttcacactatcaattttgccgctgaatattgggataatgtatttgaacactttttatctgaatataaagctggccgcacccctaatcccgatattctatgtaataaagagataaaatttaaagcgtttttagaatatgcagccgaagatttaggggccgattatattgcaacgggccactatgttcgtcgccgtgatattgatggtaaaagccaattactgcgcggtgttgataacaacaaagatcaaagctacttcttatatacattaagtcatcagcaaatcgcccaaagccttttccctgtcggtgaaatggaaaaacctgaggtgagaaaaattgccgagaagcttgatttagcaaccgccaagaaaaaagactctacggggatctgttttatcggtgaacgcaagtttactgatttcttatcgcgctatttacctgccaaaccgggtcctatcgtcaccgtagatggcgaaaccattggtgaacatcaagggttgatgtaccacaccttaggtcaacgtaaaggtctgggtatcggtggcacaaaagaaggtagcgaagatccttggtatgtagtcgataaagatgttgcaaataacatattaattgtcgcacaaggtcatgaacaccctcgattaatgtccgtaggcttaattgctcaacaacttcattgggtcgcaagagagcctattaccgaagcttttcgttgcacggtgaaaacacgatatcgccaagctgatattccgtgtacagtaacaccattagatgaagataaaattgaagtccgttttgactatcctgttgctgctgttacaccggggcaatcggccgttttctatcaagacgaagtctgtttaggtggcggtattattgaaacacgtattcaggagtag

SEQ ID NO: 296226 - DNA, 528 bp, Proteus mirabilis
gtgaataaagatcgtgaaagaacaccttttatgattttaccacctttgtatcgtttagaaccctctagtgaatatagctggaatattcgtcgtattagtgaaggttctaatgatatggcgttaccaaaagacagagaaagcttattttggattgcatttagagcagttcctcttaaggatagtaaaattgaggaaaagaaatctgtgtcactaacgataacacctactttttttttcaaattaatttatagacctgagtcaataatggcattggaaaataaagatgttattgatgatgttattgttgaaaaggtaaatgagaacatagttataaataataaatcaccactttatatgacttttgaatatttaaaagtgggcgaggttgaaataaaaaatgatggtagagcaataacggtaaaaccattctctacagtatcagttgaagcacctaaaaatgttcaaggaaagctgagttggagattcaatgatgaaaatttctttataataaaagataaagaatattaa

SEQ ID NO: 296227 - DNA, 2544 bp, Proteus mirabilis
atgaaacctatgttgcataaaattctttgtatcaatctttgtgttttatctgtggcaatgccgaaaatcgcattgtctgataattactttgatccgaatcttttactaaataataacgacaatattgatttaagtaatttcagcaaagaagactacattgcaccaggagactatagtttaagcgtttttgttaatactgagccattaggtgaaaagacaattttatttaaagcaaacaaagaaggtaaagttgtcccagttgttacaatcaaagatttgaagctatttggggttaatgtttcagcgataagtaagctaagtgatctacccgaagatacagaaattgataatatagaagcgtatattcctaattcaaggctaacctttaatattaataaattaacattaaatgcatcttttccccaagttaatatggataagagctttcaaggtgaaattcccgcagaattattagatgatggcgtgagtgctgttatccttaattatatggctaactttattaaaaatagaacgacaggtgattattcaagccataataacaactttttcttgaatcttaatggtggtgtaaatataggcccttggcgtttaagaacaaattattcttataataattcgagtggttcagatcagcgttcttcaagtgattctgaatttagtaatacctatgtaatgcgaaatatcgcttatttaaaatcaatgctgaaaattggtgaaattaccactggagggaatattttttcaagtattccgataaaggggatttctttagccactaaccaacaaatgttaccaagtagtatgcgtggatatgctcctgtggtaagaggttttgccaacagcaatgcaaccgttaccattcgtcaaaatggtcaaattatctataaatcttttgttgctcctgggaattttattattaatgatatttcctccggcggtattggtggggaccttgaaataaccattgaagaagaagatggctctaagcgtgtatatacacaagcctattcatcgctgcctatcatgttgcgtgaagggcaatttgagtatgaatttagtgcggggcaatatgatggtggtatcacgacagattccaaaaaaagtaaatttgctttaggaacgtttagttatggtatcaataactcaattactgcatacggtggtttattaattgccaatggttatacctctggtgttatcggttctggtgtttctcttgggttattaggtgccttatctgcggacgtcactctcgccagagctaatttggataaaacttatcacggtcaatcatatcgggttcgttattctaagagtttattatctacagggacttcgtttgatttaaccgcattacgttattcaactaaagattactatgactttagtgattacaataactcaggttatgaattgcgagaaggtattgcaccttggttaagccaacgtcagaaatctagttttcaaacctcaatttcacaatcattaggaaaatacggttccatgtatcttcgtggtgaaaccagccgttattgggggaatagccgtgttaataatagtgtcacattaggctataacactgttctgaaaggtattgcatttaatatagattattctatttctcgcctaaaaagtgatgacaatacatggccagaaaatagacaaattaattttaatatgaatatgccactgagtgtattctcaaatgcaagtggcttgcaaaatatgaatgcaagctatcttctgacacatagcaatgatggaagaacttcgcaacaagccggtttaaatggctctgcatttgataatcaactctcttatggtatctaccaaaatacagataacaaggcagatagttatagtggcaatatgaatatgagttattcaggaagtaaaggaacgctttctgggggttatagctatgggaaaaatagaaatagctttaatggtagccttattggtggtgttgttctgcactcaaaaggagtgacattatcaaggatgttaggtgacagtattgccatagtgagcgcagataaagcaaagggcgcagaaatcaatggaaatgtgaaaatagatacatttggtaatgccattgtccctcaattaagtccttatgatacaaacagtattagcgtaaatgtcagcacattacctgatgatgtgacacttaatgaaacgtcaatgaaagtctatccaaccgaaggggctattttagcaagacaatttcaaactaaagtgggttatcaggttatttttgatataaaaacagcggaaaatatagcgataccttttggtgcaatggcttctttgacagatgaaaaagataaacaggtaaataccggtattatcgatgcctatcaatctctttatatgagtgggttacccaatgatgggaatgtcgtggtgacttggaataacaatacgggcaaacattcatgtcaatttagttattcagagcttgaaaagattgaagtatcacaacaaaacccaataagaatggtgaccgttaattgtcaataa

SEQ ID NO: 296228 - DNA, 246 bp, Proteus mirabilis
atggaattaaccggcactaaagcgcaggaaagcggttatgtggtgacttcgctaactagccaacaacaaaatactatttgtgaacctaattccagtgatgcgttaagttatgtcggtagtaataaattagttaatgctatgcccaaagtttttaatcaaacgttatattttaatctttgtgcaaatagtaatattcccgcagatagatactcgggcagtgtcgatgtagcgattttagtcgagtaa

SEQ ID NO: 296229 - DNA, 1029 bp, Proteus mirabilis
atggcacacattgtaactcataatcacaccaccagagaagtctggttaacacaactcgcgcaggcaatcagtgatcctgttgaattactccaacttttagcgctggaacatcacgctgaactacaacggggtgctcaggcgagacgactttttcctttacgggttccccgtgaattcgttgcgcgcatgaaaaaaggcgatcctaacgatccattacttttacaagtattaactgcacatgctgaatttaccctaacgccgggattctctacggatccattagatgagcaacaaaatgcggtgccgggtttattacataaatatcagaatcgtgcattgcttttggtcaaaggtggttgcgctgtcaattgccgttactgtttccgacgccattttccttacgaagataacaagggaaacaaagctaactggcaaaaggcaatagagtatatcaaaaataacccaaaactcgatgaaatcatcttttcgggtggcgatccgctgatggccaaagatgacgagctagattggttaattactcagctagaagccatcccccacattaaacgtttacgtattcactctcgtttacccgtggtgatccctgcgcgtattactcataggttatgtcagcgcttacagcagtcacgtttacaaaatattatggtattgcatatcaatcatgcaaatgaaattgatgatgcgttaagagaagcttgcttaaaactaaaaaatgcccatgttacgctattaaaccaaggggtattactgcgaggggttaacgacaatgcccaaacccttgctgatttaagtcgtgcactatttgacgcaggcatcatgccttattaccttcatgtgctagataaagtacagggagcagctcattttatggtaccagacagtgaagcgcgcgaaataatgaaatcattaatgagtcttgtctctggctatatggttcctaaactcacgcgtgaaattggaggagagccaagcaaaaccttgcttgatttaggcttacgacaagtatag

SEQ ID NO: 296230 - DNA, 567 bp, Proteus mirabilis
atggcttcttataataccaacgattttcgttcaggtcttaaaatcatgttagatggcgagccagccgtcattactgaatgtgaatttgtgaaaccaggtaaaggtcaggcatttgctcgtgtgcgtctgcgtaaactgatttctaacaaattactggaaaaaaccttcaaatctactgattctgctgagggtgcagatgtcatggatatcaacttaacttacctgtacaacgatggtgagttctggcatttcatgaacaacgaaacctttgaacaattagctgcagacgaaaaagcggttggcgaaaatgctaaatggttgattgaccaagcagagtgtatcgttacactgtgggataatcgtcctattgctgttgttccaccaaactttgttgagttagaaatcgttgataccgatccgggtctgaaaggggatactgcaggtacaggcggtaaaccagcaacattaagcactggcgctgtggttaaagtacctctgttcgtacaaatcggtgaagtgattaaagtggatacgcgttctggtgaatatgtatcacgcgtaaaataa

SEQ ID NO: 296231 - DNA, 942 bp, Proteus mirabilis
atgaaatacataaaaagtattgggacactctcgctattagcagccgctgttcttttaagtggttgcgatatggcgttaatgaatcccaaaggcgctatcggcgctgagcaaaaaacattaatcctcattgcgcttggtttaatgttgattgttgtgataccggtaattctgatggtgattgttttcgcttatcgctaccgtgaatccaatactaaagcaacttatcgccctaattgggctcactcaaataaaattgagcttgtcgtgtggaccgtgccgattatcattatcgtgatattggcaaccatcacatggaaaacaacccatgaacttgatccctataaaccactagtttcagatgagaaaccggttaccattgaagtggtttcaatggactggaaatggttgtttatctatccagaacaaggtattgcaaccgttaacgaactggctttcccaaccaatgttcctgttaatttcaaaattacctctgattctgtcatgaactcattctttatcccgcgcttaggtggacaaatctatgccatggctggaatgcaaaccaaacttcacttaattgctaatgaaccaggtgaataccaaggtatgtcagcaagttatagcggacacggtttctctgacatgaagtttaccgccattgcgacacctgatcgtgcaggctttgatgcatgggttgcaaaagtaaaacagtcatcagatacgttaaataccaccgctgcatttgatgaacttgctaaaccaagccagaaaaatccagtgacctactattcaagcgtgaagccgatgttattccaagagaccatctctaaatttggtcatacaggtcatggcgctcacaccggtagcaatcagactgaacactctgatgcaacaatgaatatgaacatgagccacgcggcacatgcaggagcagaggaataa

SEQ ID NO: 296232 - DNA, 1983 bp, Proteus mirabilis
atgttcggaaaattaactctcgatgcaatcccgctacaagaacccattgttgtcgtaaccctaatcggcatcattcttggcggtcttgctgttgttggcgctttaacctatttccgtaagtggaaatggctatggagcgaatggttaaccagtgttgaccataaaaaaattggtattatgtatatcatcgttgcaatggtcatgatgttccgtggctttgccgatgccattatgatgagaagccaacaggcactcgcctcagcgggtgaagctggtttcttaccacctcatcactacgatcagatttttaccgcacacggcgttatcatgattttcttcatggcaacacctttcgttgtcggtctgatgaaccttgttgtacctttacaaattggtgcgcgtgatgtggcattcccattcctaaactcactgagtttctggttctttgtcgtcggtgtactgcttatcaatatctctttaggtattggtgaattcgcacaaacaggttggttagcttacccaccactttcgggcttggagtacaatcctggggtcggggtcgactattggatatggagtttacagatatccggtattggtacgcttctaacgggggttaacttcttcgccactatcctgcgtatgcgtgcaccaggcatgacaatgatgaaaatgccagtgttctcatgggctgcattatgtactaacgtactgattatcgctgcattcccaattttaaccgtcactatcacactactgacgttagaccgctatcttggtacacacttctttaccaatgatatgggcggtaacatgatgatgtacatcaaccttgtttgggcttggggtcatccagaagtttatattcttattctgccagtctttggtgtgttctctgaagttaccgcgacgttctctaaaaaacgtctattcggttatacctctttagtcggtgcgaccgttgttatcaccgtcttatcatttatcgtttggttacaccacttctttaccatgggctcaggtgccaacgttaatgccttcttcggtatagccaccatgatcatcgctatacccacaggggttaaaatctttaactggctgtttaccatgtatcagggccgtatcgagtataaaagccctatgctatggacaatcggtttcttagtcaccttctcagtaggggggatgactggggtactattagcggttcctggcgcaaactttgtattacataacagcttgttcttaatcgctcacttccacaacgtcattatcggtggtgtggtgttcggttgttttgctggtatgacttactggttccctaaagcatttggcttcacgcttaatgaaaaatggggtatccgcgcattctggttctggtttatcggtttctttatggcctttatgccactgtatatccttggctttatgggtatgactcgccgtttaagccaaaatatcaacccagaattccacccaatgctgatggttgctgctggtggtgccgctctgattgctcttggtattgtttgccaagttatccaaatttacgtcagtatccgcgaccgccacttaaaccgtgatttaacaggtgatccatggggtggacgtactctggaatggtcaatttcttctcctgcacctttctataactttgccgttgaaccgcaagtgaaagctcgtgatgagtggtgggatcagaaagaaaaaggtactgcttatcagcgccctgcaaaatatgaacctatccatatgccaaaaaataccgcagcaggcgtcattatctctgcatttagcttagtgtttggctttgccatgatctggcatatctggtggttagcgattgttggtttcgcaggaatgatagtcacttggatcgcgaaaagcttcgatacagatgttgattactatgtccaagtacctgaaattgaaaccatcgagaataagcattatgaagaactgaaaaaagcaggtgtgaaataa

SEQ ID NO: 296233 - DNA, 612 bp, Proteus mirabilis
atgtcaactcaaactttaaataacgcaaacgcccatgagcatcatgggcaccacgatgcaggagcgacgaaagttttcggcttctggatctatctaatgagcgaccttatcctgtttgccagcttattcgccacttatgcggtgcttgttaacgggattgctgatggtccttcaggtaaagaaatctttagcctgccttttgttttagttgaaaccttcttactactgtttagtagtatcacttttggtttcgccatgcttagcatgaataaaggtagtgttagccaagtcaatctgtggctattcgttaccttcttattcggtttaggcttcgtggtaatggaagtgtatgagttccatgaacttatcgctgaaggttatggcccagatcgcagtgcattcttatcggcattctttgccttagtatcaacacacggtctgcacgtaacagcgggattagtttggattattattatgatgatccaagtatcacgccgtggtttaactgatgttaatcgcactcgtttaagttgcttaagcctgttctggcacttccttgatgttgtctggatctgtgtgttcaccgtagtttatctgatgggagcgatgtaa

SEQ ID NO: 296234 - DNA, 333 bp, Proteus mirabilis
atgagtcatccaaatacttctccttcaggcgcaagccacggcagcatgaagtcctatctgattggctttattctgtccgttatcctcaccgtgatcccattttggatggtgatggaaggaacagctacaacctcaactatcttatggacagtcgttggtatggccgtcgtacagattgttgttcatttagtctgtttcttacatatgaacacgtcctcagaagagcgctggaacgttatcgcattcctattcaccttgttgattatcggcattgttgtgattggctcactgtggattatgtacaacctgaacatcaatatgatgatggattaa

SEQ ID NO: 296235 - DNA, 939 bp, Proteus mirabilis
gtggattatgtacaacctgaacatcaatatgatgatggattaagagttgtcgctatgattaagcaatacctacaagtcaccaaaccaggaattattttcggaaatttaatttctgtgataggtggtttccttctcgcctcaaaaggcgagattgactaccccctatttttcgcgactctacttggggtgtctctggtcgttgcttctggttgtgtttttaacaactatattgaccgtgatattgaccgtatcatggaaagaacgaagaatcgtccattagttcaaggattaatcgacccgcaaattagccttatttatgcctcagtattaggtattgcaggtgttgtgctgctctatgtagcagccaacccacttgcaatgtttatcgctgtattcggctttattatttatgttggggtttatagcctctatatgaaacgtaaatctgtttatggcacactgattggtagtttatcaggctctgcaccaccggttatcggctactgtgctgttagcggtgaatttgatgcgggtgcagcaattttattacttatctttagtttgtggcaaatgcctcactcttatgccattgcgattttccgttttaaagactaccaagcagccaatatccccgtattacctgttattaaagggatctcagtcgctaagcgccatattattctctatattctggcctttatgattgcaacgctgatgctaactttagtgggatatgcagggtataaatacctgattgttgcctctgcagtcagtatctggtggttgggcatggcattatctggttataaagcaaccaatgataaagtgtgggcaagaaaattatttatattttctatcattgccattacatcattaagtgtaatgatgtctgttgatcccaccagttcaacagaaacggttctcgcttatctgagataa

SEQ ID NO: 296236 - DNA, 684 bp, Proteus mirabilis
atgcatgacaatgcggtttctcgacttcgtcaatatcgagtttctatctctacacgcccatataaagccagaggctttcgtgttaaacgatgcactttttgtttattacctgaaaaacagtgtctgtgtgacaccatcattcatcaaaccgcgaaaagccgtttttgtttaatgatgtacgatacagaagtgatgaaaccaagtaatacaggaaaattaattgccgatgttttacccgatacacttgcctttttatggtcacgtaccgagcctgaaaaagccttacttgatgcaattaatgatccgcatcgacaagcttatgtcgtcttcccagacagctatgcttctccttcgcgaaaagtttatcaccagttacctgcaaacagtaagccaccgctatttatcttactagacggcacttggacagaggcgagaaaaatgtttcgtaaaagcccctaccttgatgcattaccactgttttcaattaatgaagccagtaaatgtgactacatgctccgtcaagcagcaagagaagagcaacattgtaccgctgaagttgccgcttctattttagccaatgtcggcgatgatttagcgtcacaacagcttttttctcattttagttactttcgtcaacaatatttaattggaaaaccagacagacgtcaggcaaaagaagagtaa

SEQ ID NO: 296237 - DNA, 2661 bp, Proteus mirabilis
atgagccagcgaggccttgaagcactattacgtcctaaatcaattgcggtgattggcgcctctgacaaagtaggcagagcaggaaccacaatgatgaaaaacttactcagtggtgggtttaatgggccagtctttccagtcaatccgactcgcaattctgtttctggtgtttttacttatccttctattgataaactcccccaagtaccagacttggcaattatctgtactcatcatcgccgcaatcttgaacttcttgagcaattaggtcaatcaggctgtaaagccgtgattgttctttcagcacaatcagaacaatttcaagctattaagacactctgccagcaataccatattcgcttgttaggtccaaatagtttaggtttattagccccttggcaaggcttaaatgccagcttttcaccccttcctgtaaaaaaaggcaaattggcatttatctcacaatcagcagcagtagctaacaccatcctagattgggcgtattaccgcaatattggcttttcctattttattgcattaggtgataaccaagatatccaagttgatgatttactggattttctagcaagagatagtaaaaccagtgcaatattactgcatttagagcatattcatgatgcaaggcgctttatgtctgcctcacgtagtgcatcacgcaataagccaatactagttataaaaagtggtcgaacacaaaaagcccaattactcttaggcgatacgccaagttatgatgttgcttatgatgcagccttccaacgcgcaggactgttacgcgtacaagatactcatgagatgttttcagcggttgaaaccctcagttatatgacgccattaaaaggcgagaaactgatgatcatcagcaatggttcagctcctgcggcaatggccgtagatgaattatttttacagtcaggcaaattagcacaattatctgctgatactcagcaacaattgcaagccattgtgcaagacacatctgctattcgtaatccgcttaatttaggtgatgataccacggtagagcgctatattagggcagtgaattgtctattagatagccatgatcatgatgcattactcttaattcatacaccaagtgctattgcaccaagtattgaaacagcacaaaaagttattgaagcaattaataagcaccccagaagaaaatggctcactctatttactaattggggaggcgaatattcatctcaacaatcacgtaaattatttagtgaagcgggtattcccacttatcgcactcctgaaggcgcaattaccgcttttatgcatatggtggagtaccgccgaaaccaaaaacaactaaaggaaacgccggcattacctttagaaataaaaatgaacacccagcaagcccatcgctgtattgaagacgctctcgacaaaaaacagtatcgccttgatacacaccaagtccagcccattatggaagcctatggctttaatactttaccgacttggattgctcataatgcacaagaagcggtcagtattgcagaaaaaataggttatccggtcgcgctgaaattacgctcccctgatatacctcataaatcggaagttcagggggttatgttatatttaagagacagcaatgaagttgaatcggctgcacatgccattatcgagcgggtaagcgagctttacccacaagcgaaaattcaaggactattagtacaaagtatggcaaaccgtgcaggctcccaagagctacgtgttgcgattgaacaagaccccatctttggccccctaattctattaggagaaggaggcgttgagtggcaaatcgaaacaaaagctgccgttgctttgccaccacttaatatggcgctagctcgttatctggttattaatgcaataaaaagtggcaagctccaacctagaagtgcattacaaccactgaatatcctaagcttaagccattttttggtgcaagtttcacacttactattagattgtccacaaattgtcaggctcgacatacatccgttgttagtaacgggtaatgatttcactttgttagacgtggctatggagctgtcaccaatcgaaggcgatcctcatcaaaaactttctattcgcccgtatcccaatgaattagaagaaactttctttttaagagatagcaaaccttgttttattcgacctattttgcctgaagatgaacctctactaaaaacctttattaatcaagtgaccaaagaagatctctattatcgctattttagtgagatcagcgaatttacccatgacgatctcgctaatatgacacaaattgattacgatcgtgagatggcttttgtcgccattcgccaccctcacgatgatccagaaattattggtgttgctcgagctatggcagatcctgataatcaacaggctgaatttgctatcttggtacgctctgatttaaaaggtaatacactgggtcaccaattaatgatgaaattaatcaactatactaaggcgcatggcatcaaacggttaactgccattaccatgcctgaaaatcgtaatatgataagtctagctaaaaaattagggttttctgtggaagtacagtttgatgaaggaatagtcaatctcaacttgcttcttgatcctctcagtgatgtatag

SEQ ID NO: 296238 - DNA, 1359 bp, Proteus mirabilis
atgttgtctaaactaaaacttgctaagcatcaacaacaccttgcacaactgcctaaattagctcagtcagttgctgatgttgaaacgctttatcagacatccgcgtttcgcagcaccttattgaaatatatcgcgcaagctcaaaaagagatttttattaccgcactctatctagaacatgatgaagcgggcgaggagatccttgaagcactttataccgcaaaacaacaacgtcctgaactttccatcaccgttattgttgattggcatcgtgctcaacgcggtcgtataggtgtctctgctgatgcaacaaatgcagattggtatcataaagttgcacaacagcatcctgatgttgacgtccctatttatggtattcctgttaatacacgtgaagcattaggcgtattacatctaaaagggtttatctttgatgatacggttatttacagtggtgcaagtattaataacgtctatttgcataaacttgataaataccgttatgacagatatcacatcattcataatgctgaactcgcaaacacaatgaagcaattcattgtcgatagccttttgcaatcagatgctattcaacgtcttgattcagaagagagagtgcgttgtgcagaaattaaaaattgtatccgtcaattccgctttaatttacgcacacatgatggttacgatattaaaggaaatgcctcaaataatcagttaacagtgactccattggtcggcttaggcaagaaaaatatcttgaataagactatttcccacctcatggccgtgactgaagaaaagttggttatttgtacaccttattttaatttacctgctattttggtgcgccaaattagtcatttactgagaaatggtaaacaggttgagattattattggtgataaaacggcaaatgacttttatattccgccagaagagccctttaaaataataggtgctttgccttatttgtatgagattaatcttcgtaaattcacccaacgttttcaacgttttattgataatgaccaattaacagtaaggctttggaaagacggtgataatacctatcatttaaaaggcatgtgggttgatgatgagtggcaattaattacaggtaataatctaaaccctcgagcttggggattagatcttgaaaatgccatcttaattcacgatccacatcatgaattacatgaacaacgccataaagagttagcttgtatcagagaaaaaacactgattgttaaaagctatcaacaattagagagtattaaattttaccctctaaaagtgaaaaaattaattaaacgtttacggcgtatccgtgttgatagactaattagtcgtatactctaa

SEQ ID NO: 296239 - DNA, 348 bp, Proteus mirabilis
atgaaactaaagcgtaatagcttctatctgatagttttactttcactcgtcacgttaaatggttgtcaatcctttcatgttgccaatgataattggcaaggaaaagataaagcacagcattttttattttctatggtagcctccgcaggagctaatgcttacgcagatcatcagaactattcttatcgagaaggattagttattggcttatctttttcaataagtttaggcgtcgctaaagagctttatgatagtcgaccacaaggtacaggatggagctggcatgattttgcttatgatgtggcaggagccgcggctggcagtttactctatcagcaattgaaataa

SEQ ID NO: 296240 - DNA, 528 bp, Proteus mirabilis
ttgctaacgacactacatggctttaaaccgagttttgatatggatgtggtttccgaccgtattttgggtattttattaggcaatattgttatgtatgtcatttttactcgagtctggcccgcgagtatcgtcaatacaatatacaaacagctcgccatgattttagatgactatacaaagttaagatgctctgccaataaaagtgagtgtttagatttagtcgcctctattaatgagactattgcacaatctaaagataatattgatttactgctgtttgagagaaaagataaagaaagaaacaaagtactcaccttgttttttaaacagtcattaagcaagatttcttacatcagtcgccatagttatgctgataggtttatttttgatgataatggagagtattccgatacactgcctttatctccagatgattttaaaaaaaatgtcttaactgaagaaataaaaatgttgcccatcaatgaaagagaacaagtatttaaacagttaataagagaaaatagatga

SEQ ID NO: 296241 - DNA, 399 bp, Proteus mirabilis
gtgatctttgaaatcgccagaacaataatacattatggtttacattttttagcgccaatagcactcgcttatctattttggggtaaaaactggcggcttgctgcgcttcttatgatgagtacgatggcaatagacattgaccatttgtttgcaacgccaatctttgatcccaatcgttgcagtgttggttttcatccattgcatactctatgggctgccattgtctatatcgttttatggtttattccttcttggaaatggaaagccattgccgttgggtgcttatttcatctattaaccgattctgttgattgttatttaggtggtttaaaacctgatatggctataacaataagctgtaataaactttattcgccagaaacgccattcgaatattaa

SEQ ID NO: 296242 - DNA, 1353 bp, Proteus mirabilis
atgtttattggctttgactatggaacatcaaattgttctgtggcaataatgaaagaggggaaaccaacgctattacctttagaaggtgagaatgtttatattccatctactctttgtgcgccaacccgtgaatctgtttccgaacatttatttcgccacttaaatattaaacctaccaactctattggcgaacaactattaagaaaatcaatcgcgtttaatcgtgatgaagatattgaattagtgcctgaggatattgttttcggtcaggcagcattaagtttgtatctaaaagatccccgtgatgtttattacgtcaaatcgcctaaatcttttcttggtgcctcaggcttacatgagatacaaatcagcttttttgaagatttagtgtgcgccatgatggccaatataaaacaacaagcggaaaaaagcacccaagcaaccattactgatgccatgattggtaaacctattaattttaatgggttagggggagaggctgccaataagcaagccgagcgtattttaattaatgcagctaaacgggccggctttaaacaggttttatttgaatttgaaccagtagccgcaggtttagaatatgaatccacattaaccaaagaccaaacagtcttggtagttgatattggtggtggtacaacggactgctcattgattcaaatgggccctagctatcggggtaaaaccgatcgtgccagtacactattagcgcatagtggacaacgtgtgggtggtaatgatcttgatatctacctagcttttaaacagctaatgcctttatttggcatgacagggctaacttcatcgggcataaaattgccgttaaaacaattttgggatcctattgccatcaataatgttgaagcacaaaaagatttttattctcaacaaaacttagcggcattaaatcaactacgtcgtgatgctcaagagccagaaaagataaaacgcttaattgaagtctataatgaaacactaggatatggcattgtccgcaaagcggaagaggcgaaaatggcattatcagattgccatacctatttagccagcatcgcgttattaagtgaaacattagaaaccaatatcactcgccagcaaatggttgaagccattggatcccctaaagataaaatgattgatttggtcaatgatgccgtacaacaagggggcgtggtacctgatgtggtgtttatgacgggaggctctgcgcgttcaccgattttatgtcaagctatcgagcaacagttacctaatgtgcctattgtaaaaggtaatgatttcggctcagtaaccgcaggattagcccgttggggtgaagtttgttttaaatag

SEQ ID NO: 296243 - DNA, 1026 bp, Proteus mirabilis
gtgtaccgcttccaaaatgattataatgaaattgcacatcctgcggtcatgaaggcaattacagatacagtaggtcaacgttatgatggttatggtatggataccctttgtcatcaagctaaagaattaatcaaacagcgaattaaacaacccgaagcgcagatccatttttttaatggtggcactatcactaatttaaccgctatttctcactttttacgcccacatcaagcagtaatttctgtcagcaccgggcatattgcgactcatgagacgggagcgattgaggcaacaggccataaagtgatcaccactttttctgctgatggtaaattgaccccagatttattgaagccgatcctcgctgaacataacgatgaacattgggtgcaacctaaacttgtttatataaccaatgccactgaaattggtacggtatatcgtaaagccgaattacaagcgttacgcgaattttgtgatgcacataatttatggttatatcttgatggcgcacgtttagcgacagggttgatgtctgataacagcgatctaacgattgaagatatcgcacacttaactgatgctttctatattggcggcacgaaaattggtgctatgtcagcagaagcattagtgatttgtcatcctgcattaaattctgattttcgctttagcttaaaacaaaagggcggattacaggcaaaaggttggttattaggggcacaatttgcggcgttatttagcgacgatctctactttaaattaggtaaacatctcaatgagatggcctcacaattagccgcattctttattgagcatggttttgattttttagcaccaccagaatctaaccaagtgtttgtcattttacctaatgacattgcagaaaagctaacgcagcagtttgtttttcatcgcatattacttgacgatccacagctaagctgtttgcgcctttgtacttcttgggcaacaacacaacaagatattgatgattttaaagttaaatttcttaaacttatttaa

SEQ ID NO: 296244 - DNA, 264 bp, Proteus mirabilis
atgaaaaagctgactcttcaagagatgacagatgcccaacagatgcgcgttagaaccaggatcggtcaagagagaaagaaattggggcgtgaattaaccaacgccgaaatgaataaagtaaaagatgctattattaccgaaatctccctcgaagtagaaaaagccagcaaaaaagccctttcccagaagaaaaaacagaaattagtctctagtgatgaaacctatagctggtctgcccaaaaccatcgtcgcgggtatcgttag

SEQ ID NO: 296245 - DNA, 1527 bp, Proteus mirabilis
atgtcagactatctatcatttttactgggaattgttcctttagccgttctgatttttatgattttaaaaatgaaatcggccgttcatcacgctgtcctcgtttcgctaattatcactgtggctctcgctatttttcattggaataacaccctacaatttgcctctgtatctgtactttatggtgcggtaaagggattatggccgattattatcgttattctggcggctatttacagctataacctaatgctaaaaacagggggaatggaggtattaaaagacgtattagcggggatcagcgatgataaacgcgtacaagttttacttatctcttggtgttttggcggttttttagaagcagttgcaggttatggtacagcagttgctattcctatcggtattttaatcgcactaggttttgatccctttaaagcagctgtcgcttcactagtcgcaaatacggtacctaccgcatttggtgccgttggtattccagtgtctattttggcacaaaataccggccttgatgtattggtgttaagtaaaaccattattatccaacttggtttattcaatattctattaccttttgtcattgttgctattgctggtggtggtattaaagccattaaaggtgtcggctttattactttaatgtgtgggatcagcaccttaatccctcaatatattgtcgcagctaatttaggtgcagaattacctgcctttgcaggaagtctagtcagtctgattgtggttattttcttggctaaacgcatgaaaacaggccatgataaaagtaaacagccaacaaaacactcagctaaagagctattagtcgctagctctatctatctgtttacttttatttttatcttagcctgctctccgctattccctacaatccaaaccgcagtaggaactattgcaactaaaattccttttgtattaagtgatactcaaactgaatatcaaactattgcttggttaagtacgcctggggtattgattattttagcgagttttgttggtggcactattcaaggtgcaagcctttcaacgctcttttctgtattagtaaaaaccacaattcaattaaagaactccattattgccattatggctattgttgcgatggcaacggtaatggatttcagtggcatgattggtagcattgcggaaacattagttaactttactggcgctggatttatctttattgccccagtcattggtgcactaggaacgtttgtaaccggaagcgatacaaactctaacgtactatttggcaagcttcaaaccagtgcagcggcaaaactccatgttgatccctttattctcgcagcggctaatacctctggggcgactggcggtaagatgatttcaccacaaagcatcgcgatcgccgtttcggcgaccaaaatggatgggcaaagcagtgccattatgcgagaaacattaaaatattgtattgcctatatcatcattctaggtgccaaaatcggcattatttatcacctaatgaattaa

SEQ ID NO: 296246 - DNA, 720 bp, Proteus mirabilis
atgaaagttaatttttatgcaacctgtcttggtgatgtgctaaaagcagattcggcacgagataccgtattattgctcgaaaaattaggttgcgaagtattatttcaagagcgccagggttgctgtggtcagccagcacttaatagcggttatgttaatgatgcaaaacccgcaatgaaatcattaattgagacattagaagttaatgattatccgattatttcccctgcaggctcttgcacttatgcgattaaaggctatcccagctatcttgccgatgagcctcaatgggcgcagcgagcccaaggtgtggccgatcgtttaattgatcttaccagctttatcgtcaacaccttaggtgtggttgatgttggcgcccgccttgtgggtaaagcggtttatcatccctcttgtagtttaacgcgaaagttaggggttgttagtgaacctttaaccttattaaaacatgttgaaggactcgaaatgttacctttcgccaattcagaaacttgttgtggttttggcggcaccttctcagtaaaaatgtcagaaatttccggtgaaatggtcactgaaaaagtaaaacatatcatggaagtcagccctgattacgtcattggtgcagacaccagttgtttaattaatattcaaggccgtttaagtcgtgaaaagcgtcctgtcaaagtgctgcatattgcacaagttttaatgagtcaataa

SEQ ID NO: 296247 - DNA, 1422 bp, Proteus mirabilis
atgtctattaaaaccagtaatatcgattttagaccacgcttagcgcatgaaatgaatgataccattatgcgtaacgccgttgttatggcacaagagcgcattggagccaatcgccaaataatggtaaaagagttaggtgattgggaagcgtggcgtgatcgcgcagaacaaatccgtaaccatgttcttgaaaacttagacgcttatctttatcaattatcagaaaaagtgactgaaaacggcggtcatgtctattttgccaaaacggcagaagatgcgacacgctatatttgtaacgttgccaaacagaaaaatgccaagaaaatcgttaaatcaaaatcgatggtaaccgaagaaatcggtatgaacaaagccttacaaaatgaaggtattgagattatcgaaaccgaccttggtgaatatattctgcaactggataacgatcccccttctcatattgttgtaccggcgatccataaagatcgctaccaaatacgtaaagtgctaaatgaaaaattaggttatcaaggtagtgaaaccccagaagatatgaccctttttatcaggcaacgtattcgacaagattttctttctgctgatattggagtcactggttgtaactttgcggttgcagaaacaggctcagtctgtttagtaactaacgaaggtaatgcacggatgacgaccacattacctaaaacccatattgccgttatgggaatggaacgtgttgcgcctacttttgaagaagtcgatccactgatcacgatgttatgtcgtagtgcggttggctcacgcctaaccagttataacacttgggtaactggacctcgtgaagcgggtaatgttgatggccctgaagagtttcatttagtgattgtcgataatggtcgctctgaaattttaggctcacaatttaaagatattctacgctgtatccgttgtggagcctgtctaaacacctgtcctgcttatcgtaatatcggtggtcatgcttatggctctatttatcccggccctatcggtgcggttatttcgccactcttaggaggctataaagattttcatgacttaccttatgcctgctcattatgcaatgcatgtaatgtggtctgtccggtcaaaatccctttagcacaattgatccttaaacatcgtcgagtcatggcggaaagtggtttaacaccaaaagctgagcgtcgtgtaaccggtatgtttaattacattaatgcgcaccccacgctttggaaagttggcatgaatgtaggggctaagatggcgggcttgatgatcaaaaatggctcaactccaatcaagattagtgtactcaatgattggatggcatcacgtgatctcccaaaacccgatggttatagtttccgtagttggtttaagcgccacaaagcagaaggaaaaaaataa

SEQ ID NO: 296248 - DNA, 414 bp, Proteus mirabilis
gtgaagataggtacgcttttaatttcttacagtttactcacaatgagtttgctctctttttcctcctttgctcaagtaaatcacgatcccctgaccaaatgttatgagttgtcaacagatgcaagccaaacaaccattaaagcttgtctattagatgaactaagattatctgaagagcagttgaatgttatctataataaaagcaaaggcgaccttgaagatagtgactctatcgcggctaaaagtgctattgatgcattagtcagttcacaagagcagtttattctttttagaagtagtgaatgccaacgtcaatctgctttaatgatggggggcaatggtgctgatgaagtactgctggcttgtgaaataaaattaaatcaatggcgagctaaattattactcactaattaa

SEQ ID NO: 296249 - DNA, 183 bp, Proteus mirabilis
atgcaatctctgcttttatctgggatatttatcactatttgtctatttatctatggctttttaggtacgattttcgcttatattggtttaaaaggtggattaagtgataaaggacgccgttataatgatggcattgccggcagtttacttacctttgcagccgttaatttagcctttaattag

SEQ ID NO: 296250 - DNA, 1416 bp, Proteus mirabilis
atgactcgatatgaacagcttgcggcacagatacgccaacaaattgaagataatatttggcaatcaggcgatcgtttaccctcattacgggatacggttaaacaatcaggtttaagtttaatgaccgttttacaatcttatcaactgttagaaagtcaagggtggatcaccgctcgtccgcaatcaggttattatgttgcacatcgcaatacaggttttgctcaagtaactgccagcaaagggctacatatgagtgaaaatgttgagataagcgcctctatattcaatgttcttcaagcctgtaaagatcccaatatcattccgttcggttccgcctttccagatcccagtttattcattcaacctaaattaagccgagcattagcctctgccgctagacatttagcccctcaaagttcagtgattaatttacctcctggtaatgaaaaactacgtcgtaatatagcccaacgctatgcactgcaaggtattcatgtatcgcctgacgatattgtgatcaccgcaggtgcgatggaatcattaagttttagtttacaagctgttactgagccaggagattgggttgtcatagaatctcctgctttttatggcgcattacaggcgatagagcgtttacgattaaaagcgattgccatcaaaaccgatccggtgacaggcatttgtttagatgagttagagaaggtggtagaacaatacgacattaaagcgtgttggttgatgagtcattgccaaaatccattaggtggcactatgcctgatgaaaataaaatcagactagtagaaattttagcggcaaaacagataaccttaattgaagatgatgtctatggtgaactgtataatagtccaaaagcgccaatgcctgtgaaaggctttgataaatccaatagcgtattgcactgtgcttctttttctaaatgtttagcgccaggatttcgagtcgggtgggtcgcagccggaaaacatgcgactaaaatacagcagttacaaatgatgagtactgtatcagcgagtatgccaacacaacaagctattgctgactatttatcacaagggggttatgacgggcatctacgtcgcttaagattattattagagcagagacgttatcgtatgttacaggccatacaaacgcatttgcctaaagatgttaaagtgaatattcctgtcggaggctatttcctatggctagaattcgagccaagctttgatgctaatacattgtaccattttgctctcgaaagaggggtgagtattgcaccaggtgctatgttttcgaccagttcacagtttaatcatgcttttcgtttaaactcttcttttcaatggaatagtcagactgaaaaaggaatgcaaattattggtgaagggtgtcgaaaattacgtcgtaaatag

SEQ ID NO: 296251 - DNA, 1335 bp, Proteus mirabilis
atgtttgggttaagtgcctttgatttggcgcgtatccaatttgcgtttaccgtttctttccatattatcttccccgcaattactatagggctagccagcttcttagctgtcttggaaggcttatggctaaaaactcgcaataaggattatttagcgctattccatttttggtcaaaaatattcgctgttaactttgctatgggcgtcgtctctggtctcgttatggcatatcagttcggtactaattggagctttttctccgattttgccggctctatcaccggccctttattgacttatgaagtacttacagcattcttcttagaagctggatttctaggtgtgatgttatttggctggaacaaagtaggtgaaaaattacactttttcgccacttgcatggtggcattgggtacattaatgtcaacattttggattttagcctccaacagttggatgcaaacaccacagggattcgaaatcgtcaacaatcaagtagttcccgttgattggctagcggttatttttaatccttccttcccttatcgtcttgctcatatgggcgttgctgcatttcttgcttcggcattctttattgccgcctcggcttcatggcatttattaaaaggcaacaagacctctgcaatgaagaagatgctctcgatgtctatatggattatcttaatcttagcgcctattcaagcacttattggtgatatgcatggtttaaatacgttaaaacatcaacccgccaaaattgccgcgattgaagggcattggcaaaataatcctggtgaggctacaccgttaattctatttggtataccggatatggatgaagaaaaaaccaaatatgcccttcaaattccttatttaggtagcctgatattaactcatagtttagataaacaagtaccagcactaaaagaatttcctaaagatgataggccaaattcactgattgttttttggtcatttcgtattatggtcggccttggcatgctgatgattttagtgggtgtatggggcacatggttacgttataagaaaaaattatatcaatctaacctcttcttgcgattcacttttctaatggcaccttcaggattaattgccattttagcgggttggtttactacagaagtaggtcgacaaccttgggttgtgtatgggatacaacgaacacgagatgcggtatctgctcatggtgaaatgcatatgagcattagcctactgattttctttatcgtttatggatctgtattcggaattggatatgcctatatgttaaaacttatccgcaaaggtgcgccggaggttcaagatgggaattga

SEQ ID NO: 296252 - DNA, 999 bp, Proteus mirabilis
atgggaattgatttacccgttatttggttcatcatcatcgtatttagcacattaatgtatattgtgatggatggcttcgatctcggcatcggcatgctctatccttttataaaagagagagaagatcgcgatttaatgatgaatactgtcgccccggtatgggacggcaatgaaacatggctagttttaggtggtgcggcgctatttggtgcgtttcctttagcgtattcagtgatccttgatgctttagccatgcctttaactatcatgctagttgcgcttattttcaggggcgttgcttttgaatttcgctttaaagccgatgacactcataaagttttttgggataacgcctttattgtcggctctctattaaccacctttatgcaaggtatagtcgtcggtagtattgttcaaggtttacccattattgaccgtacttttgcaggaagctattttgattggctatcaccctttgccctgttttgtggctttggtctagtcattgcctactcactgttagggtgtggctggctcattatgaaaactcaaggccatttacaacagagtttgtataaagtgatcttgccattaacgttcgttatgctagccgttgtcagtttatggacaccattagcacaaccggcgattgctgaacgttggttttcactacccaatattttctttttcttacctgtaccactgctagtgttatatagcgcttggttgattattcgcgcagtaaagaaaaaagatcattacttacctttctttgcttctctagcgattatatttcttggttttactgggctagggattagtatctggccaaatattataccgccggcaattagttttatcgatgcatcagcaccaccggaaagtcaaggttttatgctcgttggtgcgctatttatcattcccattattctcgtttatacattctggagttattacgtattcagaggaaaaaccaattatgaagaaggctatcactga

SEQ ID NO: 296253 - DNA, 162 bp, Proteus mirabilis
atgaagaaggctatcactgatccgaaccctgaaacaaaaccctcattactgaaaaaatggggttggttaattaccatttggttttgtagtgttttagcgctatttgccgtttcttcgctatttcgttttttaatgacggcagcgggaatgaaagtaaagtaa

SEQ ID NO: 296254 - DNA, 333 bp, Proteus mirabilis
atgaaaaagtttctcaccattcctttatttttacttttagcaggatgcaatacagcgacaggaaccaacacccaagttatgaacgattcgacaaaaacactacttattgactctcagctttatgattgtgttggtgttgcgccaatgaaatgcatgaaagtaaaagaattacctgctggtgaatggtctctcttctatcaaaatatcgaaggatttgattaccaagcgggaacgcagtacaaagtaaaagtcaaagttacagatattcctaatcctcctgcggatgcaccaagcatcaaatatacactggttgagatcttagataaaaagtaa

SEQ ID NO: 296255 - DNA, 984 bp, Proteus mirabilis
atgaaaagtgtcaataacgctataatcgaagattctgatgctatctatatggctcagcttaatgggcatggcggaattatgccgatcacggctaatagcatagcaagtaatgaaaggcctttttgggttcatctcgattatcgtaaacccaaaagtgatcagtggattaatcagactgagttacttcctcctatcgcaaaagatgtgcttttagctgaaaatgttcgacctaaggcacagcgtatcggggaaggagttattattaatttgcaaacgattaataacaaccccgatgatcggccggatgaactgattgcgtatcgtatttatattaatggtcaaatgattatttcgagccgacatcgtcgcgttaattccgttgattcggtgatccactctttagaagtgggtgatggtccagaaaacagtggtagttggttgatcactatggccgatgcagtgacagatgaaataggtgattttgttgaaacacttcatgaccaattaattgagttggaagatatgatcctcgatcagcaaattccggctcgaggtgaattggcattgctacgtaagcaactgattgtgttacgccgttatatggcgccacaacgtgatgtattctcccgactctctatcgaaaaattaccttggatgagcgacagtgatcgcattagtttggttgaaatatcagaacgtctctcgcgtcgattagaagatttagatagtagtatttctcgtacagccgttattgctgatgaaattacttcaatgatggcagatgcgatgaacaggcgcacatataccatgtcattaatggcgatgctatttttgcccacgacctttttgacaggactatttggggttaatttaggggggatccccggtaatgagtttccttatggctttgctatattttgcttttcactgtttttcttgattgtgattgttgcttggtggttaaagcgtagtaggtggttgtga

SEQ ID NO: 296256 - DNA, 642 bp, Proteus mirabilis
gtgtggcttgaacaatttggagtgctcaatatttggacatatcttgcgggtatgttctttattattatcgtccccggccctaattccctttatgtgcttaaaaccagtgcatcaagaggagttggtgcaggttatcgagccgcattaggggtttttattggcgatgctatcttaattttcttagcatttatcggtgtggcatcagttattaaagcctctccagtgctttttactattgtccgtttcttaggtgctttttatctactctatctcggtatcaaaattattcatgctaacttctttgccaaaaagcaaagccatactgagacaaactgtattcaagagcatgtatttcgtaaagcattaacattaagcttaaccaaccccaaagcgattttgttttatatctccttttttgtgcaatttatcgactttaactatgcacatactggtttatcctacttgatcttagcttctatgcttgaagcatttagctttgtttatctctcttttcttatttttggtggtgtagcattggcgcgtttcttcggttcacgtaaaaatatcgctaaactgggaaatggtattgttgggctattttttatggggtttgccaccaaacttgccacactctcctcttaa

SEQ ID NO: 296257 - DNA, 303 bp, Proteus mirabilis
atgataaaggttgtagcagaagattttattaaatcaggatcaatagaaacggtcttaccactttaccaagaattggtgaaagctagccaacaagaagcgctttgtattagctatgatttatttgttgatgagaaagatcccggtcactttatttttattgaatcatggccaaataaagaagcattagatattcattgtaatagtgaacattttcgtcgcatcattccgatgattaaacaatatacaaaagcagagtcaaaaatcactttagtcaatagtgtatttgataaagatatagattaa

SEQ ID NO: 296258 - DNA, 2139 bp, Proteus mirabilis
gtgaaaaccatagtgataaaacgagacggatgtaaagtctcttttgaccaaacccgcatcagcgatgctatcaaaagagcagccgaagcttgtcagatcactgatgatgattattgtgagtttgtcgctcaatctgtttcacaatctctcgcaggacgttcgaatgtcgatatccgtgagatccaagacgccgttgaaaatcagctgatggctggcgagcacaaagatattgccagagcttatattgaataccgtcatgaccgagatgttgctcgtgagcaacgaggacgattaactcaggaaatccgcggtcttatcgaacagagtgatgtctctatcttgcacgagaatgcgaataaagacagtaaagttatcccaacccaacgcgatttacttgcgggaattgtggctaaacattacgcaaaattacatatcctgccaagagatgtggtactcgctcatgagcgcggtgaaattcattatcatgatctcgattactcaccctttttccctatgtttaactgcatgctgattgatctcaatggtatgttaaccaacggtttcaagatgggtaatgcagaaatagaacagccaaaatccatttcaacagccactgcggtgactgcacagattattgctcaagtcgctagtcatatttatggtggcacgacaatcaaccgtattgatgaagtccttgcaccttttgtcaaagccagttacgacaaacactataaagtggcgcaagaatggcaaatagcggataaagaagcttatgccaacgcacgtacagaaaaagagtgttatgacgcttttcaatctttagaatatgaagttaacactctacatacggctaatggtcaaacgccttttgtgacctttggctttggcctaggcacatcaaaagaagcacgtttaattcaacgctcaatccttgaaaatcgcatggctggtttaggtaaaaaccgcaaaacggcggttttccccaaactggtttttgctattaaagatggcttaaaccataaatttggtgatcctaactacgacatcaaacaacttgctttagaatgtgcaagcaagcggatgtaccctgatattttaaattacgatcaagtggtaaaagtaactggctcatttaaaaccccaatgggttgtcgtagcttcttaggcgtctatgaagaaaatggcgagaagctccacgaagggcgcaataatctaggggtgatcagtttaaacttaccacgtattgccattgaggctaaaggagatgaagccgcattctggtcgctgcttgataaacgtcttgaattggctaaaaaagccttaatgacccgaattgctcgtttagaaaacgtcaaagcacgtgttgcccctattctttatatggaaggtgcttgtggcgtacgtttaaaagcggatgacagtgttgctgaaatttttaaacatggccgggcctccatttcattaggttatatcggtgttcatgaaacgattaatgccttatttggtacgcaaaaacacgtctttgatgatgaaacattgagagctaaagcaatagcaattattcagcgtttacgtgaagcgacagatcaatggaaagcagaaacaggctatggttttagtctttacagtacacctagtgaaaacttatgtgaccgtttttgccgtttagatgcagcggaattcggtattataccgggggtgactgataaaggttattacaccaacagtttccacttagatgtagagaaaaaagtcaatccatatgataagttggattttgaagccccttacccgccattagccaatggtggtttcatatgctatggcgaatatccaaacttacaacataacctaaaagcattagaagacgtttgggattatagctacacccgtgtcccttactacggcacaaacacccctattgatgaatgttatgactgtggttataccggcgaattttcttgtaccagtaaaggttttacctgccctcgatgcggtaatcacaaccctgcaagagtctcggtgatacgccgtgtatgtggctatttaggcagtcctgattcgcgtccatttaatgccggtaaacaagaagaagttaaacgtcgagttaaacatctggctaatggtcagttaggttaa

SEQ ID NO: 296259 - DNA, 465 bp, Proteus mirabilis
gtgaattaccatcaatattaccctgttgatgttgtcaatggcccaggaacacgttgcaccctgtttgttgcagggtgcgtacaccaatgtcgtggttgctataataaatcaacttggtcactaacatctggcaagccgtttacccaagaagtggaagatcagatcattgctgatttacaagacactcgtattaaacgacaaggactatcactttccggtggtgatcccctgcacccccaaaatctttctgctatattaaaattggtaaaacgtgttaaaacgcaatgccctgagaaagatatttgggtttggacaggctatttattggctgacttaaccccagagcaacaagaagtcgttagctatattaacgtactgattgacggcaagttcgtacaagaactttatgatcccgcattactgtggcgcggtagtagtaatcaggtgatccataaattgaagtaa

SEQ ID NO: 296260 - DNA, 210 bp, Proteus mirabilis
atgcctttaagtgataataaatatgtaagcttttctgaagatcatgaactgaactaccatttaaaaaaatggggtaaaaagcaatcgaaagccaatcgagatcaactcgtgaagctaggcagtgaattgaaaaagaaacttggtgttaaacatctccaacatactgaaatagatgcagagatagaaaaaaatctttcattatttgagtaa

SEQ ID NO: 296261 - DNA, 378 bp, Proteus mirabilis
atgacaatatttaatatgaaatttgtttttttacctttaatttcaatcgttttaataactgggtgtagtagtaaatgggagcctaaaggggtacccgattacacattacaggaagcaaagttaatttgtgatttggatgcgaatacacgttaccctattcgtaaagaggtactacaacacaccgtttatcgtgatgtagaaaaaacctgccgtaaagacgacaaagagcgttgtggggataaaaagacctatacagaacgtgttccgatgacagaaagctatgtagcagatattaatcaagaagatagaaaaacattctatacctcatgtatgtctttaaaaggttgggagcaaaaaaattactacttttggcaataa

SEQ ID NO: 296262 - DNA, 441 bp, Proteus mirabilis
atgtctacgccagactcgatcaaaataattaaacaatatatagccagtcaccatgtgtttaccttatgtacaactcgtgcattaggggatatttggtgcgcgaattgtttctattggttcgatgaaagcaacatgcgacttgtttttctctcagaaaaacatacacgacacgcacaaatgatgcaggaaaatttatttgttgcgggcagtattagtactcaagaggtttctgtcgccaatctgcaaggcgttcaattcaccggtacagtgtctttattaaccgctaatgacgacatcagagcaagaaaacagtattgcttacgtttccctgtggcgctagccgccatccatgtgcctttatggcaattacaattgcaagaaattaaaatggtgaataatcagctcggctttggtactaagctcttttggcaacgtcactaa

SEQ ID NO: 296263 - DNA, 252 bp, Proteus mirabilis
atgaaaaaatctacattaatcgctgcaacattagctttaagtgctatttcattcggttcaatcgctgctgacagcgtagcaactagccatacctctactggtgagtatatcacaattacaggtaacgatactttagatggcttaacaactaaaattgcacaaatcgcaaaagatgaaggcgcaactggttataaagttatcggtgctacaggtgacgattatctgactgtaaatgcggaaatttatcgttaa

SEQ ID NO: 296264 - DNA, 504 bp, Proteus mirabilis
atgctaatacgtgttgaaattcctgttgatattcctgctattgatgatcttttacgccaatcatttccaacaggcgcagaagccgatttagttggtcacttacgtgaagagggattattaaccttaggtatggtggcaatcaatgacgaaggccggattgttggttatatcggttttacacctgtagatattgagggaaaagattgccaatgggtaggacttgcgccattagctgtggcgccacaataccgtggtcagggcatcggtcgtcaattgattaatgaagggcttgatagccttaatgagtttggttatggcgctgttgtggtattaggtgagccaacttattatcaaaaatcaggttttataccggcaaaatcacaaggcttgcattgcaaatggccgaatacagaagaagcatttcaattttatgctttagataatggcaatgttgatgatattcacggcttagtgaacttttcgccgttatttgatgaggtttga

SEQ ID NO: 296265 - DNA, 615 bp, Proteus mirabilis
atgtatgaaattactcaatttatcgtaagtgataacaaaaatgtagattcaggcttgattataggaggtaataaagcatatgtgtctaaatggcctattaatccaaaaggaaaggagctattgcatcttttctctatagattgtgagaaagtaactcctcagatcgctgatggcattttgcccaaaactggttatttatctatattttcaacatatgatagtaatgattattttcttgatgaaataacttattttggtgatgagaacgagttaggcctgattaaatcaggctttacttttgtatcttattcattaactggtagtttaagtaaaacaaatgaagactttatacctgaaactaaaattgatttattaaatacaaaaattaatagtgaagattatccaatgatatcatttttttcaaaagatattccaaatggattaactggtgtggatgagattttgaaaaattatcattttgtctgtcaggtatattctgcagatttccctctcccttttaaagacgtattgggattgtccgatgccatcggatacttatttattaaaaatgaaggaaataatatagagggccttttcttcgtgcaaacagcataa

SEQ ID NO: 296266 - DNA, 432 bp, Proteus mirabilis
gtggatccgtggggttgggctaagctgtttgcattaggtacttatggtgaattaaatggttctgtgcatgtgggcgatcaattacaggctcatgaattattgagacacgaatatttaaaacaacaaggccttgcaaacacatcacggttatctggaaatccatctatagctttagacctagatcatcatactagaggcccgttgaaggatactagaggaattgggggggctcattggcatgaagctgaaattcgagctaatcaagggctaggtaaaaatgagtttgcttcaacactaaaacgtgaattagatataacatcaggtggtttaagaaaatcaggtgttcctgctagtcgagttaaacaattaagacaagaagcattaaaattttataaacaacaagttgctgcaaaagtaaaaagttgtaaatag

SEQ ID NO: 296267 - DNA, 318 bp, Proteus mirabilis
atgaaatattatattgatgaacatggttattcatgtgccgaagttgaaactgaacatcacctaatagcttggtttttaaaagatgatattcaaggtagtttaaatggtgtaaatgaatatcttgaattatgtgaattggttaagaatggtgagttaccagaatgggaaggtacaggtaatgcccatactgtcaccattaaaccgggtggtgtcgagatttttaacgaatatactgaagagagcgtaacaatctcaacgatagaagagttcaaaggttatctggaaaagtggaaagaattacttttgagtagagaataa

SEQ ID NO: 296268 - DNA, 918 bp, Proteus mirabilis
atgaaagagatagaacaattttatcgtgaattagaatcagctattaattttattttagaagataaagagtattatgattttatagataatgctttagtcgattatatagaaaatgttactaataagtttatttatgaatggaatgatgatttctttgaaaaaaaatgtaaaataacacttaatattaatgccttactaaatgaaaaaagtagcacaatcgtgcttttattaagagatttcttaatggagaaaaaagataattatattgagttgatcaattatttttatttttctgtattggagtgttattgtgaagaatactttggcaacaaaatagaaaaaaatttaaatgaactaatttctgtatattttatcacattgtcttatttttctctagatgatcaaattgttgtttttaaaagtctaattagaagtattaaagctagcaatgaatttattgatgatgagttgtcagagactttaataccacttgttttttatctttccaaggaaaaattaaattcagttaatgatgacttaagtaatgatattgagtggggaataaaagagtttgattttagtttaaaatataaaatttttgttgatggtttttcccatcatgaagatataagctcattattaaatgaactttgcaattatcatatatcgataaattttcctgaaattaactcaactgaaaactttaatcatgtaacttacaaattaataccttgtgaagtaatagtattacttagaatgagagagttaaataaattacctattaataatattgatcatcaactaataaatagatttaagatgtttttaaataaagatatacctttaagtaattttaatcgttcattaagaaaatctattttacataaagtatcacataaaattagtcagaatcactga

SEQ ID NO: 296269 - DNA, 435 bp, Proteus mirabilis
atgaatcatactgatattttttctgaaaaagacataataaaaagaatcgaaagtggtaatattttggaggaaaaaggcgatgttagtggtgctttgaatctgtatttagatatttgggataatttaccgaatcctaagcatttttttggagatggaatatcattatggttaattaattgtatttatggagcatattttagcttgaaaaaatatgataatgctaaacagtgggctgaagaaatgttcaaatgtgatattcccgcttatgctacatcagaattaattgatttaggggcggtacatctagaattagataagaaagatgaggcctatcaatactttttgcaagcttataacaaaggacagtacagagcatttaaagaacattctcctaaatattgggaattttttaaatcgagatataaagagcaataa

SEQ ID NO: 296270 - DNA, 549 bp, Proteus mirabilis
atgcttctgtctatagaagatattaagagtggtttagataaagagtttttacctctagaaccaatggtaacaggattgcgcttggttggaaaaataacagaaattgatgaggttgaagatactgaaaaacgtttaggtgtaacttttcctaatactttttcatctttaatacgtcaatataactttggttattttactttaggaccaattatttttggtagttcaggcaactatttaaatgatctgttagatatcaatagtggtgtttggtggggcagaggccaaaagccaaatgataaaattgttattgctatatcagatcattacacatttatcttagatgttaagaacgaatcagttagtgtgattacatcagagttaaattgggatgatgccaaggttatatcgtctaacttttacttatttttttgtggcatagggactatttttttactcagaaatcaacagagttctgaagaaatagccaaacaagtatctaatgctgtgggctcacaatataatgaattttggtttaaattagctgaataa

SEQ ID NO: 296271 - DNA, 171 bp, Proteus mirabilis
atgaaaagacagaaacgagatcgtttagctagagcattatcgaaaggttaccaagccggtatgcaaggtcgttcaaaagagcagtgtccctattttgccattgatgcacgttcacattggctaggaggttggcgacaggccatggaagatcgtcctgggcttgcaaaataa

SEQ ID NO: 296272 - DNA, 528 bp, Proteus mirabilis
  misc_feature (416)..(425): n is a, c, g, or t
atggttgataaacgcgaatcttattctaaagaagacctcattgcttcaggccgtggtgaattatttggccaagatggcccaccactgccttcaggtaatatgctaatgatggatcgcatcattaaaatgactgaagatggcggctcccataataaaggctttatcgaagcagaattcgatatcaagccagacttatggttttttgattgccactttgtcaatgatcctgttatgccgggttgtttagggcttgatgcaatgtggcaactggtaggtttctacctaggttggttaggcggtgaaggtaaaggccgagctttgggtgtgggtgaagtgaaattcactgggcaaattctaccaacagccaaaaaagtcacctataaaattgatttcaaacgtgttatcaatcgcaagcnnnnnnnnnntattatgggtatcgctgacggtgaagtttatgttgatggtaaactgatttatgaagccaaagatttaaaagtcggcttatttaaagatacctcagcattctaa

SEQ ID NO: 296273 - DNA, 1743 bp, Proteus mirabilis
ttgaaaaacaacgaattagaatggcaggcgttacgcccagattacgcctcctaccagactttctttcaaacagcatcgcaattgcctgcatcttcacttcgtgaggttcaacctcgcttgtatgaaagcttacagtggctaaataatgcagaagcaggccaatttatgctgttaaaagcagaagattctactgcttatttcgaaacactcgctgatacattacaacaagcagagataaaaacttatcctgttgtaggtgcctatcaagctgaatctaaccaaatttattggcaagaaaatgtagaaggctcattttcatcatcagaatctattgcttgttgccaatggatagagccagaacaactttttggttcattttattatcataaagataagctcctcgttaacccaggactgttgcataaagtcaatggtggtattttagtcttatccattaaaacgctcttagcacaacctttaatgtggttccgactgaaaaagatggttgaagagaaacgctttgaatggttagtgtggaatgaccatcaagcacttcctttgcctattgaagccatgccccttcacttgcgtgttattttagtgggcgatcgcctaagcttagaagagcttgagtttatggagcctaatatcagcagtacggcactatatggcgaatatgaatacgatatgtatttagaagatgaaaccgccctgagccaatggtgtggttttgttaatggactttgccaaaaatatcgtctgccttcattatctgctgatgcttggcaagtattactgactcagggcgcaagagagcatgaagatcagcttatcttatctctcgatcttgaattcatattacgccaattgcgttatgccatgcgttttaatcatgacgcttatcttggtgctgaggcgcttaaaaaagcgcaagaaaatcgtttatggcgacatagctacttattagaacgaagccgtgatgaaatattacaaggccaagtcactattcacactgaaggtgaaatggtaggccaaataaacggtctttctgtcttagattatcccggttatcccgatctaattggcgagccaactcgtattacctgtgtggctcatattggtgatggcgaactggtcgatattgaacgaaaagcagaattaggtggcaatatccatgcaaaaggcatgatgattatgcaagcctacttaaattctgaattacgattagatcagccacaaccttttagtgcttccgtcgtttttgaacaatcttacggtgaagtggatggtgatagtgcctcactagcagaattatgtgcgctaattagtacattgtcacaacacccaattgatcaacaaatcgccgtaaccggtgccgtagatcaatttggtcaggtacaacctattggtggtgttaatcaaaaaattgaaggcttttttgatatctgtcagcaaagaggattaacaggatcacaaggggttattataccgctggcgaacgtgcgacatcttgttttaaacgatagcgtgatacaagctgtcaaagaaaataagttccatatttggccggttgtccatgttgcagaagcaattactttgctaacacatcagccttattacgaagaacaatgtgaaaatccacaatcaaatgaacacttgttagctgttattcatgatcgaataacacaagctaataatcaggataggcctaagttaccttggttcctgcgcttattcagataa

SEQ ID NO: 296274 - DNA, 504 bp, Proteus mirabilis
atgctagtatatagttacgttgtcacggtgatttgtatgaaatatcaacagttagaaaatctagaatgtggctggaagtgggcttatttggtaaaaaaacatcgcgaaggtgaattaatcacccgttatgttgaaaagagcgccgccgatgaagtggttgagcaactattaggtcttgaatctcaaccattaaaagtgcttgaatggatcaatttacatatgaaccctgagttatcgaatagaatgaagcaaactattcgtgctcgaagaaagcgttattttaatgctgaacatcagcatacgcgtaaaaaatctatcgatttaacttttaaggtttggcaacgcctatcagcactatctcagcgccgaggtttgacattatcagaaacgattgtccagcttatcgaagatgcggagcgaaaagagcaatatgcactaaaagtacataacctaaaagatggcctaattgagttactagaacgagacaaacagaaaaaagagtag

SEQ ID NO: 296275 - DNA, 1089 bp, Proteus mirabilis
atgaaaaagacagctatcgcattagcagtggcagtggcagctttcgcaactgcagcgcaagcagctccaaaagacaatacttggtataccggtggtaaattaggttggtctcagtatcaaagtactggtaacaattgggacggcgtgaatatcggtaacggtagcacacacaaagaccaaattggtgctggtgcatttgctggttatcagtacaaccaatacttaggttttgaactgggttatgactggttaggtcgtatggcttataaaggttcatacaacaacggtgcattcaaagctcaaggtatccaattaaccactaaattaagctatccagtaatggatgacttagacgtttatacacgtttaggtggtatggtatggcgtgcagattcaactgcaactattaatgcaacttcagcaggaactcaaaaacgtttctctgaaaatgatactggcgtttctccagtattcgcattaggtactgaatacgcgatcactcctaacattgctactcgtcttgagtatcagtggatcaacaacatcggtgataaaggtactctgaacgctcgtccagacaatggtatgctgagtgttggtgttgcttaccgtttcaaccaagaaactccagctccagttgttgagccagctccagtagttgctccagctccagttgttgagaacaaaacctttactctgcgttcagacgttctgttcaactacaacaaatcttctctgaaagctgaaggtcaagaagcactgaatggtctgtacaatgaattagctaacatcgacccaactcaaggtcgtgtcgtagttatcggttacactgaccgtatcggttctcaaaactacaacctgcctctgtcagaaaaacgtgctcaatctgtagttgattacctggtatctaaaggtattcctgcaaacagcatctctgcagaaggtcgtggtaaagaaaacccagtaactggcaacacttgtgacaacatcaaagctcgtgcagctctgatcgattgcttagcgccagaccgtcgtgtagaaatcgaaatccaaggtacaactgaagttgttgttcaacctggtcaataa

SEQ ID NO: 296276 - DNA, 459 bp, Proteus mirabilis
atgcctaatattaaacctttttcattattcccaactttatctgacaatctactttcaaaccgttttgatcagatagatcgcctgtttagtcagttaacaggcagtaaaccaatttcatcaccgactcagacttataatctgaaacagattgatgataaccattatgaactaacagtgagtgtgcctggatatcaagaagatgacttatcggtttcattgaaaggaagtcgcttattgattgaagggaaaaaagaagaaaaattagaagaagacaatgataaatggatccaccgaggtatatctcaagggcagtttacattgcagtttgacctcggtaaaaatgtcaaaatagaaaaagccgatttatcaagtggacttctgaccattgctattgagtatgagttacctgaagaagaaaaacggcaaacaatagcgatagaaaataaagataaaagctaa

SEQ ID NO: 296277 - DNA, 213 bp, Proteus mirabilis
atgtctaattcaatgactggtacagtaaaatggttcgatgaaggtaaaggttttggttttattactccagcagatggcagcaaagatgtattcgtgcatttctctgcaatccaaagtgataacttcaaaacattagctgaaggccaacaagtttcatttaccatggaaaatggtatgaaaggccctgcagcaggcaacgtggtggctctctaa

SEQ ID NO: 296278 - DNA, 1125 bp, Proteus mirabilis
atggaacactttactaaaaaatcattatttacctgcgataaaactaatgaaaatctccctaataaaccgggtgtaataacacactgccaagagctagcgtctgacttagggttaagcgaagcttttgcgcaatacacaatatcttatacttcttgtgacagtgttcatggagaaattatccgtgaagatactggtgccgtttttattccgaaaagtcaggcgcctaaaaatggttggcctgtcattgtatggaatcatggtacggtagggatagcgccaacttgtgctccttcattaacacctaaaaatagtcgcgtatcgcaatatttaaatacttggctatcccttgggtttgcgattgttgcaccagattatccaggtttaggctcatcagggttgcatcattatatggatgaaagagcaacagcatggagcgctttggatagtgcaaaagctgtcttgaaaggtgggttttcgctaagtaatcgctttatctttatggggcaatctcaaggggctcatgctgcatttgcctctgtcggctatcagcctgaatatgcaccagaattaaatatcttaggtgcgatagtgacagggacgccttattttagtgataatctacttgaaaactttattagtgatggtgttcaagatgaaggtgatagaaagctaccttacgcgatgtacttatatctttctgctgctgataaaaatccaaacttaaaagtggaagattatttccaagaattagcaataccttatgttgaaaaagcgaaaacgctttgtatcagtccattaagtcaattagtaatggataataaattaaacgcatcaaatagcttaaaacctaagttttacgagctattagagcaagaagcgtcaagtttaaattatagaaaacttcttgttgataagcccgtatttatagggattggtttagaagatattcatgtgttaactcgttggcaacaagagtttgcaagagatgtattggaagcaggcacaaatgcatatgtatatgaatatccgaatattggtcatttagatgtatacaatgtctctttgcgaaattcagtgccttttgtatttgaactgatgaaaaatgagcatagcaaaatagactaa

SEQ ID NO: 296279 - DNA, 984 bp, Proteus mirabilis
gtgcttgaggcgaatacaccttatataggttttcggtgggagcctagtcgatttgtgataggtaaactgcctttttaccccgaaatcggtcgagtgggtgtggctatctacaataaaagcaatcccaaaggggcctttattgttttagcacccagtggatatggtacattgcgttataaaagagctaatggcacatatgagaatgcgtcattttcatttagtcgttccaaaaccaccgctatgacaaatatgtataataatttttcctctaattatgatgaattaagttggggtcttttgcccagacaaggcaatagtgattttttctcagcacgatacgtagatggtagtgataaagttcattcgttaacattaacaatatccagttattccgcgtatgccatcgggccattagaggccggtgaatatgccatgcgtgatggttcaagattttatgccaacattagcactagtccaagttcttctgcaaattctaagacattattaagttcaacggataatgtgaatattaaagcactcaaagcctgtgacgttatcccccaaacgtctaccaatattcagtttccgactcaaatcgcgaaaaattatgcaacacctactaaattagctgataatttagccagtatcagtgtcaattgcccttatgctaataaaaatatctatctcactctgagcccttttaataatttagtctcaggcagtgaaacagggatggagctatccaccagtagcactgaaaatatcaccacactgccttatgtggtggcttctttaaaatctgcacaatcaaatatttgccaagccaatgcacaagaggccttgcgactcgtcggtagtaataaactagcacaacaaaatatgaagagttttacgcaaaatataatttttaacctttgtgctaatggcaatatcaaagccagcaaatatacaggggcaattaatgtagcaattttaattgaatag

SEQ ID NO: 296280 - DNA, 447 bp, Proteus mirabilis
atgaaaaagaatgaaaatatacaatcagataataaagtaataaacacgcctcactcaatgaaagatgataatgataaatttggagatttatctaaagtacacaaaaagtttaaagttgatgaaataataaatttaatcattaatgatattatctctgttttagaagaaaaacctacattagagaaaggaaaaattatacaatttgaggatgagttacattctcactctaaaagtattttatcatctactaatgacttgtctttaactgagattaaaaataaatttttagcatcaatcatcgatagcatattaacttcagacgaaaaaataaaatctgaatttgggaatattaataattataaatattttttatcaaatagtataaatgagacggttagtcgttcactggctaaagataaaaatcttgtaaaaaatggcgataaataa

SEQ ID NO: 296281 - DNA, 1341 bp, Proteus mirabilis
atgcatcaatctgatgtagcggatcgctcacttttttcccttagctggcctatttttattgatatttttcttcatcttgccacgctattgattaacacttacatgataagtcatgtctctactgcctatttagctgcaatgggcgtaggtaaccaagtttttgatctttttatcaccatatttaactttattagcgtgggatgtagcgttgttattgctcaatatttaggcgccggtaagcgcgataaagccagtcaagctattcatatttctatcgcctttaactttttgctgggctttagtagtgccattattattctcttttttggctacaacattctaaatgtaatgaatacgccagagcatttagtacaagatggctataactatctccatattttggggatttgtcttattcctgaagcaatttcaattatcttagcagcctgtttgcgggtttatggtaaatcgaaagcggcgatgtatgtgacgttaattgccaatattgtcactgttatcggcaatatgattgtactatatggtttctttgggcttccacaatacggtttagtgggtgttgcatggtcaacggttgtcggtcgtattattgccgttgtcttattatgtggtcttttattctatggattaagaattaagttcgatataagactattagtgatttggtctaaaaatatgttagctaaaattctacatattggtttacctgctgcaggtgaaaacctagtgtggattttacattatatgaccgcctctgcctttataggattaatgggagaagttcctctcgccgcacaaacactctatttccaactatcattattcttaatgttatttggcattgcgattagcattggtaatgaaatattagtcggtcatttagttggtgcaaaacgatttgatgatgcatttacacggggttttaaaagcctaaaagcaggtgtgctatttactattggcgtggtgattatttattggtttatgcgtgatcctattttgtattctatcaccgaagatcaacgcattatcgaccaactgttgcctttatttattttatcggtctttttggagcctgggcgtacatttaatattgttatggttaatgcgttacgtgcagccggagatgccaaattcccactcattacagccgtttgttttatgtggggagttgctattcctattggctatttccttggtataaaaatggaaatgggtttaattgggatttggataggttttctttgcgatgagtggctacgaggcttaacaaatgcatggcgttggcgctctcgtaaatggcaagctaagcgcttagatatttga

SEQ ID NO: 296282 - DNA, 900 bp, Proteus mirabilis
atgaatactaaaataaaagtcgctattgtgggctatggcaatattgggcgctttgcactagatgcagtacttgcagcacctgattttgagttagtgggggtggttcgccgtgatagtcaaaatattccagatgaactgcgaaatataacagtaacaaatgatattaaaagcttaggtaaggtggatgttgctttattatgttcaccaacgagagccattaaagatttggctaaatcgatattgagcttaggtattaataccgttgatagttttgatgtccacagtgatatcgttgcattaaaaacagaactggatgaggtggcgaaaaagcataaccgtgttgcagtgatttcagcgggttgggatccgggttcagactctattattcgtaccttaatgttagctatggcacctaaaggtattacctacactaattttggtcccggtatgagtatgggtcatagtgttgccgctaaagctattgatggtgtaagagatgcgctatcaatgactattccattaggtactggtgttcatcggcgtatggtttatgttgaattagaaacgggtgctaactttgcacaggttgagcaagccattaaggccgacagctatttttcatctgacgagacacatattaaacaagttgatagtgttgatagcttaaaagatgttggtcacggagtacaaatgacccataaaggggtgtcaggcaaaacacacaatcaattatttgaatatgctatgcatattaataatccagcattaacatctcaatttatggtttctgcagccagagcaagtatgaaacaacaagcgggtgcctatactgtgattgaaattccccccgttgattttttagcaggggatttaaatacattaatcgcaaaactggtgtaa

SEQ ID NO: 296283 - DNA, 828 bp, Proteus mirabilis
atgacttattcacgtgaagtattactcaaaaaatttaatgacatgatcgcacgtaaagagcctattattggtggcggtgcgggaacaggtctttccgcaaaatgcgaagaagctggcggtatcgatctgattgttatctataattcaggtcgttatcgtatggcgggtcgtggctctctggcaggattattagcctatggcaatgccaatgaaattgttatggatatggcaaaagaagtattgcctgttgtaaaacagacacctgtgcttgccggggttaatggtacagatccattctgcaattttgataagtttttagatgacgttaaagccatcggttttgctggcgtacaaaacttcccaaccgttggtttaattgatggtaacttccgcgctaacctagaagaaacaggtatgggttatgctcttgaagtagagatgatccacaaagcacatgaaaaaggcttactcacaacaccttatgtttttagtcgtgaagatgccattgcaatgacacaagccggtgcagatattattgttcctcatatgggtttaaccactggtggcaatattggtgcagaaacagccgttactttagatgattgtgtcgcccttattaacgattgggcaaaagcagcaaaatccgtacgttctgacgtaattgtactttgtcatggtggccctatagcaacaccaaaagatgcgcaatatatccttgataactgtcctgattgccatggtttttatggcgcaagttcaatggaacgtttaccaacagaagtcgctttaactgcaacaacaaaagagtttaaaaatattaaacgctaa

SEQ ID NO: 296284 - DNA, 1008 bp, Proteus mirabilis
gtgttttgcggtgaccgcgggaaagctatcgcagcaatgtccgtcgcttttgaacgttatttaacccactgtgacgatgtcctcgctattttaggattaggcggctcagggggaacggcattgattacaccagcaatgcaatctttgcccattggcgtacctaaattgatggtatcgactatggcttccggtgatatctccggatatatcggcgctagcgatatttcaatgatgtactccgtaacagatgtatccggcttaaaccgtatctctcgtaaggtattgagaaatgcggccaaccaaattgccggcgctgtttatttttaccaagaagaaaatagtgttgataaaccggctgttgcattaacaatgtttggtgtaactacgccttgtattcaacaactgactaaaaaacttgaaaataattatgactgtttagttttccatgcgacagggagtggcggtaaagccatggaaaaactgatagacagccacttacttcatagtgttcttgatctaacaacaaccgaagtatgtgattatttatttgagggtgtccttgcttgtgatgaagatcgttttggtgccatcgcccgcactaaaacaccttgtatcgtctcttgtggcgcgttggatatggtgaactttggtcgccctgctaccgtacctgagaaatataaagatcgtcatttctatcaccataattcgcaagtcaccttaatgcgtacaacaccaagggaaaatcgtcaaatggggatctggatcgctgaaaaattgaatcagtgtgaaggcccactgacgtttatttttccacagggcggtttttctgctttagatattgaaggggggccattctgggatcctcaagcaaaccaagcattttttgatgcatttataacaacatttaaagagaccgagactcgtcaattagtcatcagtccttaccacataaattctgctgaatttaatcagcaagtttatgatttacaccaggaacttatttgctaa

SEQ ID NO: 296285 - DNA, 963 bp, Proteus mirabilis
atgtctattattcatcttgaatttgaaaagcctattgttgaattagacgagaaaatagatgcattacttgcattcaaacagtctcaagatgaaacaacggcagttgatatagacgaagaaatcgccaaacttcgccaaaaaagcctttcattaacacgctctatattttctgatttaggggattgggagatagtacagttagcacgtcatcctatgcgcccttatacattagattatatcaaagctatttttactgatttccaagagttggccggcgatcgtgcttatgctgatgataaagcgattgttgcagggttagcgcgtttagatagaaaaccagtgatgattatcggtcaacaaaaagggcgagacactaaagagaaagtaaaaagaaactttggtatgccatcaccagaaggttatcggaaagcattacgtctgatgaaaatggctgaacgcttccatttaccagtgattatttttattgactccgcgggtgcttatccgggggttggtgctgaagagcgggggcaatcagaagccatagcacgaaatattcttgaaatgtcccgattaaaaacaccgataatttgtacaataacaggggaaggtttttctggtggtgcattagcaataggtgtgggggatcgagtaaatatgttgcaatatagtacttatgctgccatatcgcccgaaggctgtgcctctattttatggaaaaatgctgataaagcacctattgccgcccaaaccatgggaatgacggcacctaaattacaggcattgggtattatagactcaattattcctgaaccattgggaggcgcacatcgccactaccagcaagcggctgaatttgtaaaaaaacagcttctcgcagatttaacagaattgaatagttattctaaagaaaaactgcttgaaaaacgttatcaaaaattaatgtcctatggttattgttaa

SEQ ID NO: 296286 - DNA, 888 bp, Proteus mirabilis
atgtcaattgaccttaatttattacgtattttttctgcggttgcagagcaagcacagtttgccagtgctgcacgatcgctttctatgccaacatctaatgtcagcagggcaataaaacagctagaacaacagcttaactgccgattaattgatagaaccacgcgaaaaatgcgtttaactgagcaagggaaaatcttgtatcagcaagccaaaaagaccttatatgaattagataatgttgtagaacatataacgagtgatggcccattaacaggaacctttagacttacgatacccagtgaatatggtagtgagttacttgccgatattttagcggattttgctgcacttcatcctaacttaaccattcaatgtgatacgcagctaatgccaagaaatgttatagaagatgatattgatttacttctaacatttcatcgtggccaattagccgatagtagctaccattcacgtctcataaagtcgtggcgtagtattgttgttgcctcagagagcttattagcaaaaacgggtatccctacagatattgaacaactaagccaattaccttgtatttccagtttaagtgcattagaagggcaaccgtggatctttattgataaagagcagaaccctgtaaaagtgacaattaatagctgttatcgtgtaaatagtgctatcttagccaaagctgccgtattaaaaggtttaggttttgctattttagctgaacattgttgccttgatgcgataaaggcaggcaaattgcgagctatttcttttcctcaacagcccgcatcaattattataaacgctgagttaaaaatgcaagaaaatgtttcacgtaatattgaacattttcttgcatttttaactcagcgtttataa

SEQ ID NO: 296287 - DNA, 597 bp, Proteus mirabilis
atgtcattagaagaaaaaaatatcgataaaccaagaacaaagccagccgaagttcgtttagaagagttaatgaacgccgcagaaacactatttcttgaaaaaggatttgatgccacaaccgtcagcgatattgtaaaacaagcgggggtcgctaaaggaacgtattatcactattttacggcaaaaacagatattctcgacgcactgcgaactcgatatatggattggtatattgataaagttgagcaagcaatggcaagctgccaaattcaagattttcgcgctaaattaaaacagtggtgtgaaactagcgttattgcttatgttgaaaaacaagaattacacgatatgctttttcatcaagtctttcatcaaagcggtaatattcatgaaaatagagcgctacagcagttacaaaagatattaatgggggggacagagaataaaacgtggcaagtcctacagcctgaattaacctgcacgcttatttatcatggtatgcatgctgccgttgataatttagaacacagtacggaatacacatcacaaacattaggtgcgctattatatcgacaatttacacaattattaagttaa

SEQ ID NO: 296288 - DNA, 1227 bp, Proteus mirabilis
  misc_feature (1193)..(1211): n is a, c, g, or t
atgactatcgaaacaaaagaagaacgtttacaaaaaatcttaacagctgaaaactgcaaggataccgcaaaaacaccacctaagcctgttcatcctcaagctgatgagcctgatacagatcccgataaaaatacagttacagagattaaatataatcaaataaaatcttcgccagatgagcctggtaacgaagtaaaaatgaacgggataattagctatgaagtagaggtaaaagatagtgatttacgtttggctcaatggagtacaaatcctaaaggaattttaattttacccaacaacaaagatgtttataccactatcgttgatgaccataaaacgaagatctctttaactggcaatcgtagtggagtggcttcattacagttgattctaagagatgaagataatgaagataatgcctattatgccccgccgttgcaaattcgagtgacacccgcgatccctaataccgattgctcagcggctaattgtgagaggtttgatgatttactgacaatcaactctgaatctatgcaatggccgagcaaatgggaagaggtatctaaaagctttgtggtacaccttcaaaatcaagaaggtgaagatatgcaaaacaaggaggtcacattagtttacgataaagacaacagcacactacttactcagcctgaaatttataattccgaaggtgagttaagcaatatttcaaaaaccaataaatatggtattgcaaactttaaagttagatttaaaggtaccgagccaaagcagattgctgttttttatgctgaatcagaaaacagtgaagatatagataacccactcaaatcaagaaactattatgttgaaatgacgacagagaagttgccgtctcctaaggttcctgcaacgctaaatggtattctaagctatcatagtgaaaattactgtgtaaatgcgaacctaattttaggtcgtgatattagtgaaagtacacaagtagggttctattttaatgatcaacttaaaatgttgccctgtactgataaatcagcggtatcggtcaggttagagaatcaagccttaacgaatggcgttcattatatctctttcttcactgtggatatttttaacaatatttgtttttcacgccgtgaacgtattattgtggataattccttaactggggaatgcggtaaacaaattaaaaatannnnnnnnnnnnnnnnnnncgaagccttgtattag

SEQ ID NO: 296289 - DNA, 312 bp, Proteus mirabilis
atggttataatctttaatggatatactaaagtcaatagcagtgagcggacattggtttatcgttctacattagaaatttatgccgatgatcctcgtttaggtgatttcctgcaagatactacaccaagcaatgagccgataagtatgattgaaatatcagagcctgcattagaaagtattttggcggatgcattgccaaatatcgaagtgggacaattaggtattcaggtgatggtatttgagaaaaatggcaactgttacttatgtggtgaaaatatgtataccgtttctctacgtttaccttgtgcttaa

SEQ ID NO: 296290 - DNA, 579 bp, Proteus mirabilis
atgttagacattaataaaaataatttatctcagctaacagagaaactcgttaaaaagcagtgtactttaatgagtatcattgccgtgctgggattacttgcgggtattatctgtattattaaccctttttcttcaggggttgtggtcagcgttttcctcggtatcgttttttttgcttgtgcaataaccagcataatggcggcctttaatagccggatctcttctggttggtcgatgttaattactttacttgctggttttatctatctatttttaggctatatttttattaccgatccactaaacggcatgttaagtcttgcatttattatcggttatttatttatctttgccggaatactccgcttagtactcggctttaagcaaattaaagatagtttttatggctggtttaatattctagtgggctttttagatcttgttttagcctatttcttactagcttttggccctgaaacttctataacactggtgatggcattgattggtatacaacttattttaagttctattactattctatcaatagccagtgccatcaagcggatgactcgttaa

SEQ ID NO: 296291 - DNA, 858 bp, Proteus mirabilis
atgtctgaaattgtgtatttaaataaccaatttgtacctaaagaacaagctaatatctctgtttttgatcgaggtttcttatttgctgatgccgtttatgaagttaccgccgttattaacggacaattaattgattttgaagggcattttcaacgtttacagcgctcttgcaaagcattatcaatgcctttttctttaaccaaagagcaattaaaagagatccacgggcaattgatagataagaaccatctgcatgaaggacttatctatttacaagtcactcgtggcgccgattcatcacgtttttttgatttcccgtcttcatcagtcgctcctacattggtgctatttgttcaacactcaacggtggtaaatcatcctaatgcaagcaaaggaatttctgtcgtaagtgttgaggatattcgttggcaacgctgtgatattaaaacggtggcattacttgctgcatgtctagctaaacatcatgcgcatcagcaaggtgctgatgatgctatttttatcaaagagagttatatcaccgaagggagttcaagcaatttctttattgttaatcagcaagatgaaattatcactcgcccattaagccaagatattttaccggggatcacgcgacaagcgattattcagttagccaaagagcaaaaactcaccatcattgagcgtttatttacactcgaagaagcgaaacaagccaaagaggcttttattagttcagcgactaccttaatttggccggtgatctccattgataatgaaaaaataaatcaaggtaaggtaggggcgttatcacaacgcttaagagagatttatcttgagaaagccggtgtgaaaccatag

SEQ ID NO: 296292 - DNA, 561 bp, Proteus mirabilis
atgtcatcaccttcggcacccattgaaattatttctcaatctattgctagagaaagaaaaaaagcaggtctttcacttgcagaaatcgcaaggcgagcggggatcgcaaagtcaacgttatcccaattagaagcgggacaaggtaatccaagtatcgaaactttatgggctatttgcgtcgcactcaatattccgttttcacaactgatttcctcacctaaaccagaagttaaagtgatccgcaaaggtgatggatttaaaattagtgcagaaaaggcctattaccatgcctttttattgtcatcttgccccaatggcgcgaagcgcgatatttatacggttattgctcaaccgggtaaagatagagtatcagatcctcatagtaaaaatgtcacagaacatattcttataattagcggtcgtgccattgtcggtactttagataatcaacaagagttatctcccggtgactatatttgttaccctggtgacgttactcatgtgctacgtgcattagagccagatactaccgctgtcatgatcattgaacatcacaattag

SEQ ID NO: 296293 - DNA, 681 bp, Proteus mirabilis
  misc_feature (14)..(23): n is a, c, g, or t
atgcatattaacannnnnnnnnntattaacagtcgtctagataataacgtacttagagatattctgcttgtttcattagcggatgggatcgttggaatatcttatggtgctttagcacatactcaaggtttcgatttttgggtacctctttcgttatcgatttttgttttagcaggggcttctgaatttctatttatcggagtggttgcgatggggggaagcgccatctatgcggcactcgctggtttaatggtcaatgcaaggcacatcccttttagtatggcggtgaaagagttacccggaaaagggattaaatcactattaggctttcatgtattaaatgatgaaagtgtggtttttgggttatctcaatcgactgctgagcaaaatagattagcattttgggcttgtggattaggcattttactgatgtggccgttaggtactatgttaggtgtttatttaggctcttttattgttgatataaaaatgcttggtttagatgcgatgttcccagcgattattttggcactaagtttaccggcattgaaaaataaattaacacgaaaagccgctattattggtagtgtgattgccttagcaacgacactgtttctccctgcgggaataccggttttattatccttgttaggcgttttatttgtggtgagaaaaatatga

SEQ ID NO: 296294 - DNA, 756 bp, Proteus mirabilis
atgtatttttttcttggttttttgttatttctaattgttttgatggttatttgcaggattagagttttatggttggcaagaaaaaatacaataactgaaaagaattttaaaaccttcaaagagtataacaatattgaagattatgaaaaagaagcaaagcaagctgtttatgctgcaacaataagcaaaactctttttgaaaaatgccaatgtctcataaccttaagaacaatgcttgaatccctacacactgattatgaaaaatatgaaaaagtaaatccgttattaatggagctattacgcaaaaaatttacttttacatactccgctttcattactatctatccagaacccatcgaagaaagcgggctagaacgatttagtttaattaatacaaaaaaatactgtccagaacatgtatggaaacatattctcaaatccgctatttataccaatgaagaattggatgactattttgggtcgcaggaattactcccactggagcggatgtgtacagatatggatttatataacgagtttaaaggcacggttttatttgatgaagtgatcgggtgctatgttaatgaagaaaacgaaggatctcaaatttttgataatgaggtttattctgttaccgaagaacagttacgccagtggctagatgaagagcttgcatttctgagttatgtcactgaaggtcttttgaatatttgtattgaatacataagaaaagagaatggaattataagggtttga

SEQ ID NO: 296295 - DNA, 918 bp, Proteus mirabilis
atggtcatacgtcctaatcaacactggttttttcggttatttgattggcacggttcagtgctatcaaaaataatctttcgcttatgtcttaatattgcaatgtctattatcgctattttggtttatcaatggtatgagttattaggtattcatttaactgttgccccatttagtttattaggtattgctatcgcaatatttcttggttttagaaataatgcaagttatagccgacttgtggaggcaaggacattatggggaaatatgttaattacccatcgcaacatattaagaaatataaaagccttattaccggaagataaacaatttaatcgtgacttttctaatctacttattgcttttagttggagtctaaaacatgagctaagaaaaacaaacccaatggtcgatctctatcgcctcttaccccgacctttatttgatgagataatgaatagcccttaccccactaatcggattttattgcatattggcctaaaaattggcgaattgcgagataacaaagtaataagtgatgttatctttcaatcaattaataaagatattaataacttatctgatgtattgggtggctgtgaacgtatttcaaatactcctgtaccttttgcctatacgctcatattgcaacgtacggtatatctattctgtgctctgctaccttttgcattggttgccgatctccactatatgacgccatttgtttccgtatttatctcttatacttttttatcttgggactcattagctgaagagttagaagatccattcggtgtttctgccaatgacttaccattaaatgcaatatgtaacaccatagaaaggaatttattagagatgcaagatatcactccactccccatcagagttaaacctgaccaatattataatttattgtaa

SEQ ID NO: 296296 - DNA, 180 bp, Proteus mirabilis
atgccaatgaaagttatcattagtcattttttaacaataaaaccaacgaaaaataaagctcgttggtatcaacaaatcggatggatgataattatttggtctttaagtgtattaagtcttgcaattatcgcctcattatttaaattattaatgtacagcgcaggaatgagaacgcattaa

SEQ ID NO: 296297 - DNA, 1008 bp, Proteus mirabilis
atgaatattgatttttcgatgatttggtttgcgatcattatttttgccacacttatgtatattattgcagatggatttgatctggggattggcattattttgccttttacccgagataaaatacaaagagataccatgattaatagtgtggcaccagtttgggacggcaatgaaacatggttagtattaggaggggctgcgctctatggtgcttttcctcttgcctatgcagttattattgatgcgttaacaataccactgacattgatgcttattgggcttattttccgtggtgtggcatttgaatttcgcgttaacgcacttcctaaacatcgcctattttgggattcagcttttattggtggctcttttcttgctaccttttgccaagggatcacagtaggtgcagttattaatggttttaatgtgacagagcgccatttcagtggctcggcattggattggttaacaccattccctattttctgtggttttgctttgttagtcacttatgcattgttaggcagttcatggttgattatgaaaacagagcatcaactgcatcgtaaaatgtgcactataacggtgtatctggctattacattgctggtggtgattgcaatagtaagcttatggacaccactcacacatgcagatattgcacaacgctggtttagtttacctaatttatattttttattacctgttccgttgctcgtattggcttgtgcttggggcattgttcgtagtgcctataattatggtcattatcagccttttctattatcacttttattggtacttattggttttgcaggattagggatcagtatctttccttatattattccaccttctatttcgatttggcaggcggcagcacctgttttaagtcagcaatttatgttagttggagcggttataattattcctgtgatattagcctataccagttggagttattatgtatttcgtggaaaggtaaatgccaatgaaagttatcattag

SEQ ID NO: 296298 - DNA, 1353 bp, Proteus mirabilis
atgtttggattagatgcttttcacctagcaagaatacaattcgcgtttaccgtttcatttcatattatattccctgctatcaccataggattagctagctttctagccctattagaaggcttatggttaaaaacaaaagaaccaagttacctttctttatatcagttttggataaaaatttttgccgtaaactttggtatgggtgtggtatcagggttagtgatggcatatcaattcgggactaactggagtggtttttcacaatttgccggtagtatcacagggccgatgctaacttatgaagtcttgaccgcctttttcttagaagcgggatttcttggcattatgttgtttggttggaataaagtggggcgaaaacttcacttctttgcaacttgtatggtagcgcttggcacattgatttctactttttggatcttgtcatccaatagttggatgcaaacaccacaaggctatgctattgaaaatggtgttatcgtgcctgttgattggctacaggtcgtgtttaatccttccttcccttaccgtttattgcatatgtctattggggcttttttagccagtgctttatttatcgcctcttgtgccgcatggttattattaaaaggacaaaatacagcacctgtacgaaaaatgttttctatggccttatggttagtactaattattgcccccatacaagcgtttgtaggagatgctcatggattaaatacactagaacatcaaccggctaaaatcgcagctatagaagggcattgggataatgcaacgaaagaagcgactccgcttattttatttggcatcccagatatggcagaagaaaaaacaaaatatgcgattgaaattccttatttaggtagcctgatccttacccatagtttagataagcaaattccggcattaaaaagttttgcgccggaagatagacctaattctagcattatattttggtcatttagagtcatggcaggtttaggtatgctgatgatttgcttaggtttgttgagcattattttacgtaagaagaaaagactctatcactcaccccttttcttacgctttgctttattaatggggcctacaggactgattgcgatccttgcggggtggtttaccacagaaattggccgtcagccttgggttgtttatggtctacaacgtaccaaagatgccgtttctgctcatggtgatattcaaatgagtttgagcttattggtctttattttggtttatttttcagtatttggcattgggtatttttatatggtgcatctgatgaagaaaggccctgtagtgcttaaatccgaccaattaacacagggtgaaaaataa

SEQ ID NO: 296299 - DNA, 1575 bp, Proteus mirabilis
atggatacgcgagtttatgttaacggacgagaaatttgctctaaagcatccgatggtgtatcaacggccgcgtttccagatccttgctggtctcctggcccctcagtggttccttatcctaacacctctagcgcagatgctttatcaaatggtacagcgactgtttttatccgaaatagtatggttgcacaagaagatcgttcattcttttctattagtacaggagatgagccagcaactaatgggttagccaaaggcgtgataacaggcgttattaaaggtaaagcctattttcggtcatggtcacttaatgtgaagtttgaaggatatggtgttgcacgtcatcaagatcttatgtcacataatcatggctcttttccatctaacacaccgacatttccgtatatttctcgaggggttttgggcggtattaaagattgtagcaaagaaaatacacagattgaaaagcgctgtaaacccgataaggataactcggatgtccaacaagagttaaaaaaagaaagtgcgcttagaaaagcattagcaagaagaaaaaaaatacaaaataaaaaaaatagcaataaatggcactggacggaggatcattgtgctgggttagaaataaaaatgtcagggaaagatcctaaaaaagttgctaaagagtttatggatgatatttctgattcgatagacgcattaaaaagcgaattagattatgttagtgcattaaaaagtaaacttactgatatggcaaaggatgccgcatcaaaagcattcggtaaggtaatcacaaaggctggaataaaacaagtagcaggtagctcagttccaggttggggaaatgcggcaatggccgcatggacacttggtgatgcagtctatgcaggttttgaggttagcactattaaatcagctgctgaagagggactagaacaagttaaagtcttatctgaaaaagcggatgatataaaaaaattgatcgaacaaactgaaaattataaaaacttatcacctgaagaacagctagaaaaagcacaaaaattggctgaagatgcacaagatattcttgctagcttaaatgcttgtgttcgagcaagaaaatgcaatttagtcccttattctgtaaaaaatgcgataaaaggtgccagaggaagtaaagtagagaccgcgaaaaaaggaggatgttgccaaggacaaacggggcatcatttaatttactctcatttgttaagagagacatgtaagaattatgaggagtccatagcccctactgtttgtgtggaaggtacgtcttggcatggtggtagtcatgggcgtattcatacggcgatggacaaagaaattttagacctaaaaagaaataatatactaataaatgacactatgagtatgcaacaagctattgatgctgccgttaatgcccataaaaaaacgtttccatatgctgattgttccaatagatgtattagagctcaattagaaagttattatttatcaatatgcaaagatgcaagattacccgcgaaagactctaggggtaaccctataacaactgaaaaagagagagaaagataa

SEQ ID NO: 296300 - DNA, 1026 bp, Proteus mirabilis
atgaaaaataaaaattatttatccattgttgctgctgggttatgtactcccgttggtacagatatttattcagcaacagcagccattcgttcaggattagatcatttccgtgaaactcattttcgagatacgctaaatcagcctattattggctctttgttatatgattatcaggtatggggacctgctcgattaattgcgttattaaataaagtcattgatgattcattggcgaatattgctatcaataaagaaaatattgttatctgtttacttttaccagaagaagaacgtctaggtattttcccacaatggttaagtatagttactgacgctatattgcctcgctttcataaaagctctatcgcgttatgtcgtggaaaagcaggtattggggaagcgttgccttttttacagcgaatattatcagaacaaaccactcatattgcattattagtcggttgtgatagttattttaatgcagaaacgattcgatattatacgaatacaaatagattattgcattcggaaaatagtgacggttttattcctggcgagggagcggcttctgttgcatttacattaacaagcaataataatagtaaagaatacgttactattcttggttttgatactcaattagaagcagctcatattttgcaaactaaattgcctttaagagtgaaaagtttatcaaatgctattgaacaagcttgccaacggtcaaatcttcttttacatgacactcaattttgtatgagcaatgcaaatggtgaagctttttactttaaagaagttgcgttagctattacgcggacattaaaagaaaaagtagaacattacccccattatttaattgctaaaagtgtcggtgaaacaggggctgcgagtagtgtgattatgttagcgatattatcggagtggatgaagcaccctgaaggacccgggaatactggattgataatatcaagcgcggatagcggagaacgaacagcgatcattttacaatatcaagaggtaaagtag

SEQ ID NO: 296301 - DNA, 1056 bp, Proteus mirabilis
atggagttgataaataatgctaaacatacagttgctaaagcgacagtaatgattgataaagctgggttcgagtatctggttgttgtaataaaagcaacttatcatattccagaaaataatcagcttccacgtcctattattccatctcaacccctagtctattcagatatatattatggagaggtggggaaatctgcgccaatttatgatgctgactttgttttaaagaaacaaaaatgtgatgtaatttttaatgctaaggcatttgcaccgcataaaaaacctattagccaactgattatatctgttcaagttggagatatgataaaaaagatcgcagtttttggtcaacgtaattggtgtaaagaagatggcctttataaacctggagtcgcagagccttttactgaggttcccttacactatggggttgcatttggaggaaaatattattacaaagatgagcagatatctcactctataaatccactgggaatagggtattttttatctcgaaaaccgaataataaagaaataaaaatgcctcaactagagtgcattgatgaacaaataaatacacctgaaagtcaaattaatcccattgcattatccgtattacctcgccattatggtgaacgggtaaaatatgcaggtacttttgatgaaaaatggcgtaacgaaacagccccctttttaccaagagactttgatgaacgttattttcaatctgcaccagctgatcaacaaattgattttcctattggcaatgaagtgattgttttaaacaatatacaccctttgcgttcgaaaattaattttaaactaccaagattaaataatatcccagtaagattttatcagcgtcaaggggaagtcgtgttattcaccccaagcgttgatacactttattttgaaccagaaaaggattttttttctgtaacttggcggtgccaattacctattcaaaatatactcgatatagagcaaattcttataggaccaagactagatagttatgtttctcgtcaaacgtatcaatctatttgtaagggataa

SEQ ID NO: 296302 - DNA, 531 bp, Proteus mirabilis
atgacaaaattattaactgataataaaataccatcacaaaaatcatccttactagatgagataatcgaaaggacagaacctcaacctttatcgggtgagccttcaatgcttccctctatccaattagcaaaaattgttagtaacagtaacgaaggtatttctattacatttaatgacaatgaacaacctattttagcattgagtttagcgccaatcactgaatctgatgtaggcaaaatatgtgcgatccagtttattaatggaaatcagaataacccattgatcgtagggatgatttattcaaataactatttagataaattatcaaaacaaataataaataatgcgacattatcatgtgttgaacaagaccaattacatatccaagcgagtgagtctattacgttacagtgtggagaatctagcttaacaatgactgctgatgggtttgttcaaattagggctctttatattgataactatgcattagccacaaatcgtattaaaggtgcatcagtacaagtgaactga

SEQ ID NO: 296303 - DNA, 372 bp, Proteus mirabilis
atgaatactaaagtattaaacaatagaacaacgcatgtacttgcagatcattttgaagtagtcgaaaaaaatcaaatgatcaaaattacacaaaatcaagatgaagaagtgggtgaaaataagaagttatttgttaataaggattatcagcaaagagttggcgctaataaaacatctatagttaaacaaaacattaaatatgttgctggggattcatttgaaattgtatgtggtaaatcaacattacaaatggataaagatggttatattcggatccgaggacatgaaatcataattgaaacatctggagatcaatatattaaagccgatggagatatcacccttaaagccaaaacaattttaggtaattaa

SEQ ID NO: 296304 - DNA, 612 bp, Proteus mirabilis
ttgctgctggatgtcgatttattctccgtttggctattattagctttattaggtggcgtttctgtagatacgctttccgtttttccttcaattttaatgccattatctgatgaggttattttcggtgtttctgggctttggatcacctcagtacctttagcggcattacttcctttctctgtggcggagatttctgcccctttgattgcctcacttcctttggatatattactggtctctgtcgcttttattacgtcagtagctttatttaccgcagaagtgccttcagatatttcagttattttagttccttctgctactttattaatagcattagcaccttcagcgactttccccacttttaaaaaagcagcggcaatagtcgctatttcaagcccacctcttgttactatttcgactttatcgctatcactttttttccatttattctctaatttttctttttcttcatcgataagtttacctaatgcacgatatttggctttaacgtcttccttaacaccttcaatacagttattccccaacctccagttttctgcttcaataagtccctcgatggtttttttgctcgcatttagagccacgttttga

SEQ ID NO: 296305 - DNA, 1056 bp, Proteus mirabilis
atgaaagtgagtaacacaaccccatttccttatcttttataccaaaaagcaggaaaaaaggatgagctgtttaatgtgatcgcattgcgccaaacttttcggctcaagactggcgggcattactcggatttaaatgaacagcaataccctttaaacatggcagatcgttactatcatgcaccggaaaccagtagtttaatcgaagaaacggatttagtgtggacgcgtccttgcactaatatccatatactgggggttgcgcgccctaaaggcaatcagcctacggcacaatggcgagcaggtattcgcattgaaaactttagcaaaacgtggtctttgtttggccctcactattgggaataccaagaggatcaatggagcttgagtgaaccaatacctgttgatggggtttctttacgccatgagttggcttatggaggaacatggcagtcccctcagcaagaacagcaacaagtaatagaaaatcccattggaatggggttttatcccgatgtagaggcacttgataaacaaaaacgttatccagcccctcagattatggaagatattcgtaaaagaccgcttgatacgttgtctattgatactcgacaaattagtgaaggtatggggcctatctcccgttggtgggcagggcgtgttgaatacgctggaacatatggaaaagagtggcaagaaaaccaattcccattttatccggatgattttgatgaacgttttttcaatagtgcgcacccgtctttacgttatccagggtatttgctgggtaatgaacctatattattggaaggtttattacctgaatcatcgcgggtcgttacagcgttacctgactatcgtgtgaaaatcatattacaagacatcgaaggtgagcttttctctttgaagccagatttagacacactgactattgacttagatcgtcgtcttatctctgtcgtgaaacgacttgttatccccgcaaaatacccgattgtggaagcattaataggcgtttgggttccagcagaaacaaaaggagcttgttgtaatggctga

SEQ ID NO: 296306 - DNA, 324 bp, Proteus mirabilis
atgaatacccgtgttcttcatgatcgcactacccatgttttacacgatcatgttgaagtgatcgaaaacaatcaacagatgcaggtgaaaggcgctcgcacagaaacgatagataaagataacagcgaaacggtaggccaacataaaaaaattactgtaggcaaaacattatctatcaatgtcggtgaagtcattgaattacgttgtggagcaagtgtgctacgaatggataatggtgggcatgtcacgattaatggtcaggaatttaagttcgaagctacaggtcctgtgaaaattacgggtaaagatatcgatttaaactaa

SEQ ID NO: 296307 - DNA, 231 bp, Proteus mirabilis
atgcgcagaatgttgcagcaaaaaatcatccaagtatgtgatacaaaaatagcgcaaaagggagaaggggtaggcctctctttttatgctttttttgctaataaaaatgatgatcctgaattattaatggaagcggcaacttggtggatattgacgcataaattagatcattttgaaaaagccataaaaattaagaagatgatacaaactgaaatggacgctaatcgctaa

SEQ ID NO: 296308 - DNA, 264 bp, Proteus mirabilis
ttgattattatcacattaacgtcagtcataaaccgttatggtaattttatgattaataacgtaaacggtgatgatatggaatattggtttattgcgtataaagtgcgttccagaaatggtgatacctacgccgggcataaaatagtagaaactgagagtgggatcacaccccatattgcgttagaaaaagcatgtcaggaagttgcacaaggggctcaagctgatattcctgcggtgagagttgtggcatttaatcgtttataa

SEQ ID NO: 296309 - DNA, 1143 bp, Proteus mirabilis
atgacagtattaaccgtttatttatgtggtaccggcgcttcatcttttgataataataatcataataatcctgtttattggcaaggtgagcttgtttccaccttggcgcataataatctagatcgcgaatttgctcagtggtttattgtagatggcccaggtagcggtaatttgcaagaagatgatttatgggttgaaagccctaattattcagatataaaaggctctttatttggcagtggatgggaagaaaatgttgaacatgcactgtgcttaatgaaaggcaactttgactggcaacgtgaaaagttaacagaacaacaatataatcaactgaaaaaagcgggtattcccattgaagatgttgaagtgactggctcttttttatggcgtaaatataattatggtgaccgctatgtcactcaacaacaacttcagcaacaaattattcgtacctttcgcaaagatggcatcattcccacccaagtgaatttaatgggttggagccgtggtggcatcacctgtcatatgcttgccaatgccatgttaaaagatcccctattaaaagatattccagtcaatatttttgctattgacccagttccagggccacttaatttccaaccagaaaaggtgacactaggtagcaatgttaaggaatatgtcggattttatgccattgatgaacgctcaaaaggatttgcttgcgttattccaaccgtgactgctgagactaaaatgcatattttcccgctttcaggacgccatgcgactttagtaggcaatgctgctattgatggtagtgaaggtaaaaatgcactattttcaccggggttaattgtgcgacattttgcagaaagatgtttaacacgttggggatgtcaattagcgaacaagctagaattaactgataaggagatatttgagcatcatactgatattaaaaatgatgcagataaatatattgctatgcgccgtaaaacttattccatatatgaaagtagcggtgatgatgaacgtaaagtttcattaggtaaagaggggaaagcattctctgatatatatggggcacaatatgagccttctatggcattaaccgcagactattttgcagatcctcaactctacgatgtgattaaataa

SEQ ID NO: 296310 - DNA, 354 bp, Proteus mirabilis
atggatataatggcagcttacgagcaggttttgaaattaagtgagcaaatgttaacgcttgccaaaaatcagcagtgggatcagctgatagaaatggaaatggattatttaaaaagtgtagaaattatcactaagatgataaaacccactgagggtgagctgataatacaacagcagctcaccaatatgttaaagaaaatactcgaaaatgaaaatgagacgcgaaatttattacgagcaagattagataagctcgctgttttaataagacagactgaacaagagcagagggtacaaaatagctatggtcagttttcagagcatagttattatcctgatctcaatctaaaataa

SEQ ID NO: 296311 - DNA, 1419 bp, Proteus mirabilis
atggctggtattagtgcactaggaataggcgccaagatgccacttggcgagacattaatgcaattagaggctgcggaaaataagcgccttgaacctttagacaaacagatgaaaagctacgatgcacaaattactgcatatggaaaaattcgtagccaattagataaattacagaaagcatctgaagaattaaaaaaattcgataaaatcgtcgccaccaaagttgatgatgagtttgatgcttttaaagtaaccactgatggtaaagcaagcattggtaattatacggtctcggtaacagagcttgcccatgctcaaacactgaaatcaaaagccgtcagtgatatcaaagatcctattggtgaaacattaggtgaaggcaaaacacggactttagtgatcacccaaaaaggtgaaaaagagcctttaaaaatagagttaacagacagtcaaacttctattattgaattacgtgatgctatcaataaaaaagaaggcaacgtttctgccactattgtaaaagcccaagatggcgttaaccatttagttctgacttctcgtaaagaaggtacagattctcaaatggaaatcactgttgaaggtgatagtaagcttaacgattttattagctactccactaaaacaaacagtggtgcaatgacagagatcgttaaggcaaataatgcaaagttaacgattaatgggattgaaattgaacgtcaaactaatgaaattaaagatgcgcctgaagggatcacgttaaatcttaagaaaaaaaccaatgataataaagatggcgtagataagcctgaaattattacggttgcgcgtgatattgagccaatgaaaaaggccataaaagcctggaccgatgcttataatgaattaaataaaacctataaagatttcaccaagtacacccaagttgaaaaaggtgaagatgcctctaaagacaatggtgtgttattaggtgataccactagccggatgattatgtctgagctaaaaagctttatcactcgttctcaatcttcatctgagattgatacccttaataaaatgggcattaaatttaaagtagatggcacattagaagttgatgataaaaaactcgataaagcattaaaagaaaaacctgctaacgtcaaagagttttttatgggtgatggtaaagaaacaggatttggtactcaaacctataattacctgaaaaaaacgctgcaatccaacgacggcacccttgatattgccactgatggtgttaaaaaacgtaaaaaatcgttagataaccaaattaaaaataccaaacgtactattgaagcgacgatggaacgttataaaaaacagtttcaattattagataaaatggttaatgccatgactaactcaagtgcatcaattgaacgtttattacgctaa

SEQ ID NO: 296312 - DNA, 525 bp, Proteus mirabilis
atgcgtaaagtcacacttactcttagtgcaattgcgttggcgttaagtttaaatggcgcagcaatggcaaaagttcatatgccagaagttgttagcccaggggttactgttactgaacttgcacatcagcaaccaattaaatgggtttctgttgcagaaattgaaaaaagcttagaaggccaagcaccaatggcggtaggttttgatattgatgacaccgttctgttctcaagcccaggcttttatcgtggtaaactggaatattctccaaacgatttcagttatctgaaaaacccagaattctgggaaaaaatgaacaacgaatgggataaattcagtatgcctaaacaagtcggtatcgatcttgttcagatgcacttaaaacgcggtgatactgtttatttcattaccggtcgtacacagactaaaacagagactgtgactaaatatgttcaagaaggtttaaatattcctgcagacaaaatgcaacctgttatttttgaaacattttttggtaaaaaataa

SEQ ID NO: 296313 - DNA, 654 bp, Proteus mirabilis
atggacacaaagcgcgtgggatatactgttgttgatctatcccaatggggacgaaaagaacactttgaagcatttcagtcttttgctcaatgcacctttagccagaccgttcaactggatattacttcattattaaaaaccgtaaagcaaaatgggtacaaattctatccgacatttatatacatcattagcctattggtaaataaacatgcagaattccgcatggcaatgaaagacggggaattggtgatatgggatagtgttaaccctgggtacactatctttcatgaacagaccgaaacattttcatctttatggagttactaccacaaagatatcaatcattttttgaaaacttattcagaagatatagcacaatacggtgacgatctagcctattttccaaaagaatttatcgaaaatatgttttttgtgtcagcaaatccttgggtaagtttcaccagttttaacttgaatgtggcgaatataaacaatttctttgcccctgtatttacaataggtaaatattatacgcaaggagataaagttctgatgccactagcaattcaagtgcatcatgccgtatgtgatggcttccatgtaggcagattactcaatgaaatacagcaatactgcgatgagggatgtaaataa

SEQ ID NO: 296314 - DNA, 3078 bp, Proteus mirabilis
atggagcagaaactcggtgtttctgatgcggccaaaacgcaatttgatcaagcctataaattgatcacctcgattgttggggaagttgagcgtcaaaatgcgtggagtgtggctaaaagcgcattacgtgaatggtcatcacatcgccatcaagccgatcgtgttcaccctattcggatgcaattagctgaattagagcaacgtttacagcaaagaaataatgctgaacgtcaacttgcagagtttaataaacagtatggcaaaaatgttgagcctgatgatctatttactctacaagaagagctagaagcaaagattgaagagctgagcgattatgttagtgattctggcgaacagcgtatgcaaatgcgccaagagcttgatcaactaaaacaacaaattgaaaaattaagaaaacaagcgccagtttggtttgctgcacaagatgctttaacgcaactgtgtgaacaaacgcatcaatcttttgaaacaagcaatcaagttactgaatatatgcaacagttacttgagaaagagcgtgaagccacggttttgcgtgatgaaaccgctgctcgcaaacagcaaattgaagctcaaattgaacgattaagtcagcctagtggggctgaagatggccgattaattactttagcagaacgctttaacggggttttattatcggagatttacgatgatatcaccttagatgatgcgccttatttctcagcattatatggacctgcgcgccatgcgattgtagtacaagatctcagtgcgatcgaagagcagttagcttctttagaagattgcccggaagatctctattttattgaaggtgatccgcaatcctttgatgatagcgtgtttaatgcccaagaaatggaaaaagcggtacttattaaaagttctgataggcagtggcgctattcacgttatcccgaaattccattatttggccgagcagcacgagaaaaccagctagaaatattatcccgtcaacgagacgagctgtcagagctatatgctacacaggcctttgatgtgcagaaaattcaacgtgcacaccatgcatttagccaatttgttgggcaacatatttcagtggcatttgatgccgatcctgaagaagatattcgccaattaaatcaacgtcgtaatgaattagagcgcgagttatcacaatatgaagagggcactcagcaacaacgtcagcattatgcgcaagccaaagagtcgctcaatttattaaataaactcattcctcaagtcaatttattattggacgaaacattaattgatcgtgttgaagagctacgtgaagagctttataacgcagaagagtcgatgcgttatttacagcgtcatgagaaagcattaactgcgttagagcctatagcctcgattttacaaagcgatccacaagagcatgatcaattaacacaagattatcaatacgcaaaagaagagcagcaacgttatcaacaacaagcatttttgctggtggaagtggttcagcgtcgtccacattttagttatagcgatgcggttgaaattgtcagtgaaaataacgatcttaatgaaaaattacgtcgtcgtttagaaatggctgaaacagagcgagcgacagcgagagagttatatcgtcaacagcaggcacaatgtgatcagtttaatcaagtactagcctcactaaaaagttcttttgataccaaatcagaactattaagagagcttgagcaagagatgaaagagactggcttgcaaattgatgcgggtgcagaagcgcgagccaaagagttacgtgatcaacgttatgctgcggtgagtgctaaccgtacgcgtattagccaacttgagcgtgatattgcgcttagtgaagctgaacgtgaaaatatggcgaagaaaattcgcaaattagaacgtgattatggccaaatgcgtgagcacgtcgtcagcgctaaagccagttggtgtgctgttatgcgtttagtgaaagaaaatggtatggagcgccgtttacatcgtcgtgactttgcctatctttcagcggatgagttacgttcaatgtcggataaggcgctaggtgcgttacgtcaggctgtggcggataatgaatatttacgggatgcattacgtcgctctgaagatgcaaaataccctgatcgcaaagtccaattctttattgcggtttaccagcatttaagagaacgtattcgacaagatattatcaaaaccgatgatccggttgatgctatcgaacagatggaaattgaattagcacgcttaaccgaagagctaaccagtcgtgaacaaaaactggcgatcagctctcgcagtgtggcaaatattattcgtaaaactatccaacgtgaacaaaatcgcattcgcatgctaaatcagggcttacaagcggtttcctttggtcaggttcgtggtgtacggttaaacgttaatattcgtgaaagccatcaaatcttactggatgtattatcggaagaagaagatagccaatatcaagatctatttaaaaaccaaaacctaaccttctctgaagcgatggcaaaactgtatcaacgcttaaatccacaggctgattttggtcagcgtatgccacaaacggtgggtgaagagctacttgattaccgtaactatcttgagatggaagttgaagttaatcgtgggccagaaggttggttaaaagcagaaagtggtgcgctatcaacaggtgaagccattggtacaggtatgtctatcttagtgatggtggttcaaagttgggaagaagaatcacgacgcttaagaggaaaagatatttcgccttgtcgtttgctcttccttgatgaagccgcacgtttagatgcgaaatctatcgcaaccctatttgaactgtgtgaacgacttgatatgcaacttatcattgctgcaccagaaaatattagtccagaaaaaggcacaacttataaattagtgcgtaaagtctttaatggaagcgagcatgttcatgtggtcggattaaaaggctttgggcaacaaagtgaaaaagataaacatttatccgaaaatattgcagatagttga

SEQ ID NO: 296315 - DNA, 624 bp, Proteus mirabilis
atgaaaaaaatttggctggcgttagcaagtatggtgttagcatttggtgtttcagctgccgatatttctgaaggtaagcagtatacaaatctttctaagcctgttgcaggtgctccacaagtggttgaatttttctctttttattgccctcattgctatcagttttctgaagtgtataaggtcaatagtacagttgaaaaaaatgtaccagaaaacaccaaaatggctcgttaccacgttgacttcttagggccgttaggtaaagagatgacccgtgcatgggcggttgctattgcattaggtgttgaagaccaagtctctccagccttatttaaaggaatacaagaaacacaatctattcgctctgttgatgatattcgcactacctttattaatgcaggggtaaaagcggaagattatgatgcagcaattaatagttttgtggttaactcattggtaagccaacaacaaaatgcggtaactgatttccaaattaatggtgtaccggcaatggttattgatggtaaatataaaatgaaaaatgatggcattagtgctaaatcaccagaagagtatgcaaaagcttattctgatgtcgtcaatcaattactgatgaaaaaataa

SEQ ID NO: 296316 - DNA, 996 bp, Proteus mirabilis
atggccatatctgcctcatttaattttcaaggattgtctcccgatagtatttgggatgcgctaattaatattgggttttatcctgattcagggctgacggaattaaacagctacgaaaatcgtgtttttcagtttatggatgagcacaaacaacgttatgtggtgaaattttatcgtcctcaacgttggagctattcacaaataaaagaagaacatgaatttgttttagcgctaaaagaggcacaggtttctgtcgcagcgcctatcgaggtaaaaggcgaaacagttcatctttctaatgaagggttttattttgcattattcccaagtattgggggaagagcatatgaaactgataatctatttcagcttgaagaggtggggcggacattaggacgtattcaccaaataggtagaaaaaagagctatcaatatcggccgacactgtctgttgcggactatttggtcgcgccaaaattagaatttgaacaaagtgatttagttccaacgcaattaaaatctcaatttattgatgctattgataaaattattcatgaagtgagtcctaaattatcagactcaacatggaaaaaattacgactacatggggattgtcatcccggcaatatattgtggcgtgatgaagtcgttatggttgattttgatgattctcgtatgggaagtgcaattcaagatttttggatgttattaagtggctcaaagcaagatcagcttatacagctagatacattgcttgagtcttataatgaatatcaagattttgatgtgagagaactatcattaattgaacctctacgtgcgatgagaatggtgcattatatcgcatgggtattaaagcgctggaaggatcctgcttttccaagaacctttgtttggtttaaagagcaagacttttggtttaaacaactcgctttatttaaagggcaagtggagcaattaaatgagccacctttacaacttagcccaatgtattaa

SEQ ID NO: 296317 - DNA, 270 bp, Proteus mirabilis
atgaaatgtcaccgtcttaatgaagtgatggaattattgcacccagtatgggaagagcattctgatttaaacttagttcaattattacagaaactggcggatgaagcaggttttaaaggtcaacttgctgatctaactgatgatattttgatctatcatctaaaaatgcgcaataccgcacccacagatgttattcctgggctgaagaaagattatgaagaagatttcaaaacagctattttacgtgctcgcggtgtgattaaagattaa

SEQ ID NO: 296318 - DNA, 450 bp, Proteus mirabilis
  misc_feature (49)..(58): n is a, c, g, or t
gtgcaaaccgtaatctggaacgctatcgccaaagccagtatcctgttannnnnnnnnnatcctgttatcaccgatgaaaccagtgatttttccggtcctttagctggaatgctggcattattaaaacaagctcaaaccccttgggttgtgtttgttccttgtgatgtcccctattttcctagcaacttggttgaaacgctctatcgtcacaaaggggatgccttagccgtctatgccgacgatgggcagcgagagcatccaacactggcactgttaaatcgttgtcttattccaacacttgaggcttatctcgctcaaggtgaccgtaaattaatgctatttatgcgccaaatcgccgctaaaccggttttatttgctaatcaggccgcagcctttattaatttaaacacacctgaagatatagcaaacgccaatcacatagcaaaatag

SEQ ID NO: 296319 - DNA, 537 bp, Proteus mirabilis
  misc_feature (328)..(337): n is a, c, g, or t
atgacacaaaatcagttaccgctattagggatcaccgcttggagtggtacaggtaaaacaaccttactaaaaaaacttattcctttgttgcgtaacagaaatattcgggttggtatgataaaacatacccatcatgatatggatgtcgataaaccaggcaaagacagctatgaacttagaaaagccggagccgaacaaacattagtcgctagtcaacaacgttgggcattaatgaccgaaacccctgatttagctgagctggatttgtactatctcgcttctcgttttgatgcaagtaaactcgatatgattttagtggaaggtttcnnnnnnnnnnaaggtttcaaaacagaggctatccctaaaattgcactttaccgtcatatcaatgagcgaagtgttaatgagttattggatgagcatgtgattgcactagctagtgatagtgatttagacacatccctcccactgctagatattaattcgccagaagctattgctgattttattattcagtggctaacggaaaaaaaatag

SEQ ID NO: 296320 - DNA, 498 bp, Proteus mirabilis
atgcgctataaaagtctacttgttgctttacctttcgtgtttggtgtagcaagtgcaaatgcagcggagaatgttgtgcatcataaattagacggtatgcctatttcagaagcagttgaaattaacgcaggtaataatctggttttcttaagtggtaaagtgcctactaagaaatccgcagatgcaccagaaggtgaattagcttcttacggtaataccgaagagcaaactattaatgttttagaacaaatcaaaactaacctgaataaccttggtcttgatatgaaagacgtggttaagatgcaagtattcttagttggtggtgaagagaataacggcactatggattttaaaggctttatgaacggttattctaagttctatgacgcttcaaaaaccaatcaattaccagcacgttcagcattccaagtggctaaattggctaatccagcatggcgtgtagaaattgaagtgattgcagttcgtcctgctaaataa

SEQ ID NO: 296321 - DNA, 354 bp, Proteus mirabilis
atgccgacctcttggaatttagatgaaaaaacaccattcgaacaattccgagttgccacggcaacacaaaatacgcaacacttagatgctgttttccaaagaatgaaaacagaattcccagtatttgaaaaatcagaagttgttgaacgttggggtgccgttgtgagtccaacatttgatgaattacctatcatttctgaggtcaaagaatacccaggcttagtgattaacacggcaacagtgtggggtatgaccgaaggcccagcagcgggtgaagtgaccgctgatattgtcatgggcaagaaacctgttattgatccaacgccgtttagtttggatcgttttaagaagtaa

SEQ ID NO: 296322 - DNA, 633 bp, Proteus mirabilis
ttggcaccgaggacagttttacatgtattaacgaatgggcgaaggttttctgatatttattttacaaagaaattattatctgaagcaaaagatatgaatatttcatttgggatccctctttattcatctcataaagaaattcatgatgagttagttgggcataatggtgcatatgaagaaacaattatgggaatagtaaatgcaggtaatttaggcattaatattgaattgagaataatcccaacaaaaataaattatcttcactttcataatattgttgaattatgtgctagagtgttctcaaatattaatcaaatttctattatgaatcttgaacccgttgggtgggctaaaaaaaattgggataatttatatatctcaccagataaatatatagaaaatctgaatcttgctatcaacatggctgatattagtcaattacctatagctttatttaattatcctttatgtcatttacctaatagtttatggaaatatactattcaatctatttctgattggaagaattattatccgaatgaatgtgaccaatgtaaaatgaagagtcattgtggtggatattttagttcttcatatggaaaatatcatcaaacagcgagggcgatattatga

SEQ ID NO: 296323 - DNA, 549 bp, Proteus mirabilis
atgaaaaagtggagtttagcagcactattacctggttttttaacgttaaatagtcaagctgttgctagttcaacagggctacctaattctgaattaacatttgaacctgaagatctcgtgtttgctcctttaaatacagaaacaccgttttatatagcagggcatagaagccatagttctcatcgaagccatcgtagtcatagctctcatcgctcttcatctgggggaggatattatcgaagtaccccttctacacaaagttattctcaaccacaaacaaccaatagaacaacttctaatttatctaataatgatttttcacaagcagttaagaattctaatgttaatcaggaacaaaaaaagcgcctgataatgagggtacaatatgccctatttgaaagacattattttaatgggatcattgatggtattatggggccaacaacacgtcaatcgatacgtaactatagaagagatgcaaaattacccgctaatgtattaattgatgtagatttattaaattcattgggaatttatgcaacttattaa

SEQ ID NO: 296324 - DNA, 231 bp, Proteus mirabilis
atgaacattaaagtcggcgatgagtttttggtttatatggcattgggtgaagagagctatatgaaggaatattatcgtgtgttggagttagatagtgcattatcacaagtgaccggtaaattgctaagaaggacgacggcagatgataaaaatattgggttagggcgttgtgaattagaaggtgggattgaacaatttgcgttagaagatatttatccaatagagaagtga

SEQ ID NO: 296325 - DNA, 441 bp, Proteus mirabilis
atgcaaggtattaagcgaaaaattgtctatgttaccgcttatgaagtatttggttgggttatctcatcggtaggactggcgcttttagccgatagttcaaccgctgttacggggccactcgcactcattattaccactatcgcggtaagttggaattttatttataactgtttatttgaattttgggagagtcgacaaaagtcgagaattcgcacctttagacgccgtcttgctcatgcggtaggttttcagcttacgttggtggtttaccttattccgctgatagcttggtggctaggggtttcattatggcaagcactggtgatggattttgcacttattatcatcatcccttgctatacatttgtctataactgggtatttgacaaaatttttggcttaccaaaatcagcattgcccgaagatgtgcctgttgcttaa

SEQ ID NO: 296326 - DNA, 903 bp, Proteus mirabilis
atgcagttctcaagtgaacatatcgcgatatttttagccgttatggataaaggctctttttctgcggctgcgcgttcattaaaacgtgttccttctgcggtcagtatggcgattgctaatatggaggctgaattaggttatgcactgtttgagcgttcatcaagagagccacggccaacagaaaaagctaaagcacttgaacctcacgccagaatgattgctgagcaattaaagctattacaggttcatgcacaagagctttcaatggatctggaaagtatattaaatattggcgtcgcggcagatattaatcccgattatttattaccggcattatctgagttaacacagcgttaccccttactaaaagtgaatgtagtaaccgcggcgcaagatgacattattgagatgctgcacgcacgtaaaatccaattatgtctcgtgtatggtgggttatatgtcaatggcgatgaacaatttcaatatttgggctctgagtcattagttgccacaatttcggcaagtcatattgcacttgctcaccctgcaggggtatttattgaagatttagtgaatgtaagacagataatgatagccagccatactcaagagataagagatgtacgctctttagtggcgactaattactggcaaacagataactttcaaatggcattaggtatggttgaagcggggatgggctgggggaatttaccttattcgctgatttatacgcagttacaaaagggaaaattaaaacaactgcaatttaaaaatactaaaaatgaattgcgcttaccggtacatgcaatgtggttaaaaggcgagtcactacaaaaaggggcaaaggaattggtggagttaatgaatattcaccaacccattgtgcccaattttgattaa

SEQ ID NO: 296327 - DNA, 663 bp, Proteus mirabilis
atgaataatatgggagcagtcgcagacaaagcgactattttattaattgatgatcacccgatgttacgcaatggtgtgaaacaacttttaagtcttgatacaacattaaccgtcgttggtgaagctggcgatggtattcaaggggtaaaattagctgaagagttagatcctgatttaatcctactcgatctcaatatgccgggtatgaatggttttgaaacactcgatcaattgcgattacgatcgctctctgggcggatcgttgtgtttagtgtatcaaactacagtgatgatctgatcaccgccttaaaacgaggagcggatggctatctcttaaaagacatggagccagaagagctattagccgctttaaaacaagcagccgcagggaaaatggtggttagcccaacattaacccccattttagcgcagtcactgcgagaagatcgttctgaaggtgagcgggatatagaccaactcaccccacgagagcgtgatattttaaagctgatagcacaagggctatccaataagatgatcgcacgtaaactcgatattactgaaagtacggttaaagtacatgtcaaacatctactcaaaaagatgaaattaaaatctcgtgttgaagtcgcggtttgggttcatcaacaacgtgtggattaa

SEQ ID NO: 296328 - DNA, 948 bp, Proteus mirabilis
atgtgtataagagacagatttaatgagataagcttagccccttcctcacgccctgaatattgtccaacgccagactgtgagcgctgcaatgaagatgccagcatcactacaccgttaaataatcgcttattacattgggaattgaccgatcagatccatcgctacggtttattcgtaatgcagttaccggaaaatagtgtacttactgacgaacagaataatttaatgctcttattgactaagcaaatttccgcaatgcttgccatggagcaacaaaatgaacagcaacaacagctattattaatggatgagcgttcagcgattgcacgtgaattacatgattcgattgctcaatcgctatcatgtttaaaaatgcaggtcagttatctacaaatgcaatctgaaaccttgccagataactgtcaaaaactactaaaagagatgcgagaagagctaaatgtggcttatcgtcagttaagagaattactgaccacatttcgcttgaaattgacagagcctggcttattagccgcattagaaaatacactaaatgaatttaatcaacgtttagggtttgctatccattttgattatcagttacctgcaaaatgtgttaattcacatcaaagtattcatgtggtgcaaattgtccgtgaagcattaaataatattctgcaacatgcgaatgcaaactgggctgaagtcgcattaacacttaataatggcatcgttgaactgcaaattaatgataatggtgaaggtattacgcctaatcccgaaaagataaatcactacggactgattattatgcgtgaacgcgcgaatagtctgaatggctcttatagtataagggttcgcaaagaaggtggaacgcaagtatttgtcacatttccgttaatcactacccataaagatcctatcgaaaagggagcaaatcataatgaataa

SEQ ID NO: 296329 - DNA, 687 bp, Proteus mirabilis
atggaagtagaatggaatgaaaatgttgtcaaacaatacaatacttatattgccggtcgctatccatttaacccagcagctaaacaagatgttcctttaagtgaatttgaacgtttcttcaaaccaaatggaacattagatagcttctatcaacaaaatctgcgtttattcgttgagaataacttagtcaacgatagtgatagccaatcattgatccgcgctgatgtattagcacaaattgaaatagccaatcgtattagagaaaccttctttaatgcccaaggtaatttagaagcacaatatgctattgagccactgtcattaagtggtaataagcgtcgtagcatcttaaatcttgatggacaattgattgattacgctcatagtcgcagccatgtgacacacttggtatggccaaactcaatgcgttccaatattgaaagtaaactgactttagtgcctctttccggtgataaatcgccacgttcaatcagtttctctgggccatgggcacaaatgcgattagttgataatgcaaaactcatcaatatcaaatctaactcattcgatattcgcttcacaatcgacggtggtgatatgacttatcgagttatagttgatgaatctaataatcctttcttcggtggattattcacaaaattccgtttacctgaaacgctttattaa

SEQ ID NO: 296330 - DNA, 1176 bp, Proteus mirabilis
  misc_feature (1161)..(1170): n is a, c, g, or t
atgttgagtgcgatgaaatcagaaagtttagtgattaaaattgggggatctccacttgatacccctgaatttattgccctgaaaaccgaatttaataaattgagccaccctgctcgaccagaaataagttggacacttattgagtcactttgcttatccctatttaaaaatcatggtatcgacctacaaagcggtgcttactataccattgcaagattacaacagcatggtttaagcggttttactgaaggatgtgagttattagcaaatgttattgtgacttattgggatagcctgtggccggaaaagccaaaccaacgtacagaagtattaaactggtttaataccaaagccagcgctttattaagacaacaatcctatcaagcaaaagatctacgattaatctatcgttcagagcgcgcgttacagttaataatcgataaactggctaaaacaacttgggaaaaactgcctaaaattgaaaacttactgtggtttttccaaaacttagccaaacaaattgaaaaacaagaaaaacagacgcaacaagatagtgccgaccccgttagcgtaccgccattagtctgtattcaacaaccgtcgaaaacaacggacaaagcagcccccacttttgtgattgaaacacctcaacccgcctcttctttcactgtagtagcaaaaaaaatgagtgcgacccgaggttttatatggggctgtgtgctcagttgcatactgtttttagctgtcggatttggtgtacatctctatttaaaacaagagatgaatgcgattacttcaatacctgaaggtgcggctgccaaatggttgtttaaaccacagttaaatagctacgagtatcatttagcattattagaaaaacgttctcctctttctaatttacggctaattgatacgatgcaagaaaaagccaaaaacgcttggcctacagatgcagagcaaatttattttacacgtaattggcaaaatctttatcaaacgcgcttagagaatatgccaattaatgatagctggtctgaaaccgcgacattattacaacaactttctaataaaatagttcagcaagaacgaaatagaggcagttttacactctcttatctaaaaacggcaatttatgatattcaaaagcagcacaataaagtnnnnnnnnnnttatag

SEQ ID NO: 296331 - DNA, 1737 bp, Proteus mirabilis
atgagtgaaattaaatatattaaagaaaagcagtacttacaaaaactgttcagtgagtatgcagataaagcgccacatttagcgagcgtacttgatcctcaagatccacaaacaagttatctcttagaaggctttgcttttttatctgctcgtttacaagataaaattgatgatgcttttcctgagatcacattacccctactgcaacgactaaattcccaagccattaaagggctaccatccacaacaattatccaaattgaccaaagtgaaattctcccctatcccatggagattaatgaaaaacatttggtgattggcgacaacggggcacaatttagtttctgccataatttcaccatcatgccttatagcattttggatagaaaaattactcagcatccaaaccactcttgtatctctcttgaaatattatatcgtggtgatgtggaattaactcaaacaaatgcacttaatgtttttttaggggaaaataaaaccacctcagacattttattactcgcatttagtcaatactttgaaaaaattgaggtggtacataacggtgaacgttatgaaggcgatcctcttaattatgcttttgaacccaaaattggcaatgactataaaatcttcccacagaaaaataactcattttctgcgccacaacgtttattagaaggtctttatttaccccatgttcaccattttattgagttagatataccacaaatagtgactcaattagattggaaacaacagcagcggtttgttgtgaatatctatttcagtcagcaacttcctttaactcaagaagagtgtaatcagagcttttttttaaactgtgctccagcgattgatagtgaagcaaaacatacacttttaattgattttaaaaagaataaatcaagttatttactccctattccaacccatcactatttggccgatcttgataaaattgagttatcactagagcctcatgagctagcgcgtggcatatactgtcatttttatcctacgacagaattaaccgccgcctctcgtttaatgccccaatttcataaagccattttctattcattaacaatggagaaaaatattactgggcatacactttattatttgaatttctttgataataaaggtgatcctatggtcacaccgcctagtttacattttgcatgtgtttatattggctttgaacaatataaaagaaatgagttaggtctattaaataaacacagcgaaaaaatgcctgatgcagtaaaaacgggaaatatcacattattatcatcttgttatccacctattgtaaataatcaccatttttggaaattgttatctcattacagtgctaatggttcaatgttaatgtcattagatactattaaacatatgatttctgattatattctttaccgagatactgataggcagatcactcgaaaatgtgagcgattattaaatggactcgttgaactaaaaacacatttatatgactatattttaaaaggtaaaccctatcgttgtttatctttatcgctattcattgacgaaacacaatatgaaaatagaggtgaagcttttgtctttactacacatctttaccattttttcccattctgtttatctgaaaatatgttattggaaatgtcagttacactcaatgatcagaaaaacaccacttggtatttatctccctcaccactaaggggctataaatcaatgatttaa

SEQ ID NO: 296332 - DNA, 474 bp, Proteus mirabilis
atggctaattcaatatatttaaagataatagggaaatctcaaggtgatatatctaaagggtgctctactttaggatctataggcaataaatatcagcacggacatgaagatcagatatttgtgtattcatttgattatgatttaactcgagcacaaaatttaaatcattctcctgtggtaatttcaaaacctatagataaatcttcacccttacttggggttgcaataacaaataatgaattattagagtgcgagctagaattctatagaacaagttcaaacggcaatcaagaaaagttttataccattaagctaacaaaagccagcattaccaatatatcagcacattaccctaattcactgacgcatgcagatgcccagccttatgaagatattactattcgatatgaaagtatctcttggaaccatatttgtgcaggaacatcaggttatagtatcagcaaaaatatttaa

SEQ ID NO: 296333 - DNA, 204 bp, Proteus mirabilis
atgggagatgtattatttcgtgaaagtattggtcgtactgatttccctcgtggtaatcatgccgatctgattgcctctatcaaaaataaagtattaccactaggtgatgattatctatttatccccggccatggccctatgtctaatttaggtcatgagcgtcaatataatcctttcttacaagatgaaatgcccatttggtaa

SEQ ID NO: 296334 - DNA, 255 bp, Proteus mirabilis
atgatttggtcggtgctttgtgattatgatgaaaaattacttacacaaattagtgccgaattattattagatagcatcaataatcaaacagaaagtttttaccctggacaaccggccttggtgagaattgaggactctttagaattaagagcatcatttatgccaattgcattgcaaaatggagaaagcatggcaagagccattgatgactattttcaaattatgaatagtatacatcaacggtttattggctaa

SEQ ID NO: 296335 - DNA, 636 bp, Proteus mirabilis
  misc_feature (117)..(126): n is a, c, g, or t
  misc_feature (607)..(616): n is a, c, g, or t
atgtttcataacgcagcgcatcctttacgaatacaaggaaatattttagaagtgatgttacgtgatgtttttattggggaggtctgccaactaaaagagaatattttcagtgaaaannnnnnnnnncataataacatagcaatattaagtatgatgggaagcgctcaaggttactctttacaaattatagttgagccaacaggaaaaacattttcagttgccctaggcccacatatattaggcagcatgattgatagtaaagggaattgcttattacgatttaatacagaaatagtagagaagacctttaataccttatgtcctatcgaaggtcggccacctttgtttagtgataggctgcctattacaacactatttaagtcaggtatacgtgctattgatggattattaagttgtggattggggcaacgaatggggatttttgctagtgcaggaacgggtaaaacgatgttaatgaatatgattatccgttttgcacaggccgatgtttttgttattggcttgattggtgaacgaggaagagaagttacagagtttattgaacaattaaagcaacatacgcgatgtgaaaatacggttttaattnnnnnnnnnntcagcggtagaaaggtgtaa

SEQ ID NO: 296336 - DNA, 855 bp, Proteus mirabilis
atgaaagctgacagcccttttaatttattatcacctgctgatatggcaaaagttgccgatgatgcatgttgttataaagcaaacaaacatatcccaacaacttacttatctgcttttactgcgggaatgtttatttcaattgcgtttgttttttatattacagcgactacaggcaccgcatctgttccatttggtctcgctaaactcgttggaggaatttgtttctctttaggcttaatgctcgtggttgtttgtggtgcagacttattcacttcaactgtactcaccattattcctaaagcgacaggacgtatttcttgggctaagatgttcgctaattggataaatgtctatattggtaactttattggcgccctgttctttgttgccttaatgtggtttgcaggtcaatatgcagcagctaatgggttatggggtctgaatgtattacaaactgcacagcataaagttgagcacacctttattgaagcagtttgtttaggtattttagctaatttaatggtttgtcttgcagtttggatgagttatgcaggtcgaactttaattgataaactctttgcacttattttacctatcggtatgtttgtggcgagtggctttgagcacagtatcgctaacatgtttcttattcctttaggtattgtaattaagaattttgcaccggcagaattctggactacagtaggtgcatcaccagaacaattttcaaatctaacagtatcaaatttcctcgttgataatttattgccagtcactatcggtaatattatcggcggagcagtcctagtcggtctggtatactggttaatgcatctgcgcggcgataaacattaa

SEQ ID NO: 296337 - DNA, 2283 bp, Proteus mirabilis
atgtctgatttaaatgaaaaatttgctgaagcatggaaaggtttttctgaaggtgaatggcagaacaatgttaatgttcgtgactttattcaaaaaaactatactccatatgaaggcgacgaatctttcctagcaggttccactaaagcaactgatacactttgggaacaagttatggaaggcatcaaaattgaaaaccgcactcatgcgccggttgattttgatacttctgttgcttcaactatcacttcacacgatgcgggttatatcgaaaaagatttagaacaaatcgtcggtttacagactgatgcacctctaaaacgtgcaatcatcccattcggtgggatccgtatggttgaaagttcttgccacgcttataaccgtgagctagatccagagctgaaaaaaatctttactgaatatcgtaaaacacacaaccaaggtgtattcgatgtttatactccagacatcttaaaatgccgtaaatcaggtatcttaactggtctgccagatgcttatggtcgtggccgtatcatcggtgactaccgtcgtgttgcactgtacggtatcgagttcctacgtaaagacaaattcgctcaattcacctctttacaagaaaaactggaaaaaggtgaagatctggaaatgactatccaactgcgtgaagaaatcgcagagcagcacgctgcattaggtcaaatccaagaaatggctgcgaaatatggttgtgatatttctcgcccagctcaaaatgcgaaagaagcagtacaatggacttacttcggttacttagccgctgttaaatctcaaaacggcgcagcaatgtccttcggtcgtgtatctactttcttagatatctatatccaacgtgatctcgatgcaggtctgttgactgaagaacaagctcaggaattaattgaccacttagtcatgaaattacgtatggttcgtttcttacgtactcctgagtatgatgaattattctctggtgacccaatctgggcaacagaatcattaggtggtatgggtttagatggtcgtactttggtaactaagaatactttccgtttcttaaataccctgtacaccatgggtccttcaccagaaccaaacatgactatcctatggtcagaacaactgcctattaatttcaaaaaatatgcagctaaagtctcaatcgatacttcttcaatccagtacgaaaatgatgacttaatgcgtcctgacttcaacagtgatgactatgcaattgcatgttgtgttagcccaatggttgtgggtaaacaaatgcagttcttcggtgctcgtgcaaacttagctaaaaccttactgtataccatcaatggtggtgtggatgagaaactgaaaatccaagtaggtccaaaacacgcacctatcatggacgaagtgttagactttgatactgtgatgaaccgtatggatcaatttatggattggttagcaactcagtatgttactgcactgaatgttatccactacatgcacgataaatacagctatgaagcagcactgatggcacttcatgaccgtgatgtataccgtactatggcttgtggtatcgcaggtctatctgttgcggctgactcactgtctgctatcaaatatgcaaaagtatcaccaatccgtgatgaaaacggtttagccgtagacttcaacattgaaggtgaatacccacaatttggtaacaacgactctcgtgttgatgatatcgcttgtgacttagttgaacgtttcatgaagaaaattcagaaactgcacacttaccgtaacgcagtgccaactcagtcaattctgaccatcacttcaaacgttgtgtatggtaagaaaacaggtaacactccagacggtcgtcgtgctggcgcaccattcggaccaggtgctaacccaatgcatggccgtgaccaaaaaggtgcagttgcttcattaacttcagttgctaaactgccatttgcttacgcgaaagatggtatttcttataccttctctatcgtacctaacgcgttaggtaaagatgatgatgttcgtaaagcaaaccttgcaggtctgatggatggttacttccatcatgaagcggatatcgaaggtggccaacatctgaatgttaacgtaatgaatcgtgaaatgctgttagaagcaatggaagatcctgagaaatatcctcaattaactatccgtgtttctggttatgcagtccgtttcaactcattaactaaagagcagcaacaagacgttatcactcgtacattcactcaaacaatgtaa

SEQ ID NO: 296338 - DNA, 741 bp, Proteus mirabilis
atgtccgtacttggtcgtatccactcatttgaatcctgcggtactgttgacggtcccggaatacgctttattgttttcttccaaggatgcctaatgagatgcctctattgtcacaaccgtgacacatgggatactcatggtgggcaaatcgtcacagttgatgaattaatgaaagaggcagtgacttatcgtcactttatgaatgcctctggtggtggcgttacagcttctggtggtgaagctatcttacaagcagaatttgtacgtgattggttccgtgcttgtaaaaaagaaaatatccatacctgcttagatactaacggttttgtacgccgttatgatcctgtcatcgatgaattaatggacgtgactgatttagtcatgctggatttaaaacaagtgaatgatgacattcaccaaaaactggttggtgtttctaaccaacgtacactggaattcgcccgctatttagctaaacgaggccaaaaaacctggatacgttacgtagttgtgcccggttggtctgatgatgatgattctgctcatcgtttaggcgaatttataaaagatatgaaaaatatcgaaaaagtcgagcttctcccttaccacgaattaggtaaacataaatgggttgctttaggagaagagtataaactcgatggtattcatccaccgtcaaaagagacgatggaaaatgttaaagcaattattgcatcttatggtcataaagtgatgtattaa

SEQ ID NO: 296339 - DNA, 411 bp, Proteus mirabilis
atgttgaataataacaattttacaataatgtctgttgaccaatttcccattattaccatgcaggttttcccagaaacgttagagcatgctaataactggattgctgaaatggacttagtgcttgctcaaaaacaaaactttgtattggtttacccacctatcaacaagaaaaatgaacaagaggatatggagggcatgaaagccgttagacgctggctgaaaacagggaaaatgccattaagtcaatattgtgctggaatgatcatgaccgtcaatcaacaaacaaatgataaagagcaactgatgcagttatctcccgttgtttctgcggtgtacggtgtacctatctttgttgaagaaacccttgatggggcttatgctcaagctaataaacttctgggcaataaataa

SEQ ID NO: 296340 - DNA, 1095 bp, Proteus mirabilis
atgagaattagttcaatttatacacaatctgtaggaccattagctgatggtgttattaagttagaagatgattggtctaatgagattgaagctcaagttttatttaccggtaataatggttgtggtaaatcgactttattacggggcatagctattttatgggaagcattaggtatttggctaagtactgaacaaccgttagctccagcgagcaatacacgaaaatggttagaacgttggggagggatcgctattatttttgaagattttaatctttcttctgatgataagattaaaattggacttttttatggttcagatgattttttttcccaagtagtaacaaactatttagatgtaatgtggataggtgaaatttcaaataataaaaagaaaaataaattatattttccatctagtgaaaataaacataatgataatctgattgagacctataaatatttagggaaaagacgtattcaatcactttataatgaattggatccagaattatctattcctaatattgtctatttagatgcagaagcgcgtaaatgggtaaatccaacagcaacgagaaaatcattatacccagacgatcttaaccaagcatggctcgcgacttatacggtgactaatgattggaatgggcaaatagaaacttcactgtttaatttaaaagcgacactgcctaatgaatatcctaacatgataaagagtttaaattactttttttcagataaaagaattgatagtgaaattcttccaggtacacgtcaacagattattttatcaaatggaaggcaacatacgtttgatgagttaagttctggcgaacatcaaatacttattatgttatttacaatccaacgttggctaaaaccaggaggaattgtattaatagatgaacctgatctacatctacatccttctgttatagcacctctcttagcggctatcgaaaatattgtgactaataagaaagggcagttaattttaacgtcacactcaacagaagtttggcaacgctatgaaaaatttggttcacgtattgatcttactttgctaaaaggatcggtgaatgtcgaaaattga

SEQ ID NO: 296341 - DNA, 828 bp, Proteus mirabilis
atgtcgaaaattgatggaacaattaatcgaataaaagatcaacaaataggtagctcaactaaaaaagtattattagttgaaggcagtgatgatgagttagcttttggcgcttttttaagaaaaaagtttcctagttgggaacagtattgggttattgctagcacgggcaagaaacaaaatgtgttggatattttagcccaagaacaagattggcttggtattgtcgatagagatgaatgggataatgctaaaattgaggaaaaacaagaacaattacccaatttattcatccttcctcgtttttgtattgagaactatcttgttcttcctgatgaaatttggtctgcattacctgaaaataagaaaaatagcatagaaaatggatgtgaaacattaaggaaagatatcgagactcagcttgaaaattggcgaaatcatgctgcggtatgggcaatcattaatcctttatgggaaggattaagaagtttgggatttaaagaatcgttattagaacttaatacaagcaatgatacagtaaaaattgaacaaattttacaaaagtggcatcaatatcttgagccttctcaattattagaaaaactcaagcataaaaagcaagaaataaatgcatgcacagtagatcaacaattaaaacaatatatacacgggaaacatttttttaaaaatgtagtttatcctgtgcttatttctcatattggtaatataaaagaaaaagaacttaaaaaacagttatttaattcacaacctattccggaagatcttgatttcctttggcaacatatgatgactaatatcaatactatttga

SEQ ID NO: 296342 - DNA, 804 bp, Proteus mirabilis
atggataatcagataatggctgaagaatatgccatttcacaagataaacagcgtgaaattacgaaattatgtattcaaacggcgctattgttgttacaacatggtgctgaaagtatgttggttgaacagctctcaacgcgacttgggctggctttaggcgttcatcaagttgaaacggctatttcagccaatgcggtggtattaacgacaatagttaatggtcattgccaaacctcaacacgaaaaattgttgatcgtggtatcaatatgcatgttgttaccgaagttcagcacattgttattttagttgagcatcatctcgcggatattgatgaagcaaggaaacgttttgaacatatcaaaccactacgttatccacgttggataattattgttatggttgcactttcttgtggatgtttttccaaattgaatggcggtgattgggatggctttttagtctctgctttggggggaggaatgggaatgtgggttcgtcagctcctcactcatcgtcaagtaaatcctttaatcaacttttgtattacggcatttgttgcgacatcagtatcaggtttattgctaaaactcccttattttcaagttactgccactatatcaatggccgcgagcgttctattattagttcctggatttcctttaattaatgctgttgctgatatgtttaaaggtcatgttaatacaggactcgcacgctgggcgatggcaacgatgttgacacttgctacctgcttaggggttattttagcgatggcagtatgggagttaagagattgggcataa

SEQ ID NO: 296343 - DNA, 474 bp, Proteus mirabilis
ttgggcataatcaacattattctaacgctaattgaagatatgattttagcggcaatacctgcggtggggtttgcaatggtatttaatgtaccgctacgtgcattaaagtattgtgcgttattaggtgcaatagggcatggctctcgtacggtattaatgatcagtggtatgaatattgagtgggcaagcttttgtgccgctattctagtcggttgtataggtattcaatggtcacgctggtggttagctcatccaaaagttttcactgttgcagcgattattcctatgtttcctgggatcaatgcttatgttgcgatgatctccgtggtgaagttgactcaaataggctatagcgaagaaatttttgaagctttagtgactaattttcttaaagcttcatttattgtgggtgctctttctattgggctatctttaccaggattgtggttatatcgtaaacgtcccagtgtataa

SEQ ID NO: 296344 - DNA, 183 bp, Proteus mirabilis
atgaatgagaatatgctgaatttaatgaatgagctcgtcgaaataaccaaaaagcatgcgaacaatgaagatgttaaagcgcatgctaatttagagtcagaaaataaattaagaattcaaattattatttctggtaaaaacgaactggatattacattaaattcgctacaacatgcggtataa

SEQ ID NO: 296345 - DNA, 1536 bp, Proteus mirabilis
atgaatttacttaaatcactggctgcagtgagttcgatgacgatgttttcacgagtactgggctttattcgtgatgcgattattgcgcgtatttttggcgcaggtatggcaaccgatgctttttttgttgcttttaaactacctaatctattgcgacgcatttttgccgaaggcgcattttcacaggcatttgttcctattttagcggagtataaaagtcaacagggagaagaggcaactcgtacctttattgcttatgtatcgggaatgctgacgttgatcttagcgattgtcacagtaatagggatagttgccgcaccgtgggttatttatattacggcacccggttttgcggattcagcggataaattccaactcacaacggatttattgaaaatcacctttccctatattttattaatttcattagcatcattaacagggtctattttaaatacttggaatcgcttttctgttccagcttttgcacctacgttgttaaacgtgagtatgatcttttttgctctcgttgttgctccttattgtgatccacctattatggcgcttgcttgggctgttttagcaggaggaattttacagttggggtatcaacttccgcatctgaaaaaaatagggatgttggtattaccgcggatctcgtttaaaaatagcggagtgtggcgtgttattaaattgatgggacccgctattttaggggtttctgttagccaaatttcgctgatcatcaatactatttttgcctcattcttggtgtctggctcagtctcttggatgtattacgccgatcgcctaatggagcttcctactggtgtgttaggggtggcattaggaacaattttattaccttcattatctaaaagttttgccagtggcaacacacaagaatatcagaaattaatggattggggattaaggctttgttttttattggctttaccttgtaccttgggtttagctttattatcaggtcctttaaccatttcgttatttcaatatggtaattttaatgggcatgatgctctaatgactcaacaagcattagtggcgtattgcattgggttaatggggttaattattataaaaatattagcaccgggcttttattctcgccaagatattaaaaccccggttaaaattgccattgcaacgcttattttgactcaattaatgaaccttgcttttgttgggagtttaaagcatgtgggactggctctttcgattggattagccgcttgttttaatgcaggaatgctattttggcaaatccgtaaacaagatatttatcaaccattagcgggttggcctatctttttattaaaacttgctattgcgttagctgtgatgagtgctgtattagtcggcatgctatgggtgatgcctgattggcaacaagggaatatgctaatgcgtattttacgtttattacttgttgttgtagccggtgccgcaagttattttgtcactttatatgctgttggatttagaccgaaacatttttctctgcgagcattataa

SEQ ID NO: 296346 - DNA, 582 bp, Proteus mirabilis
atgtttggttatcgtagtgggatccctaaagttcgttttgaaacgaaaagaatgatcgttcgcttagcttatgaaagagatgcagagaagttagctaattactatacactaaaccgccatttcttgatcccttgggagccagtaagagataaatcgcactatttaccttcagggtgggagcaccgcttactttatataaatgaattgcaccgccaagagagtgcttttcattttctattattgacgccaaaagaagatgaagtcataggggttgctaattacagcaatgtcatgcgtggtgcttttaatgcctgctttttaggttattccgtcggtgagaagtggcaagggcaaggctatatgtcagaagcattgcatgaaacattacgctttatgcaacgtcaacaaggaatgcatcgtattatggcaaattatatgcctcataatttacgcagtggtaatttattggctaaacatggctttgaacgagaaggttacgctaaaaattatctgcagataaatcaagaatggcgtgatcatgtacttaccgcattaacaactcgtccttttcccaaaggataa

SEQ ID NO: 296347 - DNA, 1203 bp, Proteus mirabilis
atggcactggtaacacaagctcgcaccttggggaaatactttctcctccttgacaatatgctggttgttttaggattttttgtcgtattccctttaatatcaattcggtttgttgagcaattaggctgggcgggtgtgattgtcggctttgcccttgggttaagacaacttgttcagcaaggcttaggcatttttggcggtgccatcgccgaccgatttggtgctaagccgatgattattaccggtatgctattacgtgctcttggctttgcattaatggctttagcggatgaaccttggatcctttggttatcttgtattttatctgcactcggtggcactttatttgatccgccaagaactgccctcgtgataaaattaactcgcccttatgaacggggtcggttttattctttattattaatgcaagatagtgcgggtgccgttattggggctttaattggcagttggttactcctttatgatttccatttagtttgttgggttggcgctggcgtattcgttcttgcggctatttttaatgcttggttactacctgcctatcgtatatcaaccacgagaacaccgataaaagaagggctaaaacgcgttattcttgataaacgttttgttcaatatgttcttactcttacgggatattttgtactgtcggtacaagttatgctaatgtttccgattgttgttaatgaaattgccggcacccctagcgcagtaaaatggatgtatgcgattgaagctttattatcattaacactgctttaccctattgcccgttggagtgaaaaacattttcgcctagaacaacgcttaatggcaggtttatttctgatgagtatcagtatgtttcctgtggggatcacccactcattacatgccatatttcttattatcaccctattttacctaggtactattaccgcagagcctgctcgagaaacattaagtgcctctttagcagatcctcgtgctcgaggcagttatatgggttttagtcgattagggttagcttttggtggcgcgattggctataccggagggggatggatgtatgatattggcaaacaacttgaactgcctgaactaccttggtttttattaggctcaataggatttatcaccctttacgcactacatcgacaatttaatcgtaaaaaaattgaaacagccatgcttaccccatag

SEQ ID NO: 296348 - DNA, 198 bp, Proteus mirabilis
atgacagcaaaaaaatcaaagaaaatccaacgcaatattctctctacaatcctagatttatcactaaacagtaaaattcacctaaaagaattatttttacgcttttattctacgcttatttttattttttatgactattttttgtactttttttacaaatttattcagttcgcgtcaaaaaaagcagaaaaaaagtaa

SEQ ID NO: 296349 - DNA, 963 bp, Proteus mirabilis
atgaaagagacatcaactcctctattactcatcaatatccttgctgatggagagatccattcaggagaacaattaggcgaaagtttggggatgacacgggcagggattaataagcatatcaagacattgcgtagctggggtatcgacattcatacagtggcaggtcagggttatcagctagatgcaccgatgaacctgttaaacagtgaacgtgtcaatcgtggcattcaaggtgcaccagctcgtgtgataccggttattgattcaactaaccagtatatgatacagcgtattagtgaattaacctccggtgatgtttgtattgctgaatatcaatctgcagggcgtggacgcagagggcggcaatggatctctccttttggccgtaatctatatctcagtatgtattggaaattggatcaaggacctgctgccgcaatcgggctaagtttagttgttggtgtgatccttgctgaagttttacagcaatttggtgcgaatggtgtcaaagttaaatggccaaacgatctttacttaaatgataaaaaattatctgggatcttggttgaattaacgggaaaaacaggtgatgttgcgcatattgttactggcattggtattaatatcgccatgagtaacaatcaaaaagatgcaataaaccaacaatggattaatttagagcaggtagggataaaaatagataggaatcagttggcttgtgaaatcgccaatgcgctaagaaaagcatttgtacaatttgaaaaacaggggttatctgcttttattgaacgttggaaaagtttagataattttattgataggcgtgttaaattaattattggtgacaaagagatctttggtatcgctaaaggtattaatgagcaaggggcgttacttttagaacaaaataataaaatagtaccctatattggtggtgagatctcgctacgaagtgcaccataa

SEQ ID NO: 296350 - DNA, 1035 bp, Proteus mirabilis
atgaatgaacctatttcattgcaatcatttaatacatttggtttgaaagccaatgctcgtcatatagaaacggcaaagaatacagatgaactctgtcggtactggcaaaatgctcaagaccaaaaactgtctattcttattttaggcggagggagtaatgttctattcattgaagattttaacggtacggtgattagaaactgtatttctggcattgaaattacagaagatgagcaacaatggcatattcatgttggggcaggtgaaaattggcataaccttataaagagcttaattgaaaagcatatttatgggttagaaaatctcgctttaatccctggtaatgttgggtctgctcccatacaaaatattggtgcttatggtaaagaattaaaagacgtttgcgcctatgttgatattgttgagttaagcactggtaaagtcacgcgtttaacaaatgaagagtgccaatttggctatcgcgacagcatttttaaacatcactatcagcaaggttatgcaattattgccgttggcttagtgctgaataaacattgggaacctattttgacctatggtgatttagctaaattatcaccagaaacagtcacaccacagatagtattcgaatctgtatgcggtatgaggacaagtaaattgccggatcctgctcttacaggtaatgcgggtagtttttttaaaaatcctattgttgatataaaacttgcacaacgcttaaaaagtaaatatccattttgccctcaatatgtacaacataatggtgtaaaacttgctgcaggctggcttattgatcaatgtggtttgaaaggttatcagagcggtggcgctgctgtgcatacaaaacaggcattggtattaattaataaagaaggcaaggcaagtgggcgcgatattgttaatttagcaagttatattcgccaaaaggtatttgaacgttttggagtgcaattagagccggaagtgcgttttattggacggcatggcgagattaacgcggtggatgctatttcatga

SEQ ID NO: 296351 - DNA, 1452 bp, Proteus mirabilis
atgtcaaaacctcataacccagaaattcaaaaaattattaatgagttaaaacaacaatatcaaaatgctgttgatgccttacgtaatgctattattatgtatgctcaagatggaaaattacctgatataaaacaaagggctgaaggtctatttgcttatccgcaattaaccgtacattggtatggtgatgttaaaaaagaagataaaacaagagcttatgggcgtttatcaaaatcaggtacttattctactactatcaccaatccaactttatttgaaaattatttaactgagcaactgcaacttattgcggatgcttatcatgtctcttttgaagtgacggcctcaaaacaggagataccatatccttttgtcattgatggcactggcattggttttgatcggtcaatgagcgcttctttagcaaaatattttccgactaccgatctctctaaaattggtgatgatattaccgatggtttaattgatgacagcgagcttttacctctttcacattttgatgcactacggacggatttttctttggctcgtttaaagcattataccggaactttacctgaagatgtgcaaccttatattttattcaccaattataaccgctatgtggatgaattcgttcgttgggcctgtgcacaagttgctgataaaaatagtccatattgcgcactttcttgtgcaggttttcagcaaataaccgccgatacggttgatccggaaaaattaatttctgatctgacatggaaaaaatatcaaatgcccgcctatcatttaattgcaaaagaagggccgggaataacattagtgaatattggtgttgggccgtcaaacgccaaaacaatttgtgatcatctggcggttctacgtcctcatgtttggttaatgattggtcattgtggaggcttaagagaaagccaattattaggtgattacgttttagctcatgcttatttacgagatgatcatattttagatgctgtattaccgccagatattcctattcctaatattgctgaagttcagcgtgcactttatgatgccactaaagccattagcggtaagcctggacatgaaatcaaacaacgattaagaacaggaacggttgtgacaaccgatgatcgcaattgggaattacgtttttcagcaacatcaaggcgatttagtttaagtcgagccgttgccgtggatatggaaagtgccactattgccgctcaaggttatcgttttcgcgttccttatggcactttgttatgtgtatctgataaaccgttacatggtgaaataaaattaccaggacaagctaatcacttttatgaaggtgcggtatcagagcatttgcaaataggtattcatgcaattgagttattaaaagacgaagaagataaattacattctcgtaaattaagaacctttaatgagccgccatttagataa

SEQ ID NO: 296352 - DNA, 993 bp, Proteus mirabilis
gtggattttcaccacgacgatcaagaaataacaccagaaacatcacttgtattggcggaaaaacaaccattattagatctcaatgcaactttcacctctccgacacaaactaaccctgcactggcttatttacgcagtttaggctctaaacgtagtcgccaaacgatgggatcgtttttaacaatcgtggcaaaaatgattggcttctcttcaataaagcattgccaatggggagcacttcgccgccaccatattcaagcaattatcgacatgttatctgatgcggataaagcacccgccacgattaacacttatctagctgcactaaaaggtgtcgctttagaagcatgggcgatgaaattgatggatacagaaagctatcaacatattcgccaagttaaatcggtaagaggcagtcgattacctaaaggtcgagcgcttactggacatgaaattcgcgcactttttcgctgttgtgaaaaagaccactcctcaaaaggtttaagagatgcggccatattaagtgtactacttggctgtggattacgccgttcagaaattgttgcgcttaattacgagcatattcaatttcgtgatcaagcctttattgttagaggaaaaggtaataaagaaagaatatcctatatgccagaagatacttgggagcgtgttcaattatggatcgatgaaataaggggatcacaagatggcgcccttttcacacgtattcgccgctttgatgatgtaacggatgaacgaataacagaccaagccatttattatattttagagacacgccaacaagaaagtggcattgataaatttgctcctcacgatctgcgacgcacttttgcctctgcaatgttagataatggcgaagatattgtaaccgtaaaagatgccatgggtcatgccagtattatgactacacagcgctatgatagacgtggtgatgatcgtcttagaaaagcggctcgacatttacgtttttag

SEQ ID NO: 296353 - DNA, 1038 bp, Proteus mirabilis
atgaaaaacattaactataagctcgctacacttaccctttgtactctttttgcctcttctgcgttagctaataatacacaagcccctatccgcctcgttattcatggtggtgcaggtacaataactaaagataccatcaccccagaacaagaaaaagaatataaagccaaactggccgaagcattaaatgctggatatgctgttttaaatagtggaggcaccagtattgaagccgtacaaaaatcgattaatgttatggaagactctcctctttttaatgcaggtaaaggtgctgtttttactcacgatggtagaaacgaacttgatgcttctattatggatggtaaaacgcgcaaagcgggtgctgttgctggtgttaccacagtaaaaaatccgattaatgccgctattgcggtaatggaaaaaagtccacatgttatgatggtttctcaaggggctgatctttttgccaaagagcaagggttaaccatcgttgatccgagttattttcgtactgaatatcgttggcaacaactacaaaaagcattagaaaaagaacaagttgtattagatcatgatggtaaaactgcggctctttttgctgatccgatgatgtatgattataaatacggcactgttggcgctgttgcattagaccaacatggtaatttagcggcgggaacatcaacaggtgggatgaccaataaacgttatggtcgtgtgggcgattcccctattatcggtgcaggtaattatgcggataatgaaacggttgcggtatcggcaacaggatcaggtgaaatgtttattagaacgctgaccgcatttaatattgcagcccaagttaaatatcaaaaactaccactagagcaagcggcacaaaatgcacttgatgaagtaaaagcaataaatggaagtggtggtgttatcgtattagacaaatctggaaactacacgatgagctttaactctgaaggaatgtatcgaggcaccattggtaatgatggcaaaccactagtcgccatttataaagattaa

SEQ ID NO: 296354 - DNA, 1146 bp, Proteus mirabilis
atgaatagtttgattggctcttctgtttatcgtcgccaactcacttgtggcacattaagcgtaacgccaaattgctcattagaacatcttgatgaactttttgatattgcggaaagacgcaaccctaagcgcgcttttttgtttgtcagtaaagtattagggcgccatattcctgtttcacctaagaaaatgcgtgaaacttatcaacaaatggccaaacaatttcctcaatcactagaaggccctattctttttattggtatggcagaaactgcggtcggtttaggtgcgggaatttttgatgaagtaagagatcgctatcctcaagcgctctaccttacttcaacgcgccatcctattgctgatggtgaattattctgtaaatttaaagaaaatcacagccatgcaactgatcacctactttatttgcctcataacctagaacaacgccaatggatccagcaagcgaaaaccattgtgttaattgatgatgaagcaaccacaggtaatacctttcttaacttgctgtctgcattacgtgaagaaggtaagttaacacaaattaagcagattattgctgtcacattaaccgattggagtggtgatgctctgcaaaagcgttcaccattacccataacaaccttctctttagtgcagggaaaatggcaatggcaagccaatcccgatgcaccattacctgttatgccaaatgtcaatattactgcctcaggacaggttgctatcacaggaaaacaaagctggggacgcttaggcatgacaacccctgctaatgatcttggcctatttattcatgtttctgagggtgaaaaaatattggttttaggctctggtgaatttgtctgggaaccctttttattagcagaacgcttagaaaaacaaggggctattgtaaaatatagctcgacgactcgctcacctattgccactaattttgctatccaatcagcgataacttttactgataattacggattaggcattcctaactttgtctataacgtggctcatcagcaatttgatcgcattctgctttgttgtgaaacccctgccgaaagtattgatagtcaacttattgaggctctctataaagttgcccctattgttgaagtaattagctatgactaa

SEQ ID NO: 296355 - DNA, 771 bp, Proteus mirabilis
atgactaaccccgttattttagccgatcttgacgataccttatttcaaactcgtcgcaaaatggtggatgagttagcgcttgccccctataaaactggtgcgttggatagaagtttagcgccacgtagctttatgactcaagagcaagctatgctggttgattggatgctagaacatgctgatttaattccagtcacagcacgtggaacggaagaaatgagccgtgtcactattccttttcattcatgggctattaccacacacggtgctgttgtcttaaccccagaaaaagtcgcagatgaacaatggcaacaccatatcacacaaagcttaacaccttataagcaacctttacttaggttacagcaatctattacccaattaatggctgaacgtaatattgatggttgggcgagaattaactatgaatatgatgatttacccatttatttagtgatgaagcataacgatagcgctcgattagatgagctatatgctatcggtgatgagatagaaaaaatattctcaaccaaaggtttttatattcatcgtaacagtaacaatattgcttggttacctgagccaattgaaaaaggtaaagccgtcacttatttgcttaataaattaaaagcagaacgtggcgtttttcctgtaattggtttcggcgatagcctaagtgatcatcgctttatgaaattatgcaattggtatgctatcccccgccaaagccaattcgcgaatgcgatcaacacaaaaatttttggagaataa

SEQ ID NO: 296356 - DNA, 1077 bp, Proteus mirabilis
atgatggatcatcagcctttttcaggctcttatctactgggtgatgttgattttttactgcaacccgtcaagattgaaatgacacctgttgagttaaaagaagaacttatacagtctggtaaacgtcactattctgatatgttaagccaagagccagaacccacaacctggcatcttgaactgtttgaaaaagcactggctgctggcgcaacacgtttagctacacaagtaattatgctagcaaaatcacttattgcgcattttggtgacacccctattattctgacaagtcttgtgcgtgcgggtgttccacttggcgtgatgttacaacagaccttgcgcaaaatgggaaaaacgtcttatcactatggtattagcattattcgtgatagaggtattgataacgaagcgctttcatggattgagcaacgccatgggacagaaggtattgtatttgttgatgggtggacaggaaaaggcgctatcacaaatgagttaattcgttcattggcgggacgtgaaggttttcctgcacaaccccatcttgtcgtccttgctgatccttgtggttgcgcttggttaagtgccagtgatgaagattggctaatcccttttgggattatgggagcgcccgtttcaggattaatttcacgttcaatttggacagagcaaggcttccatggttttgtcgattgccaacatttaaaacaatatgaatgtagtcgctatcttgttgatactgtgggaaaaatagttgacgccttaatagataacgatattccactcgccacatttaaacatcaaccgtcagacttaaaaaaactgagcgaaaatgtcgttagtttacttgccaacaaatatgacatttcaaatatcaatcgtataaaacccggtattgctgaagcaactcgcgccgttttacgccgtgtacctgagcatattctggtaaaagaaattgcagatcctgatgttgcattactgatttatcttgctaaacaaaaaaatattactgtaaccgaggcaggtaaagcattaggacaatatcgtgccgttactatcattaaaaaggtgcaataa

SEQ ID NO: 296357 - DNA, 318 bp, Proteus mirabilis
atgaacgatagtgaatttcaccaattagctgacgaattgatgtcagaaatagaacaaaccattgataattatgaaggtgatgcagatattgattgtgaaatcaatggtggcgtaatgacattaacctttgaaaatcatagtaaaattatcattaatcgtcaggaagcctttcatcaagtatggttagcgacgcgttctggcggttatcattttgattggaaaggtacacagtgggtttgcgatcgtagtggcggggaatttttaaccatgttggctcaagcaatcagcgaacaaagtggtgaagcattttctttttaa

SEQ ID NO: 296358 - DNA, 2598 bp, Proteus mirabilis
ttgtatctttatattgaaacactgaagcaacggctggatgcgattaatcaactcaggctggaacgtgcatttgcatcgatgagtgatgtgtttaaacaggtgtatggtttaattcctgttttactgcattaccaccaccctcagttgccaggctatattcaaggaaatgtccctcatggtacatgtttctttgaacctgatgacgtgcaacgtcaatgggtcaataagctgactaatgcatcatgtgatgagccaatgaatggatacaccagcggagagttacctattacgggtatctattcgatgggaagtacttcctcgattgggcaaagtcactgctccgatattgatatttgggtctgtcaccaatcttggctggaccaagatgagcgtgcgcgtttacaacgtaaatgtttactgatcgaacaatgggcgggagaattaggtattgatgttacttttttcttaattgatgagaaccgcttccgtcatcatgcaagtggtagcttaggtggggaagattgcggctcaactcagcatatcctgttacttgatgaattctatcgtacagcggttcgccttgcaggtaaacgtttgttatggacgatggtaccagtagaggaagagtaccattacgatgaatatgttaattcactctatgcccaaggtgtattaacgcccaatgaatggcttgatttaggtggattgggtgagctttctgccgaagagtattttggtgcaagcctgtggcaactctataagagtgttgattcaccttataaagccgtattaaaaagtattttattggaagcctattccgcggattaccctaatggcaaattgttggcattagaaatgaaacagcatcttcatcgtggtgaaatcgtaaattacggtttagatgcatattgtatgatgcttgagcgtgtaacccgctatttagtttcgattaatgatttaacccgccttgatttaatccgtcgctgtttctacctgaaagtttgtgaaaaactatctaatgaaaaaaatgagaatgaacctgcaggttggcgacgccaagtattatctcagttagtcacgcagtggcagtgggatcacgaacgtttggcgatattagataatcgtgatagctggaaaatagagcgcgttcgtaacgcacataatgaattattagatacgatgatgcaaagctatcgtaatcttattcgttttgcgcgccgtaataacttaagtgtcagtgctagtccacaagatattggtgtattaacacgtaagctttatgccgcttttgaagcgctaccgggtaaagtaaccctggttaatccacagatttctcctgatttatccgagcctcatttaacctttatctatgtgccaccgggacgcgctaatcgtagtggttggtatctttataatcgggctcctgattttgcacatattgttggtcatcaaccgttagaatataaccgttacttaaataaattagtggcgtggtcttattttaatgggttacttactaaagattcacaggtttatattcatcaaggtgactcctcttgtgatgaaattaaacttcatgaattagtgcgggatatctcgagtcattttcctattcgtttacctgccccgacgcctaaagcactgtatagcccttgtgaaattaggcatttagccattattgtcaatttagaagtcgacccaacagagcgtttttctgatcaagtggtgcattttgattttagaaagttggatgtatttagctttggcgaggaagagcaatgcttaattggcagtatcgatttgctctatcgtaactcttggaatgaagtgagaacgctgcattttaacggtacgcaatcgatgttggaatcgttaaaaactattttaggtaaaatgcaccaagatgcggccccacctgcttccgttgaagttttttgttatagccagcatctacgtggtttaattcgtacccgtgttcaacagttagtctcagaatgtattgaattgcgtttatcaaccaatagattagagccagggcgttttaaagcattacgtattgcagggcaaacatggggattgttctttgaacgtcttaatgtttctgtacaaaagttggagaatgccattgaattttatggtgctatttcatacaacaaattgcatggattacccgttaaattaggcaaagatgcccgttatctgcccgctgtgattgatggttttgcttgtgaagggattattcagttcttctttgaaacaacagaggataataatgtctttaatatctatatcttagatgaagctaatcgagtggagatttattctcactgcgaaggtagtaaagaagagctagtaaaagatgtcagccgtttttactcttcatctcatgatcgctttacttatggctcaagctttatcaacttcaatttgccacagttttatcaaatcgtgaaagtggatggagcaacgcaagtactgccttttgctgggggatcgtttggtaagctaagtgatctaggtaaaacagcgccaaaagaagagatgagtactaagcctattcaaggatttaatgactatcaggctgtacatcatcactga

SEQ ID NO: 296359 - DNA, 543 bp, Proteus mirabilis
atggttccttaccaacccgtattaaccttttggtttgaagaatgtaccccaaaacagtggtttcaaaaggatagcgcttttgataaagaaattaaggatagatttggtgagctatgtattagcgcaagtcgcgcagagcttgcctcttggcgcgagagcattgaagggcggttaggggaaattattattctagaccagttttcacgtaatatttggcgtgatacaccaaaggctttcgcccaagataatatggcgttaattcttgctcaagaagccattcgattacccgaatatctcaccctgacacctgtaaaacgcaaatttctgatcatgccatttatgcactcagaatcacaaaaaatccatcaagatgccattgcgttgttttcacaattaaatgatgacgacacgtatcaatatgaattacgccataaagagattatcgataaatatggtcgttatcctcatcgtaatgaaattttaggccgtacttccacaccagaagagttagcgtttttacaacaacccggctcctcattctaa

SEQ ID NO: 296360 - DNA, 783 bp, Proteus mirabilis
  misc_feature (322)..(331): n is a, c, g, or t
atgcatgaacttcctcttgtcttttttactgttttaggctctagcgcagcaggtctgtttctgatcgcttatatcagtaaaaagttaggtcaaattgatgaacaacaactgcgtaatgccaatattcttgctctgatattaatgcttgtgggcttaggtattggtggattacacgtaggtcagccactacgctttttcaatatgttattaggcgtaggccgttctccaatgagtaacgaagcttttctaagtggtgtatttactggttttgcttttgcaacagtggcactcactattatgaaaaaatggcggggattacgtnnnnnnnnnntttgtaatctatttaccgttatttttggtttagcttttgtttggtcaattccgcaagtttaccatattccaacaattgctaactggaacacagattacaccacattacagttttggatgacgctattaattggcggtggagtacttgcaatggtcagtggtgcaagacgtttaggggcattgtcctttattatcggtgccataattacctttgcagcacgctccggttatgtcagtttcctaagctttaatggcccagaattaagtgctgagcaatcactgttttggggtttccaattagcagtattagcattaggtattgtggttgtcgggtttagtgcattaaaagcgcaaacctcaaaagtgaccttagccacttgtgccgcagcggtcgtgattgctgaattatccggtcgcattgccttttataacttatggcatataaccatgtaa

SEQ ID NO: 296361 - DNA, 612 bp, Proteus mirabilis
atgaagcaatattattttgactccactaaatgcactggctgtaaaacctgtcaagtcagttgcaaggacgaaaaagatttagatttaggccctaaattccgtcgtgtttatgaatatggcggtggtagctgggcaaaacaagacggtatctggacacaaaatatttatagttattatttatcaatttcttgtaaccactgctctaaccctacttgcgtggcaggttgccctactggcgcgatgcataaacgtgaagaagacggtttagtggttgttaatcaagatgtttgtgttggatgccgttattgtgaattacgctgcccttatggcgcaccacagtttgatgaaaagaaaaaattgatgtcaaaatgtgatggttgctatgagcgtgtcgcccaaggtatgaaaccggtctgtgttgaatcttgtccacaacgtgcactggattttgatgatattgaagtgatcagagcgaaacatggtacagagtgtggtatcgcaccaatgccagatccaagcttaactaacccaaatatcgtgataaaagcacataaagatgcaaaaccttctggtgataaaaccggctcagttcaaaatgcggcggaggtataa

SEQ ID NO: 296362 - DNA, 846 bp, Proteus mirabilis
atgtggtctgaagcggttgctcgtggtgaagagttaaccagtaaaaatgccggtgtcagaaataaagataagctggatacgggcattaaatttatgtggtgttactccagtaatgtgattggtaaccagcatgctgatctcaataaaacacatgaattactgcaagatgaatcaaaatgtgaatttattttagtgtgggataaccacatgacaccatcagcaaaatatgccgatattttactgcctgatgtcactactgtggaaactaacgatcttatcaataactcttatgctagtggtgcgtatcattatatggtgcgtttacaaaatgccattgagccgttatgggaaaatcgtcctaactatgatgtattggcagatatcgctgaaaaattaggtgttaaagagaaatttactgaaggtagaacctaccaagagtggattgagtattgctataaccaagtaaaagcaaataacccagcgcttccttcttttgctgaaactaacgatatggggattgtggatagaaaacttcctcctcgtagcgcttatgtggcattagaagcatttcgccaagatcctatcgccaacccactaaaaacagcatcaggtaaaattgaaatctattctgagaaattaatgcaagacactgaaggttggatcttaccagaaggtgatcgtattcctgcaattccagaatattgtaaaaatgaagaaggtgttgaaaacgttaccttaaaagagaagttcccactgcaaatgacgggcttccacgataaaggtcacgtccactctacctattttaacgtcgcaatgttacgtgaagctattccccatcaattttag

SEQ ID NO: 296363 - DNA, 1650 bp, Proteus mirabilis
atgccatctccggctttttaccaacaagcttggcaaagcttaatgcaacaacatcatgataaattagaaaacaatgaggcggcaaaacagccaacgcaagtttatcgcaataaaatgggcatcgcctttttaagctcagtggctcagactatcagagaacaacaatttgataatccacccagttatttaaccgtaaaactagcagccgagcagagtttacgcctcgctttactaagagagcacactggtatggggcgttatgatttgcttgatgggttacaaagcgcctttattaaaggcagtttagatgacagtcaaaacgaattatgggacgaaatcaaaacctgtttttcaggttatctattaggacaaattccattaggtacagcaacgccccctttagtcaatgaaacctatgaacgcgccaaagcatttcgctttaaacttgatgatacattagcaaaaactacaaaatgtgatgtttatcgtaacccccaacatcgcttaagaagtcgttttttacatttattggcatttttagaaatccattttgcccaccgtgtcaatggacctgattttctttctggtcaccagttagatctattatttgaagaatggcaatatgcatggacccccaatgttgaaggtgaactgatctcattatcagaaaaaggctctcaacttgaaactatcgccttaaataaactgttagcaatggaaaaacagcttgcagaacaaggacaaagccgttcaagccaaagtgcggtcactttgttaattcaagcggcattaattgggctccaccagcgtatccctacgctatttaaactgctagatagctatattcagcaagattttcgccttgagtcattaacacaatgtggacataaattgatccatttatggcgaggtcgtcaatatcttgatattaccgatgagctgacattggaaaataggctacatcaagtgatccctcaagccttcttttgcttagagcaattggctcaaggtgatgagcaacaacaagaaagcaatctgcaagccctactctctttacgtgaactcattgagtttatgccatcactggatcatcaatatgattataaaagtgatttttatcagcaacttaatcgccttgatggacagttagataccgttcctttattaaaaggtgcggtagatgcattacgttatctaggttcgtatattgacgaaaagaccttagcggccgtgttaaatgcgacctttagtacaggcagcgctcccgaacatgccattggttattttgtcggtataatgcgcaccgcaccagagctagtcattcgcctgccgttgttagtcaatcacttaaatagcttattacagcaatgggatgaagaacgttttattcagattttacctgatttgcgttttgcctttagccaacttaatcccaaacaaaatgcagagcttgcacaatatattgctaatgatattggtttagatacgcaagccttatcactatggcaatcagaatttagtgccaagcaaatgcttgaagccactaaactcaatcaaaaactgcaacagcgcattaagacacaaggcatgatttcttggtttgaggcgaagaaaacagagaaaggagaccatactcatggagaagcatga

SEQ ID NO: 296364 - DNA, 1152 bp, Proteus mirabilis
atggagaagcatgatgatatgcctaaagataaaatacaacaagccaaacgttggcgcttgattttaggccaatacgctgatgatgctttagggcaagccacgtttaatgctgatgatcttaaaattgaacgtacactcgattttctttatcgccgtgaatatcagcgccgaggattacgtcaagagcgcggtcgccatggctctctcgatgcatcgcaacttactgccgtaaactggctaaatcaagctcgcaaactttttcccaatagcacatttgaacgtatgcaatcacaagcgattgaacgttatcaaatcagtagctttcttaaagatcccaatacgctaaaagccatggagccgactaaagcgttagctaaaacactattaagcttacgcggacgaatgagcgaagaaacgcgagatgcagtaaaaaccattattcgtaaagtggttgaagatattttgcgtcaaattcgtaataactttcgccaatcattaaccggtcgtcgtaatcgctttagacgctcgttagtaccaaatagtcgtaactttgattggcgtgccactattgccgccaatttaaaacattacgatacccaaaatcgtcgtttagtgattgaaaccccttactttaattcacgaatgcaacagcattttccatgggatgtcattctctgtgttgaccaaagtgcatcaatgtctagttccattatgtatgcagctgtgtgtgcgagtattttagcttcattacctgctgttaatgtctccttaatcgtttttgatactcaagttgtcgatttatcacacttagccgacgatcccgttgaagtattaatgacagtccaattgggaggaggtacggatattgctagtgccatgcaatattgcgaaagcttagttaacaaccctaagcgtactgttatttcgcttatcagtgactttgaagaagggggatcattaacccgattattagattgcacacaacgtctcaatagccaacaagttaagttattaggactggcagcactagatgatgaggctcaaccggtttatgactcaactatcgcacaaaaactcgccgatagaggtatgcaagttgcagctttaaccccagaacatttcgcacagtggctagcagaggtaatgcaatga

SEQ ID NO: 296365 - DNA, 771 bp, Proteus mirabilis
  misc_feature (733)..(742): n is a, c, g, or t
atgagttggcagaccgtttattttcattatgatgaagatgcgcttaccgtctttgctaatgccggattattaagacgcgcaagaaaagatgttgataacgaaaaagtctctgttactgatgcaaatacagggcaatttagcagtgatgggcaaaaagtcgttttacatgaagcaggcattcagcaagccagttgtgattgttccgcagcaggttgttgcaaacatattttagccgctattttatggttacaagccaacaacaattcgactgatgatattaataatcccattgaaacatcagcagaaaaaattatagcgcctgttgaaacaccgcctttattaccctctttatttacgcttgatcccgagttactcatcaaaaaagcaggtaaacccgcctgtcggactgcaattaacttaattgaacaatgggaagataaaactttagttctagaagacacaggaacccagctaaaaattcaactccctgatgttgatgaaccggtcattttcttacaagcaagtggtttcgatggcatgttatcccctttttctagctctcagaaaaaagcttttcatcttgctattgtcgcgaaaatatttgagcaaaatacacagccttggacgtggcctgaagatttaattcccttaaaatcttcaaaacgcccactaaatgatgaagaaattgcccttattaatactattgaacaatttattgatgatctattacgtnnnnnnnnnnctattacgtcaagggctatcacacattag

SEQ ID NO: 296366 - DNA, 564 bp, Proteus mirabilis
atgaaattcaataaattaggcgtaatggttgctggtgcacttcttatgggttctttatcaactcaagttatggccgctaaaaacgcagacgttacattttctgcacgtttagttgcagcaacttgtgatatcagcgcaagccaagatcgtgttgatttaggtacttatgcaactactgatattcaaaatattaaccaagctgtatctgaaaaagatttcaacttagtgttaaacaactgtactaagattggtaaaccagctgaaggtgaagatcctgctgtaactgtatctaatattgaattattagcaagcggtaatggcctagttggtaatgagcaattatttgctagcgctggtgcaactcaagctggtatcaagttaactgcaatgaactctgtagtactgaaaccaaatgagtcaacagaactgcaaaacttaaaagcagaaggtgaaggtaacctgattattcctatgaaagcaggtttatttgctacagaaactggtgactcactgaaagcacaagatattaatgttccagtaacctttagtgttgcttataactaa

SEQ ID NO: 296367 - DNA, 699 bp, Proteus mirabilis
atggtaaacaaaatacgcttttttcaatatatttcgttgtgtgttttaggagtattatttttatcatttcaggttcaagccggtgtcggtttaagccagactcgtattattattaatggggatactaatacagcctctattagcgctagaaataataatgcacaaccttatttagtctctaactttataaccgaaaaactggatacctcatcaccacctttgagcggtatgtttgttattactccaaacattttcaggttagctccggaaagtgaaaatacaataaaaattcaaataataccaacaaatcttcctaaagatagagaatcactttattacttccactcgcgaaatatcccatcaacaaataaaaatgaagatgggataaaaatagcgatggaaaatattatcaaggtattttatcgccctattaatttagcgataaacccaaaagaagccggtgataaattagttgtaaaagcaacgcctaatgggatcagtattgagaaccctacgccttattatattaatctttttaagattaccgttaaaaatgaaacgataaaattaaataaaattaataatatgatagaaccattttcttctaaaaactatgtggtaagtaataaaacaggtgctgttaatattcatattatcaacgatttaggcggagaaagtgtctacaataaaaaactttaa

SEQ ID NO: 296368 - DNA, 561 bp, Proteus mirabilis
  misc_feature (544)..(553): n is a, c, g, or t
atgcagacaaaaaaagtgtcaatattaatagttagtctttgtttattattgacgagttgggcttcagttgcagcgcaatcagtgaaatataatttttcagtcgtttttctcgctaaaacgtgtgaaattgttgttccagataatattactttcactagtggtgaaggggctagttctgttagtgctaatgacataaaaaataataaaattagtcaacagatccctatctcgttaactaattgctcaacaagttctttaagtggaacgagcgtttatatatctcaaggtgttactttaaccggaactcgagatttttttaataacaatgtttctgggtcatttggtgttcaacttacagacgacagtggtagtaaaacatataaagtaaataatagctctgtttttaaaccttctgatgattctgttgtgtgggataatataacctcagaaagctcgactaaatcattaacagcaaagttgcgttgtcaaaaagagggatgtactccagaggttggcccttttacggcaacagtagtgcttagcnnnnnnnnnngtgcttag

SEQ ID NO: 296369 - DNA, 717 bp, Proteus mirabilis
atgaatatattaaaaacgatttcattactttttagctgttttattttttctgcatcatatagttatgcagggctatctttgtcacaaagtcgcattatattttctgagggagataaaagtcaaagtgtacaaataaataatgatacagataatctttatttatctcaaaatatgataacggctgatttagatggcaaaaaagatgagcattttattgtattgccaccgttaaaacgattagagcctcagtcatcggtatctataagaattttaccacgctctttagatacattgccaagtgatcgggaatcactcttttttttcactgcatatttgatacctgaaacaaaaagagggcaacaaaataatagtggtgatttatcactaaaaattaatatggtaacaaaaattatcataaaaggattttatcgaccaaatgaattagccataacatcactagatagtcatgctaagaagataacctttaaaaaagtaggtaataatgtgcaagtcaataacccaacaccttattattttacggtatcaaatttaaaattcgatggcaaaagttatcaatcagcaaatgcacctatggttgcgccattttcgtcactcaatttagctatagataaatcaattaaacaggttagttggcaatatattgatgattttggtggattatcaaatacatttgaaaataaaataattgtggagtga

SEQ ID NO: 296370 - DNA, 864 bp, Proteus mirabilis
atgtttttttctcgtaaattagaggcctttatggccgtcgttgaaaatggatccttaagtaaagctgctcgtgtgatgaaccgaacgacaccacctgtagcgaaatcaatcaaagattttgaagccgtgctagggaagcgcttgtttaagcgggaaaagtttggtatgagtttaacgcaagaagggttagaactctataatgatttaaaatcactttatctgcaagaaaaagagataacaaaaaaacacacatcgggcgttattaataatagcattcatgtttattatgattggggtaaaagtcaatatttaacagcactctatcaagcagccaataagaattgttcacatataaatatgatgagattttcgaaagataattttgaagagataccagattatgatggaaacacgttaatcttaagctcagataaaattattagtgaaaagtttagcttaatacatcaagttaaaaataaatatctaggaatatgttgccaacaaatgttagcacaaaaagcacaagagaatatcaatacattgctaaaagaaaatatttggttatgtgatcccgctttatataaaacagcaaaaataaagaaattagaaaatgaaatagcggatcagggtaaacctatcagtattagattgatggatgatttaaactgttgtttaaactttattcaaactcaccattcgctattatttactgatgaaaacccgattaaaagtgaggatgaaaagcaactgtgctttatacctttaacacaaacggaactgatttataattgttatatctataaatctaaatatcactcgagtatattgaacaggtttgttgatttaataaaagaattggaatga

SEQ ID NO: 296371 - DNA, 336 bp, Proteus mirabilis
atgcgtgtattaacccccgcatttgtacaacattacccaaatcaaattattaatattcatcactctttcttaccggcatttattggcgcccgcccatatcatcaagcctatgaacgtggtgtaaaaattattggcgccacagctcactatgtaaatgataatctagatgaaggccctattattactcaaaatgtaataaacgtagaccacactttttcagcagaagatatgatgcgcgcaggacgggatgtagaaaaaaacgtactaagccacgccctctattgggtgctctcgcaacgtgtttttgtctatggcaacagaacaattattttgtag

SEQ ID NO: 296372 - DNA, 1578 bp, Proteus mirabilis
atgattagacacaaaagttttaaaataaaattattagttattatattattatcatcatctcctttaacttatgccaataagacgacatctttaggtgacagcagtaaagctgatggtaatgaatcgacggcacttggatataatacttgggcgcattcagatcaatcaacagcgattggcgcaagtgcaggggctgaaggtgaaaatgcaacggctattggacataaaagtaccgcaattggcgataatacattgtcattaggtagtggtgcaacgtctattggtaacggggcgatttccattggttcaggagcagttagccagaaaaaaaatgccattagtatcggtgaaaatattacaaataatgcagaaaatagtgttgttttaggcggtaatagtcaacttactgatgatgcaagtcactcggttattataggaagtcactcattcggaacagcaagtaatgctattatattgggggataaaagcactaataatcgcaataattcattatcaatagggagtaatgataatcaacggcagatagttaatgttgccgcaggtacagaaaatactgatgcggttaatgttgctcaattaaaaaaagaaagtcaaagtgttctaaaagaagctgataatcatattagtgataataatgaaaaaatatataatgaaatacaaaaggaaaaagaattcattattaatgatacaaaaaatcaaataaatgaaaataataacactataaaatcctatatagataatacaaattctttaacgttaaaaaaaagtgaagaaaaagccaatgaattagcaaataatgcagaaaaaaaagcaaatcaatatacagataatcaattatctaaatctgaaaataatattaaagattatacaaatagtaaaataattgaaattgaaaataaggggaaatcatatacggactttaaagtaaatgaacataatgataaagtggtggcgcacattgataacacaaaaaatgaaattttaatttcaacagatgataaagtaaataaatcagaaacaaatgctaatcattatacggatagtgaaatagctaaaattgcttcaggtattgataatatcatcatacagaacaataaaaagatcacacgagagcgtgaaaaatatatcactcagaaagaaagtgagtatattaatactacaaatacaataattaatgaaagagatgaatctttgagagattatattgaacaatcaagaaaagattcaattttagttgcaaatcagtataccaatgagaagattaagaatatttttattgataacaaagccgcgcttaaaaatatggataataagatagataaagctgacaaaagagcaagtgcgggtgttgcttctgttgcagcgatggcaaatattccttatgtcactgatcgcacctttagtttaggtgttggtgttgggaattatcgtaacgccaatgcactggcaacgggagcacaatatcaaattatcgacaatgccgttattcgtgtatcagcatcatggaatacggaagatagagctgtagttggtggagggatctcttatggttggtaa

SEQ ID NO: 296373 - DNA, 318 bp, Proteus mirabilis
atgatctatctgcattctggtggcggtgactccgctaaacaacaaagagttaatcaagccgcaacagataaagcgcaacaaattgcccaagatcagcaatctttactctataccatctcctcagagagtgattttccgacgacggttgaaaatatcggcgctattttattaattgagcccagtattgaattagctctagaggtgtgtcgccgttatcaatcatcaacagagatagtgatggctgaaagtgcaatcacgggggcaaagttgactgtatgccaaattgaatttgaagtgataaaaatttgtgttatttaa

SEQ ID NO: 296374 - DNA, 423 bp, Proteus mirabilis
atgtccacaacggatttatctctagagttgcaagataaaattaaacactcaatcacccgcgtctctaaagttatttttccaaccaccaccaatcatcactccacactctttggcggaacggcattagcatggatggatgaagtctcttttattaccgctacgcgcttttgccgtaaacgtttagtgacagtttctacagagaaaattaattttaatcaccctattccttctggcaccattattgaattagttggtgaggtaatacgtgtcgggcgtaccagtctaacggtaaatgtttctatttttctcgaagatatgtatgccgaaggacgagaagaagtgatccacggccaattcaattttgttgccgttgatgagcatggtaagccaacccctttattcgataaaccatcgcttttataa

SEQ ID NO: 296375 - DNA, 798 bp, Proteus mirabilis
  misc_feature (572)..(581): n is a, c, g, or t
atgaacacgcttcccatttattatgttaacgcttttacttcaacacctttttccggaaatccggctgcggttattttgttagataaatggctacccgatgacacactacttaaattagctaatgagattggtttacctgaaacggcttttttagttgccaatcatattcgctggtttacgcctaaagtagaagttcccctatgtggtcatgcgactttagctacggcttttgtattaaaaacgattaacaaagcacctgcgacaagctttaaattccattctctgtctggagaactcacggtatcttgtcactcctcaagttttactctcgattttcctcaagtacctgcatcattaaatccaaccataaaaccgtcattagaagcggcactaaacatagatattgaagaagtttggcaatctcacgacagatatacctgctttgtggctgatcctaacaaggttattgattatcaacctgactttaatgctataacacaactaccacttcccggtgtaatattgacggcgaaaggtcatgcgccttttgattttatttcacgcttttttgnnnnnnnnnncttttttgcaccacgtaaagggcttaatgaagatccggtaactggcacttcacattgtgtattagcaccaatttgggcaaaaaaattaaacaaagataaattaaatgccagacaagtttccgcgaggggaggcaatatacagtgtgaactcaaacaagagcgcttattgcttactggtgatgctgtactatttttaaccggtgaaataaccttttaa

SEQ ID NO: 296376 - DNA, 732 bp, Proteus mirabilis
atgaaagtctggtctttaggtgatgcggttgttgacctaattccactgcaaaatatgcaatatgaagcatgtgctggtggagcaccagtgaatgtcgctgcaggtgttgcaaaattaggacagcaaagtggctttattggtcgggtcggtgaagatgcatttggtcactttatgcaaaaaaccttatttgatctcggtgtagataccagcacaatggaatttgatgagttacatcgtaccagtacagtcttagtttcgttgcaagaaaatggcgaacgagattttacttttttagttgcggactctgctgatcaatttcttaccaataaatcactgcctgtatttgaaaaagacattttacatttttgttcacttgctttagttaatccaatttgtcgctcgacgctagatagtgctattagtaaagtaaaaaatagcgactctttactgagtttcgatattaatttacgcccccaaatgtggcgtgatcatgaagaaatgcgtgcgatcatcgatgaatatgctcataaagcagatattttgaaattatctgaagatgaactgacttggatgactcaggaaattaccttagaaaatgcattaaaaaaattagctgattatcctgctcgtttaaaagtgatcacccaaggctctaaaggatgtttagtgttgacgcctacaacacaagttgccttgagtgcctttaccgtcaattgtgtcgagattggttaa

SEQ ID NO: 296377 - DNA, 1467 bp, Proteus mirabilis
atgaagcaacgtttagaacaatcgacaactgccctaaatgccttacaaaaaaaacgtggagagcaattttatcctcaattccatttagccgctcctgcgggatggcttaatgatcctaatggccttgtttatcataacggcttatatcatgcattttatcaacatcatcctttttctgaactttgggggccgatgcattggggacatgctaccagcaaagatatgatccactggcaacatcagccaatcgcccttgctccgggcaatgagtatgataaaagtggttgcttttccggatcagcggtaagtcatgaaggtaaattatacctcttttataccggccataactggttagcagaagaaggcgatgacagccaaatttaccaagcacaatgtgtggcagtcagtgaagatgggatccattttgaaaagaaaggcattatcttaccgccaccacaaggatatatgcactttcgtgatccaaaagtttggtttcaagaaggaaaatggtggatggtagtcggtgcccgcgatgaaaaagaccaaggccaagtgttacttttctccaatgacaccctatttgaagaagggaaacaatggcgttcggagtacaaggtattaggcaaaaccgatgataaaaacgtctacatgtgggaatgccctgacttttttcctatcagtgatgataacgaatttgctcttgttttttcaccacaaggaaaacgcgctgaaggttatcaataccgtaatctgtttcaaaccggtgcactgatcggtcagtggtcaccaaaacaaccttttatcatacatggtcattttactgagcttgataatggtcatgactattatgctccacaatcttttgttactgctgatggtcgccgtgtttctatgggatggatggatatgtggaactcccctatgccttcacaacaggagttttgggctggttgtttcacgcttcctcgtgaaattaactttgataaaagggcaaaccgtttacgtatgaccccgataaaagaagttgaaagtctaagacaaacaagaaatacgataaagatgaccacactcaataaccaaacgcttaaattactcgataagacaccggctattgagttaaatttaacctggtcattagatagccaagcggaaaaatttggattatggctaggaaaaggtttagaggtatttgtcgataatcaatcaaatcgctttgtgatccgtcgccattatccacaatataatatcagtggatcacgtagcacaccgttgccagtaggaagcgaaattaacttacgtatatttattgatcgctcatcaatagaggtttttatcaatcacggagagctgacctttagtagccgttattatgcagatgaaaatgatcgcgatttatcgctatttgccacagatggcagtgccacattaatcgccggtgaatattggacactatcaacgataagttga

SEQ ID NO: 296378 - DNA, 996 bp, Proteus mirabilis
atggcgtcactgaaagatgttgctcgacttgcatctgtttctttgatgacagtctcaagagcgattaataaccctgagttattaaaaccagatacgttgaaacaagtccaacgtgcaatcgaagaactgaattatgtgcccgatttttcagcgcgaaaaattcgaggtcaagggactaaggtctcatcgatcggtgtgcttggtattgataccgcaacgacccctttttccgtggaaatgattttatccatcgagcgtaccgctcgtcagtttggctggagttcatttgttgtaaacctcactgaacaagaggggtatgatcaagccatttggcaactgttagctcaacgcccagatggtatcatctataccacaatgggattgcgagaaatcacggtacatgaaaagctacgtgataaaaatgtggtacttgccaactgcctagctaaagatcaaacttttccaacctatattcctgatgattatcacggacaatattttgcgataaaacacgtgattgaaaaaggttatcggcatccgttatgtttttatctacccgaagataccgttgcaggccctattcgccgtaaagcggtcgaagatgcttggcaagatgccggcttacctttgtcatcattgcgtcaatacacaatgttatttggcgatgaacattaccgtgatgtgattggattgttacagcaacactgtcgtcagcaaaaagcagattttgatattttaatctgtggtaatgatcgtatcgcatttttggcttatcaagttttactgtcgatgggattacgtatccctgagcaagtggctgtattaggctatgacaatatgataggaacgggggagttattctatccgccactcaccacagtacagttgccacattatgacttaggtaaagaagcaacattacatattattcaagagcgtaatcataataaaacagtacaagtcccctgtcagttaattgaaagagagtctctgtaa

SEQ ID NO: 296379 - DNA, 252 bp, Proteus mirabilis
atgccttgggcacaggaaggatttaataaagttctgctagatcccgcaagagcgggagctgcacaagtgatgtcacatattgtgacgttatccgcagaaaaaattgtgtatgtttcctgtaatccgaccacgttagccagagatagtaagatattattagattccggatatcagctaacccagttaagaatgttggatatgtttccacaaacagggcatctggaatcaatggcattgtttattcgcaaataa

SEQ ID NO: 296380 - DNA, 2241 bp, Proteus mirabilis
atggttgcagttagaagtgctcacttaacacctgcaggggagtttgccgttgataaatgggttaatagcttgaatttaactcatgcgaatgcggggagtgaaatcatgcaaacctgggaatactgtcatcgtactgttctgggccgtgaagatgcgcaactgttgctatggcgcggtgttgagatggttgaacttctttcgacactcagtatggataaagatagcatgagggcagcacttctcttcccacttgctgaagaagatcttattaaccaggaagttatcactgaacattttggtgaggcgatatggaatttagtgcgtggcgtaatggagatggatgctattcgccagcttaaagcgacacataccaacgaaactagctcagtacaagtcgataatgtacgccgtatgttattgtctatggtagaagattttcgttgtgtagttattaaactcgcagagcggattgcccatttacgtgaagtgaaagatgccactgaggatgaacgagtcttagcggcaaaagagtgttttaatatctatgcaccattagccaatcgattggggattggacaattaaaatgggagcttgaagatttctgtttccgttatcttcatcctgatgaatataagcaaattgcaaatttactgcatgaacgccgtattgatcgcgaacagtatattgataatttcgtcagtacggtgcgtggttatatgcagcaagagaatattgaagtcgatatctacggacgtcccaagcacatctatagtatttggcgaaaaatgaagaaaaaaaatctcgcctttgatgagctatttgatgttcgtgcggtacgtattgttgtcgaacgcctacaagattgttatgccgctttaggtattgtacatactcattttcgtcatttacccgatgaatttgatgattatgttgccaatccaaaaccaaatggttaccaatctattcatacggtagtacttggccctgaaggtaaaaccgttgagatccaaatacgtactcgtcagatgcatgaagatgctgaattaggtgttgcagcgcattggaaatataaagaaggtgctactggtgcaacaaccaaaggcgggacaggaagttatgaaaatcgtattgcgtggttacgtaaattaattgcatggcaagaagagatggctgattctggtgaaatgctagatgaagtacgtagtcaagtatttgatgatcgcgtctatgtctttacgccaaaaggggatgtgattgatttacctgcaggctcgacaccattagattttgcttatcatattcatagtgatgttggtcatcgctgtattggtgctaaaatcggcgggcgcatcgttccatttagctatcagctacaaatgggcgatcaaattgaaattattactcaaaaacaccctaatccaagtcgagactggctaaaccctaatcttggttatgtgacaaccagtcgtggtagagcaaaaatccacaattggttccgtaaacaagatcgcgataaaaatattattgcaggccgccaaatcttagataatgaattagcgccgcttgatattaatatgaaagaagcagaaaagctgctgattgctcgttataacgtccatagtcttgatgaagtgctggcaggtataggcgttggtgatatccgtatcaatcaattagtcaatttcttacaaagtaagctgaataaagccacagcggaagatgaagacaaagaggcgttacgctcattagaaaataaaacggctacaccaaaaacaaccacgtcaggtggtggcagtattgtggtcgagggtgtcgggaacttaatgcatcatatcgcacgttgttgccaacctattccaggcgataatatcgttggatttattaccaaaggacgtggtatttcaattcaccgtgcagattgtgatcaattagctgagttactttctcacgcaccagagcgtattgtcgatgcggtgtggggtgagaattactcaagtggttattcattagtggtacgggttgtggctaatgatcgtagtggtttattacgcgatatcaccactattttagctaatgaaaaagtgaatgtgctgggagttagtagccgcagtgatgtgaagcaacaaatagcgaccattgatatgaatattgagatttataatctccaagtattagggcgtattttagcgaaactcaatcaattacctgatgtcatagaagccaaacgcttttctcattaa

SEQ ID NO: 296381 - DNA, 798 bp, Proteus mirabilis
atgtcagaaaaccgtgaaattttacgtttattagccattatggcgcaattacgtgatcctcaaacaggctgtgagtgggatagggtacaaacctttgataccatcgccccctatacattagaagaaacctatgaagtactagatgccattgctcgtaaagattttaccgcacttaaagaggagttaggggacttactctatcaggtcgttttttatgcgagaatggcgcaagaacagcaattatttgattttaatgatgtctgcgaagctatcagcaataaattagaacgtcgtcatccacatatttttgctacagaaaatgaaaataatttagcgactgaaaagcatcgttgggaaaaaatcaaggctcaagagcgtgaagcgaaagcacaatattcattacttgatgatattcctgctactttaccggcactgatgaaagcagagaaaatgcaaaagcgctgtgcctccgttggctttgattggcacgagctttctcctgtattagataaagtgtatgaagaaatagatgaagtgatggcagaagtgaaaaaagcccctagagatgatcaacgtattgaggatgagttgggggatttgcttttttctgtggttaatttatcgcgccatttaaaacagaagccagagcaggcacttaatcgagcttgtcgtaaatttgagcaacggtttaggtttgttgaaaaaatgctcacagagcagggtataaacatagaaaatgcttcattagaagagatggagatcagttggcaaaaagcgaaggaaaaagaaattgagtga

SEQ ID NO: 296382 - DNA, 300 bp, Proteus mirabilis
gtgggtttaacggaacctcaagctattgagcaatatggcgctgagcaagtgaaagtctataaatcttcttttactgccatgtatagtgcagtgacacgccatcgtcagccttgtcggatgaaattagtctgtgtgggtgctgaagaaaaaattgtcggtatccacggtattggttttggcatggatgaaatgttgcaaggttttgcagtggcattaaaaatgggtgccacgaagaaagattttgatgatactgttgctatccacccaacggcggcggaagaatttgtgacaatgcgttaa

SEQ ID NO: 296383 - DNA, 1047 bp, Proteus mirabilis
  misc_feature (1011)..(1020): n is a, c, g, or t
atgagcaaacattacgattatatcgccatcggtggcggtagtggtggaatcgcatcaatcaatagagcggctatgtatggccaaaaatgtgcattaattgaagcgaaagcgctaggtggcacttgcgttaatgtcggttgtgtcccgaaaaaagtgatgtggcatgctgcgcaaattgccgaagcaattcatcaatacggtcctgattatggttttgatactacagtaaaccgttttgattgggatacattaatcagtagccgtactgcttatattgatcgtatccaccaatcttatgaacgtgtattaggtaataataaagttgatgttatccaaggctttgcccgttttgttgatgcgcatactattgaagtaaacggtgaaaaaattaccgcagataatatacttatcgccacgggaggccgtcctattcagccaaacattccaggggctgaatatggtattaactctgatggtttcttcgaacttagcgcattaccaaaacgtgttgctgttgtgggtgccggctatattgctgttgaattagcgggtgtattaaatgcgttagggagtgaaacacacttatttgtgcgtaaacatgcaccattacgtagttttgatccactaatcgtcgatacgctggtggaagtaatggaagcggaagggcctaaattacacacccatgcagttcctaaagctgtggttaaaaatgccgacggtagcttaacgttacaacttgaaaatggcttagagcagacggtagatactttaatttgggcaattggtcgtgaacctgctacagataatatcaatttagcggctacgggtgttaagctaaatgaaaaagggtatattcaggttgataaattccaaaataccaatgtacccggtatttatgccgtaggtgataatacaggtgcggtagaattaacccctgttgcggtagccgctggacgtcgtttatcagagcgattatttaataataaacctaatgaacatttagattatacnnnnnnnnnnacccagctattggtactgtgggtttaa

SEQ ID NO: 296384 - DNA, 435 bp, Proteus mirabilis
gtgagagtgtgtcgggaagatggctttggacaattaaaatcaaaactccctcccgccagtcgtcgtgggtttgctttaattgatccaccttatgaacttaaacaagattatagtgcggttgttaaaggcattgtggaaggctataaacgtttcgccaccgggacctatgcaatttggtatcctgttgtgcatcgccaacaaattaaacggatgctaaaagagctagaggccaccagtattcgtaaaattctgcaaattgagttggcagtgaaaccagatagtgatcaactaggtatgacagcatcaggtatgattgttattaacccaccttggaaattggcatcacaaatggcgtctatcttgccttggctacataaaaccttggttcctgaaggtactggacacacattagttgaatgggttgtaccagaataa

SEQ ID NO: 296385 - DNA, 405 bp, Proteus mirabilis
atgctgagctatcgtcatagtttccacgctggcaaccacgccgatgtattaaaacatattgttcaaaccctgattattgagtctttaaaagagaaagaaaaaccgtttctttatttggatactcatgctggcgctggacgttatcagctcactaatgcacatgcgactcgcacgggagaatacttagaaggcattgcacgcttatggcaacaagaagaggtgcctgaacttatcttgccttatttggaggcggtcggttcgttaaatacatctgacgagttacgttattatcccggctctcctttattggctgctaaattattgcgtgagcaagatctgttaatgctaactgaattacatcccaccgatttccctttattacgtacggaattttcccgcgattaa

SEQ ID NO: 296386 - DNA, 393 bp, Proteus mirabilis
atgaaaaaatatatttttactgcaattattcttagtttaacagctagttatgcatcagcagaaacagcggttaatggttgtgacatcaaaaaacagaatattcaacgacaaatcgactatgccaaaatgcatggtaatcaatatcgagtacaaggcttagagcgagcacttaataaagtagaacgttattgcactccagaaaaggttgttgaagatacccgcctagaattacgtgaaaaacaactggaagtgaaagagcgtgaattagaattaaaagaagcgcaacttaagggagagcgcgataaaattactaaaagagaagataaacttgcgcaagcaaaagctgagttgaaagcagctgaagaagagttagagctactcacaaaaaaataa

SEQ ID NO: 296387 - DNA, 876 bp, Proteus mirabilis
atgggtggtacacctgcactaggtatcgtactaggtataaccttagtttctccacaactaatgaatgcttacaatttaggttcacaaattcctgaggtttggaattttggtttatttactattgagaaagtaggttatcaagcccaagtgatcccttcgattttagcgggactatttctgggatggtttgagactaaattacgtcgttttatccctgattacctaaaattagttattgtgccgattgtaactcttattgtcgccgtttttgttgcccatgttattttaggccctatcggtagaagcataggtgatggtctcgcccaactgatcaaatttttaatgttaggtgattttgcccctattggttcaactatttttgcctttttctattcccccatggtaattaccggcttacatcacacaacgttagcgatagatttacaaatgactcaaagttatggcggtacacctatttggccgattatcgctctgtctaatattgctcaagcatccgccgttgtaggcattattatcgttagccgcaaattaaatgaacaagaaattactattccggcagctatctctgcttatttaggtgtgacagagccagccatgtatggcgtcaacttaaaatatggctttcctatgctgtgcgccatgattggcgctgcgctagcgggtttgatttgtggattaaataatgtgctatctaatggtattggtgtcggcggattacccggtattttatctatccaacctacttattggttagtttatttattggcaatgataatggctattgtcgtccctattggattaaccattctggtctatcgctataaagaaaaagcaggcaccttgcaagtcgattaa

SEQ ID NO: 296388 - DNA, 678 bp, Proteus mirabilis
atgagtactcctgcaaatttcaatggtcaacgtccagttattaatccagatgatgctgttatgttattgatcgatcaccaaagtggtttattccaaaccgttggcgatatgccaatgacggaattacgtgctcgtgctgcggtattagcaaaaatggcaacattagcgaagatgccagttattacaacggcttctgtccctcaaggtcctaatggcccattaattccagaaattcatcaaaatgcaccacatgctaaatatgttgcccgtaaaggtgaaattaacgcatgggataaccctgagtttgttgaagctgtgaaagcaacgggtaaaaagcaattaattattgctggtactattacgagtgtttgcatggcgttcccagcaattagtgctgttgctgaaggttatcaagtttttgctgtgattgatgcatcaggaacgtatagcaaaatggcagaagaaattaccttagcacgtattgttcaagccggtgttgtgcctatggatacggcagcagtggcttctgaaatgcaaaaaacttggaaccgtgcagatgccgctgaatgggctcaagcttatacccaaatattccctgcttatcagttattaattgaaagttatagtaaagctcaagatgttataaagaataatgaaactttagattcacaacgttaa

SEQ ID NO: 296389 - DNA, 876 bp, Proteus mirabilis
atgaaaaaaattattggtgtttataaagcgcctcgtcaacattgggtcggtgatggcttccatgtacgctcactatttagttatggtgatcatggtaaatatttaaatccatttttattattagacagagccggcccgactgatttccctgcctctcaaggccataaccgtggtgtaggcgaacaccctcaccgtgggtttgagacagtgactattgtctataaaggagaagtggcacatcacgattctacaggtgaaggaggagtgattggccctggagatgtacaatggatgaccgcagcatcaggtatattacatcaagagtatcactctgatgcctttaaccaagcgggaggcatacttgatatggtgcagttatgggtaaacctcccatctcatgctaaatcagcgcctgctggctatcagttactcaaagagagtgctattccagtgcttccattagcgaatgatgccggacaactgcgcgtgattgcgggggaatatcatcaaactcaaggggcggcaaaaaccttttcacctgttgacgtttgggatattcaattgaaaagtggtaaatctacgaccttaccaagcaaaaaagatcgctatgtgggattagtgatactccatggtagcgcctatcttgatagccaaactcaattaaatacgggcgatttggttattttagataatcaaggtggctcaattaatcttgaagccattgaagatgcagttgtgttatatcttagcggagagccaattaatgagcctgtagttggttatggtccatttgtgatgaacagcaaagatgaaattaggcaagctattgatgactttaaccaaggtaaatttggtcgtatcccaaacgaaatatga

SEQ ID NO: 296390 - DNA, 906 bp, Proteus mirabilis
atgaagtatgatctaaatgacctctattattttgttaaagtggtggagtttggcggtttttcacaagcggccgaaacgttaggtattcctaaatcaaaacttagtcgtcgtattgctgatttagaagagagactaaaggtctcgctgatctatcgttcaactcgtcaatttcatgtcactaagatagggcaaactttttaccaacagtgtaaaaatgtcgttgaacaagcggagattgctcaagaggttatttgttcagcacaagggcaccctcacggcacgatcaaactctcttgtccagttgcattactgcaaatttatattcaagatattttggtggattttatggcaaaatatcctgatatcaatatacaaattttagcgattaaccgccctgtggatgtgatcaatgaaggtcttgacttagctttacgagttagagcattacctttggatgattctggcttaacgatgaaaatattaggctattctcgccgtgttttagttgctaatccgctgttatttgcaaccaacagtgcgcctgattctccagagcaacttgctgattatcctattttagctaatagcgaacattcgcagcagtatacgctaacgcttacccataatgatggtaccgtttcaacgcaacatgttacacctaaattagcgacaacggatgtgatgaccttatataaagcaacattaaagggacttgggatcacgcgtttaccattgagtgtcgtagagaaagagttaacagatggctctttggtggaagtcttaccacagtggcgttttcctaaagatgttattcatgccgtgtatccgtcacgaaaaggtttattacctgctattcaagtgttattagattatttagcgcagaatatggctccatataaagagtaa

SEQ ID NO: 296391 - DNA, 1101 bp, Proteus mirabilis
atgagtaaattaagagtcgctattatttttggtggaaaatcaaccgagcaccaagtttcattacaatcagcaaaaaatattatcaatgaattagatcgaacgaaattcgacctttgtttaattgggattaatgaacaagggcaatggcatgaatatgccgaagacaattatttaattaatagcgataacccctcaactatctcattaagccaacctttgcgtccagtggctattattcctggcagtacccgtcagcaatttatctctttaactgatgggcaacctcttgcacaaatagatgttgtatttcctattgtgcatggtgcttatggtgaagatggcaccctacaaggactattacatatgattgatatgccatatgtaggccctaatatcatgagttctgcagcatgtatggataaagatatcactaagcgcttactggatgatgcaggattagcggttgcaccatttattacactgatggctcaccaattaaatgatatttcctataatgaagttgttgaacaattagggctccctttatttattaaaccagcaaatttaggttcttctgttggtatcagcaaagtcaataatgaagccgagtttaatgctgcattatccatggcatttgaatatgatcttaaagtaattatcgaaagtgctattgttggccgtgaaatagagtgtgccgttttaggtaatgaagagcctgaagttagcccttgtggtgaaattgtgttaaatgatgctttttatgcttataacacaaaatacattgatgacgatggtgcaaaagtagtagtacctgctgatttagataatgcgattagcttacatattcgccaaacggcattgaaagcttaccaagttttaaactgtttaggtatgtcgcgcgttgatgtgtttttaactgaagataatcaagtcattatcaacgaaattaataccttaccaggtttcactaatatcagtatgtatcctaaactgtggcaaagtacgggattagattatcaatcactcatcacgaaattaattgaattagcgctagaacatcataaaaaaacagccgtattaaaaactaagtgtgagctttaa

SEQ ID NO: 296392 - DNA, 384 bp, Proteus mirabilis
atgaaaattacacaccttgatcatttagtattaaccgtggctgatatcgaggcgagttgtcatttttatcataatgtattaggttttgagataattacctttaaacaagggcgtaaagcccttgcttttggtcatcaaaaaatcaatcttcatcagctaggaaaagagtttttgcctaaagctgctaaaccaacggcaggctctgcggatttatgttttattactgaaacgccattgttagacgtgatagagcatataaaccagcagggtatcaatatagaagagggtcctgtaccaagaacaggggctacagggcctattatgtcagtttacttacgtgatccagataataacttattggaaattgctaatattattgaatag

SEQ ID NO: 296393 - DNA, 582 bp, Proteus mirabilis
atgaaaactctccaatatcacaagaacttacccaaacttgttactttaatttctatgggattagcctcagtgccagcagaaagcttcaaacataaccaactatcatttacaccggatatccaatattctttcagttcagcgcaatttaaccaattcgttgctatccctattgatgaagctactgaaaaaatgaatattttagccgaatcaattaataaacatttaattcatttaaaagagaaatggataaatcctcctcattattttattaatgaagatgattattatcaaataaacaaaagtataaaacgtttagataattctttaactgatatcaaaaatattcttctttcattaccaaagagtgatacacaaaaaaaacaaagtgtactcttatttggtcgttctttagctcattatcggagtgtattaacagagtttatttcatttatagaacaaactcatcaaccatcaaaaacaactaataagaaacctaatataataagtgctgatatgcaaagattaatacaaacagagcataaaaagttaggtctaagtaaacctaaatttaataaccattaa

SEQ ID NO: 296394 - DNA, 618 bp, Proteus mirabilis
atgaccatatccgcactcatctgtctagctaatggtagtgaagaaacagaggttgttaccaccgctgatttactcgttagagctggaattaaggtcatacttgctagtgctgaagatgatgttgatgacttagtgatcacctgctcacgagggatcaaattaattgctgatgtcccattagttcgtgttgttgatcaccattatgatgccattattttacccggaggattaataggtgcagaaaccttacgagatagtcctcttgttgttgaaaaagtacgccgcatgcacagtgaaaatagactagttgccgctatttgcgcagctcctgcgatcatcttagagtctcataacctctttccaataggcaatatgacaggtttccccggcttaaaagataaaatcgaacctaaaaaatgggttgattatcgggtttactttgacgaaagagtcaatctgattactagccaagcccctgctaccactatagatttcgcacttaaaattattgagcgcctaaaaggtaaagcagttgcagctgatgtcgctaaacaacttgtattaccaccaggtatttataattatcaagatgaatttactgggcttggggataggtaa

SEQ ID NO: 296395 - DNA, 921 bp, Proteus mirabilis
atgaaaataaccgtattaggatgtggttcaattggtaaactttggattgcaggattaacgcaacaagcccatgaagtacaaggatggttaagaatacctcaacctgattttgacgttaacgttgactccattaatggtatcccatttcaacaacgcattatagccaaccaaaaaacatggctacaacacagtgagttactgcttgtttgcttaaagtcttggcaagtttcagacgcggttaatgcacttatccctcacctctctgctgattgcccgattttactgatccataatggtatgggaacactagatgagctcaccctacctgaaacaccgactaaaagagcgatattacaaggtataatcactcatggtgcttatcaacaagatcaaaaagtgctccatacagcagaagggatcacccacattggtccactaaatacaacagcacgtcaatacggttatttagctgaaattttacatcaagctttaccggatgtagcttggcacaatgatattcatactattagctggctaaaattagccgtaaattgtgttatcaaccctttaacggtgttttatcaatgtcgcaatggtgatttattaaaataccctgagcatatccagaaagtctgtgatgaagtttatcaggtaatggagcgagaaggtgttatacctacctctagatcacatttacatggttatattatcgataccatagagcaaactgctaataattactcatctatgtatcaagatgtgaaatatcaacgccataccgaaatcgattatattacaggctatctattacgtagggcatcagggcaaggactcgtgttacccgaaaataagcgactttttcaatttataaaacagaaggaaggcaattatgaccatatccgcactcatctgtctagctaa

SEQ ID NO: 296396 - DNA, 564 bp, Proteus mirabilis
atgagtatggcttttttgctgagtgaaaaacagctattattcaggttgtttttatttattgaggaagaacgaatgccatcttttgatatcgtatctgaagttgacttgcatgaagtgcgcaatgcggtagagaacgcacaacgtgaactgactactcgttgggattttcgtaatgttgaagcaagttttgagttaaacgaaaaaactgagtcagtaaaaacaactagtgtatctgaatttcaggtgcagcagttattagatattctgcgtgagaaaatggcaaaaagagggattgatggtgctgttttaaatatccctgaagagatgactcacagcggaaaaacatacagtgtagaagcgaccttaaaacaaggtattgatactcctttagcgaaaaaaatcgttaaaatgatcaaagacagcaaattaaaagtacaagcacagatccaaggtgagcaagtacgagtaacaggtaaatcacgtgatgatttgcaagctgtgatgaaattagttagagagggtgaattaggtcagcctttccaatttaccaattttcgtgattaa

SEQ ID NO: 296397 - DNA, 246 bp, Proteus mirabilis
ttgattggcttagtttggtttgccattagcttaacattacgtcaaccaccttatgttagtagcttacgtatagaattgccggcacatttatcaaatgctcaacaacaacaattagagcagaaatttaagcaacaacctggtgttaatgaagtggtaattatggcacacgaacaaagtgcttatattaaagtggataccaagcagacaccaagagcgacattagaatcgttagtgctcggtgtttaa

SEQ ID NO: 296398 - DNA, 852 bp, Proteus mirabilis
atgaagcagtatctggcattgtgtcaacgcattatcgatgaaggtgaatggattgataataaacggacaggaacccgttgtttaacggtgataaatgccgatctggaatatgatgttgccaataaccaatttccactcataacaacgcgtaaaagtttttacaaagccgcgattgcggaactattagggtacttacgtggttatgataatgcagcacaatttcgtgctattggctgtaatacgtggaacgcgaatgctaatgaaaatagcgcatggttaaataatccgcatcgtaagggtgaagatgatatgggccgagtctatggtgttcaaggacgccaatggcaacgccctgatggctcgcactttgatcaattacgtaaagtggtagataacttaactaacggtattgacgatcgtggtgagatagtcactttttataatcccggagaaacagcgttagggtgtttacgtccatgcatgcatacacatactttttcattgctcggtgacaggctttatttaacctcatatcaacgtagctgtgatgtcccattagggttgaattttaatcaaattcaatgctttgtattattagcgctggtggctcaaatcacagggcataaaccaggtaaagcattccataagatagttaatgctcacatttatgagaaccaattacctctgatgcgtgatgttcaactaaaaagagagccattgccattacctaagctacatattaatccaaacattaagacattagatgatatagaaacttgggtcacgacagatgactttagtgttgaaggttatcagtgtcacgaggcgataaaatacccgttcacggtgtag

SEQ ID NO: 296399 - DNA, 885 bp, Proteus mirabilis
atgagtataaactaccttaaatttccagaaatcgatccagttatgttttctatcgggccagtatctttgcactggtacggcatgatgtatttgattggattcgtatttgcattatggctagcaaaccgcagagcggcaaaacctaacagtggttggcaaaaaagtgaagtcgaaacattactttatgtagggtttgtgggcgtgtttattggtgggcgtctaggatatgttttattctataacttaccggtatttttagataatccactttacctatttaaagtctgggatggcggaatgtccttccacggtggcttaattggggtgatctgcgccatgatttggtttgctcgtcgcactaaacgtcacttttttcaagtcgcagactttgttgctccattaatcccatttggtttaggtttaggacgtattggtaactttattaatggagagctttgggggagagtcaccttagataccccgtgggcgattttattcccaggctcccgtgcagaagatctacagcttgtcgcgcaagatcccactacactattacctatcattcagcaatacggcgtattgcctcgccacccatcgcaactctatgaaatgttcctagaaggcgtggtattatttattattctgaatatctttgtgcgcaaaaatcgtcctatgggcagtgtatcggggttattcttaattggttatggtgctttccgtattattgttgaattcttccgccaacctgatgcgcaattaggtttatttagcggtatcagcatggggcaaattctttccattccaatgataatattaggcattatctttatggtgtgggcgtatcgtcgcgataaagccactccacaggcgccaacaacacactaa

SEQ ID NO: 296400 - DNA, 1242 bp, Proteus mirabilis
atgtgtataagagacagacaactggcaggggtgatagttcgtgatggtgcaactcattcacactcagcgattttagttcgagcaatggggatccctgccattatgggggcagatattcaaccggagctacttcacaaccggatgctgattcttgatggttatcgtggtgagatttttattgagccagaaccctttatcatgcaggaatatcggcaaatcattgatgaagaaagagtattgagtcaacttgctgaagagcagcttgaacagcaagcggtattaaaaaatggtgaatccatcagtgtgcaattaaatgcagggctaagcattaaatatgaacaacgtattagcgttggcatagatggtgtcggtctttatcgcacagaaatcccttttatgttacaaagcggttttccttccgaagatgaacaaaaaaaccgttatcgtgaaatcttatcattttttcccaataaacccgtcgtactacgtgctttagatataggtgcagataaacagcttccttatatgccgataaatgaggagaacccttgtttagggtggcgggggatcagaatattacttgatcagccagaaatatttctgatccaactacgagcgatgttaaaagctaatcttgaatttaaaaatttgaaaatattgttgccgatggtgacaagtattgatgaaattgaagaagcgaaagcattgttactaagagcatgtgctgaagttagccgagaaatgaaatgcgaatgcattctaccacctgtggggatcatgcttgaagtcccctcattggtctttatgttaccgcaattagcacatcgagtagattttatctcgattggtaccaatgatttaacgcaatatttacttgcagtcgatcgtaataatacccatgtagcactgctctatgataatttgcatcctgcattactgcgttcgcttaatattattgctttagaatgccaacgttatcagttaccagtcagtgtttgtggtgaaatggcgggtacgccgatgggggcattgctactaatagggctaggttttcgtcagttaagcatgagtggccgtagtttacctagggtaaaatacttattgcgccatctagatcctgctatcttacagccttttatgcaacaggtgttgaaagctgaaacggcaatagagataaaaaaattgtctgctgattttatggaaagacaaggattaggtggattaattcgcggaggtatctga

SEQ ID NO: 296401 - DNA, 378 bp, Proteus mirabilis
atgctagctaaaatcagtgataataaaacagcaacggtgatagcctctctcattaaacaggctcagcgattaccctctgaactatataaaacattaacttgggacagaggtgttgaaatgaccaatcatgcagtatttactgtagcgactgatatccaagtctacttctgcgatcctcagtctccgtggcaacgtggttcaaacgaaaatacgaacagattgctcagacaatattttccaaaaggtactgatttatccgttcatagccagcaaagattaaatagcatcgctagacaactcaacgagaggccaagaaaaacgctaggttatgaatcaccagcagaacgatttaaccagtgtgttgcatccaccggttga

SEQ ID NO: 296402 - DNA, 318 bp, Proteus mirabilis
atgagattagtatatttcgtttatcaagataaaaatgcttatgaacgacaaagtgatggtgttgagttctgcaaaattccggagtttcataatgataaaatttatttttattgtgatgaatattccatgttttgggattctattgataaagttggaaatcctaatgattgttgtaatttctcattaaagagtagtattgtcccagctacattactagaaatatctaacaacgacctgatatcttatattgatacagtaaaagaatacgttatagaaaataacaaattaagtaaattaacatatattcatataaaataa

SEQ ID NO: 296403 - DNA, 537 bp, Proteus mirabilis
atgttcgatgaagatgattgtttattagccgatgataatgttgttgttgcaataaagaacgataacattattacttggtatcaagcagacagagaggtatgggtgctggatagacaaaaatggcatagagattttgttgacaatggcatagcttgtccagaagatagcgccgacgatcgatttggtattttaattgttaatgatggtactaaagaaaaatttcttgaaagtattttgccttttaaagttgataataagaagctcaatgaattcaaagaaaaaatacaagactcttcttcttggtgggactctcacgaactatttccaatggcattcattgattttgattcaaaaaaagtaagtgcatattatccatatccagggaaaatacctgtagaaagatatattccagatggttggaatggtgagtttgttgattttatgcgtaaatttgatgaaagtattttgcctaagaaagaaaagtattgggtcattgatgatattgactatttagaaaaactttcttcattattttaa

SEQ ID NO: 296404 - DNA, 663 bp, Proteus mirabilis
atgcagttttggcgttaccgagagggtaaggcggagaatgaccctaattataccgaatgtccttttcgctttgcggggcaatatgaagatgaagaaagtggcttgtattataatcgctttcgctattatgataaggagacaggacagtatctttctccagaccccatagggctattgggtgggctgaatccatatgggtatgtgcattgtccgacggggtgggttgatccgtttgggctggcgggtggagttgggaataaaggggagcctaaaggtacggtcactgtatttagggttcaaggaggcataccgcctaacgcgagccatcgccgaataaaaatagatgatgcgaacaaccctaagattcaaaatgcaactttaaatattagtatcggcgattctaagcatgccgagcacttcaaaaatattagaggtggtgatgcagaagtggtttcattcgaaataccaaaatggtttgatgactttattaaagagaatgctatccctcaaaaaggttacaggacgaatccattaaatcaacaaggaatggctcctaaaatagtagatccaacaacccctggtgattcatatgagctgcctaaaatatgggctaaatggctagaagaaaattctgttcctggttctggaaaagtaaaaaaataa

SEQ ID NO: 296405 - DNA, 864 bp, Proteus mirabilis
atggaaaagagacattatcaacttattgaacaagcctgccgttttattgaagaaaatcagggtgatgtttctcttgccgacatcgccgcacatattcaatccagcccatattatttccatcgacgatttaaatctataatgggaattacacctaaagagtatgcgaatgcttatcggcacaaactaattaagaaagcattagctggcgataaaacaattacagatgcgatatatcaatcaggctttaatgcgaatagccgattttatgaaaatgcgacggccatattaggtatgacgccaacccattggcgcaatggtggacaaaatatcgtgattttttttgctgtagggatctgctcattaggccatatccttgtagctcaaagtgaaaagggcatttgtgcgataacacttggcgatgatcctgcgtgtttattagaagaattacaaaaacaatttcctcaagctgaacttgttggtgcaaaccaagagtttgaaaaattggttgcccaagtcattggttttgttgaactgccaacacaacctttggcattaccacttgatattcaaggaacagtatttcaacaaaaagtttggcgggcattattagatattccttttggttgtaccatgacatatcaagaaattgctcaaaaaattggttcgccaaaatcttatcgagcagtggcgaatgcctgtgcatcaaataaactagcagtggcgatcccttgccatcgagttatcagacaaaatggtgaaatatctggatatcgttgggggattgagcgcaaagaaaaattattacaaagagaaaaatcccttcatcatcagcatgatagattggatattagcaagagcgattaa

SEQ ID NO: 296406 - DNA, 612 bp, Proteus mirabilis
atgtattttcagtatagtgaaaaagagatctcttttttaaaacaaaaagataagcgtctagccgcggtgatggaaagaataggggaaattaaacgtccacttactcctgatttatttaccgcattaattaaaaatattattgaacagcaaatttctgttgtggctgctaccacggttcagcaacgcttacttaccctatgtgatggtatttatactcctgcacatattgctagtttatcagagcaagatattcagcaatgtggaatgacaatgcgtaaagccggttatattaaaggtatcgcagactcagttataaatcatacgttagatttagaccaaatccccgctatgtctgataaagcggtgatcaataccctaataaaattaaaaggtattggcatttggaccgctgaaatgttattaatttcatcacttaatcgtcctgatattttaagttggggggatttagctattcagcgtggtatcatgcgtttatatcgccatcaaagcttagatagaacacgctttgaacgctatcgtaaacgttattctccttatggttcaacggcttcactctatttatgggcattatctaaagaaagcgcagactaa

SEQ ID NO: 296407 - DNA, 618 bp, Proteus mirabilis
atgaaaaataccattgtaaaagatctgaaaacactggaaaagatttatggtcaacctgccgaaccatcggtcttaaaagaagtggattttattcaccccctttatcgcccttatattgaagctacaccatttgttgcattagccacttatagtgctgatggtatggatgtttctcctcgtggcgatgagcccggttttattcatattgaagacgatcatactttattattacccgatagacgtggtaataaccgcattgatagcatgcgcaatttattaattaatcccgcgattgctttattagtgctagtccctggcattaatgaaacattacgaattaatggtcatgcggaaattttaatagatgaagaaacactcgcacgctttaaatataacaatgcactacctcgctctgtcttgcgcatccatgttgagcgcgtatttttccaatgtggtagggcacttattcgttcaggtttgtgggaaaacaaatatttagctgataaatcaactattccagcaccgggacaaatattgaaatccatttctcatcaacaatttgatggtgataaatatgatgcacaattgcctgaacgtattatgaaaacattatattaa

SEQ ID NO: 296408 - DNA, 648 bp, Proteus mirabilis
atgttagaaagtattggtatttcaaatatttggacataccttttaggcgttatttttattacactagtaccaggtccaaattcaattttcgtcctaacttcgagtgcgaagcatggcgtgaaaggggggtataaagccgctcttggtgtttttacgggtgatgcattattaatctttttggcatttttgggggttgcttcattagtcaagacttcacccgttttctttattgtgatcaagtatgccggtgcactttatttaacctatttaggtttaaaaacactctatgcgacattccataagaaaaaagagcagccggaacaggttgcagtagaggttgtaaaagcgaaaaacggcttatatatcaaagcgcttttcttaagtttgttaaatccaaaaatgatcatcttttatgtgtcattttttattcaatttattgatcctaaatatgaaaatgcaggggttcccttttttgtattaggtgtaatattagaaatatgtagcatgctttacttatctgtacttatttttggtggcgttgctattactaataaggttaagcataacaaacgattagcatcattatcgaatagttgcattggtgctgtgttcttattatttggtgccaaactcgctttaacggcttaa

SEQ ID NO: 296409 - DNA, 945 bp, Proteus mirabilis
atggaattaaaggattattacgccattatgggggtaaaacccactgatgacatgaaaacaattaaaactgcttatcgccgtttagcgaaaaaatatcacccagatgtaagtaaagagccagatgctgaggagcgttttaaagaaatagcgcaagcttgggaaattcttggtgatgaacagcgcagagctgaatatgacgaactttgggctcaccgcaatgatccgaaatttaaacaatttacacagcacaacaattcacattcaaaccaacaaagttttagtcaggaagattttgacgatctttatgcttctttctttggtcaaggttcgccttttgaagggcgccattcacgtcaagcacctagacaacgtggacaagatctagaaattgaattaccggtttttcttgaagaagcacaagaagagcataagcgtaccattagctaccatttaccggtttataatgtctttggcatgatagagaaagaaattcctaagaccttgaatgtcaaaattcctgccggtgttgttgatggacaacgtattcgtttaaaaggccaaggtactgctggggagaatggcggagaaaatggtgatttatggctaactattcgtattgcacctcacccattatttgatgtaaaagggcatgatcttgaaattgtggttcctattgcaccttgggaagccgcattaggtactaaaattgctattcctacacttaaagataaaattttacttactattcctcccgctagtcaggcaggtcaacgcctgagaattaaaggaaaaggcttagtaagtaagcaaaagagtggtgatctctatgccattttgaaagtcgtcatgccacctaaagtggatgaaaaaacacattcattatggcaacaactcgccgaagcccaagccgattataatccacgtaaaaactgggagaataaataa

SEQ ID NO: 296410 - DNA, 306 bp, Proteus mirabilis
atggcacaattaacaacaatatttactatgactgagctttgtcatcatactggtgtttccaaagaggaacttcaagaaattgttgaattaggggttattgagcctgtagaaattaccacacaggagtggtttttcaatgatgatgcagttgttgttgtacatcgggcgttaaaacttcatcgagagttagcattggattggcatggtattgcaatcgccttgacattgttggatgaaaatgaacgattaaagcaagataataaacaacttcgacaacagcttatgcgctttattaataatgaataa

SEQ ID NO: 296411 - DNA, 897 bp, Proteus mirabilis
atgaaagccacctcagaagaagtccaagtttttattgcagtagttgaaagtggtagttttacacgtgctgcagaaaaattagcattagccaattctgctgttagtcgtacagtaaaaaaacttgagtcaaagctaggcgttaatttattaaatcggactacgcgacaattgagtttaacggaagagggggagcattactttcatcgtatgcaagttatcttacaagatatgaaattagctgaagatgaattaattaatacacaaaaaacaccacagggtctattacgtattgatgccgcaacgccggttgttttgcatctactggtgccttttattaaacaatttcagcaaaaatatcctcaaataaccctctctttagtttcatctgaaacatttatcaatcttattgaacgtaaagtagatatcgcgattagagtcggtaatttaacggattccagtttacgggcaaaaccactattgaatagttatcggaaaatcgttgcgaccccggactatctcgcccgttatggacagcctaaaatcgcagaagatctgcttgaccatacttgtctaacttttactgaaccagtatcactaaacacatggcctattgagcgagataatggacaattattagaagctcctatgggaatatcgtcgaatagtggagaaacgataagacaattgtgtctcgaaggtaatggtattgcttgcctttccgattttatggtggttaatgatatcgaaaatggtcgatttatcgaattattccccgataagctgcaacccatcgcaatgccttttaatgccgtttattatagtgaaaaagtggttagccaacgcatccgtgtatttattgattctctgagtgagtatattgctaaaaaagtaggttaa

SEQ ID NO: 296412 - DNA, 804 bp, Proteus mirabilis
atgagtgttcccgttttaggtcttggtacttttcgtttaaaagacgatgcggttataaattctgtaaaaactgcactagaactaggttatcgtgctattgatacagcacaaatttatgaaaatgaagctgctataggacaagctattgcagaaagtggtatatctcgcgacgcgctttacatcacaacaaaaatttgggtagaaaatttaagtaaagataaattaattcctagtttgaaacaaagcttaagtgatttacaaacagattatgttgacttaactctagtacactggccatcaccaaatgatgcagtttctgttaaagaatttatgcaagagttattagctgcgaaacagatgggattaacgcgagaaattggtatttcaaattttaccattccattaatggaacgagctattgctgccgttggtgttgaaaatatcgcaacaaaccaaatcgaattatcaccttatttacaaaatcataaagtggtaaattgggctaaacagcatggcattcatattacatcttatatgactctagcttacggcaaagcattaaaagatgaaacaatacaaaccattgctaaaaaacacaatgcaacaccagcacaaatcattttagcttgggctatgaatgaaggttattctgttattccatcttcaacaaaacgtgaaaatttagccagtaatttactcagcgtaaatatcaaattggatagtgaagataaacaagcgattgcaaagttagattgtcatgatcgtttagttagcccagaaggtttagcgcctcattgggattaa

SEQ ID NO: 296413 - DNA, 1023 bp, Proteus mirabilis
atggcaagtattgccagcgagtcatttgctgttagcaaagatattgaatttaactcagatattcttgacttaaaagatcgaggaaatattgatttatcaagcttttcccgagcgggatatattactcctggcaagtatgagttaattattaatattaataacaatgaattaagtggaacttatcgtgttgactatattgtgcccaaagatgatcccaaggcaagcgaaccttgtatctcacccatattagttaagcagtttgcactcagaccagaatggttaaaaaagttaacttggaaagataagggtaattgccttaatgaggcatcgttaccaggtatgagcctgaggacagatttaggtagtggggttttttttattactcttcctcaagcttatctagagtattcatcaccgaattgggaatcgccttctttttgggacgaaggtattgctggattattgtttgattataacgttaatgccaatgtcagagcgcctagtgatggcaagcagaaacagcagatcaccgcaaatggtacggcgggggcaaatttaggtgtttggcgttttcgggcagattggcaagcaagttatgagcacactacaggtgtattgcatagcacagaaaatcactggaattgggatcaattctatctttatcgagcgataacgaaatggggcgcccgtttagtcatgggggagacttacttacgttcaaacctattagataatttccgttttacgggaataagtttacttacggatgagcaaatgttgccccctaatttacgaggttatgctccagagatcacgggagttgcaaaaacgaatgcaaaagtcactgtgagtcaacaaggacggattatctatgagacacaaatcgcgcctgggccatttcgtattcaagatctgcatgatgcggtaagtggacgcttggatgttcgtattgaagagcaggacggaacaatacaagaataccaaattgatacagccaatattccttatcttacaagaccgtga

SEQ ID NO: 296414 - DNA, 1422 bp, Proteus mirabilis
  misc_feature (820)..(829): n is a, c, g, or t
atgggagagttttcttggggagtgaataatggttggtctctttttggtggcactttagtttctaaggattataactcggcctcgctaggttttggacgagatctaatgatgttaggtgctatctcttttgatacgactcattcatgggcaaccttcgctaatgagaataaacactatcatggcagttcatatcgaattagctattcaaagcgttttgaatctattgatgggcaaatcacttttgcaggctatcgattctctgatcgtcattttatgagtatggatcaatatttagataggcgttatcgctatggcgcacaagaaaataataaagagctttatacccttacactgagtaaacaatttcctcaatggggacttagtacctatataaattataaccatcaaaggtattgggatagaccgaataacgactattacaacttctctttatcaaagtatctcgctatcgggaagtttaaaaacattaacattagcttatccgcttatcgtaatcgttttaatggtaatcatgacaacggcgtgtatttcaacattaatttgccttggcgtgatagagcaacgataagttataactcggtcataaataaagaaggtaactcacataatgtcagctatttcgatcgcattgatgataacaataattatcgtctaagtgcaggagttagtagtcgaggtaaaccatcggcggatggtttctttacacattatggtgatgttgctttagtaacggcttcagccagtcatattaacggcgactatacttcggcatctttatctttccaaggtggggcaacannnnnnnnnnattttcaccgtagcaatatgccgggggcaacccgtttgttaattgatactcaaggtgtttctgatgtcccggtaaaaagtcttagtgccatatctcataccaatatttttggcaaggcggtgatccccgatattaatcactattatcgaggcagtgcttctatcgatcttaaacagctaccagacaatgttgaagcactacgttctattcatcaattaactttgactgaaggcgctattggctatcgtcaatttgatgtgattgccggacacaaagcgatggcaacagtacagttggctgaaggaggcgttccgccatttgcagcgacagtaacaacgcttaatggtcgagaattaggtgtttttaacgacggtggaaaggtttatttaagcggtattaattcaggcgatgtcttgtatgtacattgggatggtaaaaaccaatgccaattatccattcctaaattggcggatacacaactgatcacatcactgcttttaacttgctttcaaagacagccgactatttcaacatcattcctggaaacagataaaacgcaagcattacctcaacattcattccttagtaaataa

SEQ ID NO: 296415 - DNA, 759 bp, Proteus mirabilis
atgatggcatctaaacatttatttatggtaactaccaccttattaactggaatggtgtttacgtcgcaagttggtgcgacaatcgctttagatcgtacacgtattatttttaatggtgctgataaatcagtaagtctgagtataagtaatcaaaacaaagaattaccttatttagctcaaggttggctagagaacgagcaaggagaaaaaatagaaacacctcttattgtattacctcctattcagcgtattgaacctgggaataagagccaagtgaaagtgcaatcattacctgatattgcacaactacctcaagatagagagagtgttttttattttaatttacgtgagatccctccacgtagtgataaacccaacgtattacaaattgcactacaaacgcggataaaattgttctatcgaccaaaatctatttatgccacccaaactgatttaagtaatccatggcaggaaaaaattaccttaacaaagcagggggagagttatgttgtgcataatcccacaccctattatatcactattgttgatggtctaacggatctgaaagggaaaagcttagaaggatttacccctatcatggtagcgcctcgagggcaggaaaaactcaatttaacggtttctacgctgggggcttctccggtattaagttacatcaatgattacggtggtcgtccaagattgaaatttagctgcgatagtcgtgaatgtaaggtgatagaaacagaccaaggaaattaa

SEQ ID NO: 296416 - DNA, 168 bp, Proteus mirabilis
atgaaaaactttgtcaaaattgcacttattgcttcttttgttaccgtaatgactggttgtactggtagtgtttacaacaaagaaaaagattgtaactacgactatttattacacccagcagtatctatctctaaaattatcggcggttgcggcgatactaataaataa

SEQ ID NO: 296417 - DNA, 870 bp, Proteus mirabilis
atgacaatgagacaggtaaaacaaatttattcagcacctaatccacattgggttggtaatggcttttctatgagcacagtattctcttataaagagaatgcagagcaatatagcccattcttattaatggattatgctgagcctacattatttaagcctgttactaatgcgcgtggtgttgggactcatccccaccgtggattcgaaacggtcactatagcttatcaaggcgaagtgtctcaccatgattctaccggtcatgccggtacaattgctgaaggtgatgtgcagtggatgacagccgcttcaggtattttacataaagaatatcactctgaaaaaatgacgaaagagggaggtatgcttgaagtcgtacaactgtgggttaatttgccaagcgcgtataaaatggcacaaccccgttatcaagcactaaaagcgcaagatattcctcatgtgcaattacctaatgcacagggctatgtccgagtcattgccggtgactatgcaaatacatctggtattgctatgacctattcccctttaaacctgtgggatgtgcgcttaaatcatgcgggtacttcacactatgctatccctgagggacataatgcgatgctatttgtcgttaaaggtgcgatacatctcaataacagtgatattgtacgtcaacatgaaatcgcaatattagatacccacggtgataccctaacattaggatccatgggagacgctatcgtattaatattaacgggtgagcccattaatgagccagtagtaggacaagggccttttgtcatgaatacacaacaagagttattacaagcttttgatgactatgacaatggtaagtttggtatgatggattag

SEQ ID NO: 296418 - DNA, 423 bp, Proteus mirabilis
atggcggacagcaaagagctagcagaacaacgtgaagaaacacgtcttattattgaagaattactcgaagatcccgatgcactgtacgcaattgaacaccacatttcatgtgaaaattttgaaacgttagaaaaagcggctgttgaagtttttaaattaggttatgaagtcaccgagcctgaagaaattgaaattgaatcaggtgagatcttagtctgctttgatgcggttagtgaaagtggtctaaatgctgaactgattgatgcgcaagtagaacagttaatgaatttagcggaaaaaatgggtgtctattacgacggctggggaacttattttgaagatcccgacgctgagtacgatgacgaagatggcgaaaatgaagatgacgaaagcgagtctgataagtcatcacgcctgcactaa

SEQ ID NO: 296419 - DNA, 1005 bp, Proteus mirabilis
atgaaccctttctaccaaagatcatttttacgtttgctcgacttctcatcagcagaaatacaacaattactggctttatcactagaactcaaacaagcaaaaaaatcaggccatgaacagcagtatctcacaggaaaaaatattgcgctgatttttgaaaaagattccacccgtacccgttgtgcctttgaagtggccgcctttgatcaaggtgcgaaggtgacctatctcggcggaggaagccaaatcggtcataaagaatcgataaaagataccgctcgcgtgttaggacgtatgtatgatggtattcaatatcgtggttatggccaaaaaacagtagaaatgctggcaaaatatgctgatgtaccggtttggaatggattaaccgatgagtttcaccccacacaattattagcggatttgctcactattactgaacatcaaacaaaaccattatcagaaaccatttttgcttatcttggtgatgctcgtaacaatatgggcaataccctactcgaagcggctgccttaacaggaatggatttacgcctagtcgcaccaaaagcgtgttggccacaagcagaattaatcgctgaatgccaaaatatcgctcagcaaaatggggggaaaattaccttaactgaaaatgtcgcagaaggcgttaaaaacgccgattttctctacacggatgtgtgggtatctatgggagagccaaaagatgtttggaaagagcgtattacgttactcaaaccttatcaggttaatatggatgtaatcaaactaacgggtaatccagacgttaaattcctgcattgtttaccggcttttcatgatgaagagacaacaatggggcaagcattagcggaagaatttggcttatatggtggttttgaagtcactaacgaggtttttgaatcaaaacacagtattgtgtttgatgaagcagaaaatcgtctacacacgattaaagcggttatggtggcgaccttagcaaatcctttttaa

SEQ ID NO: 296420 - DNA, 660 bp, Proteus mirabilis
ttgataaatactctagtaatcagtcaagttgaaatatttagtttaggtatagaaaaattactttgccagattaaaaaaattaatattcgtaagattatgaatgatgaaagtgaagcttttcgttattgcagacaatattctgtcaatcttattattttttattctttacctactgtctctttaatagatgtaataaaaagaattaaacgtttttctcccattataaaaatagtggttatttcgcctaaaatagactcaatactttccgtcacattgctacagttaggtattgaagggtttatcgttatagattcctctgctgcgaatgtgcttcaggccattcgacaagtctgtattggtcaacgttatattagcccagaaattgctatggatattgcattaacgaaagttcaagcagacttaaatccgctacatcatctttctgaaagagagttacagataatgtcgatgattataagagggaaaaaaatagcacaaattgcacaagagctgaatatcagcactaaaacagtaaatagctatcgttatcgaatgtttagtaaacttaaaatctcaggtgatgtagaattaactcatatagcagttcgttatgggttaatcgagatagagagttacttacaaagtggaaaacatatttga

SEQ ID NO: 296421 - DNA, 1833 bp, Proteus mirabilis
gtggaaaacatatttgatgctaaagcatttctaagtcgagtaacgagtcaaccgggtgtgtatcgaatgtatgacgcctcaggcaccgttatttatgttggaaaagcaaaagatctgaaaaaacgattatcaagctactttcgtgctcaggtaaatagtcgtaaaacagaagcattagtaaaatgtattgccaatattgatgttaccgtgacacatacggagacagaagcgctacttttagagcatagctatattcagcgttatcagcctcgctataatgtgttactacgagatgataagtcctatccgtatatttatttaagtgcagacaaacacccaagattggcgagttatcgtggtgctaaacatgctaaaggggaatactttggccctttccctaactctttggcggtgagagaaacattagctttaatgcaaaaattatttcctattcgtcaatgtgaagatagtgtttaccgcaatcgctcacgcccttgtttacaatatcaaataggccgttgtctcgccccttgtgtaaaaggctatgtctctgatgaagaatatgcccagcaagtcaattatgtgcgtctttttttatccggcgatgacagccaagtgattgaaggcttaattaaacggatggaagaggcaagccaagcgttacgctttgaagaggctgcgcgtattcgtgaccaaattcacgcggtaagacaagttactgaaaaacagtttgtggctaatattggcgatgatctcgatgtgattagcgtggcatttaatggtgctattgcttgtgtgtatgtgctctttttccgtcaaggtaaagtgcttggtagccgtagttattttcctaaagtaccggcaaatacatcattagacgaagtggtacaaacctttattggacaattttatttacaaggcagtgcgatccgcactttacccacagaaattttgctcgattttaatcttgaagataaaacgattttagcggagtcaatttcttcgatagcaggacgtaagatccatatccaaactaaaccccgtggtgatagagcacgctatttaaaactagcacgaactaatgcagctacggcattagccactaagcaagttgaacaatcaaccatttctcaacgttataactcgttaatgtcacttttagagatgaaagagataaaacgaatggaatgttttgatattagtcacactatgggagagcaaactgtggcttcatgtgtcgtatttgacatgaatggcccattaaaatcggaatacaggcgctataatattagtgggatcactccgggggatgattatgccgcgatgaatcaagttttgactcgtcgttatggcaagtcattagaagagagtaaaatacctgatattatttttatcgatggtggtaaagggcaattagcacaagccattgacgtatttcaatcacttgatgtcgattgggataaatcacaccctaaattaattggtgtcgcgaaggggagtgatcgtaaagcggggttagagacactattttttaaaccagaaggcgaaggtgtggcacttccttctgattcacccgcgttacatttgatccaacatattcgtgatgagtcgcatcgtcacgcaataacggggcatcgtcagcgtcgtgctaaggttaaaaacaccagctctctagaatcgattgagggggtgggaccaaaacgacgtcaaatgctattgaagtatatgggtggtttacaagctttacgtgatgcaagcgttgaagaaattgcgaaagttcccacaatttcgaccgcgttagcagaaaaaatttttaatgcgttgaaacactaa

SEQ ID NO: 296422 - DNA, 549 bp, Proteus mirabilis
atgcaactaaatattccaacttggctaactttatttcgtgtcgctttaattccattctttgttttggtgttttatttaccatttaaagatgctccccttatttgtgccattatttttatggtagctgccgccactgactggtttgacggttttttagcccgccgttggaagcaaaccactcgctttggagctttccttgatccggttgcggataaggtaatggttgctacagcattagtattaattactgaacactatcatgtatggtggatcactttaccggcagcgaccatgatcgcacgtgaaattatcatctcatcactaagagagtggatggctgaattaggtaaacgtaatagtgtggcagtttcttggatcggaaaagtgaagactaccgcacaaatgggcgcacttgttgtgctattatggcgtccgactattgaagctgagtggttcggatttgtattgttatacattgcgacggtattaacattctggtctatgttccaatatttgagtgctgcatggtcagatttgcgtgaagcttga

SEQ ID NO: 296423 - DNA, 924 bp, Proteus mirabilis
atgttactacaaaccattttagcagcgctgggccctattatcttagggcttttagttggctggctttccggtaaatatggatttattaaaagagagtattcacaagcctttgctgattttgtcgttaaaattgctctgcctttttcactctttttagcggcaacccaagcttctccgtcggttttctttaatatcgactatctattagctctcgcggtaggattaattgtttcttatcttattggttttttaggcggcaagttcttttttaaacatgataaaaagaactcagcaatgcaggcattatcggtttcatttcctgatatggcttattgtggaccaccagtattactggcaacagtcggctcatctggtttgattgctatggtggtgggaaatttgatctacacggtaattattttaccttttactatcatgatcattagtggtgccaaacaaggaaaaagcattttacagtcattgcttaatgctatctctcagccattagttttcctgcctattttgggggctatgctagctattttcggcgttaagctaccagagattttacaaaactcagtgaatgaaatagggaaaacatctggtggtgtagcattatttttcttaggactattaatttcagggctcaaactcaaagttaatactgaaattgtttttaatgtgataataaagaatgttgtacaaggggcattaattttaggaacgggatttgcacttggattagaaactgaattattaaaagccgtctttctaattggtgtattgcctactgcaacagcggtgcctgctttagctattacaaataaggcctatgctgatatggcaacgggcactgtattattaagtacgctatgttcattactttctattattggtggtatcactattgtagaaatgatgtaa

SEQ ID NO: 296424 - DNA, 1497 bp, Proteus mirabilis
atgaataaaactattagtgaacatgtagatgtcgcgctcattggtgctggcattatgagtgcaacacttggcacacttcttaaagaactagagcctaatttaaaagtcgcgatgtttgaaagacttaatgattgtggtcaagaaagctctaactcatggaataacgcgggaacaggacatgctgctaactgtgagctaaattatacgccaccaaatcctgacggcaccgttaatatcagtaaagcgttagaagtgaacaccgagttcgatttatcgcgccaattatggtcttatttagtaacaaaaggaaaaattgccgatccgcgtgattttattcatgcttgccctcatatgagttttgtttggggtgcagataacgttaaattccttcatcaacgctatcgccaaatgtctgccaatcactgttatgaaaatatgcaatacagtgaagacaaacagcaaattgaagattgggcgccattaattatggaagggcgtgatccgaatcaacagcttgctgtcacccgagtagctactggtactgatgtcgattatggcgcattaacacatctattagttaagcaactttctcaacaagataattttgagttgcactataaacatgatgttattgatatcaaaagaaatgagactggcggttggaatatcgaagttaaagatctcaccacccatgataaatacctcattacagctaaatatgtatttgttggtgccggtggacgcgctatcgatttactccaaaaatcaggtattcctgaaggtaaaggctacggtggtttccctgttagtggtatttggctacgttgtgatgaagataaaatcagctctcgccatcatgccaaagtttatggaaaagcagatgtaggctcaccaccgatgtctgtcccccatcttgatactcgtattattgcaggtaaacgctccctactctttggcccctatgctggtttttcaagtaaatttttaaaacacggctcctatttagatttatttgagtcaattcgccccagcaatattgaacctatgctagatgtcgcgaaagataactggtcattaactgaatatttaattggtcaagtattacaaacgtcagcacatcaatttgaaatgcttaaacagttctatcctcaggctcaacatgaggattggcaagaagctgttgcaggtcaacgagtgcagattattaaacccgcagctaaacatcatggcgtattagagtttggtactgagctaattagtagcgcagataaatcattttcagtgttattgggggcatcacctggcgcttctacagcagcatttattgccatcaatatcattaaatcttgctttaaacagcaacttgaaaatgagggttgggaagatcgtcttaaaacgattattccaacttatggtattgatctcaaaatagatgccgatgcttgtcgtaatattcgtgcatcaacggctaagatattaaaattagaaacaccttag

SEQ ID NO: 296425 - DNA, 396 bp, Proteus mirabilis
atgatacgatgtgttcgcttatggaccggagaagatggtaactctttatttgaagaaggtatcatcgaatttaaggatagttcacgaggcgatagtgaaagtttgccaattgctgtttcagagttatcgtttagagaaacaacttcaggtggttcatatgattggcatcaagatcccgttcctcgttatgttattacgttatcaggaacattagagtttgaaacaaaagatggctcaacttttatcattaaacccggtgatgtgttgttagcgcaagataacagtggcactggtcataaatggcgtcttatggatgatgaaccttggcgacgagcttatgttgtttacaaagaagatgcaggattatgttttaaacctaccaaaacaactaagtaa

SEQ ID NO: 296426 - DNA, 435 bp, Proteus mirabilis
atgacaaaaactgtattagttcccatcgattttactgagcttggtttattggataaagttgtcactcatctcaaagcattagcgatggccgataaactaaatatccactttttatctgttattcctagctatgagtcctttgtcggatttgcttttggcaaccaagaccgtcttgcaaaagataagcagcgtattgaaattgcattatctacgttaaatgatagtttatctcatattgaaattcccaatagtacatctcaatcttatatttccgtaggtaacccacgcgaccgtattttagagaccgcaaaaaaaatccaagctgatctgattgtgataggctcacgtaaccctggaatgaaaacctacttactaggctcgacagcttcttccgttgttagctatgcagaatcttctgttttagttgttcgataa

SEQ ID NO: 296427 - DNA, 393 bp, Proteus mirabilis
atgaataaagaatattctgccaaatgggaagagcgttttgatttcttcgaaaaatatggttctcctaaatctccagaatacaaggctgcatataaagcactgactttcggtaagcgtattctaattgggatgaatatctgggctttcttctttggctttatttattttcttatccttggtttatggcgtaaagcattaactttattcgggattaatgttgctattatcattgtggtaagttttatcgtggaaggactttccctaagcccttcaattctcaatgtagtcagtattgtgctcaacttcttatgggcggcgacagctaattatgcttactacttaaaagaaaagaaaaatgatcaaggttggaacccgttcaccggtgtattctga

SEQ ID NO: 296428 - DNA, 549 bp, Proteus mirabilis
atgtctgaacactttcaaggtaaatttgaagcagaattgaaataccacttaaaacgacctcaagattttattgatgcattacaactcgctggagcaactttatttatatcgaaaaatgatgaaacagattggtatttagaacatcccaatacgcctttccctgctccctctataagtttatgcgtaagaaaaatgatcccctctggtatcaatttattaattgtaaaaggcccagaacaagcccaatgtgaagcagtaaaaatagaagatgcagaaaaaacggtttcgatgtttaaaacattaggttatcactgtattttaaactatacaaaatcccgtcaaatctactttctagagcaatttcatatcactatcgataaattagacaatcttggttactttgctgaatttgctattatgactgatgatgagagtaaacttgctgactataaattacagttacataacttagcatatcaatttggctttaatgatagtgagcaagagcatcataactataaaacaatgcttttaagcaagttagcttaa

SEQ ID NO: 296429 - DNA, 738 bp, Proteus mirabilis
atgtatccagttgatttacatgcacataccattgcgagtacacatgcttatagtacggttagcgaatattttcaacaagctaaaaagaaagggattaagctatttgcgattacagatcatggtcccgatatggatgacgctcctcatgaatggcatttttcaaatttgccggtgatccccagaatggtcgatggtgttggtattctttatggcatcgaagcaaatatcaaaaatataaaaggtgaaatcgactgtactgagaagatgagtaaaaaattagatattgtactcgctggttttcatgatcctgttatgggatcactaggtatggttgataatactaaagcgcttattgcaacaataagtagtggtttagtacaggtgatcacccatccgggaaaccctaaatatcctatagatattaaggaagtcgcaaaggttgctgctgagttcaatgttgcattagaaatgaataattcttcttttatacattctcgagtaggaagtgagaaaaactgcattgaaatagcgaaagcggtgcttgatgccggaggtttaattgcgcttggctccgattcacatattgcatcatctttggggaattttgagcgagtattagaagtattggcggagatccaatttccacaacagaagatattgaatacatcaccaagaaaggtgcttgattttttacaagctcatggcaaaaaagagatcacagcgtttcaacatctttga

SEQ ID NO: 296430 - DNA, 255 bp, Proteus mirabilis
gtgatagatgatttgctgaaaaaggatattaaattagttatagaagcttgggaaaaagagccggtattcaataaaaaaataaataatacattagagtacttacaaaatacacaaccgcattctgagttattacaaccattatgggatattttaatcactattccacaacaccctgaaaattgtaaaaaactaaaacactggctagtagaacactctttatgtttaattaatgatgaatttatgtggcatgtataa

SEQ ID NO: 296431 - DNA, 2469 bp, Proteus mirabilis
atgaaattaaagcagagtgcttgtctcgcttttatgatgtttccggcgctgtcttttgctaataatgagtttaattttgtcattgaagattttgaccgttatttagaagcacaacagcccgttgatattaagcctgaaccctctgcaacaatttcatcttcatctactcccgatcagcgtagtggaacggtgcgttccactgtgacattaaaggaaaagccaccacaaaaaccacaacaaaaaattcagcctaaacagcctgttgtacggaatgaacatcaaaccgtggtacgcaatgagcatcggccagtagtggcgactccctctgtacctcaggtgactttgtctgaacaatgctctgtggtatctacaaataccaacaaaataaacagtgattacactcattatttaacaccactgctttcgtttgtaccgattaaaccgcaatttacccctgaggacttgaatcggtattatcaaagtaaatccgtggtctataatcctctaatgctttatacgcgtaagcgttatccagggcagccatatcagtctactgataatactttattagatttcattccaaatacagtgtattcagtgactgaaataccttttcattttttatatcaatttaaacgttctttgcttgaccataagcaacctctctttaataaagagctattaaatcgtttagcaaatactcgcgaaaaatatcaacgtctgtatcagaaatttactgaacaaaccgcgttattaactgaaagtttaactaaactgcaaaccgcagaagaaaaagttcaacaattaacagcggaattggcaaaaacgcaagataaactggctgtagcgaataatttacttaatgatgatagcctaaaacagtctgtggctaagttacaaaatgaattagcacagtctaaaaaagagcaggatacgttgcttgcacaattagctgaaaaagatcagttgctgtttgatgcgacagaaaaaaataaagtattaactaaacagcaagaagattttgatattcaggcacaaaaattaaatcaattgactacccatgttgctcaacttgagcaacaaaaacagcagctacaatcacaatatgggcaggctcaacggttattaacaaataacagtgctaaaaaagagattgaggtactacaaaattctttaactaatttatcagcagtgcgccaatctttagaaaatcaattagctaaaaacaaagcctcttttgaagctactctagctaagaataatcagttaattgatacccaacgccaacagatagctcaacttaacgatcacataaaaaaaataaaccaagagcaacaacagttaaatcattcgttagtgactcttcaacaacaaaaagcacaagcagatgatcaattaacacagatcccagcgttgaagcttgagttacaaaataaggttaatgaattagctgagctgaaaaaaagtttatctacgggtgagaaagcttttgatgctttgatttcagaaaaaaatggtgtaatcgctaaattagagaaagctcaggcagatcttgccaataagtatcaagcattggatacccaatttaaagagaacaataccaccattgggcaacttaaagagagcaaaatagcgaacgataacgcttatgctcaattagagaaacaactagcagaaaaacaatcgcttactgataaattaacgacacaattaacacaagctaaagatcagttagcaaaacaaaattctgaaagtaaccaactaattgcttcattaaaacagcagcaagtagaatcgacggctcaatttaagcaacaagaaagtgttttagcgaattctcaaaaagagtttaatgaagtctctaagcagcttgaagctcagcgtacgctaacgaaaacacttgaagaaaaagaattaaaattaagtgagcaattaaaagaaaaagagagtgaaattaaaaaaataaatagcgaaagtgcgagtgttcaaaaagagaataaaacattaaaacagcaattggataaagctatgggagaagggcagattattgcaagtcagcttgcatatgcctattcaattatcggtaaagataatgcccaacgaaataaatcaattctgtcggaaatacaaaaacagaactatgtgcaatacgatgataatacttactttaaaatcctaaaacaagggaaacctgtggattcaattgcaggtaaaacagttgttttcgctatgcatgaacaattaaccgatggtacagtaacacttaattatgacaaagctaagccgttaattttaccataccgtcaacttccactgcctcttaatacttttgttgctaaagcaggcttaaatggcaaagctaaaatttatattaaacctgatggcgggtatgggaaagatggtatcccagggcaagtacctccagaatcgatgtctatagtgacaattgaaattttagctatcaaatag

SEQ ID NO: 296432 - DNA, 408 bp, Proteus mirabilis
atggcagttactgttctcacactatcgggatgtagcattttatctggtgatagccaacctgtggaggtggtgccaacacaggtgcaatccacggtaacttcacctgctgataataattatcaacagatgaacgtaggggagcaaaaactggcatcacaaacagcatgtatcaagcaacttgattctttaaaaacattttcaccagcagagtataaatctatggtggatgaatttaaggaaatcagtgaaattaatgcgttataccgtagtgttgaaaataccgccagtaaagatagcttagcattattaaaaatgagtatcgaatctaagaccgaagtactatgtgctaaagtgcgctatctttcggttatgtctgtgaattcgacactgaagaaattaggtgaataa

SEQ ID NO: 296433 - DNA, 420 bp, Proteus mirabilis
atgaaacaaataattattattgcaggaggaattatatcattgactattatgattgctatttttgttgcaatcttagttgtttctgtatttaaagaagataccgttgctgcttggaataatagccgtaatgttattgaaaactcctcaacacaaatcaacgatatgttttcttttgtcaaaggtaagcgtgatgatgtcatggcacgttatcaatcattagaaaacagtgaaagttgtaatcaactcgtgtctaaattagacagtgttgaaaaagcactagcggaaggtagtttgttacttcctcggtcatcaattgagcaaatttttgctattaaaaatagccttaatgatagctcatctccagcccaaagctttgcctgtgagcaagctattcaatttatagacagaattaatccataa

SEQ ID NO: 296434 - DNA, 387 bp, Proteus mirabilis
atgaaaaaagttttacctatcgccatcgttttaatgggttcactctcttttggtgcaatagccaataattcacatatgaatatgaatatgagtactaatgtggcacagagtaactctcctatgaaccaagagctcatggattcaatgaataaaatgcatgaaaatatggcaaaaggaatgaatagtgctaatgcagatgttgcatttgcgcagggaatgattgctcaccatttgggagcaattgatatggcaaaaatcgagctaaagtatggtactgatcctgaaatgcgcaaattagcacaagctattattgatgcacaaggccctgaaattgaacaaatgcaaaaatggttagaaaaaaataataccaatatgcaaaataactaa

SEQ ID NO: 296435 - DNA, 1002 bp, Proteus mirabilis
atgccaataaatataacgaaggaaaggggattactaattagcttactcacagtgatagccagttgtttgttattgattgcttattattggtctgaactaacttattttaatgttcaatggcaaaaagttatcaatagctatcttgcagaattaatgcaagatattagcgaaaataattggcaagtaggctttatattaataggtgttagttttttgtatgggttactgcatgctgttggccctgggcatggaaaagtcattattagtacttatattgctactcacccgactaaattaaaacaaagtgcgtggttaagtgtccttgcttcattgctacaaggtacagttgccatagttatcattactgttatattaataatattaaacctatcaagctctcatttaaaaatagcgagtcattacattgaaaatagtagctatttattaatttcattatctggcattattatttttatccagtctattcgtcgtttattgtcagactataaaaagcgagctttttatattaaacaggcaacacctatcatcaagcgatctagatatctctataaacataaaagcaaccaaaccatctcacaaacatcatgttgtggtcataaacatgtggtgacttccaatgaattacaagggaattggtcggcacaattgttggtactattcgctattggtagccgcccttgctctggcgcattgttagtattgttattttcttatgcattaaatatctatctttggggaatagcggctgtcattgcaatggcaataggaacggctttaaccattactgcaattgcattaacagtttattatatgcgaaatgttgcttatcggttttcggtaaaaaatactaacttatcttttaggtatatggcggagttactacgtctattagcaggaatattgtttatatttttaggtatactgatgtttaatagtgcaataacgttaaatagagaagatataatgccgttatttcgctaa

SEQ ID NO: 296436 - DNA, 615 bp, Proteus mirabilis
atgtctttctttttattgatgactacaccaaaagttttagcacatcctcatagctttattgatatgcaaacaacttttaatacacaagatgataagttaattggattaactttttcttgggttatggatccgataacctcaatggatattctgtacgatatatataatgcgcaaccagaaagtgatatttggaaaaaacaggcggcgagattaatgagcaatatattgtctcagaactatttttccgagttttatatggatgggaaaaaacaaaagtttcgtcgtataccaagccattacactcttataaaagagaagttacaggtgaagtttagctttgatgtgctatttatcaccccattgccattcgctaaacatcattttgaacttttaacttatgatcccactttttatgtcagcatgacctatcgtgacaatacacagatcatattgcctttagaaatgatcgctgattgtaaacacaaactgattgaaccttttgctgatgaaagtttaaaagaatatgcacaatcattagatatcaatggctctgctgatagtgatttaaatttagggctctcttttacacaacgagtacaagtattatgccaataa

SEQ ID NO: 296437 - DNA, 315 bp, Proteus mirabilis
atgcaaaaagaagctactgtagtttctgtcgaaaaaccgaaaatagtatcacgacaatttccttattatcctacaggcgctaaaaccgctaatattgaaggcgatgtagaggttaggtttgatgtggataaaaatggtaacgtacaaaatattaggatatcagatgatcctattgcagcgatatttgctccttctgtttcactggcgatgaagcattggcgatacgaatcaggtaaaccggctaaagatttaaaagtggttatacaattcagattagaaaatgtgaaacataacggatttaatcaatcacattaa

SEQ ID NO: 296438 - DNA, 819 bp, Proteus mirabilis
atggacactattggtgtcaagtcatttagtgtctttatgacaaaatttgattttcatgtgtttaacattaaaataaactcattatctttttataaagtgcagaccatgaacgaacaaaattttttagcaaattacaatcgccgtgattttctatcgccgcttattactgttgattcagtactattcacttaccatgaagggcagttaaaagtgctcttggtggaaagagctaatcatcctgaaaaaggaaaatggggattacctggtggctttgttgatgaaacacaagacaactgtctagaagatactgtgctcagaaaattaaaagagaaaacaggggtgatcccgccgtacattgaacaactctgctcagtgggaaataatcagcgcgatgtaagaggttggtctgttactgtatgttacacggcgttaattgctcaccaagcatgtaaagcgcatattgatagtgtggatcatgtgatgtggttacctattgatgaagtagcacagaaaaatttggcatttgatcataatgaactgattgcgcaagcgagagagcgattaaagcaaaaatcgctttattctattgtgccgggatttgcgttacctgaagtgtttactttgcctgaattacagcatgtgcatgagatattgataggtaaagagatccagaaaaaatcttttaggcgacggattgaacaagccgacttattaattgataccggagaaaaacgtgctgagaagggacgccctgctagtctctatcgacttaagaagtcgtctgcggattatcgttttattcgtaatcttgaattttaa

SEQ ID NO: 296439 - DNA, 1017 bp, Proteus mirabilis
atgtttaacttaaattatttcaaagcagactcatcaacatttattattaaatcggtcaacgggaaagtgcgccaacaaggtaaaggcttaagtttttggtataattcggcgacaacatctattgcagcactgccgttaaatgcacaagaagccccttttatctttaacttccaaactgctgattttcaggcactacgtattcaaggacaaatttcattccaagtcacatcacctgaaaaagccgctgaagtcctcaactttaatttaagtaagaatggcaaatcttacgccagtgaagatcccctaaagctcaacgatcgcgtggtacgtattgctcaaaccctgatccaagccaagatccaaagcacccctttacgagaagcactacaacttagccaatccttggttactttagtgatgaaacaacttactgaacacccttcattagaggccttaggtattactattttagatgtttctattgcggccatctcaccctctcccgaaacgcttaaagcattagaagctgaggcgcgggaatccttactcaaagaggctgatgatgcaatttatgcacgtcgtaaattctcagtagagcaagagcgcaccattaaagaagctgaattagaaacagacttatctatacagcgtaaacgacaagaaattgaagaagctcgtttagaaaatgaacgtaccctattacgtgaacaagccgaaatagaaaaagagcgtcttgaagccaaagtcaatgccgaagcaaaacgtaaagaattagtcgcgttaagtgcggaaaatcaacgcatacaatctgatgctgatgcttatgcaattgaagcaactatgcgagcttaccgtgagttgcccgttgaaaatctcaaagcaatggctctagcaaaaatggactcacaacaattaatggcaatggcatttgaaactttagcgcttaattcaggaaaaattggtgaattaaatattactcctgatttatttagccaatttatgaaaaaaagaggataa

SEQ ID NO: 296440 - DNA, 2517 bp, Proteus mirabilis
atgaataggaaaaaaattgtttcttttaaaattaatttattagttttctctgtattatcaacgttaaatatggcgactgtagtacaagctgatccgtctgctcatattgttgtgcaacaacagcaaaaaaatagtagtgttgatattcttaatattgccgcagcgattaatggctattccagtaattcattaaccagttttgatgtttctgaagcagggttaatattaaataatagtcctgatggtgctgatactcaattatcggggcatattgacggtaatagtaatttatctagcggtgcggcaaaagagattactcttgaggttaatgctaaaaaagccattacgttaaatggccctgttgaggtggccggaacaaaagcacgggttattttatctaatcctgctggaattatttgtagtagctgtaactttcttagtgctgaccgtgttgtgttgactactgggaaagtgaatatacaaaatgataccgttgatagttataaagtggaaaaagggaatattactgttaaaggtaatgccacttttgataaaagtgcgcaacagattgatttaattgcccgcaatgtttccattgaaacgcctcttgatgcatctggtattaatgtgaatgtgataactggcgctaatgaagttaaagcacaagataatacggtggttgcacaaaagccaacaggcgttgctagtaaatatagtttgcagatagtcaagaatgcaggagtgagaagctcatcgctaaaatttataggtactgaagctaactcaccactgaaaaataatggtaatgttgaaactgctgggggagggatcgagcttattcatagcggtgcacttgataataataaaggtaacttcttatctgagggggatatctattttgctttcgataaaggtgttacaaatagtactggtgaaatacaaagtactaaaactatctcaatagaaacaaaagaagcgaaaattgataatatctctggtggtaatatttctgctgatggaaatgtaactatcaatagtggtgaatttaaaaacaatgcctcctatattgcaagtaaagataaattagatattcagacaaacggtaaaccaataacgaatactgcaacggtcggtgaaggcgtcggtatttctgctactaatggtattaaaattaatagtggcttatttaataataaagagggtcaaattaattctaaaagtgtcattgatattaatactaacctaaaagatttcaataatattgatgcttatattgatgcgtcaggggatattagtattaatagtggcgcaatgaataatactcatagtcgcctacgctcagttactcgtgttgaaattgatactaatggtaaggtactgaaaaataccggcatgactgcagatactgctagcgatgattcattaggtattcttagtggtctggatggtatgacagttaatattgctggattgaataatgaccaagggattattgccaccgatggcgatatgaacttcactaacaaaggcgacattaccaataaatggggacatataaaatcaggggggtacttgacatttagtagtgataagatcaaaaacctctatggtggcttagcatctaaaaccggtgctaatgtgactttctcccagacattagataataactttggtgttttttacttagaaggcgatagtgtcactatcagtgcgccttatataaataataataaaggtgttattaaaggagatgctatttattttaaaacagataaatttaataacacatcaggatttgtgatcactgaacagaaattagagattgatacaccagaactgacgaataacagcagtttagatttcaaaacagaaatgggcttttatctggggcaacctgatcagaaagggggattaattagtaaaggagaaatgaaattaagcggtaataaattagtgagtaataaaggacgtattgtaacagaaaatggggatatggagcttaaattcacctctgttgataataccagtggtactattgcatcacataaaaatgcctctgtagtgacaagcacctttaccaattcacaaggcacattgtttggccaggataaattaacactacaaaccgatacactgaaaaataacagtacaggttcggttgaaagtaataccttaaaaggtgttattgcgtcgagtggtgatactgaagtgacggttaatcgtgattttgaaaacaatggcgtcatttctggtgtagaacatttacgtgtaaatataaatggtaaatataccaatgccagcaatagtattatgtcaggtaaaaatagtttcgaattaggtgtgacaggaaatattattaatcgcggtattcttaattcaataaaagacacgactatttctggtgagaatattactaatgaaaagtcaggtattattgttggtagagaaagtattactattgataataaaggcacttttactaataaaggtaaagttgtcgggccgttaaataaataa

SEQ ID NO: 296441 - DNA, 369 bp, Proteus mirabilis
atgggaataggaactgatattatagaaataaaaaaggtggctattgcaatatgtagaagtggtgaaccgttaactcagcgattattaactgaatatgaaagaaacagtatcggtagaattcatgaaagttatcatcgtgttgcagggttttgggctgctaaagaagccgctgtaaaagcaataggtacaggatttcgtttggggattttatttcatgatattgaaataaggcatgatgaatatggcgcaccttattatttttttacaggccatttttctaatttattaaagcagaaaaaaataacccaatcattattaagtatttctcattgtgatcattatgctgtcgctgttgcaatttttaattga

SEQ ID NO: 296442 - DNA, 708 bp, Proteus mirabilis
atgaaaaaattattacttagccttactatgctggcgataatatctacgccagtgttggctaaatcccctgtagctaacttaaaaatcaacggtgatattaagcccccaacttgtactattaatggagcaacacaaagtgatgtaattttcgattacggagtcataagcccaacacttatccctcaatcgaaaatttattcttatcctgccagtatggttcaaaatacagttacagttgaatgtgatgcaaaaacatatttaacctttgttgcgtctgatacttatgataatacagaattaagcgttaataatacgtcagactggtttcatttagtagataaagcaaatcctgaaactgcggttggagcagcttattttgtatgggataatgtgactgttgatggcaaacctgcgtatatttcacgagcaaacgatgctgctatcacagggactaactactataatgtcctatataaagggccaaccaatggttggacatcaaaacaacagacagaatcggttgataaaggctctctggctctaatttcaggtgaaattttccaagcaaatttcagacagggaattgaaagtaatcctactcaaacctttattttatctagagatgaattaagtaaaaaaggaatagatttatctaatggtttagattttatcggggaggctgttctcacttttaattttggtgtctaa

SEQ ID NO: 296443 - DNA, 1890 bp, Proteus mirabilis
atgctagcgctcgctaatgtctatttaaaaccaaatagtagtttttataattttgaaaaagcacttaagctggtagagagagcatataacatacagccatctcctgaaagcaaattattattggctaaattatattctaatagtgagggggttcatcagaatattagaaaagcagttagttttctgaaagaaaacataactaatgataaattgacaggtaaaagccaaagagaattagtaaaaatatattttgattttggtgcttctgattatcttaaaaaagaagagattgtgaatattttaagagagagtgtaattaaaaataaatcagctggtacatttaatcaaaactatagcttagctcatttttatgcagatcttcttttagaagaagatgtcgccaataatgaagaatatgctttttcattatatcaaaaagcacgaggttatgcctatgaagctacttttcatcaagcaattgcgactattaaatataaaaatataatagatgatcaagctcttattaatattgtttcagaattgaaagatgatttagaaagcagaaggttgaccgaaaaaaaacgacaggaaggatatagtattcttttccgatatggaatggattcacagtatgtaattgattttattgtggaacgttcgctatatgatgataaaataagaaaggctattcaaccattattaagtcaaaatacaaatcttgtatttcaatatacaataaagaatataatacatgagaactcagctaacaatattaatgaagataatttaaaaaaatattataaggatatatttaaattagctgaaataggttctattgatgcaattaaatttattattacaaaagagtataaagataagagtgctggtgatgaaatttatcaagactattcttttgataagttaactaatatcactattaaggaacgtttggcttggcgaaaaaaatgtgcagatttaggtaattttatttgcttaaaagaattagctataatttatcgagacggtaaagagggggttagaaagaacattgcgaaagcatctgaatatgaacgacgtattagcatcaattcgtctcactttgagctggaatcagaaaaatatgaaatagatagaagatggaaggaaaaaagagataatacacttgattatttactaaaccaaaaagagagtagtaaacaacaactagaattagcaagattttatagtattgaagatagtggaagaagtttaatttatgccaaaaaagcatatgatttaggaaataaagaagcggctgagttaatttattggtactatatgcaaaatatctgtgaagataaagataatatcaataaagcagactactatcttaaagaatggctaacaacaggagaagaacctagtaaatacagctcttctaatgaatacaaatattctagtattagtatcattgctgattattatttagagtcaccgtgtttagttgaacgaaaccttgataaggctattgagtggtatcaattatcgttagattatccatatgaaataaatgattttttgtattctgaattaaataatatgtatactaatgcaccaaaatacataagtaaggatcctttcgtgaatgtgtatttatctacactaaaaaatcataacgattatattttagatatgaatattcgattaggaaaaatgaattttgcaatatcttcttttgacaaactttatgaagcacttctactcaaaggtgatgtgaaagaagcatattattatggtttactattaaattatgatgtgaataatgtcgctatgttttattctttatctgacattgagcgtaaaaatattgaatatcgtgttgctgattatttaaaagaaatacaaaaataa

SEQ ID NO: 296444 - DNA, 198 bp, Proteus mirabilis
atggctgtactctccaaaataataataaaacaaacaagatcagaatgtctgtgtaaaaaaataccgataaccagtgataatacttttagtaaacaagagtatattttttatcgttttgccatggttattttatggcacaagaacgttactaaaagaggcgatgtattatttaataagataacagttactgtttattaa

SEQ ID NO: 296445 - DNA, 1122 bp, Proteus mirabilis
atggactataaacttaatttagattggcaatcatttttagaaagccattggcaaaaacgtcctttattaatcaaaaacggcttctctggttttgttgatcctttatctcctgatgaacttgcaggtcttgcaatggaagatgaagtggatagccgtcttgtgagttgtcaagatgggcagtggggagttaaacatgggccttttgagcactttgaaggtttgggcgataaagattggtcgttattagttcaagcggtcgatcactggcattttccaagtgcggcattgatgaaaccttttcgtgtgttacccgattggcgtattgatgatttgatgatctcttactctgttcccggaggcggtgtgggtcctcatcttgatcaatatgacgtatttattattcaagggcaaggtcgtcgtcgttggcgtgtgggtgagaaaatcccaatgaaacagcactgtcctcacccggatttacttcaagttgatccttttgacgccattatcgatgaagaattagagccgggtgatattctgtatattccacctggatttcctcatgaaggctacgccattgaagaatcactaaactattctgttggctttagagcacctaatgcacgagagctatttagcggttttgctgactatgttttagcaaatgacttaggaagctaccgttacagtgatcctgatcttactcctcgagataatccggcattagtccagcatcaagaattaaataagttgcatgatatgatggaagacttacttgcccaacccgaagtcttccgtcattggtttggggagtttatttctcaatctcgccatgaacttgacttggccattcctgaacctttatatgaaaatgctgagatccacgatttactgcaacaaggtgaacaacttcatcgtttaaacggtattcgcgcactgcgtgttggtgatagttgctttgttaatggtgaattaatggatactcatcatattgaagctgcagatgccctttgccaatatgattgtattgataaacaacatttaggtgatgctttagcagatccaaaatttatacgcttattgacgcatcttgttaaccaaggctattggtattttgaagattaa

SEQ ID NO: 296446 - DNA, 696 bp, Proteus mirabilis
ttgcgtaatgaacgcaaccgttatagtaaataccgtaccagtttatctgatctgacccatagcttaaaaaccccccttgctgttttacaatcaacattacgtgctctacgtgctggcaaacaaatgtctatagaacaagctgagccaattatgcaaagtcaaattgaacgaatttcacagcaagttggttattatttacatcgagcttctcttcacggcgatcacgatataacaacacgtaagctccactctttatcaggcttacttgacaatctttgtagtgcacttaataaggtctatcaatccaaaggcgttgatataacattaaatgtttcccctgaaatgatgtggttaggtgaaaagaatgattttatggaagtcatgggaaatgtacttgataatgcttgtaagtactgtttagagtttgtcgagatcaatgtaagtcatgatgacaattgtgtgattatcaccgtagatgatgatggcccaggagtcagcccagaaaaaagggagcttatttttcagcgtggtacacgtgcagatacattgcgcccaggacaaggcttaggattatcaattgctgttgatattattgagcagtataacggtgatatcaccattaccgatagtccattagggggggcgagactcatcgtcacctttgctgagcaacaactcactactgaaatagagtaa

SEQ ID NO: 296447 - DNA, 585 bp, Proteus mirabilis
  misc_feature (561)..(570): n is a, c, g, or t
atgcgcagccaaagtaatctctactatagcttagcgcaatggaaagatgggcaattgcagattgaatttccgactaacctcaataacaacaacacatcgctggtggttatcttcgacgagaaaggcaatgtgctatggacgccaacggatttacctcaggtgatcccaaacagtatcgcgccaaaatggcgcaataaagaaggcttatttgaaattagtgtgaatgttaaaacgacacgttttatgttacagcaactgcctcaatatcgtgcctatctaaaaaaactcaacgaatattcaagtaatgataccttaacgcattccgtggttattaatcactatcctgcggcggataatatgccttatctatccattgcggttatcgatcctattcctcaaagtctgcaaaatgtaagtagagtctgggattggtttctctatatattactagctaattttcttttggtgatcccattaatttggttagcagcccattggagtttaaggccgattaaatccattattgagcagatcagcgcgttggaaaaaggcactcgcgannnnnnnnnnctcgcgataatttag

SEQ ID NO: 296448 - DNA, 261 bp, Proteus mirabilis
atgatatacacaacaggcactgttagcacagtgtcagggtctgctattgtctctggcacaggtaccattattttaattaaaaatggtaatgctaattttatttatatggtggacagggttaatagcgatacagaattagtcatttcacaaccggctacatttaccgtaaaaaacactagttacagcattaatctcactgagccgaactcatacagcgacgctaataatcgtatgaccgctattgcatcagatattacgtag

SEQ ID NO: 296449 - DNA, 177 bp, Proteus mirabilis
atggcattgttattacgggaggggagtgtagagactccatatagcttgcctttagtctgtgcaaccagtcagtttgtgaatgcgtcttatcaggatgaccctattgattgggccaagtgcaatacggggatacgttttcgggggaaaacagatttttgtgagcgaatggatacgtga

SEQ ID NO: 296450 - DNA, 306 bp, Proteus mirabilis
atgagtacaattaattccattattgcttatagaataaagcaaaaaagaaaagaattagggatgacagggagggaaatagcccattcattggaaataagtcaacagcactattcacgtatagagaatggatataccaaaataacagtagaacatttattctctatcgcgtttattttaggtgtcaaacctaaagaactattgcctaattataaattttcaaatgaaaaagaaatgattaaagcaaaacaatcattatcagcagaaagcattatgccaataaagaaaagcgacatgtatcccacataa

SEQ ID NO: 296451 - DNA, 1083 bp, Proteus mirabilis
atgaaaagaatctttgtcatattatttcttttaactctattccctagtctagctgttgctggtgcagatgactacgtaccgtctccaataacaatcaacacatctaccctccctgttgttgttattggtcctgctgatgcccatacttacccacgagtgataggggaactcaccggaacaagtaatcaatatatatttaacggcggtagtttaatagcattaatgcgtggaaaatttactcctacattacctaaaataggcaaaatcacatataactttcgccaaggaaataacactcaatcttccgatttcgatatatttgatactggagttccagggctaggtattattattggtatggcgggctattggcctgcaacgccattggttcccataaacagctcaagtatatatattgatcctgttgccgccaatacaaatccaaatgcttataatggtgcaactggaagttttggtgctcgtttatatgttgcttttgtcgcaacaggacgattacctaatggatatgtaacgataccaaccaaacaactgggccatattttattggaatctaatcgggcaagtttgaataataaaagattaacagctcctgttatgttaaatggagggcgcatccaagtgcaaagccaaacatgctcgatgaatcaaaagaattatgttgttccattaaatactgtctatcaatcccagttcacgtctttgtataaagaagtgcaaggaggggaagttaatatacaacttcaatgccaagacggtattgatgtttatgctacattaaatgatgcgacccaacatgggaatcgttctgatatattaacattagcaacggattctacggcaaaaggcgttgggctaagattatataaaaataatgaagtaactgcgattagttatggttcagacactcctaacaaaggaaatcaaaatcaatggcatttttcaaattatagaggagagataaatccacgtataaaattaaaagctaattatataaaaacagaaaatactattacgccaggaagtgtaaaagcagtagcaacgattactttttcatatcaataa

SEQ ID NO: 296452 - DNA, 414 bp, Proteus mirabilis
gtgccttatgtcacgccttatgaaaaaaatcaaattagcatcgaccccactaatttggatttgaatgttgagttatcagcaacagaacaagaaatcattcctcgcgctaatagtgccacgttagtgacatttaatactcaaacagggagaagcctactatttgatattcgaatgccagatggtagtactcctccaatggcttccgaggttttggatgagcataagcagttagtcggatatgtggctcaagctggacgcttatttacccgcggtcttcctaaacaaggtcaacttgatgtgatatggggaccaaatcatgacgataaatgctcatttacatatcatgcgacacgcaatgaaactgacatgcgacctcaaaccattcctgttcagtgtataccgcactctaattag

SEQ ID NO: 296453 - DNA, 1095 bp, Proteus mirabilis
atgatcatgcaaaaagacgcactcaataatgtcaacatcagcgaagagctggtgttaattacgccggaagagttaaaacaaaaatacccgttgagtcgtaatgatctgcatgccattactcaatcacgtcaaactatttctgaaattgttcaacgtcgtgatccgcgtttattagtggtatgtggcccttgttctattcatgatgtcgatgttgcgttagattacgcaaaacgtctaaaagtcttagcgtctgagttaagtgatagtctgtatattgtgatgcgtgtctattttgaaaaacctcgtacaacagttggttggaaaggtttaattagtgatccgtttatggatggcagttttgagatggaaaaaggcttacatattgcccgtaaactattaacagagttggttcagttaggtttacctttagctacggaagccttagatcctaacaatcctcaatacttaggtgatttatttagttggtcagctattggggcaagaacgaccgaatctcagacccatcgtgaaatggcatcaggtttatcaatgcctgtcggttttaaaaatggtacagatggtaatttagatacggctattaatgcgatgaaagcggcttctatgccacatcgttttatgggcattaatcaatcaggacaagtctgtttattacaaacacaaggcaatcctgatggacatgttattttgcgtgggggtaagaaacctaattaccatgaagaagatgtcgcgttatgtgaagctcatatgataaaagcgggattaacaccatcattgatgattgattgtagtcatggtaattcaaataaagattttcgtcgtcaatctgtcgtggttgattcagtgattgagcaaattaaaaaaggtaatcaatcaataacaggaattatgttagaaagccatattaatgaaggcaatcagtcatcagagcagccccgtagtgagatgaagtacggtgtttctgttactgatgcatgtattagctgggaaaccactgaatcggtgttaagaaatctgcatcagcaaatttcgccagttttagcacagcgtgcagcgcaactaagaaaagttagctaa

SEQ ID NO: 296454 - DNA, 1125 bp, Proteus mirabilis
atggctgaagaattacaaaatttgcgagagcaaattgatcaggtggataaaacattgctttctttactcgccaaaagaatgcaattggtagcagaagtgggagaagttaaaaatcgccacgggttacctatctatgcaccagatagagaagccgcaatgcttgcttctcgacgtaatgaagcagaaaaaatgggtatttctgctgatttaattgaagatgttttacgtcgagtaatgagagagtcatatagcaaagaaaatgataaaggctttaaaacacttaatccccaattaggcaaaattgtcattgtgggggggaacggaaaaatggggaggcttttttctcgtctctttacactttctggctatcaagtggaaagtcttgaagcggatgagtggcaaagtaaatctccggctatttttgcggatgccggtatggtgataatcagtgtcccaatccatttaacggttgatgttattgagcaattaccgcccttgccagaaaattgtttattggtagatttagcctcaatcaagcaagcgcctttagaggcgatgttaaaagcacataatggccctgttttaggactacatccaatgtttggtccagatgtgccaagtttagcaaaacaagttatcgcttattgtgaagggcgagatttatcacattttgagtggttgcttgagcaacttatggtgtggggagcaagagtagaggctattactgcacaagagcacgataaaaatatgagttttatccaagcattgcgacattttactacttttgcatatgggcaacatttggtgaaagagaatgtcgatttagccagtttattaagattatcttctcccatctatcgtttagagctagcgatgattggtaggctctttgctcaagatccacaattatatgccgatattattttatcttcacaagaaaacattaacttgatccgtagatatcatcattcattaggtgaagctatagccttattagatataaacacaaaagatgaatttattggctcatttaataatgtaagtgattggttcggtgattatgcttcacaatttatgaaagagagtggtgcgttattacaaaaagccaatgatagccggatttag

SEQ ID NO: 296455 - DNA, 174 bp, Proteus mirabilis
atgaagaaattaattatttttatactatcaagtttattcgctttttatgctagcgcttatacttgggataataaaatcaaagataccagcactgttaatcagtattgtcaacataatagcaatactcaacaatctactcgctgtgtttggcccccttgtgatgatgagtggtaa

SEQ ID NO: 296456 - DNA, 156 bp, Proteus mirabilis
atgcatacaattatcatgctactgctaggtttgagctatttgaatttcgttgatagtgctcataaaggaaaaggctattactcctattcattagatcaccatataagttcaactcgctgtaccgtaagcccatgccccgatccgaaagattattaa

SEQ ID NO: 296457 - DNA, 237 bp, Proteus mirabilis
atgataagaaaaacattgctagccagcttattaaccgtaattagtggtaccgtttttgctttacctaatgtgacaatcctcgcaactgggggaaccatcgcagggggtggtgactctgccacttcttcaagctacaccgcaggaaaattaggcattgatacattgattaatgccgtacctgaggcaaaaaaagtggctaactatgaacgaccaagtgtggttaaaactggcgaataa

SEQ ID NO: 296458 - DNA, 483 bp, Proteus mirabilis
atggcgtatgacggaacaattacatttacaggtaaagttgttgcgcaaacctgctctgtcaatacaaatgataagaatttagcggtaacattacctacagtatccaccactacattaaatgaaaatgcggctactgcaggtcttactccatttactattcatttaactggttgcgctattggtatggatggtgcacaaagtgtcaaaacatattttgaaccttcaagtgacattgatgtaaccacacacaacttaaaaaatactgcacaaactaaagctgataatgttcaagttcaattacttaactcagatgcagcaacaacaatccagttaggtactgattctgcaacacaagatgtccatccagtacaaatcgacaatgctaatgtaaacctcccatattttgctcaatattatgcaaccggacaatctaccgctggggatgtaaaagcaaccgttcattacaccattgcctatgagtaa

SEQ ID NO: 296459 - DNA, 726 bp, Proteus mirabilis
atgttaaagttcattcttattttcttgactctgtttgtatccacagtggctcaagccagtgtggttattatggggacccgtgttgtttatcccgcaacgcaaaaaagcattaatgttcaattaaataataacgatgaatcccccgcattaattcagtcttggttagataccggaaacgcagctgcagcaccagattcaattcacgttccttttatcattactcctcccatatttcgtatggagccgaaatcagggcaaaccatccggattgtctataccggtgaatcattaccacaagatagagagtctcttttctatctaaatgtcttagacattccagcaaaacctaaagtggaagaaaattcggaaaactcagagggaaataacaattacttacaattagccgttcgtagtcgcattaagtttttctttcgccctgataatctcaacgtaacgcctgatgatgcttaccaaaaagtgacttggcatcaggaaggagcactacgcattaaagcgattaacccaacaccttattacatcacttacaacaaaatctcagtgggtcaggataaacagctaacgcctgttgaacaaagtgggatgatagctcctttttcttcaaaaatattttcacttaaagagaagccaatattaacaaataaagtcacttgggttgttgttaatgattatggtggataccaacaaggtgaatctactttggaataa

SEQ ID NO: 296460 - DNA, 387 bp, Proteus mirabilis
atgagttctataaaatcacctataattatctctatcacctcaattgcaggtggcggcaaaacagcactttctcattatataagagaaaagcttccatcaagcaaatgccttcattttgatgatttcgactgccctacagcacctgaagatctcgatgagtggatagaacaaggtggtaattatagcgaatgggatataaagccatttgttgaacaagttaatcagacgatagaagagtctcaatatactcatatcattttggattatccttttaccagatctcacccagcgctacaacagatgatcgactatgctttttttattgatacaccactagatatcgcattagcaagaagaatattgcgtgattataaagagaaaagctga

SEQ ID NO: 296461 - DNA, 198 bp, Proteus mirabilis
atgaagctagtttcagcgatattattaactttattttttgtttcaggatgttcgacatcacagtctgatattgataaatatgagcaatcgagtaaagatgcgatgaagccagatccatattctgacagcgtaatcaatacgattagacagcaccagaagatcaccgtatgtaatagtaaaattggtgggtgctattga

SEQ ID NO: 296462 - DNA, 849 bp, Proteus mirabilis
atgattgcaattactggtgcaacaggcctattaggtcaacatgtgattgaaaaccttcttcaaaccgttcctgctaatcaaattgtggcatttgctcgtgatgtaaaaaaaggatcgtctttaagtcagaaaggcgttttagtacgtcaggcggattacaatgataaagcttcattaataacagctttacagggtgtcgataaattacttttaatttcctcaagtgaagttggcaaacgtaccattcaacatcgtaatgtcattgaggcagcaaaatcagcagatgtacaatttattgcttacactagcatattacatgctgatcgctctccattaagcttgcatgtggaacatgtagaaacagaaaaaatgctagctgattctgggatctcttacactttattacgaaatggctggtatacagaaaattatctggcaagtgtccctgcagcacttgagcatggcgtttttctgggggcggctggtgatggcaaaatagcttcagctactcgggccgattatgcattggctgctgctcgggtaattagtgaagaaggacatataggtaaagtgtatgagcttgctggtgatgaagcttggacattagagcaattggctaaggaattgactaaacaaagcgggaagcaagtgatatataacaatttaagtcaggccgattttgtcgctgcgttaaaaacggcaggcttacccgataaattatcaaatatgctggctgattctgatatcggcgcatccaaaggtggattatttgatgatagtcataccctaagtaaattaattggccgacgtacaacaacacttgcggagagtatcaaagcaatattgtaa

SEQ ID NO: 296463 - DNA, 375 bp, Proteus mirabilis
atgacaatatccacactctcgcagcaattacgtgaaggaaatttattttctaaacagtgcccatccagagagatcctcaaacatgttacaagtcgttggggcatactcattttaatagccctacgagatggaacacatcgttttagtgatttacgacgtaaaattggcggagtaagtgagaaaatgctgtctcaatcgttacaagtattggagcaagatggttttattaaccgagtgtcatatcctgttgttccaccccatgtagagtactctttgacagatcttggtgagcaaataagtgagaaactcacgcttcttgcggattggatagaaataaatttacctaatatcttgtcacgacaagaagtggagtag

SEQ ID NO: 296464 - DNA, 462 bp, Proteus mirabilis
atgaaaaagccactttctttatggataactcaatttttgattgtctgctgtattatactgatattatatttttttataaccaatgcatcactgttattaaatttgtatagttttgatatgcccgctgagataaaaatagaaatttatttatggagttttattcgtttgttagttttaattatacaaatatcagcgctttacttttccttcagatgcgataaaagggcgcgggtattgactatcttagcttggctaccaatcattatcgtcatgttatggagcaatttccatgaagggttaacttctttgaacgaaagtggtataagctatgataatgatgctcaaagatctggagggattataggtaaacttattctggctggattatccctttggttgacatctattatattattttcaaaaaaattaaagcgttattttctatttgagaaaagtgaatga

SEQ ID NO: 296465 - DNA, 222 bp, Proteus mirabilis
atgaatatcacgtttaagaaaattggaacaatgtgtgtcgcttctgttctgcttttttcacttgcgggttgttcaagcatgacaaaacgcgatcgtaatacagcaattggtgccggtgctggtgctataggtggtgcaattttaacagatggtagtccattaggaaccattggcggcggtgtattaggtggtgttattggccatcaagttggcaaaaaataa

SEQ ID NO: 296466 - DNA, 750 bp, Proteus mirabilis
atgattatatttatcaccggtgcttcagcaggttttggagaagctattgctcgtcactttattaaccatggacacaaagttattggtaccgcgagacgtcttgataaactgcaagctcttcatcaagaactgggcgatctattctatcctttacaattagatgtcaccgataaaaaagcagtcagtgaaatttatcatcaattgccagaacaatggcgctcaattgatgtattagtcaataatgcaggactcgctttagggttaagtaccgctgataaagccaatcttgatgattgggatactatgatcgaaactaataataaaggtttagtgcatgtcactcgtgcattactaccctcaatggttgaacgcaatgtcgggcatattattaatatcagctcaacagcggcttcttggccttatatggggggaaatgtgtatggtgcaaccaaagcctttgttaagcaatttagcctaggcttacgtgccgatcttcaaggtaaaaaaatacgtgttactgatattgaacccggtcttgtgggtggaacagagttctcattagtacgctttaaaggtgataccgataaagtagaacaaacttatgcaggagcagatgcgcttactcctgaagatgttgcacaggcggttttttggacggcaacattgcctgcacatgttaatattaatacgcttgagatgatgcccgtcagtcaatcttttgccggattaagtgtgcaccgacaaaattaa

SEQ ID NO: 296467 - DNA, 357 bp, Proteus mirabilis
atgataaatacgttaactaagaaacaagcaacaaggactctgctgttttcactatttcttggtttatccgtgtcttctttttcttctgttgcagcttcaacaaatgtaaccattaatggcaatggctatgataatgttttagataaagagcaagctcgacaaatgaaagaagattgggatcaaaaacgcgatctccgtaataaaatcaaccaacgcgaaaaaactgagtttaataaaatagataaagctattgatgagcgtgatgcttgtttaaaaagcgccaatatctatgcttactgggagccagaaacacgtcgctgtttagacagtaatactggtcgcccaattaacccttaa

SEQ ID NO: 296468 - DNA, 237 bp, Proteus mirabilis
atgaaaaaatatctatttgcagtactggctacattgttcgcatttgcacctttagccgcaaatgctgaatgtgatgaagtcgttcaagatattcaacaaaaaattgaaaataatggtgttcctgcggctaactttaccctaacagtggttgaaaatgatcaagttgcacagattgaaggtaaagttgtaggtacttgtgaaaatgattctaaaaaaatcatttatactcgccattaa

SEQ ID NO: 296469 - DNA, 378 bp, Proteus mirabilis
ttgggccaaaaagctgaatgcgttgttatcgagggaaatggtggttggcgctatttacttgatgataatactttttattcagattgggtggctaaagaaaaaattcctgttgttctagtggttgggatccaacctggttgtgtcaatcactcaattctaaccgcgcaatctattattaatgatggtttagaattagttggttgggttgctaatagaattaatcctgggttaccgcactatgcaaaaattgtagaaaggttatctcagcatattccagccccattgattggtgaaatcccgtatttattgcgccctgaagaacgtgatctctcttgttatcttgacttaagccagttagaaatcgctcaacccgcttag

SEQ ID NO: 296470 - DNA, 2172 bp, Proteus mirabilis
atgtggcattctagtcatatcaatgaacctcagaacaatgatgaacagattatggtccagatagcagaaaacccctttatccttgtagatggctcttcatacctttatcgtgcctatcatgcttttcctccgctaactaatagcaaaggagaacccacaggggcgatgtatggtgtgttaaacatgctacgcagcctaataattcagtataagcctagtcatgtggcggttgtgtttgatgctaaaggcaaaacattccgtgatgagttgtatgaggaatataaatctaatcgcccaccaatgccagatgatctgcgtgagcagattgagcctttgcatgaaatggttcaagcgatgggcttaccgttactttctattactggcgtcgaagctgatgatgtgattggcacattggcattaaaagcagccagtgatggtcgtaatgtgttaatcagtaccggtgataaagatatggcacagctagttacgcccaatatcacacttatcaacacgatgacgaatgttattttaggccccgatgaagttaaagaaaaatatggggtgccaccggagttgattatcgactttctcgccctgatgggtgactcatcagataatattcccggtgttccaggggtaggtgaaaaaacagcattagggctattgcaaggacttggtagcttagaggatatttatcaacagcttgataaaatagccacattgagtttccggggtgcgaaaacacttggcgccaaaatggttgaacatgagaaagttgccaaactttcttatcaattagcgacaattaaaacagatgtagcgcttgataaaacctttgatgacttagtggttaatgaacctaatttagataagttacttgaaatgtttacgcgttatgaatttaaacgctggataagtgacttacaaaatggtggttggttagctcaacgcagtagccgtaaagcgccagtcccctatagtgcagaagtcgcaacacccaaagagcagccagctgcagacaatttcccggttatctctcaagagaactatgagtctatattgactcatgaaagcttaatgcgctgggttgaggtactgaaaaaagcgcccgcctttgcttttgatactgaaacagatagcttgaataatattgatgcacgtttaatcggtctgtcatttgcggtagagcctggcaaggccgcttatattccattgcgtcatgattatctagatgcaccagagcaattacctgttgatgaggtactaactgctttaaaaccgattttagaagataaaaccatcttaaaaattgggcaaaacctgaaattcgaccgcggcattatggaaaatgaaggcatcgaattaaacggtatttattttgataccatgttggagtcttatgtcttaaatagtgtgagtagccgccatgatatggataccttagcggaaaagcatttaaatcataaaacgacgacatttgaagagattgctggtaaaggtaaggggcaacttacctttaatcagattgaggttgaacaagcgaccttatatgcagcggaagatgctgatattaccttgttactgcatcaagcgctttatcctcaaatagaggcgattgcaccgctaaaacacgtttatcacgatattgagatgccattagtccctgtgctttcacgcatggagcgtaagggcgtattgattgacgcacaagtgcttgccatgcagtcccaagaaatcactcaacgtttagctgagattgaaaaagagacattcgcgttagcagggcaagaatttaatctctcttcacctaagcaattacaagagattttatttgaaaaactcaatcttcctattatcaagaaaacgccaaaaggtgccccttcaacaaatgaagaagtgttagaagcgttagcgcatagtcatgagttacctcgtttaattttagaacatcgtggattggcaaaattaaaatcgacttatacggataaattgccgttgatggtcaatagtaaaactaagcgggtgcatacttcatatcatcaggcggtgactgcgacaggacgtttatcttctcgtgatcctaatctgcaaaatattccagtaagaaatgaagaggggcgtcgtattcgccaagcgtttattgcccgtgatggttttaataatagttattag

SEQ ID NO: 296471 - DNA, 195 bp, Proteus mirabilis
atggatgagaaaaaattcttaattgatgaaaaagtaatatttgacagcaataaaatgatattagctaacaataataaaattattaagatctcggaatcagaatctaatttattacttgctttctatcaggggatatataagaaagaagatattattaacttattaatcagatacgtaataattttacccttatag

SEQ ID NO: 296472 - DNA, 480 bp, Proteus mirabilis
gtgactcgtccaagaattggtatctcactaacggtaacactagagccaatagtaacggaagaaactacaccatacgaaagcagtaaagagttagagaatacaagggatcaacaaccaaaaataatttctagcaatagcataatccccagaaaaaaattattgattattttggggagtatcctaattctactgtctacgatagcgttactgatagtgcatggtcatgaatcacatagataccatagtcacttccagctccttggtcactatgatagttatcatttttataaaatgactacagataaagtggcatttgaagaagtggttgcagcatacgatagtctgacactaccaatatgtcgcgcaaatgggcactatctttattatatccgagagccaaatatggatctttttttacaatgtttgaatcctgttgaatcggcggtacctaaatgcatgacaataaaagaacgttattaa

SEQ ID NO: 296473 - DNA, 489 bp, Proteus mirabilis
  misc_feature (472)..(481): n is a, c, g, or t
atgcatgacaataaaagaacgttattaatcatcctatgtcttttgttatgtggatgtatcgcgctagtaatttgggtattaggcagctataaacgtgatacgctggaaatacaaaatcttatttgtacagcaaaatcaactatctatataaaacctaaacatcttataatgaaagggacattggttcttgatttacaatcgaatcgaatcgctatccactataccgttcaacataaccaacaggagcaacagctattttttcaagatatcattatcagtcctcttagccgtacaggagtgcaaaattatactttcgccgttaagtcagtgcataaatttgattcagatactacaggagaaatgtttgcttggttacgccttttacaaccaacaaccattaacgagctgacgataaataaaataggtcaaaacacctatcttttttcacttaataggcagatatataatttcnnnnnnnnnncgatatag

SEQ ID NO: 296474 - DNA, 741 bp, Proteus mirabilis
atgagtaataagtatttaattgataataaggtcattcttgatatcgatagaatgacactatcacacgatcatgaaagtattaaaatttctgaatctgagtgtaatttgttatgtgcttttcatgagggactctttaaaaaagaggatttaattgattgggtatggggacgtaaaggtgtcattgtttctaatgccagttattataaattacttaatcaattacgaggttcatttgaaaaaataggtctttcggcatccgctattttaactcgccctaaagtaggtgtgacgctttctgtcactattgaaaaacttcctgatgaaattgaacccccttattcaacagaagctccgttgaatgatacacatgaaccaattatagaactacctgtggtaacaaaactcatacctcggcgagtttctctgcgtaaagaatggttttttttagtttgtgctaccctgttccttgtgagcttactatttctatttaacaagcagaataccgactatttttctccacttggaacctacaatggttatcaattttatggtgtcaccaaagataatcgtactttagaaaatgccgtagaagcttatacggaactcagtagccaagtgtataagcaaaatggtaattttatttattatattcgtgttcctaatacgaatatttttgttcagtgtcttaatcagctgaatgttgaggagcccaaatgcataactataaaagaaatatactga

SEQ ID NO: 296475 - DNA, 405 bp, Proteus mirabilis
atgagcgaatctttaaaaatattaaataacatccgtactcttcgtgcacaggcaagagaaacttctttagaaactttagaagaaatgcttgagaaacttgaagtcgttgttaatgaacgccgcgaagaagaacaagcaatgcaagctgaaattgaagaacgtcagcaaaaattacaaaaataccgtgagctattaattgccgatggtattgatccaactgacctgcttgaagctgctggcgcaagcaaaactggtcgtgctaaacgtgcagcacgtcctgctaaatattcatacgttgatgataatggtgaaactaaaacttggacaggccaaggccgtacaccagctgtaatcaaacgtgcaattgaagaagaaggcaaatctttagaagatttcctcatctaa

SEQ ID NO: 296476 - DNA, 1008 bp, Proteus mirabilis
atgaaaatattagtaacaggtgcagcaggatttattggctatcatttaagccagcgtttgatagaaatgggttatcatgttatcgggatagataatctcaatgattattatgatgtgcgcttaaaagaagcacgattagctaaacttaatcagttggataacttccaatttgagaaaattgatattacagattcagtgagtattacgcaattatttgctgatcaccgttttgatcgagttattcacttggcggctcagcctggcgttcgttattcaattgaaaacccaatggcatatatcgatgctaatattgtaggccatattaatatattagaaggttgtcgccatcataacgttgggcatttgatttattcgtcatcaagctcggtatatggtttaaatcaaaagcaacctttctctacagaagatagtgttgatcatccggtatcactttatgctgcgacgaaaaaagccaacgaattaatgtctcatagctattctcatttatatcagctacccacaacaggactgcgattttttaccgtatatggtccttgggggcgtcctgatatggcactatttaaatttactaaagctatgttagcgggtgagcctatcgatgtttataatggcggaaatatgacccgtgatttcacttatgtcgatgatattgtcagttctgtggtacgtttaattaatattattcctcaacccaacccaaattggaccgtagagcagggggaaacttcatcaagttctgcaccttataaaatatataatgtgggtaatgggcaacctacaaagttaatggattttattacagcaatagaaaaatcactcaatattaaagctaaattgaacttaatgccgatgcaagatggtgatgtactttcaacctgtgctgattgtagcgatttagctcagacaacaggtttttcacccaacactgcagtagagtatggtgtgaagcagtttgtggattggtatgtagattattaccagcaataa

SEQ ID NO: 296477 - DNA, 906 bp, Proteus mirabilis
atgtcatcagtggtgcgtaaagtaagaaaagcggtgatccctgttgcagggctaggaacaagaatgttgcctgccaccaaggctatcccaaaagagatgctacctgttgttgataaacctttaattcaatatgttgttaatgaatgtattgcagctggcatcaatgaaattgtgctagttacacactcttcaaaaaattctattgaaaaccattttgataccagttttgaattagaagctattttagaaaaacgagttaaacgtcagttgttggaagaagtacaaggtatttgtccaagtcacgttactattatgcaaagtcgccaaggaatagcaaaagggttaggccatgccattttatgtgcaaaacctttggtgggtgatgagcctttcgctgttatcttgccggatgttattttagaccgatatagtgctgatctgactaaggttaatttaaaagagatgctttctcattttgaacaatctggcgcaagtcaaattttagtagagcctgttcctgaagaggaagtatctaactacgggattgttgactgcatgggagaacatttacagcctggcgacagtaaacccattactcgtgtggtagaaaaaccgaagaaagaagaagcaccttcaaatttatctattgttggtcgttatgtgttgtctgaaaacatttggcctttattagccaaaaccgcaccaggagcaggggatgaaattcaattaactgacgcgattgcaatgttaattgaaaaagagcctgtagaagcttatcacctacaagggaaaagccacgattgtggtaataaattaggctatatgaaagcttttgttgaatatggtttacagcacgaagagtttggcgaagagttcacgaaatggataaaatcactgcaagcttaa

SEQ ID NO: 296478 - DNA, 414 bp, Proteus mirabilis
atgaattggtcttttattctaattttagctctatttgtagttgttggttgtgttgataaagagaggaatacatctggctctatagaaaaggtggcaacagagatagcgactcctactgttcaatatcaccacgatgaaagtcgttatcccacatttatgttatcaaaacaatctcgttttgaaatgcaagccaaggaggaaaaacagaaattcaatcaattatttaaatttggatttgaagaaccaactacacccactaatagcgaatattcctataaaaaggaacaacgtataagaaagaatgatcagtcaatgattattctgccagaagcgatacctgtatggaataaagataaacaagaagttgaagttaagtggagctacagaccaaaatatgtttttgatgcatattaa

SEQ ID NO: 296479 - DNA, 561 bp, Proteus mirabilis
atgtcccaaaaaccttgccgtattattttaaccggaggtccaggctctggtaaaagcactattatcaataagttaagaagaaatggctactcttgctcgatagaagcaggtagagccattattcaagatcaaagtcatattggtggttcagcccttccttggattgatccgatcgcttttgctgagttaatgttaagctgggagctacgatcatggcatgatgcatccaatatagatgataacagcaaaccttatttttatgaccgaggcataccggatatagcaggttatttacacttttgtgagcgccctattccccaacatcttgaaaacgcaataaggctatatagatattctacaaccgtgtttatagctccgccatggaaagaaatttacttacaagataaagagcgtcaacagacatttgatgaagccgtagcaacttatcaagcgatgctggcgatatatagacagtataattataccttaattgaattacccaaagccgatgttaaccaaagagtaaaatttattataaacaacataacatcgctatcttag

SEQ ID NO: 296480 - DNA, 198 bp, Proteus mirabilis
gtgggtattgtaaaaatttctgatgagctacatgagtatcttcgtaaagcaagtaatgtgatgtctcgatcagttaatgcacaagcagagttttggataaaaattggtattcaagcagaattaaatccagaaaaaacgtttccaatgattattaatgaaatgttagaaaaagaagcaataaaacaagagcataagtaa

SEQ ID NO: 296481 - DNA, 777 bp, Proteus mirabilis
atggataaaattacgattaaaacccctgaggaaattgaattaatgcgtgaatcaggtcgtttattagcccaagtttttacaatgcttgatgattttattgtgccaggtgtttccacattagaaattaacgataaagtagacgattttattactcatgatctgcaatcgagacctgcaagcaaaggacaatatggttatgagtatgtacttaatacttcaattaatgaggtagtatgccatggtgttcctaaagcagatgagctattaaaaagtaaagatattattaatgtcgatattacactagaaaaaaatggttttattgctgattctagcaagatgtatgtcatgccagatgcctcacctatagcaagaagattagtcaaaacaacttaccaagcgatgtgggaaggtatcaaagaagttaaaccaggtgcaacactcggtgatatcggtcatgcaatccaaagctttgcacaaagtcatgggtatagtgttgtaagagagtattgtggacacgggattggtcgagaaatgcacgaagcccctcaagtattacattatggtattcgaggacaaggtgttgtactaaaagaagggatgacctttaccattgaaccgatgattaaccaaggtggacacaaaataaaaaccaaaaaagatggttggactgtagtcacccgtgataaaaaattatcggcacaatcagaacatactattttagttactgctgatgggtatgaagtactcactttgcgtccagaagaaacacttccataa

SEQ ID NO: 296482 - DNA, 1014 bp, Proteus mirabilis
gtgacttttcccgctaatattgatgatcctatctggcgttcacgtctagaaggctcaaatctaaaaggccataatccaggtaaaccggttaatcattcggtaaatacaaaagagttatcagattatcaacagcgttggtataccccagatatgatgacgttatatattgcgggtaatgttgataatcgtatcttaaccgaaagtattaatcaggcattttcttctctggaaggaaaacgcgtgacacctgtgcctgtgcccgttcttgccgatatgaaaccagaaacattgtatgtgcaagaacccatgcgaaaaaatgaccaaatctctcttatttgggatctagattggtcaccagtgaaagattctgacacactgagccgttattggttaagtgatttagcgcgtgaagtgatttttgtgcacttaggtcgtagtctcgaacaacgtaaagaaaaagaaagtacgcaggtgaatatcgattgtcgagtgcaatatcaacgagccagttgctcgttaaatgttgatacagcaacggcaaatattcctgcacttgccacttgggtgggggaagagcttggcgaattacgtaatcaaggtgtcagtgatgaattgtatcaagatttacttcaagaaaagcaaattcaactcactcaattgtttgcgcgttatgccaaaacaagtacttctatcttaattaatcagcgtttattgtctcagcaaagcaatattattgatattccaccagagcaatatcagcgtttacgccaagcatttttagcgggtttaacgaaagagatgttaaatcaagagttatcgagaattctatctgaggatatcacttttgtattaacgcaaagtagcgagacgccaacggtaaacttgggtgaattgcgtgtgcaatttgaaaagcaagttcacccagaaacagcgaatagctcaaacacggctaaaacatcgttaactactggtgaaaaagcttcggtgcaggcagatgcacaacaaacaaaatag

SEQ ID NO: 296483 - DNA, 534 bp, Proteus mirabilis
  misc_feature (461)..(470): n is a, c, g, or t
atgcagggtgcaatgacacgaattttattgggaagcgttatgttcagcgctgctatttgtcaggttcaagctgaagcactgcagcctgatcctgcttggcaagaagggcgactcgcaaatggtttccaatggcaaattttacaaacaccacaacgtccaaatgataggatccaaattcgcttattagtgaatacgggctctttatcagaaaagcgcagtgaaacagggttttcatctctggtgtcaaaactgaatgtgttagaaaacaccggattaacaccagaaaaacgcgataatctttggaaaaatgcattcgatcctgattatccattgccaccgatgatcgtctcttatgactttacggtttataacttaagcttgcctaataaccagcctgaattattaaaagatgcctttgcattattggcgggcatagcaaaaccggcacaatatacagaagnnnnnnnnnnatacagaagatgcggttcgaaatgcgattcaatcaccgcttccggtggtgacttttcccgctaa

SEQ ID NO: 296484 - DNA, 711 bp, Proteus mirabilis
atgaaacctcatctcaaacgttcactaacaatcaaacagatggcagctgttgcaggtgtcacgttggtgactattgctatttttattagtattcagcttgtttatttgattgatcaacgccgagaagattatcaaaatcagctatttaatgcggcagtcagtatacaacaaccgctagctgatgcgctattgcgttcagatttaaatgatgccaaacaactgatcattagtttaaaaacgaccgggatactgggtaaagcgattgtgacacaacccgaaaatgttcaggtgatgaacttagattttgcaccgaaaaaatcagtttctcaattttcacgttggctgtttggcatccctgttgaagtgactatccctttacagcctttaggtattacctccgctgacgataaagcctataccagtcatcttattttacaggcagatactaaccgtttttatcgttttgcgagtaatactgtcgcactgatgttgacgacttatttattaatgggtcttatcctcactattgcaattagctggtgtattaatcgtattatggtaaaaccgttgcgccacattgctgtgactcttaataaaagtaatcaggtttcgatgttgtcgtgttcagaatctcatcgtgatgatgagattggtttgctgattaaaggatataatcaacaaaaatctgatcaaaaagagtcagatatctga

SEQ ID NO: 296485 - DNA, 357 bp, Proteus mirabilis
  misc_feature (323)..(332): n is a, c, g, or t
atggttatgcaacatgctaaaccaggcagggtggcacttgccgttatgggcgcattgcttgtaactgcactacctgcgaaaatgtcttatgctgaaggatttattgatgactcaaccctgacaggggggatctattactggcaacgtgaccgtgatagaaaagagttaacaccaaacagtcctgattacggcaaatataaagccaatttacaccactctacctttaacgctaatcttgatttttcttctggttatctgggtgatttttttggtattgatttagctgcttttggtgctgttgaacttaacaacagtgggccagnnnnnnnnnngggccagctgcacctaatgaaatag

SEQ ID NO: 296486 - DNA, 999 bp, Proteus mirabilis
gtgagtatttataaagctgctgctaaatttaaattaggccatttctgggctcaaggtggatatattcaacctaaagggcaaacattattacgtcctcattggagtttcttacctggtacttatcgcggtgcagaagcgggcgctgtatttgatttcgataaaaatggtgaactctctttctcatatatgtggactgatgaatataaagcgccgtggtatcggaatatgtacaatttccgtaaggcagacttagagataaatatcagttatttacactcttttggtgccaaatatgattttaaaaatagcttagtattagaagccgcatttggccaagctgatggttatattgatcaatattttggcaaagtttcttacgatttccctatcgcaaataatacattaaaaacctcttatcaattctacggtgcaaaagataaagtcaccggagggggaattaacgatgtttatgatggtttggcatggttacaagcattcactttaggctatacctacaatgtatttgattttaaagttgaaggtacttgggttaaagcagaaggtaaccaaggttactttttacaacgtatgacgccgggatgggcaacctcgaatggtcgtttagatatctggtgggatggtcgttctgattttaacgccaatggtgaaaaagcattatatgcgggagtgatgtatgatctaaaaaattgggatctaccgggctgggcgattggtacttcctatgtgtatgcttgggatgcaaaaccgagtagtaaccctatttatgaccaaagtaaacgtattagagaaagcgcatggaatgccgacatcaagtataccgttcaagaggggagagcgaaaggtacgttatttaaactccactacactcgttatgataaccattccgatataccaagctatgaaggtggttttggtaatatcttccaagatgaaaaagacgttaaattcaatgtgatcatgccatttacgattttctaa

SEQ ID NO: 296487 - DNA, 225 bp, Proteus mirabilis
atgattaaaagcacaaatatcatgataataaatggtcaccctgcatctgttgtttatggatcagaaataagtgcattccgaggacaatttttagatgtcaaggggtattgtgactttgttgctgatagtattgaagggttgcaaaaagaaggcgcaatttccttagctgaatttattgagacttgtactgaagaggagatcgcaccttttaaaagtagaagataa

SEQ ID NO: 296488 - DNA, 303 bp, Proteus mirabilis
  misc_feature (135)..(144): n is a, c, g, or t
atgaccgacaataataaagcgttaaaaaatgctgggttaaaagttacacttcctcgcttaaagatcttggaagtgctccaggatcctgagtgccatcatgtcagtgctgaagatctctataaaaaactgatcgannnnnnnnnnggtaaagttatcgagtttactgacgatgctatcgaagttcgtcaaagaaatatcgctgaacgccatggcatcaaactttccaatcatagcctgtatttatatggtcactgcgccgcaggtaattgtaaagaagatagccacgcacatgatgagaagtaa

SEQ ID NO: 296489 - DNA, 639 bp, Proteus mirabilis
atgaatattctcgtcattggcgctaaaggtcgagtaggtcagcgtttaatcgaaatattacttgctaaaggtcatcatgtcataggtacaacccgaaaattatccgacacatcagtacatcatccctcacagtaccatgaaattgaattggacataacaaagccgttatcatccatcaccgatttattgccagacaatttagaggctatctattttacgacaggctcccgaggaaaggatttattacaagttgatttacatggtgctgttaaaacgatgcaagcagcagaaaaaaaaggaataaaaagatatattatgctcagtgcgattaattcattatcacctgataaatggactgaattaattgattattttactgctaaatattttgccgacctctacttacgggatcgtacccagttagatttcacccttgttcaagcaggctatttaactgaaaaacaaggcacatataaaattacgaccaaattggaagataatgctacaaaaggtgaaatcactattgataatgtcgcggcaacattagcagagatattagataagccgaatacatttaaaaaatgcattcctatattagatggtgacgaggcgattaaaacagccctcagtcgaatttag

SEQ ID NO: 296490 - DNA, 345 bp, Proteus mirabilis
atgcgaattaaattgttattgggagccactgcagcgttgttgttagcaggctgttctgcaacaaatacattgaccagtgcaggttcacaggtacaaattactgatacgcaaccaggcagcgagtgccagttattaggcacagtaaccggcgttcagaataattggttatcaggctctcgtactgaaagccaatcactacgcggtgctgctaatgatttacgcaacaaagcagccgctatgggtggtaatgttatttttaatgttggtacaggtgcaggtagcattgtcgatagctttgcgccactagatagcaaaatgagtggacaagtttataaatgtcagtaa

SEQ ID NO: 296491 - DNA, 519 bp, Proteus mirabilis
atgccaactccttgctatatttccattgaaggaaaaactcagggcaacatcactgcaggcgcgtttactgcagattctgtcggcaacatttatgtacaaggtcatgaagaccaaatgttggtacaagaattttctcacgtagtgacggttccgactgatccgcaatcaggtcaaccttctggccaacgtgcgcataaaccgtttcgttttaccgtggcattaaacaaagccgttcctctgctgtataacgcactggcttccggcgaaatgttgccaaaagttgagttaaaatggtatcgcacctcggtagaaggtaaacaagagcacttctttaccaccacactgactgacgcgactatcgtgaacatcgattgccaaatgcctcattgccaagatccggctaaagccgacttcacgcaacttatcgaagtctccctctcttaccgcaaaattgactgggagcacactgttgctggaacgtctggtgcggatgactggcgtgcgcctctcgaagcgtaa

SEQ ID NO: 296492 - DNA, 642 bp, Proteus mirabilis
atgaccattgaaactataatttctgttttaaaagagtacctagcaaaactaaatgatgaacaaaaaattgaagctctcaataaaataaaaatatcgcttcatcaaataagcccatttaaaaatgaacctactgactgtgttctttggataaagcaacaacaagttatcgctaatgactataatcccaatgtcatgtctccgacagaaaagagattactagaaacgtctctggtaaaaaacggttatactcagcctgttgttgtcttacctattcaacaatccaaaaataaaccatcacaatggcaagtcgttgatggttaccatcgttatttattgagtaaaaaaaatagcttaaacaagcgaattaacggctatttacctattactatacttgatgttgaaagtcatactatggctgaccaaatggcagcgactattcgccataatcgggctagagggcaacatcaagtggcagcaatgtcggatatagttagagatttatcaagattaggttggaatgaccaaaagattggtgatgaattaggtatgtcacaagatgaagtactacgtttaaaacagattagtggcttagctgaattattttcagagaacgacttttcagaagcttggacggttaagtag

SEQ ID NO: 296493 - DNA, 1227 bp, Proteus mirabilis
atgtctttgaaacgtaaaattgcgctggggaaaaatgtattagaagctgctcaagagagagtccagtggatatttgatacttttgaacaaatcactctctccttttcgggagggaaagattctactgcgctttttcatcttgttgccgcacaagcgcgaaaacaacatagaaaatttaatgtgatgtttcttgattgggaagttcaatattctgcgactatagatcatattataaaaatgaaatctatctaccaagattgtattgaacagttttactggatagcactccctatcaccactgaaagtggcatttctcaatatgaacctacatggacagcatgggagtctggtaaaaaatgggtaagacaaccgccagaagatgcgataactgaccctcactttttccctttttatcacccaaatatgctttttgaagattttacccctgcatttaaccagtggatcacaggtaatcatcgcagttcgattatcctgctaggtataagagcggatgaatctttaaaccgatttattgccattagtaataatcgaaagttacgttatgccgatgatattccttggacaacggcatcagcagaaggcttttattatatggcctaccctatttatgattggcatgttaaagatatctggacttatatagcgcgtttcaatttaccctataaccctatttatgatctgatgcaccaagcgggcgttagtttaagtcaaatgcgtatttgtgaaccttttgggccagagcaacgcaagggactatggttatatcatgtgctagagcctgaaacatggagtcttgcttgtgaacgagtgagtggagctgatgccggaatgttatatacgaatcctcgtaataaatcaggtttctatgggcggcatcaaattagcaaaccttcccatcatacgtggaaatcttatgctcactttttattagccagtttaccagagaaaacagcagaacattatcgtaataaaatagcggtctatcttcgctggtatgccgaacgagattacccaaatggcatacctgatgcacaagaaggtgatactagcactaaacaaataccttcttggcgacgaatttgtaagaccatcttgcgtaacgatttttggtgtagaacattagcatttagtcctactaaatcacactgttatgatcgatatttcaaacggatacaaggaaaacgaaaagactggcaacttatttag

SEQ ID NO: 296494 - DNA, 1374 bp, Proteus mirabilis
gtgaccgcaggactcatttccgccgagaaacaagcgcgggtctcgggtgaccaagcggaagccaaagccagacagtcattggaaacacggatgaatgggaatgtttccgcgattaataaatcattaggaaccctcacctcgaaacagcaagcacaaacgcaagagatttcaacgctcaattcaactctaaaagggaaagccgatagcagtgcagtaaatacgttaaatatgcgagtaactaatctcgatggcaaagtgacgtccgcaacctctcaggtacaaacgttatccagcaaattagagacggtaaaagctgatttaacgggatctgtggtggtggatttagatttatctaaactcaatgaaaacacctattatccgattattttgccattagtaacttctcgacgttatgcctttaaggtttttaggaccttaggacaatatagagacaataaaccgagctatgcgactcacaataccaaaggttttgccatgattgtggaatggcaagtgagtggttctggatggggaacccagtctgaaaaccgcatcattgataattttgattggcgatggacaaatcaatcccctgtgatggggccagctcaattaacgaatagttctgtggaatatatctatttgcgaggaggtgctaaatatcagctcactaagcataaaagtgttaaccatcaaattatcacccgcacttataccaataacaaacaatcggtggcaccaaaaggatttgtggcgaatgaagtacctaagtccagcgaacagaaagccaatgcaacggcgaatgcggtaaaccaacttgaaactaaggtgactgaggtctcaggtaaagtgacctctaccgcccagcaagtcactcgccttgaaagccaagtgggtacaagttcagccaaaatagagcaaacctcgaaagtggtcaccgacataaatggcaaaatttccgcatcatggacaatgaaagttcagcaagatagcaaagggaataaagtcattacgggcattggcttagggtttaatgcacaaggaaatagccaatttctggtcaatgcccaaaactttgcggtgatatcgtcattaaacggcaaagtggtgacaccgtttatcgtgaagaatggacaggtggttattcatgaagccttaatggataaagcgtggatacaaaaattagtggtactcgattattttaaatcatcaggatttgataaagggaatggctttttattggatgctaaaaacaatgtttttcgctttacgagtggtaatggagggacaacattaaccaatcaaaatttatatgtaaaagacgaaactgggtataatgttgttattattggtgatatcacaaatgagcgataa

SEQ ID NO: 296495 - DNA, 360 bp, Proteus mirabilis
atgttgttattattggtgatatcacaaatgagcgataattatggcatggtaatcaaatctaaaaaatatggaattaatttattaaatacatccgatagggttggacgaattgttggttggcatgatattactccaataccacttatgactaaaaaaacttttagttatgaccattctgatctaaataaatatggagaagtatttgcttggtttggaacttcttttatgagggggttagctggagatgttattttaaatattaataacggggtaattattcttgaactcgataatgtttatagaaatggcttaatcgatatatatgatgacatcattaggttatattatggagtatattga

SEQ ID NO: 296496 - DNA, 687 bp, Proteus mirabilis
atgggtaaatatggcattattataaaaggaaaggatcgtcatattcaaatagatagctttaatacggttatgaactgtattagaaagcagactgttgtaatgaaaggtgggatagtatctggaaatcaaggatattatactgaattaccgattaccccacatttatctacaaagttatttgctgtatcacctaataatgtttttgttaaagttattgggggagccataaaaggaagtgataaaaatatccagatatcccaaccttataatgactcttcgggtagtgttgatgtatttgaatttggtgattttccgaataatatttttaaagaaaaatatggagtcgttataaaaaatagtagtacaaaacagactgtttataactctaattggggagtgctaaaaatagtaggatattttattgcatcatggaaagaagatattgattatcaattaccaaatataaaagatttagctttcgtttttggtggaggaatgggaggaatatgggaagatggatttgaaggggcttggatggatacttttattaaaagagtgggaaatacgttacaagtaagatataaagaagctgttctttggggcacaggcagtgcaaatcgtgatttatctagatttccatctacttgcttaataatagatgtgagcgatattaagaaggtattatga

SEQ ID NO: 296497 - DNA, 1368 bp, Proteus mirabilis
atgatccaaattcttgcggtcttaattgtcgttattattgtcgcgagaatgatcttaaaaggatataaagccgagccggttttgttagttgcaggtttagtcttaatggcgctaacaatgatatttggttggggagatattctacctaaaaatgtcaaaacaactggtattagctggctagatccctttgaggttatgcgtgatctctttagtagtcgtgctgcagatttaggtctgatgatcatggcactcatgggattcgcccattatatggatcatattggtgctaatgaagctgttgtacgtgttgcaactcgcccattgaaaaatatgcgctcaccttatgtgttgttatttttctcttttttactcgcgagtattttgcaacttgctattccatcagcaacaggattggccgttctactaatgggtaccatgttccccattatgataggactaggtttatctccagcatctgctgccggtgtcattgcaacttcattaggcgttgcttacacgccaacagcgattgatgctattcgaggtgcaaaagcggttgacttaggcgtggttgagtatgtgctttactaccaaggtcctgcagcgattgcaactgtattggctgttggtattacccatatcttctggcaacgccattgtgatcgcaaagcgggctttgtaccccaattaggaaaaatagcagaagaagccaaaagtgataaaaatatccccggcttttatgccctactgccaatgttacctattattatggcagtaagttcatcaagcctatttgttgaaggtattcaccttgatgtcgtcactattgtattaatttcaatggcaatttgtatgctgattgaaacattacgcttacgtgattttaaatcagtgtgtgcaggcttccaacattttctaaagggtatgggttctgcatttagtaatgttgttggactattagttgccgcgggtgtttttgctcatggtattaaagtcagtggtgcaatagacagcctgatcgttatggcggaatctgttggtctaccaccatttgcaatggcattagtgttcgctatcgtgacattggctgccgcaattattatgggctcaggtaatgcacctttccttgcattcgttgaacttattccacaaattgcccatagcatgggggttaatccaattgcaatgattttacctatgcagcaggcatcacatatgggacgcggtatgtctcctgtggcaggcgtgatcattgcggtttccagtggagctaaattgcaaccctttgatgtggtaaaaagaaccgctgttcctcttatggttggttttgttttccactgcgccattattgctatattttattattaa

SEQ ID NO: 296498 - DNA, 1254 bp, Proteus mirabilis
atgaacattgttgatcggtttatttcttacaccaaggtgaatactacaacaaatagagaaaatggcgcagcggggattatgccttcatcggaaggtcagcgagtcctcgctttacaattagtcgaagagttaaaggcgttaggtgttgaagatatcaaaattcgcgataccgccattgttaccgcgacactaccttctaaccttgattatgaggttcctaccgtagctttctttggtcacttagataccagtgcagaacaaactaatgatactaaagcacaaattttaccttataaaggtggcgacctttgcttaaacaaagaacttgagatttttttacgtcaaagtgaattccctgaattagaaaactatattggtgacgatatcatcgtaacagatggtactagcttattaggcgctgacgacaaagcggctatcgcctctattatggatatgttgcaatattttaaacaacatccagaagtcaaacacggtacagttaaaattggttttgtacccgatgaagagcaaggtttacgtggtgcaaaagcctttgatgtaacagaattcggcgcagactttgcttataccttagattgttgtggtattggtgaacttgtatatgaaaattggaatgccggtgatgttgaaataacctttatcggaacctcagcacaccctatgtcagcaaaaggtaaattaaaaaattcactgttaatggctcataaatttattgcgatgttaccgggcggtgaagcaccggaatataccgaaggtcgtgaaggttattattgggtaaaacaactggcgggtaatagcgcacgtactgtattaaaaatggatgtgcgtgatttcacagaagcaggctacgcccatcgtatggcatttttaaaacaactttcagaacaatgtgaagcgttatggggtgaagggactgttgtttgtaagcaagccgatcgttatgcaaatgtctttaatagtctacaaggtgaaaatcgatatcctatcgatcttgctattgatgcttataaagccaatggtattacccctcgtccaattcctatgcggggtggctatgatggagcagcattatcgcaaaaaggattaccttgccctaatatttttaccggagcgcacaatttccactctatttatgaataccttcctgttaaatcgctttatgctgccagcgatgtattgaaatctgtcgttaagatcaccgcagagcgctttgcccccggagctaaagcatga

SEQ ID NO: 296499 - DNA, 252 bp, Proteus mirabilis
atggaaaagaagtatgaataccctgcaccagctaactatccagatgtagtgaataccgatgaagggattgaaaaattaattacaaaatcaaaccttgaatcacttttaacaaagatgggaaacgatggtcatgatgtatcagctccacttgtagagcttattgcaatgagaaactttataattcaaaagatgagaggcaataaaaatataataccgttagtggaatgtattttagctgaattaaaaaaatga

SEQ ID NO: 296500 - DNA, 786 bp, Proteus mirabilis
atgaatatagaacttcgccatttacgttattttattgctgttgctgaagaattacattttggtaaggcagctgagagattaaatatttcccaacctcctttaagtcagcaaatacaagccttagaaagtgagataggggctcgtttactcgaaagaaccaatcgttctgtttcgttaaccccggcagtgcatttggttacgttaagtttgcgtcaatttagggaaaattatcctgaagtcggtattcatatgcatcaaatgaataccaaacagcagatatcaccattattaactggtcacattgatttgggaattatgcgtaatacggtgttacctgataatttgtaccaccagctcctatttcgtgaaccttttattttggcagtttatgaagggcatcctttacttgaatacaaagaaacaggcgtaaatattcaagatattgggcaatatccttttgtattttttgagcgagatgtaggaacggcgctttatgatgaaattattcaattgcttagccttgcgggaattacaccaacgatagcacaggaagccggagaggcgatgaccatcttggggcttgttgctgccggattagggatttctattgtgacaaaatcatttacccgcatgaaagttgatggtgtgcattatctgcattttgctaattcgaatgctttctctgaagtatggttagtttctcataacaaacgaacgatccccgctgcggccaacaggttgactcaattattgctaaaaaatatcttagaagatcaaaaatcttga

SEQ ID NO: 296501 - DNA, 1212 bp, Proteus mirabilis
atggggatcccgcctagccatattgatcatgtaaaacaatttaatcttggcactgtttttcgattaattgatgaacatggtcctatttctcgtatctcattatctaaaaaagcaacacttgcgcctgccagtattactaaaattacgcgagaattagttgaagcacaccttattcatgaaacagaatttcctgggttaggatttcgaggacggccggctgttggtttaaagttagagagcaaagggtggcaatttttatgtattcgagtaaataatggtagtctactttttagtttaagagagctagataatcaattagttgttgaagataccttcgactttcctaaacaaaatagtgatgcttttttgcatcatttccttgctgcaatagatacattctttcaacgttatcaatcaagagtagagcgccttactgcaattagtattaccatgaatgcaattgttgatccgattagtggcgttatttatagctctccttactatgctatccaagatattccgctggctgataaaattcaggaaaaaacaggtgttgctgttttcttacaacacagtgtaacggcttggacgatggctgaatcactctatggtgcagccaaaaataacaccgatattctgcaaattgttattgatgatattgtcggtgcaggggttgtgactaatggaaagacattacattcaaacagccatagtgccgtcgaaatagggcatacaaaagttattgattcacagacgcaatgttattgtggtgcaaaagggtgtttagaaacggaaatatcgatccctcagttaattaaaaaagcacagcacttggcgcaagaaaatcccacctcaatacttaatcaatatccgattacggtagaaacgttatgtgatgctgtattaattggtgataaacaagcattagacatcattaatttagtggcgcaacgacttggttttattttagccgtgatggtcaatatttttaatcctcaaaaaatattaataggttcacctctgtgtagagcaaaatctgcacttttccccctgatccttagtagtatccaacaccatgtattacctagatatgcccataacttggttattgaagaaacagaactgcgcaataaaggcacattgccagcagcatcactagtaaaagaagccttatataatggctcattattacttgagttaatgcaaggctaa

SEQ ID NO: 296502 - DNA, 759 bp, Proteus mirabilis
atggatgcacaactgtataaagagtttaaaattatagaaaaagcgttttggtcagagatatgtgaaaacaatattcgtattggtgatcatacccactgctttatgacaccgatggacgcgcctatttttaattttatctatcttcgtcaaggcgctagcgaaaatactttccaacaagcaagtacgctgttctcctcgcaaaaaaaaggtcacatgctggttctgccggaatctctgttgcctgaatttgaagagataataaaaaaagcaggttatacgggtgacggtatgacaaccgctatgtatctctcattgtctgatgcgacttatcccccctataaaaataacccgtgcgatattattttaactaaccatgatcttaaacagtgggcgcaaccattgaaaaccgcctttcctgttggtgacgatacgataactaatgaatatattcgttatcaccaaaaagcgttagataatggtgcgacgatccttcattatgcattattagttgcagggcagcctgtatcatcattaacgctgacattacatgataaactagcaagatttgacgatattgggacggatattgcctatcaaggcaatggttatgccacacatttaattactcacgtattagagttttgtcgagagcaaggtgtcgagcgttgtttcttagatgcgtcagcggatggtctagcgctataccgtaaatttggttttaagccactttttaactatttaagctttattaacgaataa

SEQ ID NO: 296503 - DNA, 399 bp, Proteus mirabilis
atgagttcacatcttgtgatgcaaaatattgaagctcttacatcgccagggggtcactactctcatgttgttacagccaataatatgtcctttatttcaggcctattacctttagataaaaacggcgtgccattaacggataaacctattgaatttcaaattaatcaagtgcttgaaaatttaaacgcttgccttataggaataaaagcacaaaaaaccgatattgcccaagttaagatgtatattacagacattaacgaatggcctgttgtcaatgagttatatgcaaaatggattggtgagcataaaccggccagattagtcgcgggcgtaaaagagcttcattttggctgtaaaattgaaattgaagccatggtgatcaaggagcaaactttatga

SEQ ID NO: 296504 - DNA, 240 bp, Proteus mirabilis
atggcatctatacatggtcatgaagtattacatatgatcctttcatcaaaagtggcgtttacgcaaagatcacttatcgaggcaattcatcaacgttttggggaagaagcgcgctttcatacctgttctgctgagaatatgacagcggccgaattagtggcatttttagaaaaaaaaggaaaatttattgctgctgatggcggttttactaccagtgaaaacaaaatttgtcgccattag

SEQ ID NO: 296505 - DNA, 258 bp, Proteus mirabilis
atggtgaaaataatgcgtgtggaaattttatttaacaaacaatctaatgtcactgactcactatttccgctgttagaacatgaactaagaaaaaaaattattcctatttatcctgatatgcagtttcgtatcgcttttagtagcatgaatacgatccaagtcacgggcgtgaaagatgaagctaagcatgagcatattatggagttaattcaaagtgtttgggaagatgatagttggctccaaacgaatgatgattaa

SEQ ID NO: 296506 - DNA, 312 bp, Proteus mirabilis
atgtcaggtaaaagaattaatcgagagaagcaaaccatccaaaaaatggttgctctgtatgaacgagcgcatcctaataccgaccccgagtattatcagcaattagtgacatatgcttataaaagactagataaatgtcgctatggtgaggaaaaacccgcctgcaaacaatgcccaattcactgctatcagccagtaaaaagagcagcaatgaaacaagtcatgcgttgggcggggcctcgaatgctaatttatcatccctatttagcaattaggcatcttattgatgataatactcggggtcggtattag

SEQ ID NO: 296507 - DNA, 558 bp, Proteus mirabilis
atggaattggctactcctcgattacgtttacgagaatggcgtgaaagtgataaagcgccattttttttacatattaacgcctcagcatcggtgatgcgttatttcccttcaccacttacccgcgcagaaagcgatgcaatggttgatacattgcgtgataaatttattcagcaaaatggttggggactttgggccgttgaattaaaagagactcaagagcttattggctttgttggattaaatattcctaatgcccctttgccttttaatccgtgtgttgaaataggttggcgtattgcacaatctcattggcgtaaagggtacacttatgaggcggccttaacagtattaaaatatgcttttgaacagttgaaactggaagaagtggtggcatttaccgccgtgaccaatttaccctcagaaggggtgatgaaaaaactcggtatgaagaagtctgaatattttatgcatccatctctagataaaacacaccctttagcacaacatgtattataccgattaaaaaaagcagactttattttcccgataaacgtttag

SEQ ID NO: 296508 - DNA, 618 bp, Proteus mirabilis
atggctttttggcgatatcaaatagctggtgagcttttgatcacccttatcctaatttttagcattattatttactctataactttgaggttaaaaaaaacggcaatgtttagtcgaaaaacagaaacaccaaaagccgcggagcctattgctccagttgtgtcagaagaaaaaaagcctatgccggagcaaaaattgtataccattattgctaaaggcactgtatttcaaggtgatattaacgttgatggtgatattcaaatttggggtaaaatttcagggaatatcaatgtaaaagatggcgtgatccgtgttatgcatgcaggccaagttgaaggggaattaacggcgccagacatcattattgatggttttgttaaaggtatttgtgccgcaaacaatcttgatattctagagcatggtgaactacgtggcactagtcgttgtggcagtatgtcaattaaacgtggcggtgtctttactggacaatctgaacaggttgaacaccaagctaaagccgttgcacagcaacgtgttgtatctattaaagaaggtacagttaataccaataaagagtctgtaactgcagaaagtaaactaaaagaaaataaaaaataa

SEQ ID NO: 296509 - DNA, 486 bp, Proteus mirabilis
atgaaaataaaatcacttattgctatttcattattaagtgttagtgcttctctttttgccgctgaaagcaccagcacaacacaacaagttcagggcgtaactcaagcacaaaaagatctcaatgattatgaaaaagtcatggtagaaaaagtttgggttaccacgcaagccattgacgagaaaggcaataaagttgacgctaataatccacaagtcagtaattattttggcctagcagaatattatcctaatggcacttttattatgtttacccctgaaggtaaacaaaaaatgcaaggggattggtcaatgtctaatgatggaaaaacgcgtacattagttgccaaagatgcacaaggaaaaacactatttactcgtgatgtagaaaatatcaccatcaataatgatgagtatacctatcgtatttacccaactgaaggggataatactgtttattttgatattattcatcacgttaagaaataa

SEQ ID NO: 296510 - DNA, 1152 bp, Proteus mirabilis
  misc_feature (39)..(48): n is a, c, g, or t
atgcttcataaaaaattacatagcgaaatgtcatgggannnnnnnnnntcatgggaacaacttggtgagtactataatgaaattagtgatatgtccggtgttaggcaagatccgatccaccatgctgaaggtgatgtagctattcatacacagcaggtgatccacgctataaaatcactccctgaataccaagagctgtcagaaagagagcaacaaattctatggattgcagcacttttacatgatgtagaaaaacgttcaactacccgtgaagagaatgggcgaattatttcgccaggccatgctcgtaaaggagaattaacgacaagacgttttttatatgaaaaagtgccggttagttttattgatagggaacagattgcggcattagtacgctatcacggattacctttatggttaatggataaacccgatcctaaaaaagccttattagcggcttcgttaagagtagattgctatttattggcattgctggctaaggcggatgttctgggacgaagctgtgaagataagcccgctttattggataaaatagcgttatttacactttactgcgaagaattaaattgttggagaacacccgcacgatttatttctgatggcgctcgatttcactattttcatagtgaaaatagcgtcgatcctcactatgaaccttatcctgagcaaggaagtgaagttattgtgctttgtggactaccgggaatgggcaaagatagttatattcgccaatattgtgcagatatgcctatagtaagtttagatgtattacgtcagcagcataatataaaaccagatgatcgtgatgcgaatggatggattgcacaacttgccaaagagcaagcgagaatatatttaagagagcataagccttttgtttggaatgcaacaaatattactaaacaaatgcgtaatcaacttattgctctgttttatcgttatcaagctaaagtgacattggtatatattgaagtcccttatttgcaatggaaaaaacaaaacagcgcaagaaaggaagcggttcccgataaagtgatggaaagaatgttgagcaaactggaagtcccaacaccagaagaagcgcttaatgtgatttattgggttgatggggaagctcaaaatttgatttaa

SEQ ID NO: 296511 - DNA, 549 bp, Proteus mirabilis
atgggagtttttgctcgctctcatgcgactccgacacaatctgcatggacagtacaactacgccagcgttggcaatccatcagaaatgatttaggtaatttagatatttttggtgaaaatctttatgccattcattctattgaataccaacatttggaagagtatttctatgtttttgccatacgttgtcaggataaatggctaagttgggaagaagtgcacttttatgccactttatttgatttacccatcgtaccggaaatctcgctaccaaaatcggaaaataaaatagagtttgaaaagaatattattttacacgcacaaaagcatagctcttttcaatcacgagatgtgttaaccaagaaaccaagtgcgatggaaggcattgtcacacgagatgctcaagcattttcattagatgaattttcacatcgggtgtttaaatatgtgagaaaagatcatgttaaaacagatgtgcattggaaacgtaattggaaaagagcgccactgatttgggaaaaaacacaggagtctcatgatgcttcataa

SEQ ID NO: 296512 - DNA, 609 bp, Proteus mirabilis
atgaatatagcaagtcttcttgaacaaattgcagataaaggttggtgtgtatgggatgatttccttacaccagaggcggttaaacaattgcgtgcttgttttggtaatgatgcacaacaagcacgtataggacgtcatgaaaacctattagcagaaaccacgatacgcagtgataaaattcgttggctagagccgcaaatgggagagccagttcaacattatcttatgcagatggaaagcattcaacgagcagttaatcgtgagttctttttagggctgtttgaatatgaagctcatttcgcttgttatgaaaaaggtgctttctataaaaaacatcttgatgcatttaaagaaaatgtcacaagacgtttaacgacagtgttatatcttaatgatgaatggacaccacaagacggtggagagctagttatctatgatctggatgataatcaattagcgacagtcgcccctcaaggtggtcgtttagtggtttttctttcagaacaatttccacatgaagtattacctactcataaagaaaggatcagtattgcagggtggtttcgagttaatggtgtcagagataattttctcgatatcgccagctaa

SEQ ID NO: 296513 - DNA, 558 bp, Proteus mirabilis
atgaatgaattttcgattgtctgccgtctattaggtacattatttcaacgagcaccgagtgatgctattttagcaccgatcataaccatgatagcggaagataaactaagccaattatggccattagagcaagatgaactattcaaaacgttaaaaagtagcgtagctgatttagcggcagtagaagctgactaccaatcgctttttgctgacccaatacccgcagtatctctttatgcacatgattacggtgatataaaagagcaagatattcgtcaattcttagtcactcgaggtatgcctgtcaccggatcagcgacagatagctttggtgcgttgttacttgccgcttcttggcttgaagataatgccgcacaagatgaagtattagcacaaacacagctatttgataactatctattaccttgggcgggaacctttttaggtaaggttgaagcgcatgctaaaacaaatttttatcgtactttagcagcaattacgcgtggtgcactttctgcattacgagaagaattatcagatgaagaaaacgaaaaataa

SEQ ID NO: 296514 - DNA, 696 bp, Proteus mirabilis
ttggaaaaaaatgttgatgttgagtattttagcggaagttttgaattataccgagatttaaaatttacaccttcagcgacaaaagcatcgcataatattcactggtatccattgacatcattgaaaaattttgaagtcatgttagaaaaaagagttaattcactatttaaacatagaatttatgatggaaaaataaaacaagacaaaaaagaatttgaagcacataaaaataacttaaaaggactttataaaagagtgcttaaaataaataacctatttgataaataccctgttcaatacgatgttaaaagaagtataaataaacttgattatgtttatttacagttggatgcaaataagaaattaaaaaacaaactaaatccacaattgatggagaatgatctttctctcaagagtgatgtaatagataactcaatagatctagtacacaataataacagagtacaacaattcttagctgatttaacagaaaagaaaaaaatactttcttcacagaaaaaaaataatatgaatgaaaaatttaagccatattttatttctaaatatcagctaaatagtgaggggagagtgcgttattcagtgcttgaaactcaactggaagagcttatcaatgaagtgaaaacagatgaaaatctaacagttaatgatataaaagataaattaattattttctag

SEQ ID NO: 296515 - DNA, 1674 bp, Proteus mirabilis
atgaccatgaatgaggcagatgcccgcccaacgaactttattcgtcaaattattgacgaagatctggctaccgggaaacataatagtgtccatacccgtttccctcctgaacctaatggctatcttcatattggccatgcaaaatcaatttgcttaaattttggtattgcacaagattatcaaggtaaatgtaatttacgttttgatgatacgaatccagtaaaagaagatgttgaatatatcaactcgattcaaaaagacgttcagtggttaggtttccaatgggatggtaacgttcattactcctctgactattttgatcaactgtatcaatatgcgattgagctgattaacaaaggcttggcttatgttgatgagttgagtgctgaagaaattcgtgaatatcgtggcacactcaaagagccaggaaaaaatagcccttatcgctctcgtagtgtagaagaaaacttagcgctatttgaaaaaatgcgtgcgggtggctttgaagaggggaaagcgtgcctacgtgcgaaaattgacatggcatcaccatttattgtcatgcgtgatcctgttctttaccggatcaaattcgctgaacaccatcaaacaggtaacaaatggtgcatttatccaatgtatgattttacccattgtatttctgatgcattggaaaatatcacacattctttatgtactttggaattccaagataaccgtcgtttatatgattgggtgttggataatatcactattccttgccaccctcgtcaatatgagttctcacgtcttaatcttgaatataccgtcatgtctaagcgcaagctaaatcagcttgtgacagaaaatattgttgatggttgggatgatccgcgtatgccgacaatttctggcttacgtcgtcgtggctatacggctgagtcaatccgcgaattctgtcaacgtattggtgtgaccaaacaagataacaacgtggaaatggcatcattagaagcttgtattcgtgatgatttaaacgaaaacgcacctcgtgcaatggctgttatcgatccggtacgtttagtgattgaaaatatgccagaaggtgaagagattttaactgcgccaaatcacccaaataaaccagaaatgggaactcgtgaagtaccatttagccgtgaaatttatattgatcgtgcagactttaaagaagaagccaatcgtcaatataaacgtctggtattaggtaaagaagtccgtctgcgtaatgcttatgtcattaaagcagaacgagttgaaaaagatgaacaaggtgaaataaccaccatttattgtacttacgatccacagacgttaaataaagatccggctgatggtcgtaaagtaaaaggggtgatccactgggtaagcattccacatgctattccagcagaaattcgtctttatgatcgtttatttagcgtaccgaatcctggtgctgaagaggatttcttatcaaccattaaccctgaatcattagtgatccgtcaaggttttgtggaagcaagtttaaaagatgcggctattgaaaaagcgtatcaatttgagcgtgaaggttacttctgtgctgataagctttcgacagcggataaactggtctttaaccgtactgttggtttacgtgatacttgggcgaagatttcgaaacaaggttaa

SEQ ID NO: 296516 - DNA, 141 bp, Proteus mirabilis
atgaacctcgcaaacttatctcaagaagaaaaagacaaaatcaatgtcgatttggctgcttcaggtgtcgcatataaagaacggctcaacatgccaattgttgcgtccgaagttgaacgacaacaaccagcacatttatga

SEQ ID NO: 296517 - DNA, 612 bp, Proteus mirabilis
atgactgctgtatacaaagctattagtaatgttgctagagaaatggctgaaacgggcattaaaaaaggaagtgtaaaccaacaacaaggatttatgttcagaggaatcgatgcagtatataacgcccttgcccctgctctagttaaacatggattacttattcttccacggatcattgaacgtaccgtcacggaaagacaaacacaaagaggtagcttgttattctatgtcgtagtgaaagctgagtttgaatttgtttctgttgaagacggaagcaaacacacggttgtgacttatggtgaagcaatggatagcggagacaaagccacaaataaagccatgtctattgcatataaatacgcagctttccaaacattttgtataccaaccgaagaaacggcaatcgatgctgatgcagaagtccacaatgtagcaccgagaacaccagatcaaatattgaaagattttactaattcagcaatggctattacagatctcaatattttgaaaaaagaatttggtgaaacatggaagttactcaggaaaacgcctgaacaatcaaaagcaaaggaagtatataacatcagaaaatcagaattggaggcgatgtaa

SEQ ID NO: 296518 - DNA, 510 bp, Proteus mirabilis
atggcaagtaaaggtgtaaacaaagtcttattgataggacatctaggtcaagatcctgaaatgcgttacctcccaaatggcgatgcagttactaatattacattagccaccagcgattcatggaaagataaacaatcaggtgaaaccaaggaacgtgtcgaatggcatagagttgtgatatttggaaagctcgccgaaattgctggcgaatatctgcgtaaaggttcacaagtctatatcgaaggtcaattacaaacacgtaaatggcaagatcaaaatggacaagacagatacagcacggaagttgtagtgaatattaatggctcaatgcaaattttaggtaacaacaatcaggctggtagccagaaatcacaaccatcacctcatcaacacggatggagccttcaacaatctcctaagcgtaatgaacctccaatggattttgatgatgatattccttttgcgccgattgggcttatgtatccacgacatttgattaatataatttag

SEQ ID NO: 296519 - DNA, 696 bp, Proteus mirabilis
atgattgaaatctcatcaaaagttaaaaactttattttttggatatcattaacttcagtatctttaattgtatttggtattttcattatcgatatctttgtcaccgatgctaaaggaaaagacaaactgagcattatcttctcctatctatctaccgtatttgcatttttatctgcattagctttatttgcgactattgttgtttacttttggcaaaaaaatgactcattaaaaatgcaaaaagaaagagatgatatagtaaagaggagcctgagtgctgcattaaatagtcatgaaacaactatacttaatataatggatttcgcaattgatgactttgaaacaaaatataaaaaaatcatgatcgagcaaggtaagcatatttcatgcgcttttatagctttagattgtactgacgagttaatacaataccaaccagtgcatattgagcatggaggatttattaacgaatcgatgcgcgaaaggcattcatgttcatcatctaccgctcaacttgttgaagaaataaattattttactgaagggctcacgaaatttataaaaaatgtggtaatagataaactctcaaacgataaattcccaattaggatgaaattaataataataaaagatttcagtaataagaaaggaaaatactttttgaatgaaataaataaattaaaaaaaagaatttaa

SEQ ID NO: 296520 - DNA, 276 bp, Proteus mirabilis
atgaagccaatacttgatatgtgttgtggctctcgcttgttttattttgataaacaagacgaccgagttttatttaatgatattagagctgaagaacatattttatgtgatggaagaattttaaatataacaccagatattatttctgattttaaaaaccttccattaccagataataccttttatcaagtgctatttgaccctcctcatttaatgagagttggtaaaaatagttggatgtttaaaaaatacggttcgttaaataaagactcatag

SEQ ID NO: 296521 - DNA, 495 bp, Proteus mirabilis
atgaataaaactgtcatagcgttaattgctttggctgtttcctttaccgctggctttgttgctggcggtatttattttgataaccaagcaatgagtaaacagattgcaggtaatcaattagatgaaaaggatgtggccacaaatattgaactgcgtaaacacgcagacaatgaacagcagaataggttggagatatatcatgacgcacaacagcatgatacgatacgtacagatgctttgcttgatcgtgttcttaatcactttgacaggatgcagctctcaaccagtaccacgcaaacagaagttgcaagtaccgataacgccaatacctgccgagttgaggaagccaaagccagtgaactttctcgacaactacgagaaacacttgaacgatatgggcgtgaagctcagcgtgcagatgaaaacaccagaacactcaacctttgtatttcagagctggaagaaaaggaaaaactcctcaattcttaccgatga

SEQ ID NO: 296522 - DNA, 345 bp, Proteus mirabilis
atgtcattagttgataaacaaaatacgtttacaggcatggttgcaaagctgatcacctttgctcagcagaacgggtataagctgacgtttggtgaggcttatcgaacaccagaacaagcacagcttaatgcaaagaaaggatcgggtattagcaacagtcttcacactcaacgcttagcagttgatttcaacctattcgatactaacggcaaataccttacagccaccagcgactataaagaactgggtgagtattgggaatcattgggcggaagttggggcgggcgttttaaaactcgtcctgacggtaatcatttttcattagagcacaatggggttcgttaa

SEQ ID NO: 296523 - DNA, 273 bp, Proteus mirabilis
atgaaatgcgaaacattgctcactattgttaataccatcatctgtaccgtcatatttctacgtgtgttctattttaaacgtgacggcagacaacactgtaaaaaaggtggatggttagctttcctcattcttgcttactcttcaagtgtacctattcgcgcttacttcgatcctaattatcacgctgatatccacaacatctttgccaatatcctgatctgcacaacgttgctggtcaataaaggcaatgtcatcaagtttataaaggggtga

SEQ ID NO: 296524 - DNA, 372 bp, Proteus mirabilis
atgcaagaagatgtctacacaaaagctgggatcggcactactgcttttcttggctacttcgcagggcttccagcagaagttgttatgggttcactgttgggagccatcttctttaccactgctgctactgaatatagctttaaacgtagatcactattggcttttctgagtttcgtttgtggtcttatattctttagccccgcagcaactatatttatttctgttactggccttttcggtgtgaaaccggagcaatacgaaatcgaacatatcgataccgtaggggcttttgtttccgctttgcttgtggttaagttaagcgtaaaagcatatggaagggctgatataccgaaacaaggagggcaacaatga

SEQ ID NO: 296525 - DNA, 123 bp, Proteus mirabilis
atggacgagaaatacacacaaaagacaaagattatgatggcagagattacaacaatttttttcagtgtctttattgaaaataattttgataaaataattaatactattggatatactatgtag

SEQ ID NO: 296526 - DNA, 732 bp, Proteus mirabilis
atgtcatcgatacatactgaacaatttataccagctaaattagcacaggcattagcgaattcactttttcctgaactggatagtcagctacgtgcaggtcgacatattggtatagactcactagataaccatgcttttttgatggactttcaagatgagttaacagatttttatgcgcgttataatgtcgaattaattcgagcacctgaaggctttttttacttacgcccccgttcaacgacgcttattcctcgttcagtgctttctgaaatggatatgttggtcggcaaaattctttgttatctctaccttagccctgagcgattagctaatcaggggatcttcactgtacaagaattatttgatgaattacgtacactggccgatgaaagcaaattgttacgcttagttaatcaacgctcaacaggatcggatttagacctacaaaaactgcaagagaaaatgaaaacgtcacttaaccgactacgtcgtttagggatgatttcgtttttacccaatgatacgcaacgtttttcaattactgattcggtgtttcgctttggtgctgatgtgcgtagtggtgactctcctcttgaagcgcaaatgcgtatgatccgcgatggtgaggctatgccactagagcaagatagcgagccaagtgatgacgatgaacaggaagatgagcaattagagtccagtgaagatgatgatgcagaggaagaaaataaatga

SEQ ID NO: 296527 - DNA, 312 bp, Proteus mirabilis
gtgaccggggaattgcctgaagagctggaatatcaaatgttcagtgaagtaaatgaacaaattgctcaatgggttgaacaagagctggctgcttataaattagaacaacgagcgttagatctcagttcagtattagttgagtatcttaatcgttatccacaacagaagcattttgatgtggcacggattgtcattgatcaagcggtacgattaggtgtcgcgcaagctgaacttgcaggattgccagcaaaatgggcagaaattaacgaatatggagctaaggtacaagcgcatgtcatcgatacatactga

SEQ ID NO: 296528 - DNA, 189 bp, Proteus mirabilis
atgttacaacgtgaagcaatagaagccgttatgatggagttagcccaccagcaagggcaatcactcaacggacgcgataggttggacattagaacaggtgtagcacagacaatacaggctaaagaacgtcacagacgaagaatgacagcacctacctacaagtggactaagccagcactaaaacgatga

SEQ ID NO: 296529 - DNA, 222 bp, Proteus mirabilis
atgtcacacaatagttctagggcgaaagttattaatcctgaattacctttaaaccaaagagcctcaaatgctagaagctgcgctaatcatgtcgcattaagactagggataaccagaatagagttatttgctctcattaaaagctctacaagcgtcgatatggaacagcccaaaaatgaagaagaactgatgagagcatttcactattttgagcaactataa

SEQ ID NO: 296530 - DNA, 288 bp, Proteus mirabilis
atgaataaaccagaaatgagaaaaacaaagttaatcaagatcaccacatcaggaacggtaataaaagcccctgagcgagttaaaacagcgacaggtaaagttatggccacgatgactattcaggctgagagtgacaagcgtagcccgtacccattaaagatagtggcattcgatattaacgcgctggagttaatgacctgccagaaaggaaataaagtcacggctacaggtcgctatgaatggtttaatggttatcagctaacaggggcgcagatagttgctggttag

SEQ ID NO: 296531 - DNA, 186 bp, Proteus mirabilis
atgaatgatacagatttaatactagaaactgatgtttacaaatggttaggactgaagcgtacggcattatggcgactaaaaaagaagcatgaatttcctctccctgttttaaaccgaccagccaaataccgtaaatcattaattcaaaagtggcttgatgatggtggggtaaatagaaaaaaatga

SEQ ID NO: 296532 - DNA, 1473 bp, Proteus mirabilis
atgaataaattaactccattacgacctatacctaccttaattgcggttgctattacccttatcatttggtttgttatccctgttccccaaggggtagatcccaatgcttggcacttgttagcactgtttgttggtactattgcggctattatcggcaaagccttacctataggggcagtatccattattgctattgcgcttgttgccgcaacaggcgtcactaacccagactcaactaaaggggcgattaatgatgcattaagtggcttttccaacaatcttatctggttaatcggtatttctattatggtttcaatgagtcttaataaaactggattaggtgctagaattggctactattttatttcgttatttggtaaaaaaaccattggtatcgcttattctctagctattgcagaaacgatcctcgcccctgttacgccaagtaatacagctcgaggtggcgggattattcacccaataatgcgatctattgccgatagctttaattcaaaacccgaagagggtactagtggtaagattggtcgttatttatcgctagtcaattataatatcaatcctatcacctcagcgatgtttattactgcaaccgcgcctaatcctcttattgtaagcttaattatcggtgaaacagggcctgaaaatgagttaacttggtcaatgtgggcaatagcggcttttgttcccgccattgtttcattatttttaatgccgattgtgatctactttttatataaaccagagataacccatacgccgaatgctccccactttgccaaagagcgtttagctcaattaggccctatttcattgccagaaaaaatcactttgggagtatttgcactgttattaattatgtgggcaggaatacccgcactattatttggtgatgcttttagtattaatgcgactactgcggcttttattggtttatcaatcttattatgtactggcgtattaaattgggatgatattttaaaaaacaaaggtgcatgggataccgtggtttggttttccgcattagtaatgatggcctcttttttaggaaaattaggtctaattaaatggctctcattaagtgtgggtgccggtattgatagtatggggataagctgggtaagtggtatgatattactcgtgctgatttatgtctattctcactatttctttgctagcaccacggctcatattaccgccatgtttgctgcattctatgccgcaggtttagctcttggcgcgccaccaatgttattaggacttattttagctttctcttcttcattaatgatgtctttaactcattacggtacaggtactgcaccgattattttcggctcaggctacgcgaccttaggtgagtggtggaaagcaggttttgttatgagcattgttaacctcattatctggataacccttggtagtttatggtggaaggtgctggggtattggtaa

SEQ ID NO: 296533 - DNA, 303 bp, Proteus mirabilis
atgaataaaaaaatatcaaagatagttggcgcaagaataaaaatgttaagacaacaacatggtatgacgggtagtgagcttggtgctttattaggagtaagccagcaacatcaatcacgctttgaaaatggggagtgcaatattcatgtggatgtaatttacttattatcttatatttttaaagttaaattaaattatttttttcaggatataaatgattgttttgatcaagaaggaatagcctataaagaaagttattatcattctgagacgattgtcgaaaagtgtgaactttggcgctag

SEQ ID NO: 296534 - DNA, 774 bp, Proteus mirabilis
atggttatgggattgactatcgctaatttagtcggtgtacccttagtcacttggattggacaacaatatggctggagattagcctttatattaatttcaggtctgggttttattaccctaatcggattattaatgtttttacctgttatgcctaaaggaaaaaagcctaatattaaatatgagctgggtgttcttactcgcttacccgttgtattagcactattaacaaccgtatttggtgcctctgcactttttgccttgtatacctacattgctcattttttaaccaataccgttcatatatctgaaagccatgtcgctgtggtattagttattattggtctaggatttactatcgggaattacttaggaggaaaactatcttcttacggtatcgaaaaaacattaatccttttcttcatcctacttatcggctctatgtcagttttgccgttagtttccaataatgtgtatctggcagtggcgactatttttatttggagtatctcaagctttgcacttgttcccgcgttacaaattaaaacaatgcaaatcgcccatgatgcacccgccttagtttcatcggtaaatataggtgcgtttaatttaggtaatgctatcggagccatcatcggcggtatcgcattaaaatacagttataacattgtgcctttaaccgcggcactggtaggcgttattggcctacttctcgtctattcacaaatcaaaataaaaaaatcgttctcctcagaatgttgcgttaattctttataa

SEQ ID NO: 296535 - DNA, 447 bp, Proteus mirabilis
  misc_feature (412)..(421): n is a, c, g, or t
atgaaagcattttttcctttatttgccctcgctacaggagcatttgccataggagccaccgaatttacacctatgggattgctacctaatattgctaatggactgagtatttccatagcaaccgcaggtggattaattactggttatgctgttggggtgatgattggtgcacctattatgacattaagtcttggcaaattaaccaaacgtcatgcattgggattattgttattattatttattgcaggaaatctattagccgcacaagcagatagttattggagcttaatgatagctcggttgatcactagcctaaatcatggtgctttttttggtattggctctgtcgttgctgccagtttagttgaaaaacataaacaagcctctgccgtcgctgctatgtttatgggannnnnnnnnnatggttatgggattgactatcgctaa

SEQ ID NO: 296536 - DNA, 1299 bp, Proteus mirabilis
atgagcaaaacatatttgacagaaaagaagttttccgacttcgccttgcatccaaaagtgatagaagcccttgagaaaaaagggttctctaattgtacacaaattcaggcattgacgttacctatcactgtgaaaggtcatgacattgctgggcaagcccaaacaggaacaggaaaaacgttggcgtttttaacctcgacgtttcattatcttttaactcaccctgcaaaagaagggcatgaaaagaatcaacctcgtgcactgattatggcgccaacgcgcgaattagctgtgcaaatttatacagatgcacaacctttagcacaaagcactggtattaaaatgggtctagcctatggtggagatggctatgacgaacaacttaaagtattaaataacggtgtagatatcgttatcggtaccacgggtcgtttaattgactatgtaaaacaaggtcacattaatcttaacgctattcaagttgtcgtacttgatgaagcagacagaatgtacgatctgggctttattaaagatattcgctggttattccgtcgcatgccaaatgccgcagagcgtatgaatatgctcttttccgccacactctcatatcgtgtcagagagttagctttcgaacagatgaataaccctgaatatgtagaagttgaacctgaacaaaaaactgggtttagcataaaagaagagctgttctatccttctaatgaagaaaaaatgcgtcttctgcaaaccttaattgaagaagagtggccagagcgctgtattatttttgctaacaccaaacatcgttgtgatgatatttgggcgcatcttgccgcagatggacaccgcgtaggtctattaacaggtgacgtgccacagaaaaaacgtctgcgtatcctagaagattttacccaaggtaatattgatattcttgtggcaaccgatgttgcagctcgtggtcttcatataccttctgtaacacatgtctttaactatgatttacctgatgactgtgaagattatgtacaccgtataggtagaactggacgtgcgggtaaaagtggtaactctattagcttagcctgtgaagaatacgcgttgaatttaccggcgattgagacctatattcaacatgctattcctgttagtaaatataacagtgatgcattattaactgatttacctgagccaaaacgtcgtcatcgtcctcgtcaaggtcagcctcgtcgtaataattcggcacctcgtagaggaaataatactcaacgtaataaccgtaataaacgcccgagtcactcataa

SEQ ID NO: 296537 - DNA, 213 bp, Proteus mirabilis
atggaaacatttcaattagatggtcacccctatgtagaactgtgtgatctattaaaactccaaggctggacagaaagcggagccgctgcaaaaaatattattgctgaaggcctcgtttgcgttgatggtgaagtagaaacacgtaaacgctgtaaaattactgccggtaaagtcgtcacactcggtgagtttgctgtcactgtcagcaactag

SEQ ID NO: 296538 - DNA, 873 bp, Proteus mirabilis
atgtcagcaagaattatagatgggaaaacgattgcgcagaccatcagaagtgaagtggcagaaaaagtaaaacaacgtattaagataggaaaacgtgcaccgggtttagcggttattttagtcggtgataaccctgcatcgcaaatctatgttgctagtaaacgtaaagcttgtgatgaggtaggatttatctctcgctcttacgatctaccggatactacaagtgaagcagaattactcaatctcattgatactctaaatgaagataagactattgatggtattttagtgcagctccctttacctgcgggaattgataacgtcaaagtattagaacgtattcatcctgataaagatgttgatggcttccatccttacaatattggtcggttgtgccaacgtgcacctaagctacgtccttgcacccctcgtggtattgtcacactcttagagcgttgcaatattccaatgaatggcttaaatgcggtaattattggtgcttcaaatattgttggtcgcccaatgagtttagagctactgcttgcaggctgtacaacgactgtcactcatcgttttactaaagacttacgttttcatgttgaacatgctgatttggtggttgtggcagttggtaaacctaactttattcctggtgaatggataaaacctggcgctattgtcattgatgtcggtattaatcgccttgaaaacggtaaagtggttggtgatgttgatttcgcacaagcctctcaacgcgcggggtggatctcccctgttccgggtggtgtaggtccaatgactgtagcgactttgattcaaaatacgttgcaagcctgcgaagaatatcacgatcctgatataggaaataattaa

SEQ ID NO: 296539 - DNA, 468 bp, Proteus mirabilis
gtgtttacagtcaaaattattgccatttataacaagagatgcattatcatcagcgtagctttaaatgacactgcgtgtcaggatcttaaggagcaaataggaaaccatcacaaatgggtatttgttcatactgaatcaaagaagagaccagacggaacattaacgccaagcgttagaaaaatgcgagttgattctaacacagcatggagagcagcgttaaaaagagcaggaatagaaaacttccgttttcatgatctgcgccacacatgggcgagctggttaattcagtccggagttccgctttcagtattacaagaaatgggtggatgggaatcagttgatatggttagaaggtatgctcacctagcgcctaattatttaactgaacatgcaaagcaaatagacagtatttttggctcttgcgtcccaattacgtcccacttaagaaaagtagagaatttaaaatga

SEQ ID NO: 296540 - DNA, 1374 bp, Proteus mirabilis
atgaatacctcacagtttgtgaccccggtgatagaccgtcgttatcgttgggataaacgcaatcaacttatcgagcgcagtgtcagttatggtcaaacgggcgaggtttttaccgccggacattggtactaccacagttatcagtacgacccgctgggacaattgacggcgcatttagggtcggtgcaaaccgaacactttctgtatgatgcagcagccaatttactgactcgtccgcacaccgaagcaccgcataaccaagtacaaggcagtgataaatttgattatcgctacgacggttttggtcgcatggtatcgcgctatgaaaaaggcagtagctcgggacaacgttatcactatgacagtgaccaccgcattatcgcggtggatatcgaccaagggcccttagggtatcagcgagcggaataccgctacgatatcttagggcgtcggattgaaaaacggttatggaaagccagtgcgattgccaatgcggtgacctatcaccaacatgagccggatgaagtgtacacttttggctgggtagggatgcgactggtgtctgagcacagcagcgcagcgccccataccacggtttatcatgcttacaatgaccaaagttatacgcctctagcccgcattgaatgcacggataacccgcttaatccgcaacgggcgatttattatacgcacagcagtttaagtggcttaccggaagcgttgaccaacagtgagggtgaaatcgtttggcaagggcaatacagtgcttgggggcatttacagcgtcaaacccgacccacaagcacgtttaaccgtgaacagaacctgcgttttcaagggcagtatttcgacaaagagacgggcctgcattataatacgttcaggtactatgccccggatttaggccgttttacccagcaagacccaatagggttggtaggggggataaatttatatgtttatgcgccaaatccattgacatgggtggatccgtgggggcattgtgcggtcaaactttctaaaaatatggtagctgatggtacgcctagacctgccaataccgcagctcatcatattgttggtgatacatctaaaggtgcccagccagccagagatattctgaaaaaacatggtattgatgttgatgatgctagaaatggtgttttcctgccaaatagaaataatgttgatgaagcattgtcaggaataaaacataatggcagacattcaaatgattatatagaagcagtgaatgaaaggattattagggctgataaagaaggaggtaaacaaggggtaatagatacattatctgaaattcgagaaatcctatcctctgctagtagaaatgctaaatggaaaactatattatga

SEQ ID NO: 296541 - DNA, 564 bp, Proteus mirabilis
atgattaataaagtctattatttaaaatcagatttggaaaactatagttcttttattcaaaattatcctgatggagaagaaagtataatagggagagcgatggatcagcgatggtctaaatttactgatgactatactgctatttcattagagttaaattccaatgattttggaagaaagaattataaatttgattttagtagttttttgtcgccatttatggtttttagtgaagatgcattggtgtctttatctgatattttgagttcaagaggacaagtattacccgttaagactgagagcaaacggaagaaatttgttggttattatccaactaattcactttcaggatgttttgacagaaaaaattctgtttatcgggaataccccaatggattaatgattgaaaagccagttctcataaaaaataacatcactgatgagtatttatttactattgacgaatatattagtcgaatctttgttacggataaatttaaacaaagagtagaagatgcaggtttaacggctttcgatttttcagtggaaatagaattatcgtaa

SEQ ID NO: 296542 - DNA, 1254 bp, Proteus mirabilis
atgttagaacaaatgggaaaagcggcgcgagaagcttcttggcacttagctcagctatcaaccgaacaaaaaaatcaggcactgttagtcatcgctgatttattagaacagcaagaagccattattcttgctgctaatgaaaaagatatggtggcggcacgagagtctaatattaatgctgcaatgcttgatcgtttattactcacatcagaacgtttaaaagcgatcgctgatgatgttcgccaagtttgtcatctagaagatcctgtaggtcaagtgatagatggtcgtttgttagacagtggcttacgtttagaacgccgccgagtccctttaggggttgttggcgttatttacgaagctcgtccaaatgtgactatagatgtagcatctttatgcctaaaaacagggaatgcggctattctccgtggcggaaaagagactcaccatactaaccaagccgttgtcgcggtgatccagcaagcactagaaacatgcgctattcctgcggctgctattcaagctatcgataagccagatcgtgaattagtcgcaaaaatgctaaaaatggatgagtatattgatatgcttattcctcgaggtggtgcaggattacataagttatgtcgtgaacaatccactattcctgtgatcacgggggggattggtgtttgtcacacctttgttgacgaaagtgctgatttagaccaagcattaaatgttattattaatgctaaagttcagcgtccaagcgcatgtaattcgttagaaacgctattggtacatgaagctattgcggagagtttcttgcctcaattaagtgatgcgatggcagcacaaaaggttactttgcatgccagtcaacgcgctataactgcattgaaaaagggacgtgcgacggtcgtcgatgtgacggaagcagattattgtgatgaatggttatcactggatctgaatgttgaagtcgttaatgatttaacagcggcaattgctcatattcgccaatatggtaccgcgcactcagatgctattttaacgcaatctatcagtcatgctgatcgctttgtacgccaagttgattctgctgcggtatatgtgaatgctagtacacgttttacagatggtggacagtttggcttaggtgctgaagtagcggtgagtacacaaaagctacatgcacgaggccctatgggattagatgctctaaccacctataaatggattggttacggcgacaatacattacgtcgctaa

SEQ ID NO: 296543 - DNA, 762 bp, Proteus mirabilis
ttgaatgcgcgtgatacactgcatgcattattagataacaagattattcctgttatcaatgaaaacgatgccgttgctactgcagaaataaaagtaggggataacgacaatctttcggcattagctgccattttaggtggcgctgataaactcctattacttactgatatcgaaggtctatatacggccgatcctcgtagcaatccggatgcgaagcttattccagaagtttttgatatcaacgatgaattacgtcaaatggccggtgatagtgtctctggtttaggtactggaggtatggcaactaagttacaagcggccactgttgcagggcgtgctggtattgacgttgttattgccgccggtgttaagcctgatgttatcagtaaagttattgataatgaacctgtcggaacactctttcatggtttaaaaagcccccttgaaacgcgtaaacgatggatttttggtgctccagtcgcaggggttatcattgttgataatggggctgaaaaggcgattaaagagcaggggagttctcttttacctaaaggtattaaagaaattaaaggtgacttttctcgagggtgtgttatccgcattcaaagtttgcaaggaaaagatcttgctcatggtgtcgcgcattataatagtgatgcgctacgcttaattgcggggcaccattcgcaagagattagtcaaattttaggttatgagtatggcagtgttgcggttcaccgtgatgatatgattgtgagctag

SEQ ID NO: 296544 - DNA, 288 bp, Proteus mirabilis
gtgccaatacgtgttaaattaagaaaagcctgtactgatcgccaaggcatcatagtctcggtatgtatgagtaaactactaaaaaatcataaaaaagattatgaattactagtcgattactatgtatttggacaaacatttattcaattagcacaagcgcatcgatgctctgatacttatatcggaaaaaaactcaaaaaagcagaaggcattgtggaagggatgttaattatggccgaattaatatttattattgagaaaaatgaaaatagtactttacgatcgtaa

SEQ ID NO: 296545 - DNA, 864 bp, Proteus mirabilis
atgtcaacgaaatatcctatcgttttagttcatggtttagctggttttaatgaaattgttggttttccctacttttatggtattgcagatgccttaaggcaagatgggcatcaagtttttaccgcttctctttctgcctttaattcaaatgaagtgcgtggcaagcagttgtggcaatttgtccagactctcttacaagagacacaagcgaaaaaagtgaattttataggtcatagccaagggccattagcttgtcgttacgttgcggctaattatcctgatagtgttgcttcggtaacttcaattaatggtgtaaatcatggttcagaaatagccgacttatatcgacgcattatgcgtaaagacagtatcccagaatatattgtcgaaaaagtattaaatgcatttggtactattatctcaacattttctggtcatagaggcgatcctcaagatgctattgccgcattagagtctttaacaacagagcaagtcacagaatttaataacaaatacccacaggcattacctaaaatccctggtggtgaaggtgatgaaatcgtcaatggggttcattactactgttttggtagctatattcagggattaattgctggggaaaaggggaatctactggatcctactcatgcggcaatgcgtgtgttaaatacattctttactgaaaaacaaaatgacggcttagttggtcgctcgagtatgcgattaggcaaattgataaaagatgattatgcgcaagatcatattgatatggttaaccaagttgcagggttagtgggttataatgaagatatcgttgctatttatactcagcacgctaaatacttagcgagtaagcaactttaa

SEQ ID NO: 296546 - DNA, 432 bp, Proteus mirabilis
atgttcaattatccagcaacatcccattttgacgaagaaagtgaaacttacgagattacttatcgtgattttgacaatatacatgcagtggcatatacagaagatgatattgaactagaagcctcagatattttacatgtaggacttgaagagtttatttcgagtaaaatgccgatccctatgccttctgagcctcaatcaggggattttattgtgtatcttccccctattagttgcttaaaaatcgcattacataatgccatgttaacaacaaaaactaaaaaggcagatctggcaagaaaaatgaatctaaatagcgcccaaattgagcgtttactcgatatcaatcaaacttcaaaaatcgatagcctagagcaagcgctttacctattgggttatcacattgctatatctgtgcataaacagcgctag

SEQ ID NO: 296547 - DNA, 333 bp, Proteus mirabilis
atgggtattcgcctgttgtattggcggttatatgccgtagtacacgttttaattggggtcttttctatgttttttcaagataaaaataatattttgggtatacctaaattgccaccaagagccatgatttttctggttccgtttttcctatcttttgtgatgtgtggcattgtttcttttattagtacagcaaaaacaatgggcttaaatagccttatgtttgcaccttggttctcttcatggggggtatcttggatgattgcgtttccaaccgttttattcgttttaccctttgcaagaaagctatcactcttattagtaaaaccacattaa

SEQ ID NO: 296548 - DNA, 1092 bp, Proteus mirabilis
atgagtttgttatttacgcctaataaattaggacctcatcaattagacaaccgtattattgttgcaccaatgtgccaatattctgcgcaagatggaatacccacatcttggcatacaatgcactatgggcaattagcattatcaggtgccgctttagtgattatagaagcgacggcggtagagcctcgaggtagaattagctataaagatctcggattatggtctgaggaacatggtcgcgcattaaaacagcttattagcgatataaaacagcatactaatgctaaaataggtatacagttggctcatgcggggcgaaaagcatcaacatcgttgccatgggaaggtggaaaatcattggctcctgatgatgagaatggctggcaaaaagtagcaccttctagtattgcttttggtcaatatcatcagcctcaagcattaacaattgatgagattgaaaagataaaaaacgcatttgttgaagcagctaaaagagctgagtcagcaggtattgatgttattgagatacatggtgctcatggttatttactgcatgaattcttatcaccattatcaaaccatcgcaccgatcagtatggcggtgattttaataatcgtagtcgcttgttaattgatgtttttactgcagtcaaaaaagcagtctctgacaaaatgtgtgtgggagtaagaatatcggcgactgattgggttgagggaggatgggatctggaaagttctatcgcattaactcaacatcttgaagatctcggttgccattatattcatgtttcttccggtggcttatcagacaaacaagccatcaagctaggacctaattatcaggttccttttgctcaagccatctataatgaaacacaattacccgtgattacggttgggttaattacagagccagagcaagcagaagctattttactgactgaacaagctgattttatcgcattaggcagaggaatactttatgatcctcgttggccttggcatgcggctgaaaagttaaagcagaccattaaagttgctccgcaatatttacgttgtgcacctcatggtagtaaagaattttttaaatag

SEQ ID NO: 296549 - DNA, 1647 bp, Proteus mirabilis
atgaatatagcgatgacagaaagatataaatggttattgtttttcctatttatcttattaacttattttattcctttagaaacgcgactgttatggcaaccagatgaaattcgttatgctgaaattagccgtgaaatgttagtttctggcaattggtcagtgccttatcttcttgatattcgttattttgaaaaacctgttttaggatattggatcaattgtattgctcagtggctatttggtgaaagccattttgcggtgcgtattgttgtagtaacatcaaccttattaacaggatggcttatttataaagcggcaatggtagtttggcgcaatagcgctcttgcttttaatgctatgaccgtttttttatcttcttttctggtattagcaataggtacttataatatattagatcctattgtgacgctgtttgtgaccgctgcaatgtactcatttttagttgcgttatcgaccccgaataaaaaaggcaaaataattgcttatatgggtattggctttttttgcgcacttggttttttaacaaaaggctttattgcggttgttttacctgcattagtttttttagtcatggcaattagtcaagctcgctttaaagaagtggtttgctattcctctattgcactgttagctctcgctattaccgctggaccttgggtgattactgttgcattacaagcaccggattattggaattattttttctgggttgaacatgtacagcgttttattgctaaagagtctgctcgctcacaaccaacgtggttctatatcccgatagttatattgggtgtattgccttggctaggttttttatttggtgcattaaaatcagctttctctttaaaaaaaggtacactctattttctgctgtggtttgctctcttttttgcttttttctcagcctcaaaaggaaaactattaacctatatgctaccgtgctttgtgccattatctattttaattgcacactatatcgaagagttaaaagataaacctgatgagaaaattagcaaactgaatgcatctatcaatattgcttttgggctaatgggtatatcagccgttatctattctttatacagtgccaaatttgcgctttatgatacgaatgaaacgttaaaaatagtgttagcaataagtgggtttttattttggagtgtgattggtgcgggggcgctgtttagacaaacacagtttttaacgatgttttgctctatcggactaagtttagttattggatatgcaatcccagaaaagatagaaagtagaagtacaccggaaaatattatccaacgttattatgagcctttgagtaataaatcgtatcttttaacggacgaagttggtattggtacatcacttgcttggggactaaaacgtactgatattcgtttaacagagacgaaaggtgagttggcttatggtttaaattacccagatgtaaaaaataaatactatagccttgaacagctattagcattaattgaagcaaaccaatataaaggggtagcgattgttttagtcagacctgatagaaagcagattttgactaaattgactacattaaaggaaaagccgatagtagaaaaagagggcgatttaacgctggtgttctttaattag

SEQ ID NO: 296550 - DNA, 738 bp, Proteus mirabilis
  misc_feature (44)..(53): n is a, c, g, or t
atgaaaagaatagtgttggtatcaagctatttgaaacagaaacnnnnnnnnnnactacttaatattccttcacccattaaatacttgcatgaaaaattgcctaataaagcaaaattaggtctttattttaatccttatggcaaggtgctagatctgattgatgactgtatcgcttgtggggttgataaactcattgcttcttatgggggattaatatggcaagaagagcaataccaaaaactccaagattatgtccgtgctgaattaaacgatgttgttgtcgaaattgctaaacaagttgagtctattttaactcaagtatttgcgattaataaacgcttaaaagggcgggttgatattagtgtcgcttttgcattatctgatattaaagcacaacttaatcaattagttttccccggatttgtcacatcccatggctggaaacgtcttgcggatattcctcgctatctcagtgccattgaaaaacgtatggagaaattagcgattgaccctaaccgtgatagagcacaaatgagccgagttgaaaatgtcattttgcagtggcaacagtggttagctaagttaaccgagaagcaaaaacagcaagaagaggtacaaaatattcgttggatgatagaggaattaagagtgagtttatttgctcaacagataggaacaccttatcccatctctgataaacgcatcttacaagctattgagtctatctcattaagttaa

SEQ ID NO: 296551 - DNA, 558 bp, Proteus mirabilis
gtgatatttgccgaaactcccgccaatccaactaattcactggttgatattcaagcgttaaaaatcgttgcggataaattagaaacaagccaaggctatcgacctattattatttgcgataacaccttattaggacctgtttatcaacatcctatagagcaaggcgctgatatttcactctattcattaacaaaatatgtgggtggacattctgatttagtcgccggtgctgcaatgggatcacgcgagcttattaatcaagttcgcctattaagaggtgcaatagggacacaacttgatgcgcattcttgctggatgttaggccgctctttagaaacattgcaaattcgcatggaaaaagccaatcaaaatgcgctattagttgcacaatttctacgtgaccatgaaaaagtgaaagtgatccactatttaccttttgtagatgaaaatagtattgaaggtcaagtatttgctagacaatgcacaggcgcaggatcaacattctcctttgatattgttggcgatatccagataaggaacaatcagtctcgcgcttaa

SEQ ID NO: 296552 - DNA, 546 bp, Proteus mirabilis
atgaaaaaattacaaacagaacgattattattacgtccatggcgaatatcagatgcagagagcctctattattatgcgagggataagcgagtaggccctatcgctggctggccagcacataaaagtgttgctgaaagtaccgaaattatccagactatatttatgcgtgatgaagtttatgctgtcacattgctcgatgatgataaagcgattggtttaattggcttatctttttgccatgagagcaatttccctataggggataatgatgccgaaatttcttattggattggtactcctttttgggggaaaggacttattcctgaagcagtgaaagcgcttatttgtcatagctttgagactctacaattagataatctatggtgtggttattttgcagacaatgtaaactcgaagcgagtacaagaaaagtgtggatttaaatatcatcacataattaaagatcagtatgtggagtatttagacgaaataagaacagaagttatttgtcgtttaaccaaaagtgaatggcaaaaacaacaataa

SEQ ID NO: 296553 - DNA, 576 bp, Proteus mirabilis
gtgcgattagataatgcggatatctttcagtggagtaaagaagaaattggtccacatattggttatttacctcaagaaatcgcccttttccccggcactatcgctgaaaatattgcacactttactgaggttgatcctcaaaaagtgatccaagccgccaaaatggcacatgtacacgagatgattttacgttttcctcaaggatatgaaacccaaattggtgctcacggtgaaggattatccggcggacaaaaacaacgtattgcattagccagagcattatatggcgatcccacattagttgtcttagatgagccaaattctaatttagatgatttaggtattagagcattaacacaggcgatcgaaacattaaaacaacataaaaaaaccgttattttaattacccaccaaaaacagctactttccgtcaccaataaattattagtgatatttgatggaaacaccaaattattcggtccaacggcttctgttattgctgaattaaataatccaactatcacaaaaacggcaaacactatttcttcaacaccagcaacctcaaataacgcttaa

SEQ ID NO: 296554 - DNA, 669 bp, Proteus mirabilis
atgataagagaattagctgaaaataataatcaacttaacgagacttttgggcaaataagcgcattagaaaagcaaaaattagaatatgagcaaagaatattgcaacgtaatgctaattactaccaattagctagaactgagctaaataaaatacaattacaaatcagtgaaacagaaaaacaacttattatagaaacagataaattagctaaaatggcaattatcgcaccgatatcgggtactgtgatggatctttctgtttttacccaaggtggctttgtaaaaacaggtcagacattgatggatatagtgcctgaagatcatcaacttgttattgaagcgcgtcttgctccgcatcttattgataaggtaactcctggccttcccgttgatttgatctttagtgcctttaatcaaaataccacgccaaaaattcctggtgaagtaacgattatttctgccgatagattaattgatgaacgaacaactgagccatattatcaagttcttattaacataaaagattatacattattagcagataataaaaataaattgaaagcaggtatgcccgttgatgtatttattaaaactggcgatcgctcattattaaattatcttttcaaaccagtattggataggctccatacttcattaacggaagaataa

SEQ ID NO: 296555 - DNA, 1020 bp, Proteus mirabilis
  misc_feature (986)..(995): n is a, c, g, or t
atgtttttatttaaaaaagctgttatcgctttgtcaattaatatcgcattagtttcttcggctctggcctgcacaacgttattagcagggagtgaagcaactaatgacggctctttgattgtagctcgtagcgcagatagtgatgctttaaaagcacaacattttgttattcatccagctaaaagtaatcagactggcatttatagcactcaagcccatcatggcgctaataactttacttatccactacctaaacactcattacgttataccactgtacctaattggaaaactcaattgcatggtgcaacgggttttaatgagctaggagttggggtgagtggtacagaatccatttttgcctcacctaaagcattggcgttcgatccttatgttgaagatacggggatcactgaagatgatattccagatattttactctcaagggcaaaaactgcccgtgaagcaattgaattactgggaaacatcatcgaaacacaaggtgcgggagaaggatttggggttgccgtcgttgataaaaatgaggtgtggtacctagaaacaggtacaggtcatcaatggatggcgcaaaaactaccaaaagataaatattttgcaacgggtaatcaagggcgtttacaggcttaccatacagatagtaatgataatttaggttctaaaaacttagttgagtttgcaatagaaaaaggactttatgatcctgccactgatggtgaatttaatttttctaaagcctatacgcgtgatgatgaacgtgatctcacttataattacccgagggtttgggttatccagcaacaatttaacccttctctgaaacagaatgtggcagatggtcgtcaatttgcgcctatgctgacaccggagaaaaaagtatcagtagaagacgccaaagcgatgttacgcaaccattttgacggtacagaacatgatccttataccaatggattgaatggcaatgaacnnnnnnnnnncaataagtgtgtttcgtacttatga

SEQ ID NO: 296556 - DNA, 477 bp, Proteus mirabilis
atggctcatcaatacaataaaaatatttcagcatggaattatgataagaaaaaatttagaaaagaattctggaagaagtttttaaaagaaatacataccatccctacagaaatgtatgccacacatcgtgcttctgcaggctcgctagatgatacgacttatatttatacaacagcagtaagtaaagaacaattaacaagctctgctaatatttccactatgtctaaagtagaattacccaatgggaaatatttagttattactttcgagatggataatattttagattccctcaccgggtatgatgatattatttatactgtatataccaaagtattgccaaagatgaatttgctacgtcgagctggtcctgatattgagcgttataccttaaaacaatcggttagctatgataagttaatcggccatagtgagcagcatctacaagaaattagttactatattcctgttctttag

SEQ ID NO: 296557 - DNA, 159 bp, Proteus mirabilis
atgaaaaaacgaacaaacagtatttatactactgggtttaagcaagaagcggtcgcattagtcagcgaacaaggttatagcgtcccaaaagcggtagcttctttagggatcaccgataaattactttatagctggaaagcaaaattagacgctgagtaa

SEQ ID NO: 296558 - DNA, 165 bp, Proteus mirabilis
atgctacgccacatgggttggacagaagccgctgatttaatcattaaaggtatggaaggcgcgatcgaagcgaagaccgttacttatgatttcgaacgtctaatggacggcgctaaactgctgaaatgtagcgagtttggtgacgcaattatcaaacatatgtaa

SEQ ID NO: 296559 - DNA, 993 bp, Proteus mirabilis
atgtcacttcgtagtagtggtaatagatatggagcggctgtaggtgttaataacattgtagattattgtagtaaaaatagtgcacaatggcagagttttttattcccattcccaggaagtcaagagggggagtacggattaaaattatataataaaaacgtaagtgaagcggaaaatagggaaaattatttagttgcagctatcaatggaatagtatctatcgatgctgtgtattatcagaatggaacatattctccgactcgaattactctgcgccgaggaaaagaaatttctagaacagaggaatattccaatcaatttgtctatcgtcacccaatgtgctggtatggttatttatctcgtgtaaacaatactagcttgaaaataagctcttattctatttatgcagtaggccatgttaaacctggtatttacgattttgtagctccgatatattttactgcagctcaaacagcaactgatgctcctccagatctatcttcagttcctttttcatttggtaatggtcctattcacgtcttaaaaacatgtaatgttgctcctgctagctcaacaaacatacaatttgctactcaactagcacaaaattttaagtcagccaagttacttgagcaaaatgtcgctagtatgcttgtctcttgtcctcattcaggaaatatatacgtgacattaaagccctataatgagctagtcaatgggagtaaaactgggatgacaatgtctcccaatatccctttgaaagataaagaagtcgcaccttatatcactgtatctgatgcagctaaaaaaataactaatgcagtatgtaataacaattcttccgaagccttagagttttatgcaggacaatctttggggaaatataatgggggaactgtttataagtcattatcattcaacctctgtgccaatgggaatatacctacaaatacttataaaggaagtattgatgtatcgttcctgattgaatga

SEQ ID NO: 296560 - DNA, 813 bp, Proteus mirabilis
atgaaaaaaataaacatttttacgggtactctatttgttttatctagcataagtatggcacaagcagaaatccattctaatcaaagtggccctttaaccaccatgagtgtgggggcgagtgatcccgtgactcgaggccctcatcaatcagcaggtggggagccgggtgtcggtatttctaatctatatggagggaaaaaaattggttttgcgtcattaacaccaaataatatgagtggtggggcggatagccatggtgtttatacaatacaacccaatgaaaatacaccagctagccatagtaatatgggggtatttcatttttcacaggtgactgatgccaatgtctattttggtacttgggcaaaaacagcctctgttacagatatcactcatcagtcttattatgtaggtaaagaggttactagtacgctaccgacagacagtgcaacttataccgtaacaggtatcagtcaatatagtggtgataatttactgtctggtacttttgatgttgatttttcacaaaagacaattggtggctcactggctaataacctacgtactgtcgagttagaacgtggcaatatttataccgcaaataaccaagtaactttctctgcagatgcaaaagaagataccacatccggtattgttgaaggggcgttctttggtgaaaatgctgaaacattggcaggtattgtcgtcttccacaccgatcatactaaagatattggttttgggggaagcaaaaatagtgctgaagtagatactgcaacagatagcgtaacagatagtgcagaagcctcttaa

SEQ ID NO: 296561 - DNA, 780 bp, Proteus mirabilis
atgcataatcagatattaaaaaaactgccacaaatagagcaaatgcatcaaataaaactactttatgttgctgaaagtggaagccgtgcttggggcttcgcatcaacggatagtgactatgatgtacgaggtatttttatacggcctcgcaatgcatatctttcaattgataaacctaaagaaacatttgagtggatagaaaataattggtttgatgtaggagcttgggatattacgaaagcattgcatctattacgtaagtcaaatgctatcttatttgagtggttacaatcacctattgtttatcaacaatatgctggtatccaaaaagaattatttgagttggcacaattatattatcaaccccaaatcattgttcatcattatagagggatcgcaaaagccgttagtagacatcattttgaagagagtcattcaagtaaagcgatagatgagcccataaaattaaaaaaatatttctatctcttacgttcacttttagctgcttattggacagtaaaaacggggaatatcccaccgatggagcttaatcagctaataaatatattaaccacagatgagcaaataattattcgagagttagtgagctttaaagcagataaagatgaacactttacttggctaccaaccgataatatgcaaaaactgatcacttttttatggcaagaaacagcaactcaattagcgaaacgcaccgtaccagatagtgaaatattaaataattggtttaggaaaatacttgatgaaactgaccattga

SEQ ID NO: 296562 - DNA, 258 bp, Proteus mirabilis
atgatgcacacttttaggttgctttatattgcattaggaattgccactgaaaaaaaagtcaaagtttggtgtgataacagggatgaattgttagaaattaaatctggggctttaagttatgaaacattatttgagcgaagcaaaatattaatagaaaaaattgagcaagcttttcaacaaagtcaattaccagaaaaaatcaatcctcaattaattaaacaagtattagtgaatattcgtaaagaattatatcaataa

SEQ ID NO: 296563 - DNA, 888 bp, Proteus mirabilis
atgcaaaatcaagtcgcacaatcaatgaaaaacagtatcaaggtatacttggtaaactcatttactcgtgatcattgcggtggcaaccctgccggagtcgttctcaatcctcccaagctaacgacagaacaaaaaatcgccattgctcaacaagttggattttctgaaacggcatttgtctattcgggtgatgacactgattttaaagtagatttttttactgctgaaggagaagttgatttttgtgggcatgcaacattagcggtttttttcactctgtcatcgcttaagttactcaaacctggcgattatagccaaaaaaccaaggcaggaattttaaccgttaccattaatcacgataatattgtgatggaacaaacgcttcctattacccgtaaggggccttgtgttaacgatgtcgcaaaggcgctgggcattctacctgaagtgatagaaaagacagatttaccaatagagattgtctcaacaggattaaacgatatttttgttcccgtacaatttggctatttagatgctttacagcctgactatcaagctatcactgctttaagccataaatttgatactatcggctttcatgtctttgaacttagtcatgatcaaaatattactgcccactgccgaaactttgcaccacgctatggcattaacgaagaatcagccacaggtagctcaagcggtgctttagggtgttatcttgttcatcaccttttgccaaacaaaaggcaatttttgttcgaacaaggtagagcaatgcaatgctcttctttaattgacgtatttattgattcgacagcaaaaaacgtcactcgcgttcaagttggtggaaaagcgacattgattggtacaaaaataattgagatctaa

SEQ ID NO: 296564 - DNA, 813 bp, Proteus mirabilis
gtgaatatcgtttctgcggacttctttaatattggatttactgaatatgcatcaattatggtgccagtcgatattgcgggaattgttgcaacgcttgtgatgctacattggtttttccgtaaagatattcctaaccaatatgatgttaaaaagctgagtgagccagctttagctattaaggatatgactacgtttaaagcaggttggcttgtattgttgttattgctcattggtttttttattttagagccattaggcattcctgttagtgcaatagcggcaattggcgctttaattctttgggtaattgcagccaaaggccgtacgattaatactaaaaaagtgttgcgtggcgcaccgtggcaaatcgtcattttctctttaggtatgtacttggttgtttatggtttaagaaatgcaggattaactaattatctttctgaaatacttaattaccttgctgataaagggttatggatagcaacaattggtacgggatttattaccgcctttttatcatcaataatgaataatatgccaacggtattaattggtgctctatccattgaaggaagtgacgcgacaggggtaattcaacaagcgatgatttatgccaatgtgattggtgctgatttggggccaaaaattacaccaataggtagcttggcaacattattgtggctacatgttttatcacaaaaaaatatgacgatcacatggggatattatttcaaaacagggatcatcatgactatccctgtgctcattgttacactcgttgctttagtgcttcggctttcactgtttaattaa

SEQ ID NO: 296565 - DNA, 258 bp, Proteus mirabilis
atgtttacttcacagctcatgctggtcggttatgttttattagtcagtccatgcgggcatgattcttgtgatgcggttccagtaacagaaaccatttataccaaggatgaatgtactattcgcttaaactatctcaaaaagaaaagacccgatctctatattttttgtggtgaagtattacgtgatcccgaagtgaccgatgaaaatccatacctaacaccgccaaatagcgccgatgatgtctttcaattaaaataa

SEQ ID NO: 296566 - DNA, 642 bp, Proteus mirabilis
  misc_feature (41)..(50): n is a, c, g, or t
ttgctaccttggcgggtacaacgcaacaatcaattgaacannnnnnnnnngcttgagagtggcaaaaccaaacgccctcgttttttacctgaattagcaaaagcgttaaattgtgaattatcgtggttgctcgaaggggataataaacaaacacacgcttctgaaattcctccccaagatgaatggcattcagtcagtgaatgggataacgatacccctctcaatgctgatgaagtcgagatccgttattttaaaagtattgaacttgccgctggtgatggttgctgtactaacgaagatcataatggttataaattgagattctccaaaagcacactacgccgctatggcgcttcaccacaaaatgtgatctgtttttccgtctatggtgatagtatgtctccagttattccaaatggttcaacagtgaccgttgatacaggtaatacgcggattgtggatggcggtatttatgctatcgaacaagactcattatttagaataaaattactctaccgtcagccaggcggaaaattaattattcgtagctacaataaagatgaatttcctgatgaatttgcagaaattgactccgttaaaattatgggacgcgttattcactggtctgtgatggcttggtga

SEQ ID NO: 296567 - DNA, 294 bp, Proteus mirabilis
atgggaattgctcatttagcaacacgttatccatctcaaatatcagggggagagcagcaacgagttgcattagcaagagcactcattagccaacccaaactgttattaatggatgaacccttttcaagtttggattgggaaacacgttatcagctgtgggagcttattatctcattaaaaaaacagcagataacgatgataatagtcactcatgagcctcgtgaattgcaagcattagcagataaaacgctgttattatctaatgggaaaattgtgcaagaaagtaaaaactaa

SEQ ID NO: 296568 - DNA, 1011 bp, Proteus mirabilis
  misc_feature (261)..(270): n is a, c, g, or t
gtgaaagcggttgaatatttcttaaaagaaaaagtggcagctatccctgcactacagcaagtttctgagtttatccacttcgcttgtacttctgaagatattaataatttatcccatgccatcatgttagaaacagcacgccaagaagtgctactaccagcatggcgcgagcttattgatactatcagtaaaatggcgcaagcatatcgtgatttacccctgctctctcgtactcacggacaaccggcaacaccttcaacnnnnnnnnnngtaggtaactataatgctcacctagctgcctatcctgaagttgattggcaccaatttagtgaagaatttgttacttcattggggatcacatggaacccatatactactcaaattgagccacacgactatattgccgagctttttgattgcatcagccgctttaatacaattttaattgattttgaccgtgatatttggggttatatcgctcttaatcacttcaaacagaagaccattgccggtgagattggctcatcaacaatgcctcataaagtgaatcctatcgattttgaaaactctgaaggtaatttaggtttagctaatgccgttatggggcatctttccagcaaattaccagtttcgcgttggcaacgtgatttaactgactcaaccgtactacgtaacctaggtgtcggtatcggttatgcattaatcgcttaccaatcaaccatgaaaggcttaaataaattagaagttaatgaaagtcatcttcgtgaagagttagatagcaactgggaagttcttgctgaaccaatccaaacggttatgcgtcgctatggtattgaaaagccttatgaaaaacttaaagagttaactcgtggtaaacggatcacggcacaagatatggttgtgtttattgacggtttagcgctaccagaacaagaaaaagcacgcttaaaagcgatgacacctgaaagctatattggttttgccagtcaacttgttgataaattagattaa

SEQ ID NO: 296569 - DNA, 675 bp, Proteus mirabilis
atgcggatcttaattattgaagataatatcttacttcgccatcatttatctgtgcagtttcgcgatgcaggacatcaagttgatgcagcacaagatgcgaaagaagccgatcactttatcgcagaaagtacacctgatgtcgccattgttgatttaggtcttcctgatgaagatggtatcagccttattcgtcgatggcgggaaaataatattactattcccattatggtattaacggctcgagaaagctggcaggaaaaagtgaccgcattaaatgccggtgctgatgattatgtgacaaagccttttcattttgaagagatcgtggcacgcgttcaggcattaatgcgaagaaacatgggcattgcctcacaaatactgactattgccccttttgagttggatttatcacgtaaagagttcatgatcttaggtgagcaaatcaagctcactgcattcgaatatactattttagaaacattaatgcgtaatcaaaacaaagtggtgagcaaagatgtgctaatgcgccaactttatcctgatgcagagcagcgagaaagtcataccattgatgtgcttatggggcgtctgcgcaaaaaaattctccaaaaatatgataatgatgtcattgtaactgtacgtggacaaggttatcgttttgatatgaaagcttaa

SEQ ID NO: 296570 - DNA, 1707 bp, Proteus mirabilis
atgtggtgcattccatcgctattaaaacaaaaaaaatcattatatttaatttttattttatcttgttttattcaattatttgctttagttaatccaattattttggaaaaaattattgataaggtattaacaggaagaagcctctctaatttgcaagttttaggggtactcctcgtgctgcttgctattatagagcctatctatcttttattacgagataaactttatgcttttgtttcttgtaccctaggtgccgaattctcagggaaaatttatcaacacctcattcggctacccagtcagttttttaatcaacgtcaatctggccaaattattgctcgtattcaagagcttgctcatattcgccagtttattactggctctgcgttgatgatggtactggattttatttttattatcgtatttctttcagtaatgtttgcttattccgtattattaacttggataaccatagcagcattagtcgtttactttttattttggctgatacttggccccatgatccgttattgggttgaacaagagtatcaagcaaatgctgataatacgagcttattaacagaagctattaatggtatagaaaccataaaaataacagcaacagaacatcaatttattgaaaagtggcaatataaactcactaattatatccttaagcgtttttcagcggccaaaaaagcgttacttgctcagcaattaattggggctattcataaaattactatggcaattatcttgtggcatggtgttaatctgattatgaaagcgcaattaagtgtgggcgaattagtggcttttaatatgtttgccacccatattacacaacctattttacgtttagcccaactttggcaagatgttcaacaaacaggcatctctatacgtcgtattggcgagatcgttaatactcccacagagcatcaacatcaaggacttgctactgtacctaatattgcaggaagtatagtattttctcatgtacgctttcgttatacagccaatactccagatgtgattgagcaactctctttttcgatccccgcgggcaaatttattggtattacaggaccctcgggttcaggaaaaagtactatcacacgtttaattcaacgtttttatactcctcaacaaggccagatctatattgatggtatggatctcgccattgccaatccccttactttacgccaatcaattagtgttgttttacaagataattttttatttagtggtactattatggaaaatattcggttatcaaaacccgattgtagtgaagaagatattattgaagcgagtaaattagccggcgcttttcattttattactcaactccctgagggatttaatacacaagtgggtgaaagaggtagtaatttgtcaggaggacagcgtcagcgtattgcgctagcaagagcacttttacctgatccacgaattcttattttagatgaggcaacatcggcgttagattatgcctcagaagcggaaattttagccaatcttccagctatttgtaaaaatagaacggtaatttgtattgctcaccgacttaatgctatttctatttcagattatatttatgttattgataaaggtcgtatattagaagaaggtacacatagcgatttattaaataagaaaacactttatcagcaattgtggcaacaacagacacagaaataa

SEQ ID NO: 296571 - DNA, 549 bp, Proteus mirabilis
atggaacgtctattttttattgcatggaataacaataattttaaagttgctgtcgccttagaaaaaaatattatcaataatgcttatggttatgatgataaaaaaacgggtgaatttagagatcaatccaaacgcaacggttatggattaactttaggctggagtaatctacaacaaaatcctgaaaatggtgtcacaataaattggaataccgcttatttagacgctaacgatgagaacgactttacaacaggtactaatattttatggcgtaaattacaattaggctatatctatgcccataataatattaagtcatatactattaatagtgatgatgataacaataatgatgttatatttggcccaggaaaatataatatccacactctctattcctcatatgaattatctaatattttagatatggataattttaaaatctatttaggtgcatattattctgttattaatggtaaagatattgaaatagaaaatagcgataaagatcgttatggtgtaagagcacgttttaaatacttcttctag

SEQ ID NO: 296572 - DNA, 816 bp, Proteus mirabilis
  misc_feature (30)..(39): n is a, c, g, or t
atgaacatcaaacaccttgcgatagcgacnnnnnnnnnnacttgtatcggcattgccgtgccgacaattgctcacgccaatacaaatgaattatcgatagaacaacgtttagctcgactagaagagagaacgttagccgctgaaaaaagagctgagttagcagagcaacgtgccgctaagttagaaaatgcgttaaaacaaaatcaggcgcttaataacaatctatcacaaactagcgaaactataactgcgccaccatcatcgctgatagaaacaaataccggttatggaaaactcaagttatatggtgatgttgaatttaatacagatattgcaagtaaaaaaggtcagctaacctccattaacatgcgctcaggtaaagaaaaagactatggcgattatgataaatgggggatcaatgggcgtatattaattggcttagacggagagcgtctgttagataataaaaattatgcaggcttcactgttcaaccactggcaaatattgatggtaaggtatctctcgacgatgccgctttttattttggtaaaaaagagcgttggcaatttaagttaggtcgttatgaagcttatgacatgttcccgcttaatcaagatacttttgttgaatattcaggcaacactgcaaatgatacttatagtgatggttttggttatatctacatgatgaaagaaggtcgagggagaagcaatagcggtggtagcatgatgtttaatagccaatataataattggtattttgaaactaatttattaattgaagatggaacgtctattttttattgcatggaataa

SEQ ID NO: 296573 - DNA, 1257 bp, Proteus mirabilis
atgaaaaaaaacgctctatttactgtctcactgttatctgtatttatttcattatcttgctatgctcatcaagatgttattttacattctgattcattatcagatgcaaaagtatctattaatgatgacacagggaaaacacaaattgaagtgataaatactaatcaagatggtaccgcccatatctattataatcgtcttgatgttggtaatttgggtttatcattaaaaaataatgctgaagcagaattaattattaatgaggttgtttctaaagatttttcaattctgagaggtgagcttgagttacaaggaaaaaaggcgacagtggttatagctaatcctaatggaatttcttgtcgtgattgttctttctctggaattaatgatattaaactaattgcaggtagcagtacagggaaattttctaagacattcactatagcagatataggttctagagttgtttttgatatgagaaataaattagataaaaatgaacatagtcatattaatcgcaattataaagatatttcatctggaatgataaatattatctctaataatgtagacttgattgacggtgatttaaatgctgaatatattcgttttgatatagggttaagtgagtttaatcttggagctaaaaatgattataataaatacagccattttttgttaaggacagaggcaggaataaatagtcgatatttaataataaaagcaaaacagggtaacgtttataatgatggtaatataaatactttgtcactaaatcatgagtcttatagcttaattaatgcaggaaacatagatataaatcaagatgataatttatatagaacagcttatgatgggacgaaacaatcaaaagtaatggtttatcaatattcttctgttcttaataattcatcatttaatgttaaagatagtattctatttatgaaagcggataggttgcttttagatagaatatttaatattgatgatagttatttatatggaagagtaggaaccatagtaataggtaatatatcattgtcgtataatagtgtttttcatatcctcgctgaggatagtatatttcttggtggtaaaatccagggggatggtcgtattatattacaattaaatgatgataaagttgatattgaaggtaaaaacttgttaataggaacagagggattaagattagaggggggaacaaaatataaattaggtagatcaactattatagattatactgaatacaaataa

SEQ ID NO: 296574 - DNA, 474 bp, Proteus mirabilis
atggcacatgttattatagctaatccaaatggtattgaatgttatcaatgctctgcatctgatgtcactggttttacattaatcagtggatataccaaaaatcagggtagcgacttttttttatctaatagaaattatgtttatattaatgacgtaagaattttctctagagtagcaaaaaatataaatatcatttctaacgaagtctatttagagggtgggatatatgggaatgttaatgatttaaatataacaagtggattagtaacttataatccgcagttagagaataaagtaaactcatatgggcggatttctttttttgatggttttgacgcttatttaaataaaattaatattaagcatggatatggtgagatttattttgataaagaagcttatagaataatagaaagaaaattaaatattaatagcttgtttggtaatagggctgtttctatatcttactattaa

SEQ ID NO: 296575 - DNA, 393 bp, Proteus mirabilis
atgattaattatccagatttaaataaagataatattcgctatcaatcagcttttggaaaaaaattagtaataagcttttgtgcatcttggtgtaataattgtgaatcatggaaagatacttttacgctactctctgaaaagtttattgatgactgttttatttggattgatattgatgaatatccagagttagtcagtgagattgaccttgatataatccctgttcttcttatacaaaaaaaagaggatatccatttcttgggccccattaggccaggattggaaacaattgtgagtattctaaattcagataaagtaatgaaagttgaatttgatcccggaattagagattatttaattgcccccgacctccctaaaaggacgatatattaa

SEQ ID NO: 296576 - DNA, 1272 bp, Proteus mirabilis
atgtcaacaattatgtttccaaccccacccccgataattagacagcatctgaacaatgcaatcttttattataagactttgtatgaaagtcgttattcgtcattaattaatgtggataaatttaattattttaatgcattattaaatgctaatgttgatggcttatgttgtgcaaaagaaaaaggtttagatgaagctcgaatcgcactattacgttggaaaggacatgaggaagcttttatctatactttactttttaatgagttagatagtgaaaaagagtttgatagtttttggttgatgataaaagaactaggatttaatgctgttattggttcgttggaggcactgctccgtgttgagataaacgctagaactgcacaattagcgctactgaaggaacgagagcctgacatattcattgtcgctttattaaaaataaaagcacattatcaggagctaatccatcatgataaattattatattatttaaatcttccttcaaaagaaattaaaatcgcattatgttattatgtaaaaaaaatgaagctaataagcttttccgaaaatattagaatgttagtaaatagctcgacagatatcgctgtaaaatatgctgccatagatgcgatgtgttggctttcaaatgataatgaatataattatatagcgttatctcaacttttaccattatatttggaagagaatgcacctaaaggaaatcaaagcttaattcattctaaaaatatagaaagcttagtccgtttaatgggatgtatatcgtccactaataataaattaatagcacctccgagtttgtatcctgaatatttgaatattatttattatactcattcatgtcatgcagaatatcttcctgatcttatcaattatctagataaccccgaattatcgaggctggcttataagggaatttgtattcttacaggtattgatgtcaattcgcctgaattaacatactcttctcctgaaaaagttgaattagctgtggatagtcgagttcgtttcctttcttcaggtgttaataatattaatattaaaaaggttaaaaaaaccataaagttattgaacttaaaagaaaaaattattcttggtaaaccagtatctattcaacattgtgaaaagattattaaaaagggttatcagcttgaaaggcatatagcaaattggcatttatgtcatatgaataaagaaaataaatataatgatttttgtttttttaatcgaattaaaaataaggagttgatatga

SEQ ID NO: 296577 - DNA, 1383 bp, Proteus mirabilis
gtgaccgcaggacacaatgttaatattggtaacttagtgcttaatcaaggagccgatattgatgtgggggcggataatgttgggcaactaaaagatatttatcttaataatagtgttgttgtcggtgaggtgaatacagatagtttagttgataatcgcactaaaacgaaaatgttagccagtaaccgtgtggttgcagatccagccacaaccactactgtcaccaataatgattatgctttatttgataaacatatcacgataacagataaaaccatcagtggtagtttaactaagaaagaaaatacgactttagccacctttgctgataatgaaaatggtcgtgctattgctaatgcattagataatacagggaatggtgagctatttaatgctgtattaccgatgaatgaaaatgatctgaaaaccacttatcaatcattgggtagtgatatgtatttaaatgccaataatgccagtattgttaatgtattgggtttaactcgtacagtgaaagatcaggctattggtatcggtgatggtcgccatgcacaactaggtaatagtaatgcgcgtatttggatcagcggcatgggtcagtggggtaagacggattatggccacagtgatatggatgttgatttctatgttgggttattaggtgctgaaattgatgttactgaaaatactaaagcgggtctatttttcggtgcaggctccaccaaatataaaggtaatcaatatggaaagatagatagtaatgatattcatattggtgcttatgggatctctaatctttatgatgttgcctcattaaattatggatttacacatacaaaccaagatagagatgcaaaaagaacactctggataggacaaactgcaggttataactcaactagttacgatgcgaaaattagtcaattctttttagaaggtgcttatactcaattgaatactagccagtactcaattgaaccttatgctggatttagttggttaagagtatccactgataatatcaatgaaaatgtgggtaatatgaagtttaccactaaaacagatgcacaagatattcaagttgctacggttggtttacgtggtggatatccatttatggcaggcaatattaatatggcattaaaaggtgatatatcagcaagccatctgtttggtgataatcgccctgaatcacgtctatggttatccaattcaggtgaggcatcactacgaggtggtaaactagataatttatttggtgttggtctaggtgttgatgcgcagttatgtaaatcaaccactttcggtatctcttatcaaggtcaatataatagtgatatcaattcgagtggtattaatgcaatattgaaaattaatttctaa

SEQ ID NO: 296578 - DNA, 411 bp, Proteus mirabilis
  misc_feature (265)..(274): n is a, c, g, or t
atgaaaccagaaacaagcatcagtattgaatgtgatgctaaaacttatttgacttttatacctactgacacatatggtgatgtggatcttgattataatactagttttgatagtgcttggtttcgcttagttgataaagccaacccagataaagctgttggggcttcattttttaattggaaagatgcaactgttgacggaaaaacggcttttataagccgagcaacacctaaaacagctgaagtagggatatctgtcttagttnnnnnnnnnnccacaaaatttataccaggaatatcatctcatacattcattctttctcgtgataagctagctaaaaaagcgatagatattagtaatggactcgattttattggtgaggccgtattaacattctctttcggtgtttaa

SEQ ID NO: 296579 - DNA, 852 bp, Proteus mirabilis
ttgtccattggtcatcgactgcgtgcttatcgtattgcctcctcattaaaagctgaagatgtagctgaaagtttagggatctcccgtgccgctgtctatcgattagaaaagggtgaaatcgttaaaattgagacattagataatcttgctcgattacttaacacctcattaagtagcttattaggtattaatacggagtattactctagcgctaatggtttttttgaacgaatgcgccaacttgaaacacaatcttcccatatttatacccatttcgaacccttttcttatttattaacctctgattgttatgataaaacgcttgtcgaaatgttaacagaagcctctcctgaaaatgcgctaacaaagaagcaacaagaagttttatctattttaaaagagcgtaaaaagcatcaatcattacactcaccgcatatttataatttaattagtcaacagcaaatcgaaaaatttctttatgttggtatgctaggctctgttaatgtaagtaaagccattcaacaagaaagaaaacaacgcgcaaaacaagaaatcagccatttaattgaaaagttagagcaaaaaaatagtcatcttaatattgcgattatttcagatacgatgccatctttaacctttcaattgttttatcaaaacaaagcacctctctctttagcggttagtccatttcgtttaggtgaatttcctaatgtaagtacgggtattgcgacagtatcttcatcaacagaagcaatattccaatatcaatctctgtttgatacgttatgggcaaaagcaataaaaaatgatgatgccattacacgcttaaaagagattatcagtcattattga

SEQ ID NO: 296580 - DNA, 414 bp, Proteus mirabilis
atgaacgttattccagggcaagtaaaattctccgtggatattcgtggtattgatacggacagtattcaacgtgttgtacagcgtttaacaaacagtgttgagaaagcagaaaaagattttggtgtaaaaataatagtgcaacctatttcggctgaatcaccagtaaaactggatgactcaatttgccaagttattgaaaatatttgtcaaaaacacgatatcaattatatgactatgttaagtggtgccggtcatgactcaatgaatatggcatctttatacccgacagcgatgatttttaccccctctgttgcggggattagtcatcacccagatgaatttacggagtttagtgatattgcaatagctgcagatatcttagcggaaacattaggtgttctagctaatcaataa

SEQ ID NO: 296581 - DNA, 294 bp, Proteus mirabilis
atgtggaaaaatcctgtctggttacatcctgataccgcaaaaagtcatggaattaagcatggtgatgagatcattttagaaaatagcgtaggcaaagagaaagcccatgccttaattaccacaggtattcgtcctgacacagtgtttgtctatatggggtcaggttctaagactggcgaaaaaacgccagcaaccacaaatgggatccactgcagtagtttattacctcatgaaattagccctgtttcaggcactgatgtacatacttcaggcgtcaaaattagtctggcttaa

SEQ ID NO: 296582 - DNA, 579 bp, Proteus mirabilis
atgaatagcaactctaaacaatttgtcatgctacacgatgaaaaacgttgcattggctgccaagcttgtaccgtagcatgtaaagtcatcaatgatattcctgaaggatacagccgactacaagtacaaattcaaggccctcataatgatgaggcaggagatccacattaccaatttttccgagtttcctgtcaacattgtgaagatgcgccttgcgtttctgtctgccctacaggtgcttcatttattgatgaaaatggcattgtacaggttaaaaaagagctctgtattggctgtgattactgtgttggtgcttgtccttatcacgttcgatatatcaatccattaacacacattgccgataaatgtaatttctgtgctgatactcgactaacagaaggtgagttacccgcttgtgtaacggtatgtccaactgatgcattggcatttggtcgcattgactcacccgagatccaagcttggatcaaacagaaatccgtttatcaataccaattagataatgtcggaaaaccaaatttattccgccgtaaagagatccatcagggagataaagcatga

SEQ ID NO: 296583 - DNA, 768 bp, Proteus mirabilis
atgacaagtatctggggagccgaactctattatacgccagattactggcctgtatggttaattgcagcaggtttgatcattgtcgccatgatagccatattggtgctacatggttttttacgttatgcactggcacctaagcaaagtggtcactatgaagaagagcgtgtttacttatactctaaagccattcgtttttggcattggggtaatgccttactgttcattcttctattaatcagtggattgttaggccatttttctatcggtaatgttccatcgatggtactactacataaaatctgtggttttattctcatcgctttttggataggttttgttgtaattaacctaaccacaaataatggtgtacattacaaagtcagaccacaaggattaattggacgctgtatcaagcaagctcgcttttatctttatggtattatgaaaggtgaaccacatccttttgccgcgactgcaacagataaatttaaccctctccaacaacttgcttacttaggtgttatgtttgggttagttccactacttcttatcacaggcgtactatgcttataccctgaagtcttaggttatggctattggatgttaaaagtacactttatattaggcatcgttgcactcatgtttatttgtgcacacttctacttatgtactttaggcgatacctttacacaaacattccacagcatgattgatgggcatcatcgacatcaaaaacatggtgaaagcacaacaacaaaaaattga

SEQ ID NO: 296584 - DNA, 1458 bp, Proteus mirabilis
atgtgggagagattttctttctacggtattcgcccattattaatcctatttatggctgcaaccgtttatgaaggtggtatggatattcctcgagagcaggcatctgctattgtgggaatttttgctggtggtgtttatttaacatcattgccaggaggttggctggctgataattggttgggacaacgtcttgcggtttggtatggctctatctttattgcattagggcacctttctatcgcactttcagcgttttggtctcagaacctattttttatcggcttattgcttatcgtattaggtacaggcctatttaaaacctgtgtcactgttatggtgggaaccctgtataaaaaagatgatacacgccgcgatggtggtttctccttgttttatatggggatcaatatgggctcgtttatcgcaccactgatcaccggtttcttagtccgtgattatggctggcattggggctttggtattggtggtattggtatgctagttgcactactgatcttccgcttttatgccgtaccgacaatgcgtcgctttgataaagaagttggcttagattcaagttgggatcgccctactgttgtgcgtcgtaatgtcggacaatgggtattagcacttgctgtgatattaattgccattgttggtttaattatttcaggcactattccatttaatccggttattgttgccaattttatggtttatgtgatctccggcagtgttatcgcctactttatctatttattcctatttgcaggattaagtagtagtgaccgttctcgcctgtttgtttgcttcctattattagtttcagcggccctgttctggtctgcattcgaacaaaaaccaacctcatttaacttatttgctaacgactatactgatctaaattttatgggctttgagatccctgcggtttggttccagtccgtcaatgcgctatttattattattcttgcccctgtatttagctggttatggccaatgctagcacgcaacaatatgaatttaagtagcatgagcaaatttgtgattggtattttattcgctgcaggtggctttaccgtcatgatgtacgcctctgaaagcgtgcttgcaacaggcagtggtgtttcaccattatggttaatttccagtattttattgctgaccctaggtgaattatgtttaagccctataggacttgcgacgatgactattttagcgccagcaagaatgcgtggacaggttatgggtttatggttctgtgcgagtgcattaggtaacttagccgcaggtttaatgggtggaaatattcgtcctgataaacttgatgttatgcctgatttcttctctcacgtctctatagcattggttatttgtgccgttgttcttgcagcattaattattcctgtgcgtaaactgttacaaagtgcagatgataaagagaatgcgcaagcataa

SEQ ID NO: 296585 - DNA, 1707 bp, Proteus mirabilis
atgaaaaaagaactaaaagctattgaagataaagatagtgagggtttccaaaaaagaattgaggaaataaatcaagatataaaatcaaagagtgagagaagtggccagataataaagaacatacctttatattttttggctacaccaatgacgatatttcctcatcaacaagaagttgtcacagaaattttacaattggcttcagatttcgcagatactagagtacctatacaaaaaaatgccaatttaaagtttggctatttcaatcatttttacaaagattcaactactttttttatgacgagaggaaatggaggctttgctcaatatcctaactataacggtacacctataaaagagatcgggccaaatgaagattatgatatccctggaaccatatttattaatttagctacacatgaattttataaatgggaaaacggggataatattgataaatatatagaaaatgaggccaatcccggtgatttatataattaccatgataataatcaagttgctataataaaaagtacggatgtgttactcaacgaaacaatgaaaagtaaacacaaactaggatcacaaatatattatgtttttttgcatgaattaggtcatgcactagggctagagcacatagatgcatatttgaaaaatataaaaaatagtgcaattgaaacatataaatatacagttatgggcatgggatttgctgatattaaagatgcagattttggtggcctttatcctatgacctttatgctagtagatatattattgttacaatatctctatggcgaaaatatgaccacacgtcttgaaaataatacctatggatttaattccaatacgggacgcgccgcttactctttaaaaagcatagaagataaattagtgagctgtatttgggatgcgggtggaattgatacattagacttttccctatataccgttaatcaagtcattaatctcaatgaaggctgtttttcagatattggaggattacggagtaatatctctattgcctataacactattattgaaaatgcgattggtggtaaaggtgatgatactctcataggaaatccttttgataataacctaatcggtggtgatggcaatgatttattctatggcggtgatggcaatgatttattctatggtggctctggaaacgatgttatatacggagaaatgggaaatgatgtgctctatggtgatgatggagatgatatgcttattgattattatggtgctaatatgttggatggtggtaagggtaatgatcggatctgtgtagcctcaatggatagagggctccctggcagaaatatcattcaagggggagaaggtgatgatgaaatatatttgggcacaggaactcatcgtataacaggtggacaaggaaatgatacctttaattttttctgctatgagggcgttgaaagcaatagttcaatttgggattttgaaaaaaacaaggataaaataacgttgattactagagattatagaaaaatagatatatcaaaaatgaaaaaagttgataagttatcaggaagtaaaaatgaattttcattaaatcataacaaaccagccaacaaaaccatcatagacgtttcaacatcttctaacgatgataagtccattgtacatatagagattgtcggtatatttaaccatgatgaactctttgcagtataa

SEQ ID NO: 296586 - DNA, 1704 bp, Proteus mirabilis
atgtctacacgttatctgtattggcgagcaacccacacacttaattttaatacctctattgaagggatattgggtacaggattatttttggctgagatctactcttggattattttagttttaggttatttccaaacagcttggccattaaatagaaaaatagcgccattaccaaaagatatctcgttatggccaacagtggatatttatgtacccacatataacgaaagtttagatgtggtacgtgatacggttttagctgcacaaggtattgattatccaaaagataaaatgaaagtttatcttttggatgatggtagccgtgaagagtttaagcaattcgccaatgatgttggtgtgacttatattgagcgtgaagagcacgatcacgctaaggcaggtaatctaaatcacgcaatggcattaactgatggtgagcttatttgcgtctttgattgtgaccatatctctacccgtatatttttacaggcaacggtgggttatttccttgaagatccaaaattagctttggtgcaaacaccacactatttctattcacccgatccttttgaacgtaatttaagtgccgccaaaaacggccctcacgaaggtgcacttttttatggccctgttcaacgaggtaatgataattggaatgcaaccttcttctgtggttcatgtgcggtaatgcgtcgtagcgccctagaagaaattggtggtattgcggttgagacagtcacagaagatgcccatacggcattaaaattacaacgtttaggttggaattcggcatttattgatattcctttagctgcaggtctagcaacagagcgtttagcattacatgttaatcaacgtattcgttgggctagaggaatgacacaaatctttcgtgttgataaccctatgttaggccgtggcttaacatttcctcagcggttatgttatctcaatgcgatgatgcattttcagtatgggttgcctcggattatctttttaaccgcacctttactgtttatgttattcaacctcaatattatcgcctcttctgccagtatgatttttgcctttgcattaccacatttaattatgtcggtgtatgtaaactcacgaaatattggtaaatatcgctattctttctggggagaaatctatgaaacagtgatggcatttagtttagtactgcctacattgctcagtttagtctcgcctaaattaggtaaatttaatgtcactgataaaggcgatttgcttgataaaagctatatggattatctaacggtacgccctttgattattactgcactgcttctagttatgggtatttcatgggtcatcattcgttatttattaaatgattttcaaggcatcgaccctttagtcattgtattgaatttggtttgggcaacttatagtttatttattgtgttggcatcgatcgcagtaggtaaagaaacacgccaaattcgtaaaaatacccgcattaaggcatcacttcctatcactttacattttgatgacggcgctgaattacaaactaccaccgaagatatttctatggggggagtgcgtattgtgattaataaaatagctgaattacgccagcgtaccgttaatagcattacgttaatggtgcaacgtgatgttgttacgcttcctgtggaaatggtcagtttctttttcatacctagtcatccccattaa

SEQ ID NO: 296587 - DNA, 330 bp, Proteus mirabilis
atgagaaaaataagtatatattcaaatatgttatggaagtcattatcttatataagaaatgtgcaaacacactcttgctttagaaaagcctttgataagtcttgttatatggaggctgagctattacataatattgttatatctcttcctgaagaagaaatgactgaacatgatatattttttttaaatagtcatgcgcgattctatttggaaaatgctgacaaaagaaaatgtacaaattatttttctcatgaagatgatataaaaaggctatttagtctcgttcctgagcacttgaaagaaaaacttgaatggaatggcccagaataa

SEQ ID NO: 296588 - DNA, 483 bp, Proteus mirabilis
ttgtattataatcgctttcgctattatgatagggaaacaggacagtatctttccccagaccccatagggttattgggtgggctgaatctgtatgggtatgtgcattgtccgacggggtgggttgatccgtttgggctggcgtgttgtccaccaccaaaaataaaagctacacaaatcggattaagaaaccctaaacagattgatggtatgaaaaaagatatgcttgacggcacttttgatttttcacttcccaaaaatcaagttggtggctttgtagattccaatggaatttattatatgggggaagggcatcatagaatggttgcagctcaagaaatatataaagaaacaggcgatgctaaatatattaataaattaatagaaaatggttcatggacaagaacaaattcaccaccaactgatgccagagctatgccatccagaagtttctttagtaatttaagaaacaaattaggattttaa

SEQ ID NO: 296589 - DNA, 1422 bp, Proteus mirabilis
atgtcatttagtcgtcgccagtttttacaggcttcaggcttagcggtatgtctgggctcattatcttcatctgttcgtgcaggatcagttagtgatagaaaactacctattcccccattacttgaatcacgtaatggtcagcctctttttgtaacgttacaaaaagtgcattgggcctttgatggcacacaaaaaacagaagtctggggcattaatggctcaatgccgggtccgacaatcaaagtaaaaagcggtgatgatgtcaaactgatttatagcaatcgccttaatgaacccgtttctatgaccgtaagtggcttattagttccgggaacacaaataggtggagctgcaaggatgatgtctccgggagcctattggtcaccggtgttgcctattcgtcaaaaagcggccacctgctggtatcatgcgaatacgccttttaaaatggcgcctcatgtctataacggattggtaggcatgtggattgttgaagacgaagagagcaaatcgttaccattgcctaaacattatggggtaaatgattttcctattattcttcaagataaacgccttgataactttggaacgccacaatacgacaaagaagccgcgacagagggcttttatggtgacacattattagtgaatggctgtgaagatccctatattgaagtatcacgaggttggattcgtttacgcttagttaatgcctcgaatgcccgacgctatgagttatcggctaatgatggtcgctcactctatctgatagcctctgatcaaggtttgttaacatcaccggtagaattgaaatctattcctatggcaccgggtgagcgacgtgaaattcttattgatctatcagaaggcgaagaagtgactatcactgctgggcaaagtgccggatttatggatagattacgtggtatttttgaaccttctaacttattgcgcaataccaatgtgctaaccatcaagcctactggactgatgtcattggttaccgataaagttccacaacagttggtggtggatgacacacaaatcaccacctcaattcaaccgagaacgatccaattgcaaaacagtcctcctggtattaataatgcgcgttgggagttatcaaggatcgatcttgtcggtaaacaaaatggctgggaacgttggctagtgacagtggaaacaccacaaccttttcatattgaaggtgcacgttttaaagtgattaatcatgatggacaaaaaccagcgcctgctgattttggttggaaagatacagtgtggatcgaaaaacagagtgaattattagttgagctaaaacagccttcttattctcatttcccttttgtttattatagccaaatactcgaaaatgcggataaagggattgcggggcaaatggaaatcacgccatcagaataa

SEQ ID NO: 296590 - DNA, 294 bp, Proteus mirabilis
atgacttttgcttggtatggccatttaaaatacggtaacaagccgttaattatagtgatcttactcagttggttaatcgcttttgttgaatactgttttgcagttcctgcaaaccgtatcggccacaactattacagcgcagccgaattaaaaaccattcaagaagtcatcacactaaccatttttgctgttttttcggtgacttatttaggtgaaagtttcacacttaaccactttatcggttttattttaattggtgcgggtgcgctatttatttttaaggggccattttaa

SEQ ID NO: 296591 - DNA, 135 bp, Proteus mirabilis
atgcctctcttagctagctattatgcgctgaatgaaaatattttttcaagagcaatatttgctttttgtagtcaaatttctactaatgcagtgcataatatgggatgtgataatttattgaatgatataacttaa

SEQ ID NO: 296592 - DNA, 336 bp, Proteus mirabilis
atgcattgtggtgcatgttgcgcctattttagagtctctttctattgggctgaaatgaaaagtggtggtggtgttgttcctgacgaatttaccgaacccttaaccccttttctatcatgtatgaaaggaactaatgagaaacaaccacgctgtgaaaaattgattggtgaagttggtgaatgcgtgagttgtgcaatttatgaacagagaccatctccttgccgtgagtttgaacaatcttgggctaatggcgtaaaaaatgaagcttgcgatcgggcaagagccgcttttgggcttcctcctcttcctaatatttctctaccgcattctgcgtag

SEQ ID NO: 296593 - DNA, 258 bp, Proteus mirabilis
atggacattaatcaagatattagacgtttaggtgaaaatctgaaagggcgtttggcgcctgatattgttgattttgacttagaatatatagaccactcagaaagtattttagcttttgaaacgttatgcgatcacatagctgactatgatgtcgtaataaccagtgatgagtataagcagatcattggtattgtaaataagctaaatcttgagttagatgatagatatttatatataaatccagataatattaagtga

SEQ ID NO: 296594 - DNA, 483 bp, Proteus mirabilis
atgacagcagttggcactaattttgatattaatcaacaaattttttatataaaagaggggagtggaacattagaacatctgattattaatgaggcactgaaagatgaaagccaattagaacctctttttgtgacaataagacacagtgaaagttactggcttatattacatctgattagttatttggatgaaaaaaaaagcaatattgcacaaataggtgaacgatatggtgtatcagggacacattttagacggctgtgtaaacgttatttaggtaattgtggtaaaagtcaattacgttcatggcgtgcggcatcttctattttgacaacgctatcaacagatgaatcattgactcagattgcagtcgataatggttttagttcagcatctcatttttctaatgaaattaagacattatttggtattacaccaactgaatttcggcgaattggccaatatctttatgaacataaaaaataa

SEQ ID NO: 296595 - DNA, 633 bp, Proteus mirabilis
atgtcacacaaaactgcagaccaagagtggctggtagaacaactaaaatatattgcacagggcattggtaaaacattatcgcctttttgtgaagttgtacttcatgatctgaccgatagtgaaaataccattatggttattgaaaataatctatcaggtcgaaaagtgggagatagagcaactgagctaggtatggcaaggattgaatcgtctgattttccacaaattgttgcaaactatcctaatcagtttcctgatggtagaacagctaaaagtacatcgattggtattaaagataaacaaggcaattatgttgctgctttatgtttaaatattgatatatcgatgattaaaggtttacaaatggtattaaatcaattttcgactcttgaagagggaaatcatatcattgaaacttttagctcagtaacagaagattcgttgaaaaaacgtattgatgaattttctgcgacttattcagtgacaccaagagcattgaaaccgcatcaacgacgcgaattgctattgtgtttacaggatgaaggttacctttcacttcgcaaagcgatggaaattactgcgcaatatctcggtgtttcaagagcaacagtgtataacgatttaaaagaatga

SEQ ID NO: 296596 - DNA, 636 bp, Proteus mirabilis
atgagttttagtcgtaatgaaatagatacaatgtcaggtactcgaaaaagaacctaccaattattggtgacaacggcattgcaactttttgaacaagggatgttacctaccgtatcagagcttgcagcacatgctggtgtttcaagggcaacggcgtatcgctattttcccactcaaagtgatttaattagtgctactgttgatgcaagtttagcaccgatcattgcatggcagcccactccagaagataatacacaacagcgtattactgcgttgctcaatcttgcttatccacaaatgtttaaacatgaaggggcgttgcgtggcgcattgcaggtttcattacagcagtgggctaaagagcggcaatcaagcgaatatacagaaaaacgatttattcgtggtcatcgtaaagagatcttacttaaagtcatcgaaccattaaaagcgcattatccgcaagaaatgtgggataaagtgataaaagctttctcacttatttatggttctgaagtttttttagtaatgaaagatatctggaaaatggatgatcagcaggtcattgatatgacccaatggatggctaaagctattttaaatcaggcaaagtcagattttccgatagataacgattaa

SEQ ID NO: 296597 - DNA, 228 bp, Proteus mirabilis
atgttaaaaatatttctttttgccttcatcttgttcttactggcattctttggaatggctttaggatatattgttaaacgtaaaagtattcagggcagttgtggtggtttaggctctattggtattgagaaagagtgtgattgtcctgaaccttgtgatgctcgtaaaaaaagaatggcgaaagaagctgctcgccaagagctattgcaaaaaaaccgcatcttatag

SEQ ID NO: 296598 - DNA, 873 bp, Proteus mirabilis
atgatcaaaatatttattgcaatttcattcctcttttactcagtatttgttatggcttctcctaaaattattgcacacagaggtggcacagcggatgcacctgaaaataccgaaattgctatcaaaacagcactaagcaatcaagctgatgcaatttggataaccgttcaactgtctaaagataatgtccctgttctttatcgtccaagtgatctaaaaagcctcactaatgggcaaggggcaatttcaacctttactgccaaagaattggcgcaatgggatgcaggatataaatatggggaagcacaacaatttccatatcgcaataaaggggttactatcccgacattggagtatattctgactcaatttcctaaaacacaattctatattgacttaaaatcacctgatgccgatcccgttatacaaggcaaagcattagcttcggtattaagcaaacataatgcgttagagagaacgcgtgtttattctaccaatagtgcttttttagatgcgttacctgataacgtacaacgctttgaaagtcgtgatgttacccgcgatatcttagccaatattactatggggcatatctgtttactgccagaaaatcttgatatcacacgttggtatggccttgaactgcacagaaaagttgaggtggttgaaaaatataccttaggtgaagctcgttcagcggctgtattaagttgggacaaagatgcgatgtcttgttttcgtgcggggggtaatgcgcatatcgttttattcggtatcaatactgagaaagattatttgcaagcagtagaattaggtgctgatgcagttatggttgattctccagctaaaataaaagcattcagaaaagagtaa

SEQ ID NO: 296599 - DNA, 786 bp, Proteus mirabilis
atgaaactcaatgcattattaaactatcaaatacatcaaccagaaacagcaacgataaacaatttacctattgtgttgatccatgggctttttggtgatctcaataatctaggcgtactaggtcgcgatctacgtcaagaccataccgtgatacaaattgatgtgcgcaaccatggacattctcctcatagtgaaagtatgcactatcacgatatggcacaagatgtattagccctgcttgatagcttaaatatcgcaaaagcaatcgttataggtcactcaatgggagggaaaattgcaatggcaatgaccgctctcgcccctcttcgccttgaacgtatcgtagttattgatatgtctcctgttgcttataatgttcgtcgtcatgataaaatttttgcagcccttgaagctgtcactaaagctcacgtcacacaacgtacagaagctattgctattatgcgcccttttattgaggaagacggcgttatccaatttctgcttaaatcatttaaaaaaggtgaatggttatttaatttacccgcaatcaaacaggcttaccccgatattattggttggcaagaggtgcctgcttggcatcatcctgttttgtttatacgtggtggactatccccatatattttagatgaatatcgcgataatattgctcgccaatttccacaagcaaccgcctttgttgtcgccaatacaggacattgggtgcattctgaaaaaccagaaacagtaattaaggccattcgtcgcttcttagccaaaacagtataa

SEQ ID NO: 296600 - DNA, 300 bp, Proteus mirabilis
atggcaaaagaacaaactgatcgcaccacactggatttgttcgcaaatgaacgcagacctgggcgacctaaaacaaacccgctttctcgggatgaacagcttagaattaataaacgaaaccaattacgacgcgatcgtgtcaatggattacgtcgggttgagttgaaattaaatgaggatgctgtcaatgcgcttaatgagcttgcgagcgcaaaaaatgtcagtcgtagtgagcttattgaagaaatattactagaacaactcgcacaaacttatgcgttaaaaaaacatcaaagctaa

SEQ ID NO: 296601 - DNA, 306 bp, Proteus mirabilis
gtgggtaaagagatgatggttgattgtaatcgtcaatggtttggtgctgagttagataaaaaagatctcgaaggttggggttatgattactatatcgtaagcgacttaaatggcccaatgtctacgatgatgggttgtcttgataacactaaaaaacccgcctttgttcaagctaatatggggcaagcggcatttatccgctataacagcaaattacctattgttgtctatgcaccaaaagatgtagatgtgaaatatcgtgtgtggtctacttctgacgaggttaaagattcaacaaagaaataa

SEQ ID NO: 296602 - DNA, 438 bp, Proteus mirabilis
atgtacaaaaaaattctagttcctatcgatattctagaagacgagctttctcaggaactgatcactcacattgaacaaattgctcaagttggcaaacccgagatccacttcctcaccgttattccaaatgcagaacttttctttggtattgagtttgccgctattcctgaaaaatttaaagactcttcagagcgcactcgcctcgcttttattgctctgcaagatatgatcaaagatgcgaaaattcccgatgagcaaattgtttgcaatgtcggtgttggtaatgcaaaagatgaaattttagagtatgcacgtcaaatcgatgcagatttaattgctattgcttcacatcgtcctaatgtttcttcctacttattaggctcaacagcatcatctattgttcgccatgcaaaaatgtcggtattggtgatccgttag

SEQ ID NO: 296603 - DNA, 666 bp, Proteus mirabilis
atgaatattttattagttgaagacgatctgcaattaggaaaggcgctctgtcgtggtctagaaattgccggttttcagccctgctgggtaagattgcttgcggatgcacgtgttcaattaaaccaaaaagcctttgatttaatgttgcttgatctaggtcttcctgatggtgatggtcaagatgaacttatcgcactaagaaaaagtggtgaaaaaatacccattattattttgacggctcgtactcaaatagataacctagtacaaacattagattcaggtgctgacgatttcttaccaaaaccttttgctatgcctgaattaatttctcgtgtaaaagccgtaagtcgccgtatggccggtttctcttcacagatttggtctattggtgatttacagcttaatccctcgaatcatcaagtcactttaaatggtgaactattgttattatcaggtaaagagtaccagctattatatgagctgatgcgcaatacagataatgtagtacgtaaatctgatttagaacaacgcttatttggcttagatgacaaaattgaaagtaactcacttgaagttcatatgcacaacttacgccgtaaaataggcaaagagcgtattattacggttcgcggtatcggttatctcttaaaaaaagaagtgaactaa

SEQ ID NO: 296604 - DNA, 522 bp, Proteus mirabilis
ttgaaaagtattggtgctgcgggagggaagcaaataaataagggggatttaattgcaaaaatagaaatgtacaaaattgcagattgggatggtgggcaccctcgtttttttacatggaatatttacgcattaaatgatgttattatgcctactgggggctgtgatctttctagtagaaatgtcacgattaatcttcctgaatatccgggtaatgcgcaacctattcctttatctattttttgtcctagacaacaaaatatttcttactatttaacaggatcaacgtctgatgtgaataatacggtctttaccaatatatcatctaactctcctgctaaaggggttggaattaaaatatcaaataataatggtgttattcctgctaatacaccggtcaaattaggcaatgtgacgaataatagtgtgagtttaaggctatctgcttcgtatggtgaaacgggagaaagagtaagagcgggtaatgtaaaatccgttatcggtgtgacctttgtttatgagtag

SEQ ID NO: 296605 - DNA, 360 bp, Proteus mirabilis
ttggcttattcagcgcgttgttttactgctcgctcggaaaatcgtgctaaagatgattgtgaaacctgctgtcaaaaatacccacaaggccgtcaggtattatcacaagaaaaccaacaagtgtttgttttaaatggtattcaaacgcaaagtggctactgttacaatttaggtaatgatttaacttcaatggcaggtttagtcgatatcgtccgtctttcaccgcagtctgatgaagtttttactaccttaaaacaatttcgccaaaatgaacaaggcgcacaccctattaacaccatccatcatcatgattgtaatggttattggcgtaaactggctggtttagaattagttgaataa

SEQ ID NO: 296606 - DNA, 1209 bp, Proteus mirabilis
atggaaaacacagcaccacaaacctctcttagtaaaggccttattttacttatggccgttgccactggcatggttgtcgcaagtaactattatgcacaaccgctacttgattcaattgcaaattattttcatatctctgccactttagctggctttattgtcactacagcacaattaagttatgccttaggtttaatgctattggttccccttggcgatatttttgaacgtcgttcactgattgttatcatgacgctgatttcagcgagcggcttattaattacggcaatggcacctaatatttggcttatgttaattggtactgccctatcaggtatgttctcggtcgtcgcccaaattctggttccttttgccgctacacttgctgcacctcatcaacgaggaaaagcggtaggtactattatgagtgggcttttacttggtattttactggcaagaacagcgtcagggctgatggcttcctttactaattggcagggcattttctggctagcaagtgtttttctagctattttagctattacactatggcgctgtttacctacctataaaagtcaaacaaatttaaattattttcaactgctcggttctatttttaaattgtttgccacgaccccagtattacgtacccgctcactgattggtgcacttatctttgcccactttggtttactgtggacatcaatggcttttttactcgcttctgatccctttaattattccgatgcagttattggcttgtttggacttgtcggtgctgcgggagcactaatggcaggtaaagcgggtgtatgggttgataaaggcaaaggtaaaaaaacgactacttcaggtttaattcttctcttcatttgttggggacttattgttatcgccccttattatcaatggattggactgattagttttattattggtgtggttttattagatttagccgttcaaggtgttcatgtcactaaccaaagcactatctaccgtattttacctgatgcccgaaatcggcttactgccgcttatatgactagctattttatcgggggcgccctaggctctttattatcgggttacgcttatcaccaatatggctggattggtgtttccagcgccggtgcaatcattggcttattaggtttactggtttggttatttggttataaaaatgatccagtgatccaatctgaataa

SEQ ID NO: 296607 - DNA, 459 bp, Proteus mirabilis
atgactcatgatcacaaactaaaagttgaagctatcaaacgtgggactgttattgatcatattccggcgcaggtgggctttaagatcctatctctatttcgtttaaccgaaacagacgaaagaataacggtaggttttaatcttccttctgaaaacctaggtaaaaaagatttaatcaaaattgaaaatgtctttttaaccgcagagcaagcaaatcgcttagcaatgtatgcccctcaagcgacggttaatattattgatgactaccaagtcgtcaataaaatggcgctaagtttacctgaattactcgaagatgttgtaccctgccctaatagcaactgtattagccataatgagccggtacaaagtagctttcgcgtaaaaaaattcgcgtctgacgtggtattaacctgcaaatattgcgaaaaagaatttgagcgccatgccgttattcgttga

SEQ ID NO: 296608 - DNA, 726 bp, Proteus mirabilis
gtggttggctttgcagatggtagtaacacctctttaggtaaaaaaggggaaaccttagctgatactatttctgtactacgtacttatgctgatgccattgttattcgtcatcctcaagaaggtgcggcacgtttggcctctgaatttgctggggatatccccgttattaatgctggggacggtgccaaccaacacccaagccaaacgttactagacttgtttaccattaaagaaacacaaggccgattagataacctcaatatcgcgatggtaggtgatttaaaatatggtcgcacagtacactcactagcccaagcattagccaaatttacaggaaatcacctctattttattgccccaaaagtgctggccatgccagagcatatcttgcatttactcgaagagcatggtgttgaatatagtcagcatgaaactgtagatgaagtgatgtcagagctagatatcctgtatatgactcgggtacaaaaagagcgccttgatccttctgaatatgccaatgtcaaagcccaatttatcttaaccagtgctgatctggtgaatgtaaaagataatcttaagatattacaccccctgccacgtatcgatgaaattaccaccgatgttgataacaccccttatgcttactatttccaacaagcaggtaatggtatttacgcgcgtcaggcactacttgccttagttctaaataaaaacttagttctttaa

SEQ ID NO: 296609 - DNA, 231 bp, Proteus mirabilis
gtgaataatttatataaaaatgaggggacggcaaaaaatattgccgttcaattacaaaataaaaacagtaatggcgaaattccattaggtaatggaaaaaatttatatatcgcggttaatggtaaaccatcggttactgttccactaagaacacgagcatttagtaaattaggtaatgcaacaccggggacggtgtccgccaaaataacagcaacgcttatttatcaataa

SEQ ID NO: 296610 - DNA, 498 bp, Proteus mirabilis
atgtggaaatcactaacgttatttttattattttcatattctcctatcgcattaagcaacactgttaatattaatgtatatggatcagtagtagcctcaccttgtgagttagaaacgaaaaaccacttaattgatttaaaaaaaatcaatattagaaatattaaaaatggtcaagcatcagactggatagatttttctataaaattaaaaaattgcccagttaatacagagaaagtcactatgattttaagaggccaaagtgttcctaattattcggaatattttattaatagtgggacggctaaagatatagcactaaatttagcaatgcaaaataataaaggtattgtaaaaaataatgataaattaatgacggctgttaataaatataaccataatgctgaatttgctttatcggcaagaatggttggctatggaaataatataacggtgggatcatttaagagccatcttgaatttactcttatttataattaa

SEQ ID NO: 296611 - DNA, 696 bp, Proteus mirabilis
atgaaaaaattattactcagtcttactatgctggctatagtatcaacgccagtgttggctaaagctcctgtggctaacttaaaaatcaacggtgatattaaaccgccaacatgtactattaatgggacgacacaaagtgatgttctttttgattatggaagaataagcccatcacttatccatcaatcaaaaatctacgagtatccacccaatatagttcgaaatacagttacaattgattgcgatgctaaaacatatttaacctttgttgcgtctgatacttatggtgacacggaattaagtgttaataatacgtcagaatggtttcatttagttgataaagcaaatcctaaaaatacagttggagcggctgatttcatatggagtgatgctacggtcgatggtaagcctgcatttatttcacgggcaaacgatgttgcgattacagggaaaagctacaacaacgtcctatacaaaggaccaactaatggttggacatcagaacaacaaacaggcgttgataaaaattccctggctctaattccaggtcaagttttccaatcaaatttcaggcatggtaattcaaatggtacctttattttatctaaagatgaattaagtaaaaaaggaatagatttatctaatggtttagattttatcggggaggctgttctcacttttaactttggtgtctaa

SEQ ID NO: 296612 - DNA, 201 bp, Proteus mirabilis
ttgtcttttaaagcagattataaagataaagctagttatattgagtcgatatgggttgataactcttttcgatggagaattgggtcaatggatgccacgtctgattttcaaataaatacaggtggtggcgttaggtttcatctaactaaagatagtctcactgttaacggtaagaaggttcttgataatgtcacactataa

SEQ ID NO: 296613 - DNA, 579 bp, Proteus mirabilis
atgtatcacgatcttcaaggaaaagttgctgtagtaacaggttcgtcacgaggaattggtgcagcagtagtgacgagattagctcaagaaggaatgaacgttgttatcaactatcactctgatgaaaatgaagctcaagcattagccgatagcttaaataaacatggtaaaggtaaagcaattatttttggcggtgacattagtgatgaaaaaattgctcagtcttcagttcatgaggtgatcccatggccgacttttgctagttacgctgccagtaaaggtggcgtgagaatgttaacgcaatcactggctcttgaatatgcacactatggtattcgtattaacgccattggcccaggtgctattaataccccaataaataaagaaaaaatgcaagatgatgcgttacgcaaagaattagaagagatgatcccaatgaaatatgccgcagagcctgaagcagtggctaatgttgctgcttggttagcatcggagcaatctacttatattactggacaaactattttcattgatggcggtatgacactttatccttcatttcaaggtggaaaaggttaa

SEQ ID NO: 296614 - DNA, 912 bp, Proteus mirabilis
atgtattatggttttgatatgggcggcacaaaaatcgagctcgccgtttttgataaagatctgactcaagtatggcaaaaacgtgtaccaacgccaaagaatgattatcaagctctattaaatgtttttaaaacactcactttagaagctgataatgatttaggctgtaaaggaaaaataggtatcggtgttcctggcatcgtcaacgcaaaagaaggaactgtatttaccaccaacgtgcctgctgccaaatataaaccgatgatccacgatctggctaatattcttgaacgccccgtcaaagttgagaatgatgctaactgttttgccttatcagaagcatgggatcctgaatttcgtcattatccttcagtactgggtttaatattaggtacgggtgttggcggtggttttgtcattgatggcaaagtactctctggtaaaaatggtattgccggtgaaataggtcacatgaatcttaatgtagatgctgataatgtgattggtgagaccatgccaaaaatattgtgcggttgtggtagaaaagcctgctttgagacttatttatctggtcgtggttttgaacgtatgtataaagcctttaatggctcaccacaaagagcggtggatatcgttgcacaatattatcaaggcgatgaacagacccaacagcatgttgaccgctatatgaaagtattagccatttaccttagtaatattctgactgtacttgacccacatttaattgttattggtggcggtttatcacaatttgacgcactgtataccttattaccggattatctctcacattgtgtatacggtaatacacaaattccaacaatagaaaaagcacgttatggtgatgcgggtggagcaagaggagctgcctgcttaaatttattagactga

SEQ ID NO: 296615 - DNA, 537 bp, Proteus mirabilis
atgatattacaaagattatctctgagtactgcaatctttgccgctgtgatagctatggctaatgctgatcctaatatgcgttttcatggtgagttaattgatgagccatgtgtaataaaacccggtgatgaaattattgtcatcacgctggataaagtgactgatagtgctttttacaatggagtagaaagaactaaaagccagcaatttgagatccatctatcggagtgcgatctctctatgaataacaaagtttccatcacatttaaaggtgatgaaaataaggcgatggcagggaaaggttttctagcattgagtccaataagtcgagcctctggtattgctattggtctagaagatagcgatggagtcctcttacccattaatcagccatcaaaaaatatggctttactttcaactaataacacattgaggcttagtgcttttatacaagcagaacctaccgcaattgctaatcaatcaataaaacgggggccttttagcgccattgctacattccatttaaattatgactaa

SEQ ID NO: 296616 - DNA, 450 bp, Proteus mirabilis
ttgattaattttggcccatctcgccgtgagcattatccaaatctgcctttctggcgattagttcgcgatggtttttgggagttgcaactaccaaaagagagcgatctatcaaaagataataagcaaccatcgaaaaataaattaattcagcaaaatgtgttaggtggatttgaccaagaaagctatcagcttcttataaaaaagccaagtttaatcaataagctagcacaacagattttaagtgaacacttccctgataatgttcaagaagttattgctaaccgtcttgattttcccctacaagaaattcgccaaaaccgagatcccacttttagaaaaaatatcttacgtgcttacaattatcagtgtgctatatgtggttataatctacgttatgatagcgccgtggttggcctagaagccgctcatttgacatcctccacgccctaa

SEQ ID NO: 296617 - DNA, 390 bp, Proteus mirabilis
atgtctaaatcggcaaaaggtacgacagaacggcatggacggaacgtaaaagctaaatctggtttaaaccgcgcaatactggagcagggctggtatgaaatgcgccgtcagcttgagtacaagcagctctggcgaggtggtcaggtactggcaataccccctgcctacaccagtcagaagtgcgcttgctgtggacatacagcaaaggaaaaccgccagtcacaaagtcaattcgagtgccttgaatgtggatatacagcgaatgctgatatcaacggggcacgtaacattttagcggcaggacatgccgtgcttgcctgtggagggagggtgcagtcagaccgcccgtcgaagcaggaacccgccgaggtgattcagacatcagtctga

SEQ ID NO: 296618 - DNA, 900 bp, Proteus mirabilis
atgactaaatttaaaaatagtagtaaattctttttttataagattctaaaattaatatgttttttttctccagaaatagctacaaggatactctataagagacgtttaggaaaaaaattaaatctagcctcaccaaaaactttcaatgaaaaactacaatggcttaaattaaacagatataaaaataatccattagttactaaatgtgcagataaatatgcagtacgtgaatatataaaagaaaaaggtctcgaacatacattaaatgatttaataggaatatgggataatcctgaggatattacttgggaaaaattaccacacaaattcgcaatgaagtgtaatcatggtgcaggatataatataatttgcaataataaagataaattaaataaaaaagaaactcaaagtattctaaaaaaatgcatggacgaagattactggattaaaacaatagagttgtgctataaaaatatagaaaagaaaattatatgtgaaaaattcattgagactgaagatgggagttttcctttcgattataaaatattctgttttaatggcaaggctacatttataatgctctgcacacaaagagaaacgaaaaagcctaaatatttttttgtcgacaaaaattgggaactattgccatatggattagattttaatgatactaatagttttaataaaattaaaaaacctaataatcttaatatattatttaattatgctgaaagattggcagaaccatacccttttgtaagagctgatttttatttagacaatgaaaaaattatctttggtgaacttacttttgtcccagctgcgggctatgatgatgaattaaacaatgatagtagcaataatattgatctcgaaatcggccatctattaaagttataa

SEQ ID NO: 296619 - DNA, 675 bp, Proteus mirabilis
ttgtgtgttatttttaaaaaaataaccggctggtctgctggccgctttggtgcgatcgttcaaggcaatattcggtttaacacttatttaggtttagctattgtcgctgatttatttggcgttgaaggtttaggaatagctgctttgatattagcaaccttggttcctctatcaaatgtgacttcagtgctttgtttaaccgcaggacaaaatgtaacttttcgtcaattaatcttcccaattattaaaaatccattaattatctcttgtgtaatagggattgtaatcaatttatcaggaatagggcttccttttggtagcgatcaatttctaaaattgttagctgcgactagtttacctttagggcttatctgtattggtgcggcattacatttatcaacactaaaagcagaaagtaaaatgattagtattaacacagtgactcggttgcttattgtaccgataattgcatatagtgttgctaattttttaggtttgtctccattagttatgatgcttttagtcattttcttttctatccctacagccccaacttcttatattttaactcgacagctaggaggggattctgagctaatggcggggatcattactgcacaaaccatgcttgcagcaattaccttgccgatcgtattaagttttttaattccataa

SEQ ID NO: 296620 - DNA, 450 bp, Proteus mirabilis
atgaaaaaattactttttccctctctcttagtattgtcaacggttagtggtactgtacaagcggcaaatcatgctgtagttgaagtttataaaaccgaaaattgtggttgctgtaatttgtgggctgatggtgtaaaagaagcgggctttgatgttaatgtcaatattgtctctgaaacagaattaatgcaaaaatatcagcaagcagcagtccctgataatttattaagctgtcactatgcaacataccaaggcaaagacttagtcggacatattcctatcgatagcttaaaaaatatagacttaatggataaaaagcaaacaggcattgctgttgcaggtatgccagcgggtagcttaggtatgtatgcaggggactataaagaaccttatcaagtcattgcttttgataaagcaggtaatcaatcactatttaaatcatacaattaa

SEQ ID NO: 296621 - DNA, 561 bp, Proteus mirabilis
atgcttaaaaaaaagatgttagttaaagctctatttacagtatctgttttatcactgagcggtgttgcttctgcagcgactattgttaatggtggtaaaattaattttactggagaaattgttaatgctgcatgtgttgttagtacaaaatcaatagatcaaactgttaatattggacaatatcgtaccgcacaatttgatagtgtagggaaaacagttggtaatactgatttttatatcaatttagaagcttgtgatacgactgtcgcacagaatgcctcagtttcattttcaggtgtaagtgattcaaatgataaaacagtattagctgtaagcaatattacaacaggtggtgcgggtgctgcgacgggcgttggtattgaaattacagaccatacaggaaaagtgttaccaccagacggctctgttttttctacagcaaaacagttaattgatggatcaaatacacttaactttgttgcacgttataaatctacattagataccgttacccctggtcatgctgatgctgatgtaactttcaaaatgcaatatgaataa

SEQ ID NO: 296622 - DNA, 978 bp, Proteus mirabilis
ttgagaaaaatattacactatattgttttagcgttaggtttatttattattacgctaaatgtatccgcacaggcaccggaaaatttcactaaagcaaaacagctagccagagaacgcatttattatgatcaaaatcaaaacaaccaaggtacgctgtattgtggttgtcattgggagtgggtaggaaaatcggggggacgtgttaatttagccagttgtggttatcaagtgagggcacaagccacccgagcttcacgcattgaatgggaacatatcgtccctgcttgggtttttggtcatcaacgtcaatgctggcaaaatggtgggcgagctaactgtgttaaaaacgatcctatttttggcaaaattgaggctgatttacataatctagcgccttcgattggagaggtgaatggtgatcgcagtaattttagctttggtcaattatcatctcaagcgccttatcaatatggccagtgtcgcagtcgggtcgattttgcttctcgcacctttgagcctcgtaatgaggtgaaaggccaagttgcacgtgtctatttctacttacatgatcgttataacctctcaatgtcacgtcaacaacaacagctttttatggcatgggataaagcttacccaccaacaccgtgggaaagagagcgagataatcgaattgctaacattgttgggcatcataatccctttgttacgggacaaatgaagtggcagttaggacataaaaatagtggtgcaggattaactgcaacatatcgtcctacaactgacaaaatagaaatgcctaaagcgcccacagtctcccaagatgagcagatcaaaggtaatctaaatagtaaaatttatcatttttcacactgtactggttatagaaccatgtcagataaaaatgcggtatattttaaaaccgaaaatgaagcaactaaagcgggttaccgattagcaaataactgtaaagcgctttag

SEQ ID NO: 296623 - DNA, 192 bp, Proteus mirabilis
atgtatcttggctttctcgatattagtattgggctgttttttatttttggtaactggggatttttaggggctgcgcttgccttctactttattaccgatcgctatactattgtgcaagaagagaaaatattaagtgagcggtttccacaagcgtggcgacaatattgccgccacgttcgacgctggatataa

SEQ ID NO: 296624 - DNA, 549 bp, Proteus mirabilis
atgcagcgtatattgtcgttattcatgctgtcagcactattattcgccacgccatttgcgtttgcgacaaaaaataccacggtatcactcggctatgctcaaacccatatgggagcattaaaaaactctgccagtaacgaccttcggggattaagtgtaaggctccgttatgagtctagcgcagtatctaatgccaattggggattattggcctcttatacagtaacaacccgcgatataaccaactatcgctgggaagatggaaaattacataaagagaataatgataccgtaagatatggatcctttatgatgggtcccacttatcgtgttaataattttctgagcttatatggcaatattggtggagcggcgatgaaaataaaacataaagagcgagctagtgaatcagaaacttcatttgcctatggtgcaggttttattatggagccatttactaacctttcactcgatttttcttgggaagcaagtaagttcgattttgcaaatacaaatacttttggcatgggtattggctatcgtttttaa

SEQ ID NO: 296625 - DNA, 360 bp, Proteus mirabilis
atgaacaagatctttatttttattaccacattactattaaccgcatgcagtgccaactcacttcactcaggtgcacaaatggtacgtattacacacaatgagccaaatgcatcttgccgatatttaggtgatgtcacaggaagtcagggaaacttcttcactggtggctggacatcaaatagcaacctagaaacaggcgcccgcaatgatctaaaaaataaagcatggaaaatggggggaaatgtggttgtattattaactcaacgggcaggacaaacgggaagcgcttaccgtggaagtggctcaagtcaacaaaccaacgttacattaagtggtgctgtatatcactgtccacaataa

SEQ ID NO: 296626 - DNA, 171 bp, Proteus mirabilis
atgatccttgacggtaacaccagtaaagaagcagccgaaaagctctctttatcaccaagaacagtggaagttcatcgttcgaatatgtatacaaaactaaaaataagatcactaccacaactagtacaagaatatgatttctttaaaaaatatgacttaagagccaattaa

SEQ ID NO: 296627 - DNA, 417 bp, Proteus mirabilis
  misc_feature (354)..(363): n is a, c, g, or t
atggaatcgataatccatctgatcactttcgaagatgacagcacaaaagttcaacttaaagcagtgctttcttctttagcggcaaatgtgaaaacctattcaaatgaacaggcatttttaaagtactatttttcatcaactaaaggggctcataaagagtgcatcataattaacactaaaagtagtgcatcgccatcaattgcgttggtaaaagagttaaacaaattaaagaatatcattcctgttataattatttcaggagatgcatcgatagaaagttgccgtaacgcatttaaagcgggggctttcgaatatttaactcgccctttaaacgtcaatgagcttcttaatatnnnnnnnnnncttttttacactatgaaagtgaggttgagcaattcagaacctatatttctttaa

SEQ ID NO: 296628 - DNA, 669 bp, Proteus mirabilis
atgatggggagaaaacttaattgtatcggtattattttaataataatctctctattgctctcgcaagtagagagtaaaatagacattaaaaatagcgataaacgttttttattatttatatcactgaatacatttactgccagtgataaattgacctcattaatttcagagttagaattcagtataaaacaaggtgatcatccatttgataaagtcatttatggttatgtcagtgtatttttatccgcttattatcataaaaataaagcttattctcaggctgcacagacaataaaaaaggcctttttttatcttgatgaagttgttgaacaaaatccaactaattggcggttgatctatctaagattaagaatggatgcttttacacctcgttatttagggcgctgtgtggtggctaaaaaagacagtcagcaattacttgagaatattaatatcaatagtgaacttatacccatgattaactatatgtatgcgcgtgcattatttagttgtgagcaagtgacacaagcaaaaaagatcatggctcaattacttcaagaaaatgaagcgagtaaaaaaattgctcgatatagtttcactagtgttcctccttggttatctattgaaaagatcgcggttattcaaccaataacattagagagtgattaa

SEQ ID NO: 296629 - DNA, 582 bp, Proteus mirabilis
ttgtctagtgagcaaaatattgttaaaggaaatattaatttcgaagtctcttcatgtaatgattttgaagactcaaggaaagagtctaaatcattgatagaattaaaaaataaagttcctgagattttcagagatgcggaatatgttgaatgttataagcaaaaacttaattcattcgcccatttctcaatacctgttggtgttggcaaggttgaagacggccaaaacactgttgatacggatctaatggtcttctcttacaaagagatattggcgggggtttatgcttcagaaggggtaattaaaaggatcaagcaagcagaaaaaaattcacatcaaaagatggattttagtatcagcattattcttatgcccggtaacgtgaaaatggataaggtagttgcgttaggcgtgacatttacaggagatacatctaaaaatgatccagtattaataagcagaattaaatttggcaataaaccactgacttttaaattatcagatgtgtcagtaaaccaattaatgcaatacggtatggttccattcttagtaactcctgaatatttcacactatataagtaa

SEQ ID NO: 296630 - DNA, 429 bp, Proteus mirabilis
ttgtcagatatagcattatcaattgagcacataggatctactgcggttgcaggattggctactaagccaataatcgatatcgatttaattatagaaaatcctaaagatgaatcatcttatattcctcaattagaggcattgggctatgaactcattattcgtgaaccttcatggtatcagcaccgtatgcttaaactgagtaatccgatggttaacttacatgtatttggaaaaaattgtcccgaacattggcgccacctattattcaagcaatggttaacaacacatcctgatgatttagccaattatgcgacgattaaacagtttgctaagcataatgtaaagacgactcaagattataacctgaaaaaacagagccttgtacgtgcaatttatcagaagatttttacctcattgattggcgactaa

SEQ ID NO: 296631 - DNA, 930 bp, Proteus mirabilis
  misc_feature (840)..(849): n is a, c, g, or t
atgactgacgggattttattagctgaactacaacaagataagctgttattacaatatgatactattattatcgatgaagcccatgaacgtagcttaaatattgactttattcttggttatttaaagcagcttttacccaaacgcccagatttaaaagtgattattacttctgccactatcgatcctgagcgtttttctaagcaggatatgactgagggcattattgatgcaattgacgagttaagtcgagaaagtgcgggtgatattcttatttttatgagcggtgagcgcgagataagggataccgcagaggcattaaataaattacaactacgtcataccgaagttttacccctatttgctcgtctttctaatagtgaacaaaaccggatatttcagcctcataccggaagacgcatcatattagcaaccaatgttgccgaaacttctcttacggtaccgggcattaaatatgtgattgatacgggttatgcacgtattagtcgatatagttatcgaaccaaagttcagcgcttacccatagagcctatctctcaagcttctgcggatcagagaaaagggcgttgcggtcgtgtttctgatggtatttgtattcgtctttattctgaagatgattttatttcccgtgcgcaatttaccgatcctgaaatactaagaaccaatcttgcttcggttattttacaaatgacctcgataggattaggggatattagcggatttccttttgtacaagcgcccgataaacgcaatatacaagatggtgtacgcttattagaagagctgggtgccttacaagagggtactgataataaaggtgcnnnnnnnnnnaggtgcttatcgtttgacgccgatggggaaacaattagctcagcttcctatcgatccaagattagcgagaatggttcttga

SEQ ID NO: 296632 - DNA, 468 bp, Proteus mirabilis
atgtcaataaaattggataagatagacaagcatattttgcaagtgttacagcgcgatggcaaaattcaaaacatcgaactggcaaaagaagtgggactctcaccatctccttgtttacgtcgtgtacgtttacttgaagagtcaggtgtgatcacgcgttatgttgccgtattagatggtagtaaagttgatgcaggattatctttatttgcgcgaatttggttcagagcacaagatgctgaaactattgaagaatttgtaaaggcgataaaagtattacccgaagtggttgaatgccatctaatggcgggagaatgtgatgcacttattcgcattgtgacaaaagatctcgccacttatcgccgttttcacgctgattatttaacacaaattcctagcattcaaagcataaaaacagaagtacccatggagacggtaaaagtgagttttgctttaccattgcagtaa

SEQ ID NO: 296633 - DNA, 354 bp, Proteus mirabilis
gtgcaacttgctagagtgcttgctcaactttggcaaccgacacctgagaatgttgcgctatttcttgatgaacccacatcggcacttgacctctaccaccagcaacaaagtttgcgtttattaaagcaactggtcaaaacgcaaaatttgatggtgtgttgtgttctgcacgatctcaacctcgcctccctttatgctgatcgtattttattactgcatcagggaaaattagtttgcgaaggtacacctcaagatgtactcaccgctgagaatattgaaaaatggtatggcgccgaggtcagtgttaatactcatcctgagttatctcaacctcaagtttttttacgcccataa

SEQ ID NO: 296634 - DNA, 1062 bp, Proteus mirabilis
atgttaagaatatttttaacaagcttactatttattagttttttatctaatgcagattatgctccacaaattgataatccaagtgatggtttttttgtatcgtttgggggtaatgcgactatagcatcatcacctattatagccagtgatggcagtaagtattataaggtgggaaatacttattcactttcaggtagtaaggcaagaggtggagtaaaatgcaatgcttttttttgggggcccccaaatattggacgtcctcctgcatggcatcgtgtttttgtttatcagccttctgccaatataactattgatggattacaagcttatcgtgttaattctaatgttgtgtttacattacaaggtcaggctgtaggtaaatggtggcaaaatggtgatccttggatatcagcctgttatcctgctggtaatggaagtgaactggcaccagtgagtatgtttcaacaacaattccctattagtgttactatatatatcaatgagaaaattattgataatcatgttacaattcctaacgctaatttagctggttatgtaagagcttttaatggaggaccaggtagtgctccacccccttttaattcttgggatttttctaaaacaacggctcctattcatttagaaaattctgatatcatgataccttctaaatgcacagtaaaaatagatggtattaactcgagtaaattggagttaaatcatggcataatgaatgccaaagagtattttagtgaagtaaaatcaacagtaaattatgagtgtaaattctcatcattaacaaaagtaaagtttaaattagattatattaaagacgatgatcctttaaaacgtgtacctctgtctaatattggtgatctacagagtaaaatttatagtgagttagttttaatcgataataataccggtaaagaagcaggaacagaattaagaacaagtattaaagattttcaaagcattacaataaggagcacattaaaaggctctaatgcagtagcgggaaattatcaaggtactgcttggctaatcgctacgtttgattga

SEQ ID NO: 296635 - DNA, 687 bp, Proteus mirabilis
atggcggatattgtaatagtattgtcgtggaatagcttacttttacaagatatagcctttatggatagccaaggcatgttagttgaagcgcacgctcaacctttgagtaaatacagcgatggggtcaccttatcagacggttatgccgtgatgattttagaaagccaacaacagataaactcgagacaatatcttgcacctgcttatatctatcattccgtttttatgcaaagtaatgctgaacggacaatgggaggcacattatttaacttttatacgatatcaaaagtgatttctcagcttctcgatcttagtcattatttaccaagtgatattggtgctatttttattcatggtaatggttcgattattagtgataaagctgagacggtagctattactaacatctttaaacaacccattcctattattagctataaagggcagataggttatatttctaattgctctggtattattgatttaatgattatagctgattcattaaaaaataatcgattgatcccctcgactacacattatccaatagatgatggaatggaggttaatttcctcactaatcaagagggtgtgaactatagcgctaaacctattttaaaaatcggcttaggtatggatggctctattattgccatgttattaatcgcaaatggagagcaaggatga

SEQ ID NO: 296636 - DNA, 723 bp, Proteus mirabilis
atgaaactttctactgctaaacaaaaattgtctcttatcttgctgttaaatttggttggattgactctttttttatcttggtatcttcccgcacaacatggcttttggctttcaatagatacacatatcttttatttttttaatcggcaactattgccagactcttcttttgctatgtttgtggcttatgtcaataatcgagcattcgatgtgattattctgctggcgatgggagggttgtattaccatacctttcgtcagaaagattatcagggcaaacgccatctcattattgtgggaatagttatggtgctaagtgcaatcgtaattaatcagattggacaaaatattcctatcgaaagacctagcccaacacttcattttcacgatgtgcaccgcgtaggtgtagtgacaggaataccgactaaagatgcatcaggtgatagctttcctggcgatcatggtttgatgctactgatcttttgtagctttatattacgttatctttcatttcgctcttttttatgcgctcttttaattacggtaattttttcattacctcgtgttatggctggcgcacattgggcttctgatatcttagttggctctatctcgctcactttagtcacaacaagctggttattaataacccctgcatccgatatcatcattcattggctagatgaacatctcccttttaaaggcaaaaaagtatttagctaa

SEQ ID NO: 296637 - DNA, 201 bp, Proteus mirabilis
ttgaaaaagataccgatagttttagcatgtctaggtctattattaacggcacctagtttagcacgtgaaagtaaagtgttaggttcaacaacaattacttttgttggtgctattgtcgaaggcggatgttttgcatcatcagaagaaaatactgttaaaaccaaagtacaagccaaattggtcgaatggaataccatgtag

SEQ ID NO: 296638 - DNA, 480 bp, Proteus mirabilis
atggcaaatatcatctatctgtcaataacaggcaacaaacaaggattgatttcacggggagcttcaacgattgattctattggtaataaataccagattggtcatgaagatgaaatactaatatttgaattttcctctaatatttctattagccaaaatgttagttttcaaccaatagatattcgtaagccaattgataaatcatccccattgcttgctcaggcattgacaaataatgaaatattaacttgtaatttttcattttatcgtacctctatgtctggtggagttgaattatattataaaataaaacttacagaagcttctattactaacttaaactgtttctatcctaattctgtgacacataatgattctcagccagaagaaagtctttcaatacgatttaaatcagtggtgtgggaacacgtaacggcaggaacaagttcttatagcatttgggatgaaagggggttctga

SEQ ID NO: 296639 - DNA, 333 bp, Proteus mirabilis
atgcgtgaactgctgttatctgatagttatgcagagaaaacaaaatcagttgatcgttttttacagatcctgtctacattatatagcttagatagtgctacttttactcaatctgctgaaacagtacatggacgcacgcgaatttattttgccggtgatgaaaaaacattgctcgacagtggacgtcatacaaaacctcgccatattcccggtacgccattttgggttattaccaactcaaatactgagcgtaaaagaactatggtacaaagcatcatgcaggatatgcaattccctgccaatgagattgataaagtgtgtggaactatctaa

SEQ ID NO: 296640 - DNA, 858 bp, Proteus mirabilis
atgggaaatagggtatatcgtgacgttccatcaataaaagaagtatggaattgtgcgagtgaaatagcagggttcgatgtaaggacggtttgtttaaaagggcccatgaataaattggtacaaacctgttatcagcaagtggcgttaacaactatcaatattgcttctctttatttactgcgtgagcattgttgtgtgaatgaggcgggttattcagggcacagcgctggagaatattcagcgttatttgcggcgaacgtactggaacttgaatctgtctttaagttaattagttatcgcgcatctatcatgcaacagctcgctaagaataacaaaggggtaatgtatgttgttaaaaattgctcttatcagacgttatcaacattgatcgaccagcaagatctcgccacaaaggtgaatatttgctgtgataacagtgaacttcaccaagttattgggggggagtatgcaagtgtacgtaaggttgttaatcaattagctaatatgaaaatagaaacgaataaattagccgttaatggtgcttggcacactgaattgatgagcgaagggaaaaatttacttgctcactttttacagacaatccctttttcaatcccagataaacccctagtgatgaatgtttctgctgagattgttagcgatattgagacaattaaacagaatttagttaatcaactcacagaaaccgtaagatggacagcaactatggcgctatggtgtcatttaggctatcacaattttattgaacttggtgatagcaagtcattgtattatttagcgaaaaattcatatacgctaaaagataaaaatatattgcatgttaatgattatatttaa

SEQ ID NO: 296641 - DNA, 321 bp, Proteus mirabilis
ttgcttctagcctcaataagcttattttctgtctcttgttcgcaagaagatacagatgtcgtcaaagtagcaatcaatactggaccagaccaagtcatttgggatgaagtgatccgtttagctaaacttaccgaaggattaaatgttgaagttattgcatttaacgactatgaacgtcctaataaagccctagaaaatagagaagtagacgtaaatgtatttcaatctattccttatttacaatcagagataaaagcccacaattacaaatttcatattgccagcaaacctgtaataatttccttcataactccctcttaa

SEQ ID NO: 296642 - DNA, 162 bp, Proteus mirabilis
atgttacaatcaacacctatacgtttttcaagttacactatcacgaaacaagataaacaatataaatgggcattttctgcatattgcgtaaccaattctacttatcttaatgttgatgatgcttttgttgatccctgcataaataaattaattcgagattga

SEQ ID NO: 296643 - DNA, 675 bp, Proteus mirabilis
atgaagtatcgcctgtgcggtgttgctcttttagtagctttactttcaggatgtgcaagcacacctaacaatggtgacagtcgttctgatcccttggaagggtttaaccgccagatgtttaattttaactattatgttttagatccttacgtattacgacctgtagccgtagtatggcgtgattatgttccaccaccagcacgtaatggactatcgaatttcttaggtaaccttgaagagccagcaagtatgctaaatagcatcttacgtggagattttgaaaaaggggctaagcatttcggacgtttttggatcaataccgtatttggtattggtggtttaatcgatgttgcaggaatgtctagagaatcaatggaaaaagaagttcctgtaaggtttggtagtacgttagggcattatggtgtgggatatggcccttatgtggtattaccgggctatggcagctttacagtgcgagaagaggggggcgattgggctgatgccacctatccagtactgagttacctcactttctggatgtctgcgggtaaatgggcccttgaaggtattgaaacgcgagctcaattattagattcagatgcaattttacaaaactcatctgatccatatttaatgatgcgtgaagcctatttccaaagaagaaggcttccgtga

SEQ ID NO: 296644 - DNA, 357 bp, Proteus mirabilis
gtgaagcctatttccaaagaagaaggcttccgtgatgcatggcgtattgcattaggaaccacttattaccatgatgataattggacattccgcaccggtattgcctttgatgatagtcctgttcctgctgataagcgctctatctcgatccctgaccaagatcgcttctggttaagtgcgggggcaacctacgcatttaataaagatatgtctgtggatgttggtttagcctatatgcacggtaagaaagtgacgattaaagagaaactatctgaaagcttaccattgccggcttatgaatttgaatcatcaggtaaagcatggttatacggtatgaactttaactatcgcttctaa

SEQ ID NO: 296645 - DNA, 540 bp, Proteus mirabilis
atgcctgttattgggcataaaactattgcggcaattagaaggctaaatatcaatggtcacggtctgaaatgggagactagtgaagggaagttagtcatcggcaaaggcagcgataggtatattgtaattattggtagtaaaaagctcttcttatcactcgatagtactcaggctggttatgggattcggtattggtatttatgccctcattgttctaagagaagggctgagctttaccttggaggtgaggacttagcttgcagagaatgttggaagcttcattatgccagccagagcgaaagcagcattgaccgattaagacgcaaggtgcgagtaggtcgttttgctatttggggttatagccctaatgttagtaacctaaccaagcatgtatattctttcggtaaacccaaaggcatgagatgggagaaattcagggagaaagtagcggaacaggcaagattagaggattcttactggcaggcgtttataccatgtgtagataaattaacgacaaatattaagataactagtgcttaa

SEQ ID NO: 296646 - DNA, 918 bp, Proteus mirabilis
  misc_feature (284)..(293): n is a, c, g, or t
atgacaataggtcaactcattgcttttaatatgctattaaaccactgtctacaacctttaagttctgcaatagaagtttggggaaagtatatccgagccaaaacggctatttataatttacaagacattcttaatctcccaatagagcaagaaaaagccaataagaaaatgaccttacaaggtgaagtgagttttgagaatgtcagttttagttatcaacatgatgccccccctgttgtaaggcaaatttcatttagaataaataaatatgaaactattggtannnnnnnnnntatcgtcgggacgtctggatcagggaaaagtacattagcgcgcatcatcgcagggctttatatcccacaattaggtcaagttaagcttgatggcattccggtttgtgaaattccccccgcagtattacgtcaacaaataggttttgtcttacaagagaattttttatttcatttaaccgtgctcgacaatatccgtttaacgcagccatcagcctcattagatgatgttattcatgtagctaaattagcaggtgctcatgagtttattttgaaacttcctttagggtacgacacactcattgctgaaaatggcagatctttatctgggggacaatgccaacgtattgcaattgctagagccttactctcatcccctaaaattttaatttttgatgaagctaccagcgcattggatggtgagtctcaagccatcatcgaaaaaaatcttccccttattacccaagataagaccgtcattatgattgctcatcgcctttccacaataaaaaactgtgaccgcattattgtattagaaaaaggccagataattgaagaaggcaaacataatgaattgattagaaaagatggcgcttataagaaactttggcaacatcaacaaggataa

SEQ ID NO: 296647 - DNA, 984 bp, Proteus mirabilis
atggataataattcgctaaaaaatgcgagtttatttgataatgatcccgttctttatgctgcatggctttactatcaggacggactcagtcaaagtgaagttgcaaatattatgagcgtttctcgagtgactgttgtgaagtatttacatctcgcgagagaaaaaggtttcgttaatataagcttggattcatcagtattttctacgattgattattcaatcagaataaaagcaaaatttaatcttaataatgtgcttattttacctgatgaagaaaagaataaatcgcaacaaacatcaaatatgaatcgagaaagattagctaaagcaggggctatgtatctttctcagataatcagcaatgatgatattttaggcgtagcttggggaagaacaatccataaactagggcactatctccccactaaaacactagaaaatgtcactgtgttacaaatgattggggctgtagccccacaacctgattttactactgcggaatctgccgctttgatcgccaataagttttcaggttgcagtattaatttgcatgtaccggctgtagtgtcaaatgcacgtttggcaatggaactacaagcagaacccataatacggcgtaatttctctgctttaaatcaatgtaataaagctttgtttgtagtgggtaatactcaagatgacaatcctttgattacaacaggcgtactcaccacaaatgagatggcacaatatcgcgatttaggtgctgttggtgtcatttgtggtcgattctatgatgcacaaggtaatcctctgctttctgatatcgaccttagaattatgggaattagtcttgcacagttaagacagatcccacagcgtatttttattgctggaggcgttgaaaatgttgctgcaaccataggcgcaataaaagggggatatgctacagatattgtcatcgatgaagtgacggcattagcattattggagttgagtatttaa

SEQ ID NO: 296648 - DNA, 912 bp, Proteus mirabilis
atgatcactggtgctgcgcaaatggacggagctattctggtagtagcagcaactgatggtccaatgccacaaactcgtgagcacatcctgttaggtcgtcaggttggtgttccttacatcatcgtattcctgaacaaatgtgacatggtagatgatgaagagctgttagaattagttgaaatggaagttcgtgaacttctgtctcaatacgatttcccaggtgatgacactccagtaatccgtggttcagcgctgaaagcactggaaggcgaagcagagtgggaagcaaaaattgttgaattagcagaagcactggattcttatatcccagagccagagcgtgcaattgacaaaccattcctgttaccaatcgaagatgtattctcaatctcaggccgtggtacagtagttactggtcgtgtagagcgtggtatcatcaaagtaggtgatgaagttgagattgttggtatcaaagaaaccgcaaaaacaacttgtactggcgttgaaatgttccgtaaattacttgacgaaggtcgtgcaggtgagaacgtaggtgttctgctgcgtggtacaaaacgtgaagaaatcgaacgtggacaagtactggcgaaaccaggttcaatcaacccacacaacaaatttgaatcagaagtttatattctgagcaaagatgaaggtggtcgtcacactccattcttcaaaggctaccgtccacagttctacttccgtacaactgacgtaactggtactatcgaattaccagaaggcgtagaaatggtaatgccaggcgacaacgtgaacatgatcgttgaactgatccacccaatcgcaatggacgaaggtttacgcttcgcaatccgtgaaggtggccgtacagtaggtgcgggtgttgttgctaaagtattaggttaa

SEQ ID NO: 296649 - DNA, 300 bp, Proteus mirabilis; identical to SEQ ID NO: 296382

SEQ ID NO: 296650 - DNA, 600 bp, Proteus mirabilis
  misc_feature (564)..(573): n is a, c, g, or t
ttggctgaatatggtattaactctgatggtttcttcgaacttagcgcattaccaaaacgtgttgctgttgtgggtgccggctatattgctgttgaattagcgggtgtattaaatgcgttagggagtgaaacacacttatttgtgcgtaaacatgcaccattacgtagttttgatccactaatcgtcgatacgctggtggaagtaatggaagcggaagggcctaaattacacacccatgcagttcctaaagctgtggttaaaaatgccgacggtagcttaacgttacaacttgaaaatggcttagagcagacggtagatactttaatttgggcaattggtcgtgaacctgctacagataatatcaatttagcggctacgggtgttaagctaaatgaaaaagggtatattcaggttgataaattccaaaataccaatgtacccggtatttatgccgtaggtgataatacaggtgcggtagaattaacccctgttgcggtagccgctggacgtcgtttatcagagcgattatttaataataaacctaatgaacatttagattatacnnnnnnnnnnacccagctattggtactgtgggtttaa

SEQ ID NO: 296651 - DNA, 444 bp, Proteus mirabilis
ttgcctttaggcattgatatttccccaagtgagaaaacaaaaataggttttggctttggtaaaaagaaagctaattttaacgcaaattttcgacgcaataccgattacaccttatcactgacgttagatcaaaaaagaatgttgataagaatgcgttattttaatctcacccaaagtccgacggtcaccaatattaatcaatttttaaaacgttttttctggcgaggtgaaagtaaagtatttgtacttgatccctttgatatgacgtatatgtattacgtttttaattttaatccagatgaacgcttacgtttattattagaaaacttcgatttaatgccacgtccttctggcgtaggcgtcaaatatcgcatcataactaaaaaagcatttggttatggttcatatcgtaaaaatttcttaaaaagtaatttcggagaataa

SEQ ID NO: 296652 - DNA, 933 bp, Proteus mirabilis
atgggaggagagcgtattaatgccacacactcctatttaagtaatgtggaatttatgggagtgcccggcaccattatccctaaaggttcacaagccctaacgataaatggcgcagtatttgaaacattaacctctcttattatcgcagacactggaaaaataactggggatatgcgcgctaaagagtacgggcctatcacttgtggtattgggcaattaaataaagtggcaagttcggtattaggctgggaaaaagtcaataataccacgcacgctattattggccgttatgcagaatctgatattaaagccaggcgtcggcgtaaacagactctcgctaaaaataccatcagtgttgcccaagcaattacatcgtccctctatgaattagccggggttaactctctctcttttcgagaaaacttcactgataaaacattaactatcgatggtatttccttattgccacatagcatttatgtctgtgttgaagggggagacagccatgaaattgccaatgttttattaagaacgaaaacaataggtgcggcgtttaatggtgatattgaaataaatctcttagagccagcaagtggtcaagcatatccgattaaattttcacgacccaaagaagtgacgattttttgcaaagttaccgttaaaaaatcctcttttgatgcacaaaccattattcctgatgcactagaaaaatggagtcatggagagatagagggggataatgggctggtggtagggcgagatgtctctccttttgagatctccgctgccgtcaatgctgtggagccacatttatttgtcacaaaagttgagttatcaacagatggaaaaaattggcatgtagcattaattcccattgccattaatcaaattgcccgcttacctaaaggggcgatacaagtggtgatggtatga

SEQ ID NO: 296653 - DNA, 255 bp, Proteus mirabilis
  misc_feature (235)..(244): n is a, c, g, or t
atgtcaaaagggccacaaagtaccgttaatcgttatttacaaagtttaattcctgatccgcaaaaagtaagaacatcagaatttcctggtactttaatgaatgcagtaccgacattttgtgccatcacagagggaataaaaggttataccacgacattggcaacaggggttaatgctgcattaggagcgttaacttatggttatgaaattatcaggcaagatctacaacctcagnnnnnnnnnnacctcaggtaa

SEQ ID NO: 296654 - DNA, 624 bp, Proteus mirabilis
atgagtaagaaagttaatctgaccaagaatgcgacagattatcaggtttattctaatgcaagtgccggctatatccccggagaaggggcagggatgttatttcttgaagataaagagtatgccaagcaacgaggcgctaaaatttatgctgaaattattggctacggtaaagcgaatgataatacttttttagtagacgaaaatattactgatagagtggccgccttatgtaaggctatccaacaagcattatctgaggcgcaactcagttgccaagatattgatattatctgtggtaccagtgatggtaataaagagaatgatgaagttgaaatccgtgcgattcggcaactattttatcaagcggcaaatcatgtaccagtagttaattacaatgccttttttggtttagttgaatcatgcgctgggatattggcgatctctttagtgattcatatgatgcaaagcaacacgataatacctattccttatacaaaaagttttatagctgatgatattcattttgttacccaaccgattaataagcagatagaaactgctttagttcttggttcatcagaaggatgtaatcactatgcaattatcatcaggaaaccgttatga

SEQ ID NO: 296655 - DNA, 600 bp, Proteus mirabilis
atgacggtgaatgctagttatgttcctcatttgtatcgtagttttggaggatctatgaatagcggtatgacgataacttctcatggtgttgcattacatagatcttctaatggtgatactagaattatgattgaaacacctggagtaagcggtgtccctcttgataatggaataatatcgacaaactttatgggacttgcagttattcctacggtaagtagttatagaaaaacaacgacaactattaataccagtaaattaccagataatttagatacattgggagcatcgacagatattacgttaactaaaggggcaataggttatcgaaaattagaagtaatgaaaggtgaaaaattgtttgttgttattaaattaaataatggtaaaacaccgccttttggcgctagcgttcgtaatgagcaaaacagagagctgggtattattggggaagatggagtgacttggatagtgggtgtttcaccacaagagaaactatctgtttactggaatggtgaaaagcaatgttatttagaattaccaaacacgcttgatccaaccgctaatatgttgttattaccatgtactttaacttattaa

SEQ ID NO: 296656 - DNA, 744 bp, Proteus mirabilis
atgaaaaatactgatctagaattaattattaatgaaaagctaagtattgagaattttcacgactacgcacctaatggtcttcaagtagaagggcgccctcatattcaaaaaatagtgacaggagtaacggcttgccaagctttacttgatgaagcggtacgtttaaatgcagatgctgtattagttcaccatggttatttttggaagaatgagccagttgttatccgttcaatgaaacgcaatcgcttaaaaaccctactatgtaatgatctcaatctatatggttatcacttacctttagatgcccatcctattttaggtaacaacgctcaattagcgttaaaaatgggcgtaaaagttgagggtgagatcgagcctttagtgccgaaagggatttttgatctacctgtcacagccaatgaattaaaaacacgactcgaaaaagccttacagcgtaatgtgcttcactgtggtgacaatgcaccagatgttattcgccatattgcttggtgtactggtggaggacaaggatttattcaacaggcggcagagcaaggtgttgatgcatttgtaacaggagaagtctcagagcagacgattcatatagcaagagaaatgggcgtgcattttttcgctgctgggcatcatgctaccgagcgttatggtattaaagcattaggtgaatggttagcacaaactcaccatttagatgttacttttgtcgatattgataatcctgcctaa

SEQ ID NO: 296657 - DNA, 549 bp, Proteus mirabilis
  misc_feature (477)..(486): n is a, c, g, or t
ttgcatgtaccgtcaaatggtagtactgcatcagcaacagcccctgcgcttaatgtgacagatgctaacgccagtggtgtaattaaggtgaccatacctcaggttaaagggtggcgggttatcgcttcttactgtagtggttcaggctcaatggcagaagaaggaaattaccgctattggattagattgccacaaacaaatacttggcaaaaacattcatcaggattgagctattatttgtccaatctctcttggacactagcaggtaccaataataacaataatcaggtttatgtagggccaaattattatgctaagcagtcaccgagtggttgccatagtgttggaaccgtttggggattaggttctgcagtgcttccgttagatcgttctatgtcattaactgtggcagtgtccagagcgacggcttatccgggatcatataatttaaatattccttttgcatgggcttatgannnnnnnnnnatgaagaaaataaagggtctggtggtaacagtacgggttatcttcaatttggtaatgcaatga

SEQ ID NO: 296658 - DNA, 414 bp, Proteus mirabilis
atgaagccttatatgaatagttatattaatattcctgtgagtatcacaagtaaatgtaatattaaaaaccaagttattaacttatctcatggaaatatgaccccagaagaatctattaacaatgtgacgccaccttataactatcaactaacgtgtgattatgatgcatcagtatccgtttcattaataggaagtgcacctgtttctggaaaaacggaaaactatacaaaatgtggtaatggtggctcttgtgagttgaaatataacgataccgaatataaaggtaaatttaaacttaacgcaggtgctgcaaaaacattttctatcacatcaacctttcatcctaatgatataagaaaccctgttgaaggtagttttcaaggaagtgctattttgcgggtattggttgactga

SEQ ID NO: 296659 - DNA, 549 bp, Proteus mirabilis
atggatattgttgattcacatcgtcgtaagtggttaggccttggtatggctgctgttggtttaggtttacttccctcacatgcatttgcatcattagcaactccccgaccgaaaattcttcgctttaataatttaaatactggtgaaactattaaagccgagttttttgatggtaaacgttataataaacaagagcttgctagactaaatcatctttttagagatcaccgtcaaaataaagttaaaactatcgatccagccttatttgatcaaatctatctgttacaggtgatgttaaacaacaataaagccgttgaacttatttcgggttatcgttcactcgcgactaataatcatctacgtcaacacaccagcggtgttgcgaaaaaaagctatcatacccgtggtcaagcaatggatttccgtttagtaggtactgatttatctaaagtacgccaagtagcactaagaatgaaagcgggaggagtgggttattatccacgaagtaattttgttcatatcgatacaggacccgtgcgctcatggtaa

SEQ ID NO: 296660 - DNA, 330 bp, Proteus mirabilis
atgatgtatcacattatacctgtgacaaattatatgcaaaattgcacccttatctggtgtgatgataccaaagaagcggccattgttgatcccggtggtgatgtcgaaacattaattgcagaaattgaacaacgtcaattaaagttgactaaagtgctattaactcatggtcactttgatcacgtagcaggaacggctcaaattgttgagcattttcatgtgcctgtttatgggccacataaagatgataacttccttattgaagatttagaacaacagtgtcgtatgctgtctcttatacacatctccgagcccacgagaccgtactag

SEQ ID NO: 296661 - DNA, 831 bp, Proteus mirabilis
atgggaaaccagtttggtgcggctatcacttacttctcatttttatcattaattcctgtactaatgctctcttttgcttgtgcgggttttattttagcttcaaaccctgatttgttggccaaattaattactggagttgccaatagtattgatgatccaactttagcctcaaccgttcaacaaagtattgatactgcggttcgtcaacgtacaaccgtaggtttaacagggttagccatcgccttgtattctggtgttaactgggtcggaaacttacgccaagccattttggctcaatctcgcccgatatgggaacgcaacaaagaagatcaagaaaaaatttactttcgttattttcgcgattttttagcccttatcggtttacttgttgcacttgttatcactattacactaacctccgttgctggctccgcacaaaaattgattgtgcatacattaggtttagatggtattgaatggctcacacctgcttggacaaccattggtttaactatctctattagtgccaattatctgttatttttgtggatattgtggatcttacctcgtcaccaacctaaacgtatctcattattaaaaggaacgcttatcgccgcaattggctttgagatcttaaagtcggtgatgacatggttattacctagattagccagttcaccttctggtgcagcttttggctctgtgattggtttaatggctttcttctacttttttgcacgactaacactcttttgtgccgcttggattgcaacagatggacctaatatgcgcaaagaaaaacacaagagtgaaacgcaatctatcacctaa

SEQ ID NO: 296662 - DNA, 525 bp, Proteus mirabilis
atgaacaagcttcttgtactaaaatccagtattttagaaaattactcgcacagcaataaaatggctgactatctaatagaaaattggcaaaagcatcatcaaaatgatctcattaccctacgtgatctggcaaaagatcccattcctgttttagatcaagccacattatttgcttttggcaaagatacggctatgttatcggaacaacaaaaagccgctagagcactctctgatacattaattaatgaattaaaagcacatgatattattgtgatcacggcgcctatgtataatttctccatcccttctcaattaaaacactatatcgattttattgcgcgtgcaggtgaaacttttaaatatactgaaacagggtcagtcggattacttgaagataagcaagttattgtattaacgagtcgtggtgggatccataaaggacaaccctctgatttaattattccatatctaacacaatttttatcatttattggtattaataatgtacagtttattctaacctag

SEQ ID NO: 296663 - DNA, 597 bp, Proteus mirabilis
atggctcagctttacttttattattcagctatgaatgccggaaaatcaacatctttattgcagtcttcttataactataatgagcgaggaatgcgaactttgatttttacggcagcgatagacacacgttttgccaagggaaaagtaacctcaaggatagggttaagtgctgatgcattgcttttcagtgatgatatgaatattcgtgatgctattttagctgaaaataataaagagcctattcattgtgttttgattgatgaatgccaatttttgactaaagcacatgtagagcaactttgtgaaattaccgatagttatgatatacccgttttaacctatggcttaagaacggattttagaggtgaattatttactggtagtgcttatttgcttgcatgggctgacaagctcgttgagcttaaaacagtttgttactgcgggcgtaaagcaaataaagtattacgcttagcggcaaatgggaaagtactttcagacggcgcacaagtggaaataggtggtaatgaaaaatatgtttcagtgtgccgcaaacattatacagaggctacgttaaaaggacgaattgaacagttataa

SEQ ID NO: 296664 - DNA, 960 bp, Proteus mirabilis
atgaaacccgttgtaatactttatcaaccgcttccagaaaaactgcaacaaaaattatctgccgttgctgaggtaaaacagtttaacgcgctctctctcgattgtgccgattttaaagccaccctcgctcatgctgaaggattgttaggtgcaggcggtaatatcgataaacactttattgaaaaagcgccaaaactaaaagccgtatcaacgatttctgtcggttatgataatgtggatgttgccgcgctcactgaacgtcatatcaaattgatgcatacacctacggtattaactgatactgtcgctgatacaatgatggcgcttgttcttgccgtctctcgtcgtattcctgaactagctgataatataaaacaaggtttatgggtaaaaagtattacgccggattggtatggtactgatgttcaccataaaaccatggggattattggtatggggcgtatcggtaaagcattagcacaacgcgcccacttcggttttgatatggatattatttaccattctcgtactgaatataacgatgttaaccagcattttaatgctaaattttgttccctagagatgcttttacaacaagccgattttgtctgcattactttaccgctaacaccagaaactcatcatctgttaagcgcaaaacagtttgcattaatgaaagctgacgcctatttaattaatgccggacgcggtgccgtggttgatgaaaaagcattaattaacgcattagagcagcgacaaatagctggagccggattagatgtgtttgagcaagagccactgccaacctcttcaccacttttaaccatgaaaaatgttgtcgccttaccccatattggctctgcgactaaagagactcgctatgcaatggctgaatgtgccgttgacaatctgattgctgcattaaccgataatgtaaaagaaaactgtgttaatttttaa

SEQ ID NO: 296665 - DNA, 582 bp, Proteus mirabilis
atgaacgtaccgggtgaaaacgagtaccgtactcgcggtgtaacatactgcccacattgtgatggtcctctatttaaaggtaaaagagtggctgttattggtggtggtaactcgggtgttgaagctgccattgacttagcgggtttagtggagcacgtgaccgtactagaatttgcctcagaaatgagagccgatgctgttttacaaaagaaactgcgtagcttaagtaatgtcgatgttatcttaaatgcccaaacaacagaagtatatggagatggtactaagttaacaggactgaaatataaagatcgcactaacgattcaatgcatgatattgtcttagcgggtattttcgtccaaattggtttactgccaaacacacaatggttagacggaactgttgagcgtaataaaattggtgagatcgtggttgattcacgtggtgaaaccaatattaaaggggtatttgctgcgggtgactgtacaactgttccttataaacaaattattatcgccgcgggtgaaggtgcaaaagcctcattaagcgcctttgattacttaattcgtacgactgcaaaataa

SEQ ID NO: 296666 - DNA, 444 bp, Proteus mirabilis
atgggtaaaacatggcgccaagcaacagagcatgaaatgaaacggacgggaaacagtgcaggttttctcgtctcagtaccagaaaccggtgattatcccgtattaatgaccattccagcgattggctttcaaccgcctcgccccatcttaatgctgagctgtattgataacattactcggatgcaaattatcctgccaacaaaacaagatgctggcagtgtgatggtttcaacggataaaacacaatttaccgcagaatggtttttacgtgaaaacggttatgtattggaatcaagccgcggtataccgggcatagatgaaattaaacgcttgttaaatgctgaaagattgacgttgaaattatctaataacgaaaaactcaccttcaatatttcaggtatttcacaacaaataatccctttaagagcggcttgccactggtag

SEQ ID NO: 296667 - DNA, 636 bp, Proteus mirabilis
atgataaaaaaatcatcagaactgattattttatccagtcaagagcaacaatatataaaaaatcgcgatagattagaaaaacaaaaacacctagagtggcatgacaaatttaaacaatatgaaagcgaagtttttatttatcaacaaaatctttatcatgttcagaaacgtcaacaattaaaaattgttcgttctcctgttacaggtacagtacaacaactcgctgttcataccctaggagccgtattgcaaccttcacaagcggtgatggtgatagtgcccgatactcagcataatgttgctgaggtgaatattctcaataaagatattggttttatctatccgggtcaaaaagcggtgattaaaattgatgcttttccttatacccgttatggcaccattgaaggcaccattgttaatatagcaaaagattccatacaacatgaacaattaggcttagtttatcccgtcctgattgaacttgataagcaagtaatgggtgaagatgaagcacaatataaactggctacaggtatgtctttagttgccgatataaaaattgaaaaacgtcgagtgattgattatttactcaatccaatagaagtttatcaacatgaagcattaagagaaaaataa

SEQ ID NO: 296668 - DNA, 444 bp, Proteus mirabilis
atgatcagtgtattgcctcgtattagtaatactaaccaagagattgagatgattatcaatcttgaagatggcgccgagaaaaaaagtgatgatgaagatagagaagaagggattgaaaaattacctgttattaatcgcacaaatatcagcactgtggcgcgagtttctgaaggcggtagtttattaattggtggatatacacgagaagataacataaaagcagaaaacaaaattccttttttaagtgctatacctttagttggccgagcatttagctatcagtcagataataataaaaaaatggtgcgtatttttatgttacaaccgcgtttattagataaaactgatacgcacggattggactctttaactgaacacccatttttaccgatggataaaaaaacatctcaagcgctaaaacaaattcaggcatttatgaggtga

SEQ ID NO: 296669 - DNA, 357 bp, Proteus mirabilis
atgaatagaaaagagcttatcgagtatatacagaaaacatatgccgtaatccccgaatatttatggagtaagtaccctaattatgcggttttcagacatcataatcattctaaatggttcgctgtcatcatggatgtcgctgaaaacaagctatttgatacgggtaaaaataataaagtcgatgtgattaacttaaaagtaccggtgcctttagtgggtgctttacgcttaaaaaaagcagtttatcccgcttatcatatgaacaaagagcattggatttctattcgcttagacacagattttgatgatgctgagttgaaatcattaatttctgaaagttacgaactgacgcagtga

SEQ ID NO: 296670 - DNA, 171 bp, Proteus mirabilis
atgaacaaagtggtttataaagtgagtggactatggaacgaaacgtcctttgtaaatctatttattgcaacgaatgaaaaagaagtattatctgcaattatactatgggctcagtttagtggtgcaaaagtggatgatttatctattgagtattatagttccgtgcattaa

SEQ ID NO: 296671 - DNA, 819 bp, Proteus mirabilis
atgatgatccaagcgttacattcgctttatcaacaacacaccgataatggtggtcatggcatcggacgttgtggtggtaaaggtaaacacagaggacaacaccataatggcaataatgaacattgttgtcacggtgaaagaggccatcaccaagaaggtcatggcaaatgttgccaacagggtgagcaaagtcatgagcataatgatcatgccgaacatggctgttgtcacggtgaaaaacagcaagagcatggtaaacgacatggccgaggttgtggtgctggtaaaggaaaaggaagaggccaaggtcgtcaattaaaacgtatgtttgaccatggtgatttacgtgtccttttgttgagtatgattgcggcaaaacctagccatgggtatgaaattattcgaggaatagatgaagcatcttcaggactatatgtaccaagtccaggggttatatatccaacactgacactattagaagagcaagatttagttgttgctaatatcgctgaaaaaggccgtaaaaattatagtattacgccagaaggttcagcatttttagcagaaaaccaagaaacagaaaaaaatattcaaaataaactggcttatgcacgtgatttatcacaaaacgcagggggagtttctgaggaaatcgaatttgcggtaggaaaattaaaagcggtattacgtcataagttagtattgaaacaactttctgtagaaaaagcgcaacgcattgcttttatacttaatgaagcagtcgaaaaaatagaagccattaatgaggcattaatctctgaggtaagggaagatgaataa

SEQ ID NO: 296672 - DNA, 843 bp, Proteus mirabilis
atgattgaatggtcagaagaaaaacctgtaatctactcagtatctttagatgggaatgaatatgtgcataataaaaacaggatattacctacaaagaactcatttcaaataatcacagaaaatataaaaaaactacaacatagattaggtcgcgatagagtttcaacagttactacagtaacaaaggaattgcttcataatcctcaatcactgattgatgctcattttgaattagatgtatttgatctttttattaggcctataagcccttatggatttgctgagaaaaaagaaagctacacaatatctgagtatattaatttttatgaaaaattattagatattattttcgaggaaaataaaaaagggtttccttttgttgagcattctggtgctatacatataaaaagattatataatcctggtttttgtgggtatgctgatttaaaatcccctagtggtatagtatttaatagcttattattcaattatgatgggaaagtatatggaagtgacgaattaagaatgcttcagcaggtatactctgatattgacttttctttaggtgactttgattcgttatcatttaataaaaacactatctataataatttactttctaattcatttaacatgctacatgttggttgtgaaacttgtgcttttcagccatattgtggcgttgacccttgtcaaaatatcagtttatttggtgagccggttggaaataaaagtctttcacgattttgtctttatcataaagggatgtttaaactactagtaaaaaaaattgatgaagataatgcaggggctacattactaaaaagttggatttatgcttga

SEQ ID NO: 296673 - DNA, 813 bp, Proteus mirabilis
atgaataaatcggttgaagcagtgattttagattgggctggtacagtagtcgattttggctctttcgcccccacacaaatttttgtcgatgcctttgctcaagcctttaactttaaaataagtttatcagaagcacgagggccgatggggatgggtaaaatcgatcatattcgtgctttacttaacgagcctaatattcgtactcgctggacagcccaatttggtcacccaccaagtgaagaagaggcacagcatatttatcgcacctttatgccgttacaaattgcacaagtggtacattttgctaaaccgattgagggagcacttgaggctatctcgaccataagagcacaaggaattaaaatcggctcttgctcaggttatcctaaagccgtcatggatgtattagtaccgaaagccgctgaatatggttatcagcctgattgcgtggttgctagtgatgaaattgccgccggctctcgcccaggcccttggatggcgttaaagaatgtgattgaactgggtgtaatgagtgtagcacgctgtgttaaagtcgatgatgcagtaacaggtattgtcgaagggttaaatgccggcatgtggactgtcgggttatctgtttcaggcaatgagtttggtgccaccttcgaacaatatcaaacaatggaacaggcagaaatagaaaaccgtaagcgcattgctgaaaataaactacgtaccgctggtgctcattatattattgatacccttgccaatttacctgcggtgatagaagatattaatcagaggatcgctaataatcaaaagccgtaa

SEQ ID NO: 296674 - DNA, 546 bp, Proteus mirabilis
  misc_feature (432)..(441): n is a, c, g, or t
atgaaattaaataaattagctttagttcttggtttaggtttatctgttgttgcgggttctgctttagctgcagatcaaggtcatggtactgttaaatttgttggttcaatcattgatgctccttgctcaattactcctgatactgaaaatcaaacagttccactaggtcaaatttctactgctgcattaaaagatggtggccgtagtaattctcgtgactttaaaatctctttagaaaattgtactacagagacttacaaaactgttcaaacaactttcactggctctgaagcaactgaagttttagaaggttctttaggcattgaaggtatcgctaaaaatgcagctgttgttatcaccgatgcgggtggtaaacaaatcaaattaggcaccccaagtgctgctcaaaacctgcgtgatggtaacaatgannnnnnnnnnaacaatgatctgaactttgctgcttatttacaaggttctgcatctgaagctgctgttccaggtgactttactgcaatcgcaactttcgcactgacttatcagtaa

SEQ ID NO: 296675 - DNA, 825 bp, Proteus mirabilis
atgtctactgcaacaaatctgaatgaactacaggaacaagttcgctcccgctataatggattaagtaaaaggctacagcaggttgcacattatcttttggataataaaaacagtgtagcatttgatacaatcgcgatccttgcagataaagcaaatgttcctccatcaacattaatccgttttgccaatgcatttcatttcaaaggatttaatgaaatgaaacttttatttcaacgtcatttaatgggtgaaatggataatgaaaaattaacctataagcagcaatacaaaaaggaaccaccaaacttaaatgagccagattatattctgcaagagtttgcacaagccaatagccacgctttgcaacagttagctcatcaaacccataaggatatgttaaataaaactatacaactacttgagtatgcagaaactatctatataggtggttttcaccattcttttagtgctgcgagctatttttttcacgcgctttctcatatcccttgtgaaaccgtctttgttaattgcctagggggaatgtataaagaacaacttaggaatattacacatagagatgtgccgtttggcatccatttccacccttattcagaagaaatgcaaaaaatgtgtgagattgctgcttataaagaggctaaacaaattattgtaacagatagccccataagcccattagcaagtctaagtgatgtttgtttaactgtaaaagaagcacaaataaaaatgtttcgttctcaaacctcaacattatgtttactacaagcactttcagttgcattcgcttttagaaaaaagagccattaa

SEQ ID NO: 296676 - DNA, 573 bp, Proteus mirabilis
atggaattgttgtgcccagcaggtaacttacccgcattaaaagccgctgttgataatgccaatgctcgccattttgctggcttaaacttcacagaaaagaaattgcaagaagccgtcaattacgtacatcgccaccagcgaaaactgcatattgccattaatacttttgctcatcctgatggatttgaacgctggcaaaaagccattgatatggcggctcatttaggtgccgatgcattaattttggccgatattgctatgctagagtacgcagctgaacgctatccacagatagagcgtcatgtatcggtacaggcgtcggccactaatactcaggcaatcgcattttatcaacgcaattttgatgttgcacgtattgtactaccacgcgttctttctattcatcaagtcaaacaattggctcaaagtagtcctgttcctttagaagtctttgcctttggtagtttgtgcatcatggctgaaggacgctgttatctttcctcttatctaactggtgaatcgcctaatactgtcggagcctgttccccagctcgttttgtccatcactgctaa

SEQ ID NO: 296677 - DNA, 504 bp, Proteus mirabilis
gtgttattattaattattttttttagttattttgttagtgctaattctagtttagatgttaattttcgtgggatattaactagcaccacttgtcaattatcatctgattcattagaacaagaaattgcaattaataatttacgttggcaatatttaaatgaatatggacgtagcccaatcaaatatttttttctaaatatagaaaaatgtagtgatactgatttagcaaaaacaatttctattacttggaaaagtaacagtgtgattgtaattgatggaaataattacattgctactgatggtaatacaaatattctacttggtatcacaaatagcgatgataaattgattgagcttaataaaccaatgcagttttctcaagttgaaaaggtaggtgaaatgcaaaaaattaaatttggtgtttttgctagtaaacctaatgaacgcaatattaatattggtgattttatcagtgttgtaacattcacagttgagtatgaatga

SEQ ID NO: 296678 - DNA, 822 bp, Proteus mirabilis
atgcgttctgataatgattctatatggcaaaatgcgagtttaagtactaactcctcgcataacatgaagaaacgttttaacaatactatcggattaaacggtacattattggaagataaaaacttaagttacaatattcaaacaggttattctcatgaagaagaatcggactcaacaggatatgcctcattaagttataacggttcttatatgaatagcaatataggttataactataccgatacatcacatcaaataaattatggtatgagtggcagtattttagctcactcaggtggtataacacttagtcagcctatatatcaaacagcggtgttagttaaagtacctgaagttaaaaatataaaattagaaaacaatagtggcatcacgacagacagtaatggttatgcggttttaccttatgtttctgaatataaagaaaaccgtattgcattggataccaattcattctctaacaatattgaaatagataatgcggtgaaaagcgtagttcctactcgtggggccattagtgcgatcacatttgagcctagtgttgggataaaagcaattacgacattaacccataaagggaaaccagtacctttcggggctatcgttgattcaggtaataatactgggattgtggcagatgaaggaaaagtttatttaacagggttatcaccttcagggcaattaaaagtgaattggggtagtaagaaagagcaacaatgcttagcaaattacacattaccaccacaagatccagataaactttatgttgaatatagtgcagagtgccaccctattaaggaataa

SEQ ID NO: 296679 - DNA, 390 bp, Proteus mirabilis
  misc_feature (60)..(69): n is a, c, g, or t
atggtgattatccacacgataaagttgaagctatgtaccaaagtagtaccaatgccatannnnnnnnnngaacagattatagcggttgttttcagctttccggtcagttctttttctcttccacctattgctcaagaaattaatcgacgttttcctagccttacataccataattggttttacggtcctgtatgtattgataaatcataccgcggaaaatcgctattaaccgagctttaccaatatattggtgcgttacaaggtggtcgcccgattgcatttattaatagtgaaaacatccgctcgctaaaagcacatcaaaaattaggtatgaatattgttgaaaattttcaatttcaaggaaaagcatggtgggtaattagtggataa

SEQ ID NO: 296680 - DNA, 873 bp, Proteus mirabilis
atggccctaaaagaagatgtttctatcaacaccacttctaaaccaaacagtccgaaacactatatccagcgtgatgacgcgctttatataaaagtgacagtgtcattttttatggttggtttagccacttttgcattactctactttgtgcaacctatcttacctatcctatcaaaagaattttcagtcaccccagcaaccagtagtcttgctttatcgctttctacaggtcttatggcttgtggtctattgattacagggcctctttctgatgcgtttggtcgaaaaaatgtgatggttattgcgctattttgtgcggcttttttcacactattaagtgccatgatgaatagctggacgggaattttaattacacgagcactcgtagggctatcacttagtggtgttgcagccgttgcgatgacctaccttagcgaagagatccatcctgcttatctagccttatcgatggggctttatattagcggtaactctattggtggtatgagtggccgtgttattactggtgttttgagtgattattactcttggcgtgtgtctgtgattattttaggtatttttgcccttgttgctgctatcattttttggcgaatattgccgacatcacaacattttaggccagcaaccttaaaaccacgtaatcttcttatcacaactaaattgcattttagagataaaggactccctcttctttttattgaaggtggcttgttaatgggagggtttgtaactttatttaattatattggttatcgcctattagatgcaccttattcattaactcaaacaaccgttggtttaatttcaattgtttatttgagtggaacttatagtgcatctaataggcgataa

SEQ ID NO: 296681 - DNA, 351 bp, Proteus mirabilis
atgatgaaatataaatggcgaggagtaaaaaacgtaatatttgctattttatgctgcaatacttcattcgctatggctgcagatgcaacaattactgttaatggaagtgtaatagcaaggccttgtgaaacaatcacaaaaacagccaatgtggacatgggcgacctatatacattcgattttatgatcccaggctctacctctaaatggtatcccgttgatttggaattaagaaattgtcctattggtacaacttctattgaagcgacattcaccggtcttgatgatagtactgggtttgaaaataaaccgaagcttaaatacaataaaaaacgcattgtttttttatag

SEQ ID NO: 296682 - DNA, 288 bp, Proteus mirabilis
gtgattgctgtgaaattctattttaatggtatttcagatagaaataatccttcattattagcgttagatccgatagcaacatctgcttctggtgttggaatacaaatattagatagtgaaaggtcacccattcctattaatccaagtagtgaccaacttaaatggatccccttagttgcaggaaaaagtaacaccgtttttttctatagtcgattaatggcatctgatatgcctgtcttagctggaaaaattaaagccagtgccacttttacactcgagtaccaatag

SEQ ID NO: 296683 - DNA, 471 bp, Proteus mirabilis
gtgattaaagatgaattattttctgctataaatataagtgaatttgaatatgttattaaaaccaatttattaggaacttgtcaatttactaaacagttattgcttttattaagatcggcagaaaaagcgaccattattaatgttgcttctattgcagggattgttccaagtattgggcaaagtaactatagcgccgctaaggctggaattataggttttactcatacgttggctgcagagttggcaggtaaaggaattcgagtcaatgcggtggcaccaggtatgattgagtctgacatggtcaaaaaagtgtcacgccaagtcgtccgtcatattaaatcggttattccattacaacgattgggagcaagtgctgaagttgccaataccattgtatttttaagctccgaggcatcgagctatattgttgggcaaacattaatcgttgatggtgggatggtgatgcgatga

SEQ ID NO: 296684 - DNA, 336 bp, Proteus mirabilis
atgaaaccattacaactgtttaaaattttaggtgatcaaaccagactagatatcgtattgcttttaaaagcatctggtgagctatgtgtttgtgatatctatactgcgttaaatttatcgcaacccaagacatctcgacacttagctatgctgagagagtcgggtcttttgctcgattcgaagcaaggcaaatgggttcattatcgattatctcctgtattactgccgtgggtgaaaagtatcattgatataacttataccacagagaaaaatagagttgcagatttactcaagatcctagagaaaaaagagtctggtcatcgttgttctgtgtaa

SEQ ID NO: 296685 - DNA, 330 bp, Proteus mirabilis
atgttaggcacaacatcctttgatattgcattggcaaaaggtactgttttttctcgtgagatccctgtcaatacaatgaagcaagttttattagaaataaaaaaaccagatggtaaacctgttaatacagcaaatagtgttattgatgataagggaaatctaataggtgttattatgggggacggtaatgttataataagtaatgagcaaatcggtaagccactaaaagtaaaatcagataatggtgacatctgttctgttgattattcagttccagaagaatttaatccagactttttatatgaaaaagttgatgcaatttgtaagtaa

SEQ ID NO: 296686 - DNA, 222 bp, Proteus mirabilis
atgtttccagaatatcgtgatttaattgctaagcttcgtcaaactgatccccatttccgagccctgtttgaacaacataatgaacttgaccataaaattgtacgcttagaacaccgagataggcgaggatatggagaagaagttgttgaattaaaaaaacaaaaattacgtctaaaagaagaaatacatcagatcttaaaaaatcccccagaagatgagtag

SEQ ID NO: 296687 - DNA, 162 bp, Proteus mirabilis
atgacactgattgattgtggtgtcttatctatatcactaagtattttatttgttgatagtgtttttgttgccactaaacctgaaattggtccttgcggatcttgtgagggggatgcggtaacaatgattttatcaggtgaattttgtgtcattgcggcatga

SEQ ID NO: 296688 - DNA, 294 bp, Proteus mirabilis
atggttctaaaaaagagatgttttagacaaattgctcctgcgcttattttttctttactaacaattggtactttctcggcgaatgcgaatatcgatgttcgcgatgaaaccttatttgaagcacatcagcgttttaaaacacaaattataaatgatagttttgacaatactgaagcaccttgggaagcgccagcagaaatattcaatgtagttaaatatcccgccaaactaggtgatatgtatgcttatttaacccctccgccggcgaataaaaaaataaactacctgcggtga

SEQ ID NO: 296689 - DNA, 564 bp, Proteus mirabilis
atgtctttaattaataccccaatcaaaccattcaaaaacatggcatttaaagacggtcaattcgtagaagtgactgaaaaggacgtcgaaggcaaatggagcattttcttcttctatccagctgactttacctttgtttgtccaacagaattaggtgacttagctgatcattatgaagaattccaaaaaatgggtgtagaaatttactctgtttctactgacactcattttactcataaagcatggcatagcagctcagaaactatcggtaaaatcaaatatggcatgatcggtgacccaactggcgcattaactcgtaactttgaaaatatgcgtgaagcggaaggtctggcagatcgtggtactttcgttgttgacccacaaggtatcatccaagcaatcgaaattactgctgaaggtattggccgtgatgcagctgacctgttacgtaaagtaaaagcggctcaatatgttgctagccacccaggtgaagtttgcccagcaaaatggaaagaaggtgatgcaactttagctccatcactggatttagttggcaaaatctaa

SEQ ID NO: 296690 - DNA, 579 bp, Proteus mirabilis
atgcgctatatcattatctttttgagcctcattttatatggatttaatcttatggcttattcagaacaaacgctggtatttatccgtcatggtgaaaagcctgataatgatagcggacaattaagttgtcagggattaaatcgtgcgctagcactacctaatcgattgataacacaatttggtcagcctgatgcgttatttgctgcagcaccaaaacaaaataaacttggaaattcattacgctctcttcaaactttaacacctcttgcggtgaaaacatcactgccaatccatttaaattaccatgccaaagagatagacccattacgtaataaactgctgagtgaagaatatcagaattcagtcatttttattgcttgggagcatgataatttagttaaagtagtaagggatattatggcgcaatttggtggtgatccaaaagctattcctaaatgggaaagtggtgattttgatagtatctatatattaaaaataatcaaagaagcagataagaaaaaagtgctctttgagcaacagcatcaacagctaaatgatgtgcctaaacagtgtccttag

SEQ ID NO: 296691 - DNA, 699 bp, Proteus mirabilis
gtgttttctaacattagtgataataaagaggtaataagattagaggcaaaacacccaaataaaaataaacaagaagtatgggaagatattaatattgttccaatttttgataaaaataatctaatttctcattatgcatttttaagtttagatatcacggataaagtaaagttaagaaatgatttattaaataaaagctatattgactctttaactggaatggctaaccgtctaagtattattgagaaaattgaacaggagcgattaaatattgcgacacctttatctttttgtcttgggattattgattgtgataaattcaaaacgattaatgatcaatatgggcatgctattggtgatcatgttttatgtgagatagcgcagcgtttattagccttagaacgccagcaggtttactgtgggcgacttggtggcgatgaatttgcggtacttttccctgctggattacgttcttgctctttattgttattggagatcatcgaatcgctatggcgagggatggaaaaaccgataaaaatcaataaagaaaaaacaatcgttccttctattagcttaggtattgctgaataccctaaggatggcaagacattatctgaactattaaagtcagcagataaacagctttatgcaataaaagagaaaggaggaaataaatacggtttttattcagagtattaa

SEQ ID NO: 296692 - DNA, 504 bp, Proteus mirabilis
atgaaattgaataaattagcgatgttcgctattgcatcaatggctttttctgcgactgttgctcaagcggcttcaggtgatgctaccgaaagtgctaaccaagctatcgattttggtcaaatcagcaaaagcctattagagaaagatggtatttctcaagttaaacaaatcccaattaaattggttaattgtgatttaactaaagccggttctgatactggtgctgcaggttcttataaaggcgtaaaagtaacctttaatggaaatactattactggtgcaacagaagagttagcaacaactggtaatacagggactgctattgttatttcaggaacaacaactggttcaatggttaaattcaatgaagcaggtgaattacaagcactgggtaataatgataatacgctgatgtatacagcttgggctaagaaagcaacaaacggaacaattgctgaaggtgagtttaacgctacaacaaacttcacattagcctatgaataa

SEQ ID NO: 296693 - DNA, 510 bp, Proteus mirabilis
atgagaattgaatgttatagctggtcagatgttagtgaacaaattctgcagcaagcaatagccttacagaattcagcttttgaggatatgaagggtaatttttatcaggttgatataccttacaagttggtactggcaattgatgataatcaggttatcggacatgtagctgtttatttacgagatgtttacctagattcatttcctgaaaccattggtatattgagttgtgtagtggtagctcacaaataccgaggaaagggcgttgctgcatcattaataaaaagggctcatgctatactgaaagagcattctgttaatttttctattttatttgctgtttctcatgcttattatctctcctctggatatattccgatgaaaaatctcacccgttttattgagaataatgagaagaaagaatttatatatgacggtggtatggtgtgtgaattaggtagtcaaaattggaatgtaaatatattagaattaaatggggaagttgtataa

SEQ ID NO: 296694 - DNA, 672 bp, Proteus mirabilis
atgaaaaaattgctatttagtcttgctacgctgattgtaatgtcaacaccagcattagctactccaccaggcgctaacttaaaaataaacggtgatattactccccctacttgcaccgttaatgctggtgataatgatattattattgattatggtgtaatatccccctcttttattcctgctgaggaaaattacgcactaggagctaagagtgccaatatcaaaatatcctgtgatgcaagcaattatttaacacttaaggtatcagataattataaaacaagttcaacagattcagcgaaaattagcgtttttggattagttaatgcaaaaaatacagaacaagagattggtggatatataattgatgtcattgatatcaaagttgataataaacgagcttatttaggaagagtggcagataagatttggactggctcgtccgcaactatttttaaagataccttaacagcgttaactagtgaacctcaagcccaggttgataaaaacaatttaaaacttatagctggaaaagtgtttaatgcaaaaatacaaataggagcttataacgaaagtaggtatgcgtatattttatcaagaaaaaaattggcacaaaacaatatcgatttaactgatggaattgattatatactgtctcttatacacatctga

SEQ ID NO: 296695 - DNA, 657 bp, Proteus mirabilis
atgtttaaaaaaagtttattagctgtttctttacttgctctaacaagtagtgttgcctttgctgctacacctactgctaaactaaaagttatcggtactattcaagcccgtacttgtacagttaatggggaaacaagtgagactactgttgaatataaattcgatgttagcccaggccttttcccagcaaaaggtaatctaacattagaaccaatttcacacaacattactgttacttgtgatgctagaacctatttagcttttgttcctacagatgatagagcaggttcagaattagaagcaaatgcggctaactttggtttaggtacacaccacgaaacaaacaaagagggtgaagctgtagatactaaagtaggtttctatggtattaccatgaaaaatgcgacagtaaaaccaactgctgatgcagaagaagctaaagtttctgtattctacaatggtgctgtaaacagttctcaaagtcttcaaaaagaaaaagtgtttgcgtgggctaaaagctctagcgatttctctgccggtgaagtatttgcagctgatttcgaaatcaaaccaactatcaatagtgaactaaaaaatagcggaggtgaacctaaattagatggtttagcaactcttgctttccaatttggtatctaa

SEQ ID NO: 296696 - DNA, 270 bp, Proteus mirabilis
atggaaggtaaaaagaaagtgatagaaaatataagtaaaatattaacggaaaagggtgttttatatggtgctactatcttgggggctgatgttgaacacaatttttttggtaataaattgatgtctgtttataacaaaaaaggtatttttagtaactattctgactcggcagatgctttagaaaaagtattatcttgttttttttacgatgtatctattcatattcaaggagttgtcgcgttatttaccgcgagaaataaaaaattataa

SEQ ID NO: 296697 - DNA, 498 bp, Proteus mirabilis
atgacacaatcaggtgggcgtcgaattaagcgcagtttatctcttgatatcaatagtatttactttttagatcaagagaatattgataaattagaaaaggcacagcttcttgaaccttatataaaaagcaaagtaggtgaaatctccagctataacgctagcctttgtcatgagcatcaaatgccacttaatcaacgtggtatgacgaatgtcggtacatttcgcgcttacgtggaagcttatctaaaaaatcatccgaagatccataaacagatgaccattatggtaagacagcttgccccaacctctgaagggttacctatcgaaatttatgcctttaccaatacaaccgtgtgggtagagtatgaagctattcagtccgatatttttgatcatatattcgctattcttcctcagtttggtttacgaatacaccaatcaccaacaggtagcgatgtcagagcattaaaattccctaccaatatcgacacaccatag

SEQ ID NO: 296698 - DNA, 642 bp, Proteus mirabilis
ttgactgaagagttattccgtacattaactcaagatgtattaggttcgactatcgtcaaatatggtgatgaagagtttgatttcggtaaaccgtttgaaaaactgaccatgaaagaagctatttgcaaatatcgtccagaaaccaatatggctgatctagatgatatggataaagccgttgctattgctcaatctattggtattaagattgaaaagagttgggggttaggccgtgttcaatgtgaaatttttgaagaagtagctgaaagccatttgatccagccaacttttatcattgaatatccagcagaagtttcaccactggctcgtcgtaatgatgataatccatttattaccgatcgctttgagttctttattggtggtcgtgaaatcggtaatggtttctctgagcttaatgatgcgcaagatcaagcggagcgttttgaagagcaagttcgtcaaaaagaagcgggtgacgatgaagccatgttctttgatcatgactatatcactgcattagagcatgggttaccacctacagcaggtttaggtattggtattgaccgtatggtaatgctatttaccaatagtcatactattcgtgatgttattttattcccagcgatgcgtccgggaaaataa

SEQ ID NO: 296699 - DNA, 393 bp, Proteus mirabilis
atgaatagtcctatcatagaagagattgcagaatctcatgctgaaattaaagtgaaacaacaaggaagaaccatttatgaaactattgttcctcctgggccttttattttaaacgatctacctgttataggtagcaatgaattggtattagaaataaaagaagcagatggacgtataagaaaaagcactcattactttactacaatgccaaaccaattaaaaaaaggtcgttatcaatataattttatttctggatattcttatgatagatataaccagtttaataatcaaaataataaccctatttttttactgggtgagttctcctatggtattaatcaaaaaataaccgcttatggtgcaattagaaagctgggggggagtagccagtga

SEQ ID NO: 296700 - DNA, 345 bp, Proteus mirabilis
atggtgcaattagaaagctgggggggagtagccagtgatattagttattttgaacacaataatctattaaaataccagttgcgctataataaacgatggagcaatattggtacttctttaaatatatcttctagccattatcaatcaataaaatctgatagtgttagcattagaaaaagtcaaacagacaacataaaaaatagctatacaatttctctctttcaaccgattaaatctttcgggacattttctattggttatcatcaaaattcttatgccaaaagaaaaaatgactttacaatcaatacttctctatcatcttctataaaaaaaaatgaattatag

SEQ ID NO: 296701 - DNA, 390 bp, Proteus mirabilis
atgctcattctattactttcttccgagcaaggtgccaatcttatggcgttactacgccaattaagtcataggcaagttgatcgcttgaaaatatttatggaaaaaaaccatctaaaaaattggaagctaaaacagtttgctcgcgagtttggtatgggtctcaccacatttaaagagttatttaatcatgtttatggaacatcgccaagaacatggatatgcgaaagaagaattatttacgcacatcaattattattaacaacagaaatgagtattgtcgatatttctatggagtcaggattctctagccaatcttactttacacaaagctatcatcgacgttttaatatgacaccgagtaaagcgagacatcttaaattaaaattataa

SEQ ID NO: 296702 - DNA, 534 bp, Proteus mirabilis
atggttgttatagcaagaccactagaaggttttgtttccatttgtcatgacgatgaacgagctgttaacgctttaatgcattatttccatcgagacaaacattatcaacatataagttttatcgggatccaaattaatgatgaaacaacgggtttattacgttatcaaacttatcttcaatattgccagcaacatcaattaatatctcaagctcaacttggtgaacttaattatcaaagtggctatttacttgccaaacaagcattagcaagcaagcctcaagctattttatgtgcgaccgattctctggcctttggtgtacaaaaatatttagccgaacagaaaatagatcatattgaggtggcctgcatcggtcgtaatgatctactcacctttttatttcctcaaactaaattttatcgattaggttttagagaaagtggacaagaagctgctaacatattgatacaaatgctagaaaaaaatattcctgcacaaaaaatcattatatcaagtcatgacttaaacccatga

SEQ ID NO: 296703 - DNA, 489 bp, Proteus mirabilis
ttgctaaatcaagcacagcaagaaatctatcaaaaacaactagcttcaagtcaacgcctatttgagttaggagaaggaaccaaaacagatattgctgaaatagagactcgtttatatttaacccagtcacaatataccgatcttcaattagaaattgaaaaggctaaaaacaaactcagtgctatgatcggttcacaattgcctactcatgagcacatcgcaaagctaactgatacaaagtttgttcttcaatcactggctcccgatgactattccacatgggaaaaaaatgccatacaaaataacttaaagatacaatctgctcgtcatgaaatggcgatagctaaacaagagattgagaaaaatagaggagaatttttcccaacagtacaattttatgcggcttactctagtagtaattctgatagtaataataccattaaccagaaataccaatctgctaacgtgggtttttattttggagtgtga

SEQ ID NO: 296704 - DNA, 174 bp, Proteus mirabilis
atgtttagtccaatagtatttttacgatatggcatgatgtgcggtaatattaaattaccgttattgtctgtaatggcttgtgaagaacgattagttttaattccggcaatgccattcgtatttacaatagcaaaagtattacctaagtcaggtgccaaagttactccactttga

SEQ ID NO: 296705 - DNA, 507 bp, Proteus mirabilis
  misc_feature (355)..(364): n is a, c, g, or t
atgagcaaattaaataaatcactctgtgcattaggagtgactctttctatattctcagcacctgctgctttagcatcaggcacaattaactttacgggagaaataaccgatcaagcatgtactgttgatggctcttctaaaaacttaaccgtcgacttaggcaaagtttcttctaaaagcttagcaaccaaaggggaagttgctggcctgaaagattttaccattaaattaatcgactgccctgttgataccacggtagccgtacgttttggcggtactcgtgatgcaagcgacagagatatcttagctatagagcaagtttctggtggcgcaactaacgtaggtatcgcgttannnnnnnnnntcaaactgtatgacgattcacaagatgtacagatcacaggtacggaaattaacctagactacgttgctcgttataaagcaactgatgcggcaacaccaggccctgccaatggctctgctgtatatagcatccaatataaataa

SEQ ID NO: 296706 - DNA, 405 bp, Proteus mirabilis
atggttaaaataaactctctaaaaatgtatttaattgcaatattccttttttctttagctttgttttgtttctatgactccataatctactacaaaaattattttatgatgaaagatagaattctattctcatttcaaacagggttgtttttttttgcagcccctttgattatctatttttcttatctaatttttatttgtggatacacaaaaaaaacacaaaaaatgaataataaagtagcgggtatatgcacaggaatagcaatagttggtatcgtttttagctttttcttttcaatttatgtcgctctcgatttaacctctaaaggctattatcgttgttataagtcatctgcttttgcaccaaatgaatatgttattgcaaaagagatgtgtaaaaaatag

SEQ ID NO: 296707 - DNA, 417 bp, Proteus mirabilis
atgaatattgacttatccagcttatctcttaaattaaccatcccacaatattggttagaatatcaagatagttattgggtacctcctgctcattgggaggaggggattaatggtgcatttattgattatagcgcaaatgttttagctacagagtatgcaaataatgataagcaaatttatttatcgactaatggtactgctggaataaatttaggtgcatggcgttttagaggtgattacagtgcgacttatcaaagaaataaagagaaaaatagccaatatgaaaatcgtacttttgattttaatcgattgtatgcgtttatctcattaaagaaattagcatctctgctttctgttggtgaaaattatttttattcggatatttttgagtcttggcaatatagtggtatctcctaa

SEQ ID NO: 296708 - DNA, 492 bp, Proteus mirabilis
atggaatatttaaatacaaaaattattatcggtagttcaatcatcgctttagcaacactgtattttgctatttatttaatactatatcttattaaatgcgttaggactcaaacgccttttactttaagaaaaatatggaaacaatggttattgagtagtgttattggtctaattggtgcttatattgtacaacttggtgataatcaaagaagaagcgaatttaccaaagaagaggttagctttatgagtgaaaataaaacatatagccaatttacctcagcagacaaagatctcgcgtcaaaaataacccataaatgtacttacaattcagatgctatatttgaacaatgtttaccaaaaatactgacttgggaagcaaaaatttatcaatcatataatgcacatcgtaaaatttctgatagtgaagcgataaaatatacagaagaagaattacgcgataagcataattactggatcaacaaaaaacgctaa

SEQ ID NO: 296709 - DNA, 474 bp, Proteus mirabilis
gtgacaccagttttgtcaagtacgggactatcacaaaattcgcctattacacctatttatccgatccctatcaatataaaagggtacgttatcgctcaccctccttgcatgatcaatgagggcaaaacggtagaagtgaatttcggtgatgtgctaagtacacgagttgatggcttaaattacaaacgtctggttgattatcatccaagatgtgaacaaatgcccattaatacactaaaactttctgtcgaggggaatggtactttttttgatgccaatgcattaatgaccaatattaccggattaggtatacgtattttgtatcaaaataaaccacttaagttagggcaggcaattaattttacttatcccgattttcctgtattggaagcggtgcctgtgcgtgatttttctactcttcttgtgggaggagacttttctaccacagcgacattgcgcatggaatatcagtga

SEQ ID NO: 296710 - DNA, 510 bp, Proteus mirabilis
atgggattgcctgttaaacgttttattgcggcgaccaatgtgaatgataccgttcctcgctatttagatagtggtaaatgggaaccacatcggacaatagcaacactttcaaatgcgatggatgttagccagcctaataattggcctcgtattgaagagttatatcgtcgcaaaggttggctgttatcggatctttcgcatggggctgtgagcgatgaaacgacggaagaaactgtacgtgaactggcacaaaaaggctatatttcagagcctcatgcggcggttgcttatcgtctattacgtgatgagctacaagaaggagaatatggggtatttttaggtactgctcatccggcgaaatttaaagaaaatgtcgaacgtattttaggtgatacattacctttaccaaaagaattagctgagcgtgctgataaaaaattactatcgcatcttttaccggcagatttttctcaattaagagcatttttgttagaacgagcacctaaataa

SEQ ID NO: 296711 - DNA, 621 bp, Proteus mirabilis
atgccagaaaaagaagcttttccgataaatattaaatgtattgatggttatgcctactatgttggcccaggaagagatatttataaacgaatcgatattggtcagtggcaacagatacaaaatggtattccagagagtaaattcaatacagatatggggtttgatgatctcgatggtttctctgagcaggatatgtatgccgttggcggtgcaggtgatgtttggcattataatggcgaaatctggatcccttgtggttttccctctaatgagcaattaagtgcagtattgtgtgcccctgatggttatgtgtatatcggcggtgaagggggcagtttatggcgagggcgtgaataccaatgggaaaaactttatcacggcagttcggctattttactgaatcagttacgctggtttgaagataaagtgtgggcatgtgatgactatcgcttacagtgttggaatggtaaagaaatggtccgtcccaaggatggtgataaaaatgttatcgcctcaggtcatatggatgtccgcgatgggattttagttgtagctgatgattataatgttgatctgtatgatggaaccgcttggcataagatagtgagaccttataaataa

SEQ ID NO: 296712 - DNA, 162 bp, Proteus mirabilis
atgggtatcaaaattttcacaaactgtgcagcccgtggtttagaaacgcaagctggtgttatttctgatgttgtaacagaaaaaggaccaattaaaacctctcgtgttgttgtcgccggtggtgtttggtcacgtttatttatgcagaacctaaatgtctga

SEQ ID NO: 296713 - DNA, 222 bp, Proteus mirabilis; identical to SEQ ID NO: 296686

SEQ ID NO: 296714 - DNA, 270 bp, Proteus mirabilis
ttgttgtcacgattatcaccagaaatggtcaccgcaaataccttagcaggtgatcctattactgcgcgtttaactcacgcatctggtaatggtgctgctattggtggtttaaaagtgatgaccgattatggttggtttgccgctcgtccttctggaaccgaagaagcgtacaaaatttattgtgaaagcttccgtggctctgagcatcgcgaattaattgaaaaagaagccattgaaattgttaataatgtttttgccagtaaacaataa

SEQ ID NO: 296715 - DNA, 312 bp, Proteus mirabilis
atgggtgatttctatgcttattctcctaacttaaacacttataaaatactaggcgtgcaaatcaatagcgataatgcaatgaaagatggctccctagtaggttatgcacccattataagtgaaaccgcctatacctatgcagaagttagcattgagcaaaatggagaaacactatatagcacatctgtaccacctgggccatttactcttaataaccttccctctttaggtacaaatggtgaattagtattaattatatttattaagaaagaaccaatggaattattactatactatgggtttagtaaataa

SEQ ID NO: 296716 - DNA, 543 bp, Proteus mirabilis
atgaaaaaatcattattttcactattaattctatctacactttctttatcaacacaagctattgcacaacagattcaccttggtggttataatatagatatccaaggcagagtaattgacgagaaactaacttgtgtcgttcaagatattgctccaattcaattggatgatgcttacgttgattctttactacttactcctgtgaaacgatttagtgtggatttttctggctgtactaatcaagcaagagatagaaaagtcaaagtagtttttgcacaacaaaacactactcatttaatgaatgctagttcgacagcaaatgataccaatgctcgagtagcattattgggttctacaggtgaacttgttccacttaatggtgagcgagaacaacgtacattttattcggatgttgccggtgatagtggtagattagtattttcattaaaatatgatagaccagcatcgattgatgatgctgttaccgcaggtgctttcaaggctaccttatctcttgatgctctgtctcttatacacatctga

SEQ ID NO: 296717 - DNA, 168 bp, Proteus mirabilis
gtgacaaaaggtgatacgctaattgaatttgatttagatgcgataatagccgcaggctatgatccaacaacgatgatcatcattactaatgatgataataagctagacgttgttcagaccgataaaaaacatgtcgaccaaaatacagttttactaaccgtgggttaa

SEQ ID NO: 296718 - DNA, 342 bp, Proteus mirabilis
ttgccagtttcagattttaataaactcacttttgccattgctcttaaaggcaaccaatgtttaaaaatacaaaatcagctaaataatgctatttataaaaatttagaaataaagagccaatataagccagatctcaacctattagtgctgtgtgctcgtaatagcgatgatatacctgctcagttttgtcaacaatgtcatttaggtaaagatgaatggaagcaagttaaccacttaagtcttttacaattaacgataaaaaacactgataaatggagtgaagagcatattaaagcagggtacgactatattaaaaaagttgtcctatctgcattaaaatag

SEQ ID NO: 296719 - DNA, 312 bp, Proteus mirabilis
ttgtttccatctataaaaaaaggaagcattcaatatgaaaattcaagtataacattttcttcatctgaagctcttcctactgttataattgaagcattagctatgaatattcccgtaatagcaacgaatatagcaggaacaaaagaaataattacatcaccaaactatggaactattattgatgattttttagaaattaacttagatacagtaattaataatctgttaataaataaaaatatcaacacaaaaaatataagggaaaaattttatttagaaacaatgttaaataaaattgaaattttattctag

SEQ ID NO: 296720 - DNA, 465 bp, Proteus mirabilis
gtgtttgcgcttaatgagctaaatcaattgaaaataaataactttactcgccagacattaattgattttcatacaagatacaaactattgttattagctcattcacaaccgctttatcggcaactagggcgctttgttgctaacaataaagattgggattcattagagactttctttgttgaataccgtaatcgatttatggctctattacaacatcaagccacacgtcgtaatcacactaatgttcttatgcatgtgcaaggatattttaagcaagatttaacttctaagcagcgacaagcattaagccaattgatcttagagtatcgtcaaggaatacaacctttattggcaccattaacattaattaatcattacttatcagaatacccagataattatctgagtaaacaaaaatacttttatccttatcctcaatctttaagattacgttatggtttatga

SEQ ID NO: 296721 - DNA, 339 bp, Proteus mirabilis
atgagcaagtaccaagaaatagtaacagacatctcggggaatatgggggcattatctaaaaatattcctgaagttatgaagtcatttatgagtaccaccaaagcaagctctaaagatggtgtgctcgatgctaaaaccaaagagctgattgctattgccattgctgttgctaatcgttgcgatggttgtataggttttcatactaaaaccctagttgaattagggacgacagagcaggagcttgcagaagcattgggcgtcgcgatttatatgggagggggcccttctgtgatgtatgcgtccaataccatgggggcttttaaagaatttagtcaatag

SEQ ID NO: 296722 - DNA, 231 bp, Proteus mirabilis
atggaacttgaacgtaatggtgaacagttaatttattattaccaagttggcctattcgataaaaatggcgattgggttaatcaagtaataagtaaaaaagatgtgattgaatcaatacatgaaacacttattcgttttcatgattttctacaagtggcggtaagtgaattagagatgacgctagttccagatgaaaaaatgagcaattttcctcttccccttaagccctaa

SEQ ID NO: 296723 - DNA, 483 bp, Proteus mirabilis
atggaaggtgttcaacttaggcttgcggagcctcatgaagcaaaacgattatggtatttaagaaataaagcgttacgttttggctgtcaacatgtctatccgcccgatatattagccgcttggactcctgatgaaatgcctgacggctatagacaatctattattaataatcctttctatgttattgatgataaaaagttgtctattcccgtggcttctggttttttagatcttaaaactggctttgctgaagccatttttacattaccggaatgcatgggaaaaggatatgcaggacttattcttaaacagctacaatatgaagctaaacaaagaaattttgttcagttatttttagatgcaacgcctaatgcgatgctattttatttaaaacaagggttcactgttttagaagagcgagagtactattctagcttggctcaggcaagtttacactgttatcgaatgtatattgatttataa

SEQ ID NO: 296724 - DNA, 225 bp, Proteus mirabilis
atgcggaaattagagatcgcgctaaatgtaccttctaccacatctttagatggatcgacgacttttgctaatgctttaaatgttaaagtattatcaccaattttattaacaattcgtgatagaacatctgttggcttaccaaattcaaaaccatcgattgcaatacctaaattatttgtatttcctgtagatgtcgctaacaatgttttacccgcatcagcataa

SEQ ID NO: 296725 - DNA, 144 bp, Proteus mirabilis
atgactttaataaaattaccaataatactagcaacactattatttgcatctatatctgttgccacagtagacaactgtccaccgactaaaccagattgtgtagacgaatatacagcttttcattaccctcctgaagaagattaa

SEQ ID NO: 296726 - DNA, 291 bp, Proteus mirabilis
gtgaaaagtgaaattattggttatggtgttgtccatcgccatttttttggtcagcaatttattgaattagtgatgatagctaaagagcataggggaaaaggttatggcaaaaaactaattacttattttcagcaaaaaatagcgacagaaaaattgtttacttcaaccaatcaatctaatgtacccatgcaaaatttacttattcaattaggctttgttgaaagtggctatattgaaaaccttgatgaaggtgatgctgagcttattttttgttttataaaaaatcattga

SEQ ID NO: 296727 - DNA, 240 bp, Proteus mirabilis
atgggaaatcgcttagggataagccagcaacattattctcgaatagaaaatggtaacataaaaatcacggtagaacttttgttttctattgcatttattctcaatatgacgccacaaagtttattacctaattataatttattggataaaaaaatcattaatctttcagatgagaaaaatataatcaaagcaaaacaggctttatctgcagaatttattataccaataaaagaaaaataa

SEQ ID NO: 296728 - DNA, 192 bp, Proteus mirabilis
ttgaaaggattagaaataagtcattctagaatgaaacctatcgactatgaactgacccaaaactatgctaataaatttggtttgctaaaaagtggcggtagtgacttccatgatcctgcgttacttaaatttggcgattttggcctaaatcaaacacaatttgagaccttaaaaaaggacgcaaataaataa

SEQ ID NO: 296729 - DNA, 318 bp, Proteus mirabilis
atgaagggctatcgagtgatcagtgggttattggatatttataagccattgcttttattatcgaccgatgattttctaagactacataaatataatgaacatcctcattatgttattgagacgcgtttatatcataagctttcgattaaacataagcttgcttataatgaagcattagaaaaaatttacgatattaatagtgaagagggaaaaaccttagagttttattatcgtacaagattgatacaagattatatcagtggtatgaccgaccattatgcatatgaagaatatagaaaattaatggtatgtgattaa

SEQ ID NO: 296730 - DNA, 309 bp, Proteus mirabilis
atgattatcgcttattcaacagcccctaatgaaactgtcgcccatgaaatagctcaccatcttatacaggcgaagcttgcagcttgtattaacgtccttcctaatatcaaatctatctatcattggaataatgaaattgttgaagataatgaggtacttatgatgatcaaaagcgagagttcaaaacaacagattttgattgatacactagtaaaaatgcacccttacgatacaccagaagtcattattgtccctatagaaaatgggtttcatggttatctagaatggatacatcaaagcctaaattaa

SEQ ID NO: 296731 - DNA, 246 bp, Proteus mirabilis
atgcaatattggcttaatactggtaaaaataacaataactatagcgagacatacatagggttaatacccaaaaatactattagccaaatgaaaaacttaactttagatattagtgaggatagtaatctgataaatgatggtattatcatgacagaacggttacacacacgcgataagaatataagcaatattcaaaataatagagaagatatcaaaatttatactaagttacgcaaaattaaataa

SEQ ID NO: 296732 - DNA, 243 bp, Proteus mirabilis
atggcacgagtaacgagtgtaactttaggtgaacacttcaatgattttgtgggctcaatgattaattcagggcgttatggaaatacctctgaggttattagagatgctttgcgtatgatggaaatcagagaagaacgactccaattggttcgtaaaatggtactagatggtgtgaattcactagaaagtaaaaatgacatggatgatatttttgcaagagctgaaaaggacttaaatgtataa

SEQ ID NO: 296733 - DNA, 267 bp, Proteus mirabilis
atgaaagaagcatttaaatatggaaataagggctatgctcaagatttattaatcacgatgcaaccttggggatttactccagaaatgattagcacacctacaacattatggtatggactaaaggatacgagtactgttcactcgcctgattttggcaagttattgtctcaacgttttccccatgcacaacgttatgtctatgataatgaaggtggctctttgttgtggactaaaacatcacagattttaactaatcttattagttaa

SEQ ID NO: 296734 - DNA, 228 bp, Proteus mirabilis
atgagtagacaaaaagtagcaacacgtttacgtagagaaaataaacgtacattacgtaaagagcaacgtaatgccgcccatcgagataatgttatggttttaccaggatttggggatctagaaacaattggtatggcgagagagaaacgtgatcaacgaacactctctcctcgtaatgaagttcaacgccaatatatgaacgctattaaacatcaaaattcagtttga

SEQ ID NO: 296735 - DNA, 246 bp, Proteus mirabilis
atgccagattgggtattggcaatatcctctgcattaccttctacatgggctgtaaatgctatggccggaattaaccagatgggattatcattccaaagcatcctaggggatatcgtgatgatgctggttttaggcgtgatatataccattttgggggtgttagtggggatgttgcgcaatggtgagttaaggaaaattactcatcaatttaagcattgggtgagacattaccaccgttcaaagtaa

SEQ ID NO: 296736 - DNA, 273 bp, Proteus mirabilis
gtggaagttggtatcccagaaaatagtttacttcgctccgctatgttggtttaccttactcctttgctgggattatttatcgttgcagggatagccagcctgtggctttctagtgagttggctattttttgtagtggtttagtggggggagtgttaggctttttattagctaaaaatattgcccgctggtggagtaaagatgaaggatttgaacctattattttacaaataggacttccacctaatgaattgcaagtacaatatcaagaataa

SEQ ID NO: 296737 - DNA, 156 bp, Proteus mirabilis
ttggttcgagcccaataccgcccaccacttctttttatatcattcgataaaaatttctttattattccttatccttatccttatccttatccttatccttatccttatccttatccttatccttatccttatccttatccttatccttatccatag

SEQ ID NO: 296738 - DNA, 258 bp, Proteus mirabilis
atgtattttggtgatttagaaaaagatccaatggcagagcaaattaccggcaaatttaaaatgatcgttgccgaagcgggcaaaaaaattaaagagcaaggtggcttgggtaaggttgaagtagcaaaagttgaatacagcgaagataaaaataaagccgttgtcacactcaaaacagtgttgaaaaatggtgaagaaaaaacagaaaatcaaaatatgatcaaagttgatggcaaatggaaagttgaagttaagtga

SEQ ID NO: 296739 - DNA, 255 bp, Proteus mirabilis
gtgggctattacaccatcaatatcagcaatgccactgtcaaaaaagaagatggtagtaagtttgaaaaagcttatatcaaatctaacaacgccacgacatcagttcctaatacattaattcataaacaaagtgagtatggttgggctttgcctggtaagacatctgttgcaggaaaatcttttgctgctgactttgaagtcaaacccgtcattaatagccaaatgaaaaaacatataataaaaagtgtaaggtaa

SEQ ID NO: 296740 - DNA, 165 bp, Proteus mirabilis
atggaacaaaatgatgcaactaaagcacaagcagaaacaatgaaagcgcaatatgctcaatcaaaagaacaatttgctgcattacctaaagatgttcaagaaagcacctgtaaacaagctttagattctttagagcaaatgaaaaaaatgtctgctggtcaataa

SEQ ID NO: 296741 - DNA, 258 bp, Proteus mirabilis
ttggataatgcaatcaaatattgccccaataatagtcaagtcgaagtgactattgaacataaagatacccatcatctcaatattattctgcgtgataatggaccaggaattgcacctgagtatattagctcactattttcccgtttttatcgtgttccgggatcacaagggacgggcagtggtttaggcttatctattgcacaaaatctcgctgaaaaaattcaagcaaccatttccattactgaaggcctcctataa

SEQ ID NO: 296742 - DNA, 213 bp, Proteus mirabilis
atggctatgaatattgcctctgtcaaaattgaaggtcgccaacgtagccccgcgtatgttactgaagttgcaagagtatggcgtgcagctattgaccaatgtaaaaaagatcctcaaggttttaaaacccaaccgcgttggatgagtgcattaggaaaaatatctgaaggaacacaaacaacattaggtgcttaccaccggaaatggcaataa

SEQ ID NO: 296743 - DNA, 597 bp, Proteus mirabilis
atgcgtaagttagtcgttggtttggttttgcttcttatcattatttttgttgtattgattaattcttataataaaatccagaagaatgacgagttagttactgcggcggcatcagaattattaaatcaatatcaacgtcgtttagatttgatccctaatctagtcaatacagttaaagggtactcaaattatgaaagccaagtattacaagatgttgtaaaggcaagagcgtctgttggacaaattaatgtcaatacgcgtttatttgaaaattctacacttgctaccagttatcaaaaagcacaggatgatttgggcaaatctttatcacgtcttttagctatttcagaaagatatcctgacttgaaagctaacacattatatcaagatctaatggtgcaattagagggagccgaaaatcgtatctctgttgctagagggcgatatatcgaggcagttcgtcattataatactcagattagacagtttccttataacttcatagctatcgttatgggatatgataaaaaagtcaatttcactgttgagagtgaacaggaaataaaagtaacaccagtggtggactttgcctcatga

SEQ ID NO: 296744 - DNA, 1179 bp, Proteus mirabilis
atgatacgtaaggttttattcttattctcattgttcttatttagctttagcgtgatagtgagtgcatcggcgaatgatattcctcaactaaaaacagatagagtgattgatagtgcaaatttattgactgcacaacaattcaaagcgttaaatactttattggttaacttcgaaaatagtcgtaatgatggatcacaatttgttgtctatatcgttccaacgacagggaaagaaaccatcgaatcctttgcttttcgtgtttttaatcaatggaagataggtagaaaagggaaagataatggattattgctcgtggtggcaattaatgatcgtaatgttcgttttgaagtcgggtatggctatgagggagcattaactgatgtactggcaggacgaattattcgcaatgaaatgttgccattttttcgttcaaataattattattcaggcatcgaacaaggggttaaaaaggctattcaagccgttaatcatgaaccaataagtttcactaactcacagataaatactaatacacttaaaatattccacacacattttatcctaatttatttggtaatattaggcggtgtttattggtttcagttgatattctcgacgcgaaaaataaaaaccaaaattaatcaattattagcgcctagaggaagaaaaaagaaaaatccagcagaccaaaaaggtaagttaagtataaagcaacgtaaacagttgaaaaattatctgcaatattcgtactattttcctacattttcaacgttatttttccccatgacactctgttttgcggcggtgatgttttatacacaagtctttcttgatggtattattgataattttgttttagtgataatagtcatattgtcattattatgtaattttatcgtattagtggttttatttggtattatcaacctgttatttccaatttatcggcaacaacgaaaagaatggaaagcgatttgtgtcgctagtccgttcggttcaccgtttaatcaactgccatattcaaaacgtattcgtagacgtagtggttattcaggctctggtggttattcgagttcgtcttattcatctagttcatccagttcatcaagctcttctagttcttctagcggtggtggcggtggttcgagtggtggtgggggcgcttcagggagttggtag

SEQ ID NO: 296745 - DNA, 774 bp, Proteus mirabilis; identical to SEQ ID NO: 238184

SEQ ID NO: 296746 - DNA, 639 bp, Proteus mirabilis; identical to SEQ ID NO: 14558

SEQ ID NO: 296747 - DNA, 555 bp, Proteus mirabilis; identical to SEQ ID NO: 103787

SEQ ID NO: 296748 - DNA, 339 bp, Proteus mirabilis; identical to SEQ ID NO: 103768

SEQ ID NO: 296749 - DNA, 597 bp, Proteus mirabilis
atggaacattatataagcttatttgttcgtgctgtttttattgaaaatatggcactggcgttcttcttagggatgtgtactttccttgcggtatctaaaaatgtaaaaacagcatttggattaggtattgcggtaaccgttgttctggggctttctgtacctttgaataacttggtttacaactatgtactacgcgcaaatgcattaatggaaggtgttgatttaagtttcttaaactttatcactttcattggtgtgattgcggctctggtacagatcctcgagatgattttagatcgctacttcccttcgctatataacgcattggggatcttcttgccactgatcactgttaactgcgctatttttggtggtgtgtcctttatggcacaacgtgactataactttagtgaatctattgtatatggtttcggctctggaattggctggatgttagctatcgtattactggcttctattcgcgaaaaaatgaaatacgcggatgtaccgtcaggtatgaagggattaggagttacttttgtcaccacagggttgatggcattaggtttcatgtccttctctggtgttcagctataa

SEQ ID NO: 296750 - DNA, 990 bp, Proteus mirabilis
atgctatgtgcactggttttcttatcagcctgtggtgaaaaacagcaggtgttagaaggcgaaacgatgggaacttactattcaattaaatatgttcctagtagtgattcaccttcacaaagcgtcttacaaacagaaatcgatcgtattcttgaagaagtgaacgatcaaatgtcaacgtatcgtcctcaatctgaattaagtcgtttcaatcaaagtcgtgaaattaatacgccattcccagtttcacccgctactgctaaagtcgttagtgaagcgatacgtattaataaaattacggatggggctttagatgttactgttgggcctttagtcaatttatggggatttggccctgaaggacgttttactcatcaaccttcagccgatgaactagctaaacgtaaaaaatggacgggaattgattaccttgcagtggaaggtaatacattaattaaaaaaatacctgagctttatgttgatctctcttctattgctaaaggttacggtgttgatgctgttgccgaatatttgatttctcaaaatattaccaattatatggttgatattggtggtgaggtgagaacacaaggtgttaatggtaatgataaaccttggcgcattgcgattgaaaaacctgctaatgatggcaccacacagagcgtacaattaattattgaaccgggtgataattctattgcgacatcgggggattatcgtaactattttgaagaagatggcgttcgtttttctcatacgattgatcctacaacaggtcgtccaatcaaacataaccttgcctctattaccgtaattgtacctacttgtatgagtgctgatggtttatcaacagggttaaatgttctggggcctgaaaagggcttagaggtagcaaataaattaaatattcctgtttttatgatagttaaaactgaaaatgggtttgaagagcgttatagtaaggcattcgccccattcttgaaaaagtag

SEQ ID NO: 296751 - DNA, 213 bp, Proteus mirabilis
atgttaaataataaagcttctggtgactggaatttatttaaaggaaaagtgaaagaaaaatggggaaaactcacccatgatgaactagatattattgaaggaaccagagagcaactgatagggaaactccaagagcattatggttattcttatgatgaggcaaaaaaagaagtattagagtgggaaggcagtaacccttatccttggaagtag

SEQ ID NO: 296752 - DNA, 873 bp, Proteus mirabilis
atgatcaaaatatttattgcaatttcattcctcttttactcagtatttgttatggcttctcctaaaattattgcacacagaggtggcacagcggatgcacctgaaaataccgaaattgctatcaaaacagcactaagcaatcaagctgatgcaatttggataactgttcaactgtctaaagataatgtccctgttctttatcgtccaagtgatctaaaaagcctcactaatgggcaaggggcaatttcaacctttactgccaaagaattggcgcaatgggatgcaggatataaatatggggaagcacaacaatttccatatcgcaataaaggggttactatcccgacattggagtatattctgactcaatttcctaaaacacaattctatattgacttaaaatcacctgatgccgatcccgttatacaaggcaaagcattagcttcggtattaagcaaacataatgcgttagagagaacgcgtgtttattctaccaatagtgcttttttagatgcgttacctgataacgtacaacgctttgaaagtcgtgatgttacccgcgatatcttagccaatattactatggggcatatctgtttactgccagaaaatcttgatatcacacgttggtatggccttgaactgcacagaaaagttgaggtggttgaaaaatataccttaggtgaagctcgttcagcggctgtattaagttgggacaaagatgcgatgtcttgttttcgtgcggggggtaatgcgcatatcgttttattcggtatcaatactgagaaagattatttgcaagcagtagaattaggtgctgatgcagttatggttgattctccagctaaaataaaagcattcagaaaagagtaa

SEQ ID NO: 296753 - DNA, 1056 bp, Proteus mirabilis
atgcggaaaattattcatgtcgatatggattgtttctatgctgcgattgaaatgagagataaccctacattaaaagagatccctattgcagtcggtggtaatgcttctcgtcgaggtgttatctgtactgctaattatcctgctcgccgttttggtgtccgtagtgccatgtcaacggctacggcattaaaattatgccctcatttaaaagtattgcccggtcgcatggcattatataaagagacttcagctaaaattcgtcaaatatttgcccgttatacagatttaatagagccgctttcattagatgaagcttatcttgatgtctctgatagcaaacactgtcacggctctgccacattgatagcgcaacagatccgccagcaaatttttgctgaacttaacctcacggcttccgccggtattgcgccgattaagtttctcgccaaaatagcatctgatttaaataaaccgaatggacaatatgtgatcacccctgaacagatggatgactttattttaaaattaccattaaataaaattccgggagtaggaaaagtcacctttgctcgattacaagagatgggattagaaacctgtgctgatgttcgtggtacggatgttatttccttagtgagaaatctaggtaaatttgggcaaagcttatgggagcgtagccatggtattgatgagcgattaatcaatcctgaacgtttaagaaaatctgttggtgttgagcgcacactggctgaagatattgattcatgggatgagtgtttagcattgcttgatggattatatgatgaattagaaaaacgattaagccgagtgaaacctgatcttagaattgcgagacaaggggttaaattaaaatttgatgatttccagttaaccacccaagagcattctcatcctattttagaaaaaacggatttaattgatattgcttatcaggcatggcatgaacgtcgaaatggcaggggagtaagattagtcggttttcatgtcacgttgcaagatccacaaatggaacgacaacttcttttagcattataa

SEQ ID NO: 296754 - DNA, 1362 bp, Proteus mirabilis
ttgccagcttatggtacggtcaaaacaacacccgaaggcaccattccatttgatttcaatgtaaataatgctgattatcaccaatcatggcgccaacaatatggcgttggttatgaatttgaacatgaatttaatgatagattaaaattgatccaaaatgcccattatagccatatcaaacaaaaatataaatatcttgtttttggttcattaagaaaagataacccttatattcttgagcgccgagctcaacaggaaaaacgagaaacagatacatttggtattgatactcgactacaagctgattttgatactgaaaaattagcgcatacagtaattataggtattgattatcaatggagtaaaaataaagacaatttattgcaagcgatgggcccagaatatgatttggattggcgaaatcctaattatcattatcctattgatatcagtttacaaaaaccggtgacaaatcaattacaaaaacacgaccagttagggatctatttgcaagatcagatccaatggaaaaactggatcttattagggggattacgccaagattgggcgcaagttcgtacctatgatcacatcaaaagcagcaaagaccaacaagacgaccagaagctaaccggtcgagtgggtctactctatgcctttgataatggtatttcaccttatattagttatagcacctcttttgaacctaatttacagacacgaagagctccgggtagtgcaccatttgagccaagtgaaggacgtcaattagaagcaggaataaaatacctcaccccaaatgaacagacattagcaacactctctatttaccaattacaacaacgtaatgtgactaactataacgctgaaaaagcctattttgagccagtaggtgaaattagaagccgtggtattgaagcgcaaattaatagccaattaactgaaaatatatcatttattagtagctatgcttataccgatactgaagtgagaaaaaccatcaccgcaggtacacaaggaaaagaattaccacgggttcctaaacatatggcatcattttgggggcagtatgatgaaacatcagggctatttaatggtgctaaagcgggctttggtgtgagatatatcggtgtatctcaaggtgacactaaaaatacgattagtgtacctgcagtcactttgtatgatgccatggtaggttattctttaggcgagttatcctcttctttaaaaggggctgaagttcaactaaatatgaataatattgccaacaaacactatgttgcctcttgtgcgggtgaaactgcctgtttttatggcattggcagaaccatgacagcaacgataaattaccgctggtga

SEQ ID NO: 296755 - DNA, 216 bp, Proteus mirabilis
atgatagaatatattagaaacatacaacaacatagtattattccattagataaaggtgttgaatgtgaagttaaattgactagttttgaacaagtaataccttactttgcaactcctgatgatgataaactagaaagatggaaaaagtatcgttatcaactaactaaagtcaatgttgaagatgaaaatttagaatggccatcaaagcctgagtaa

SEQ ID NO: 296756 - DNA, 1188 bp, Proteus mirabilis
atggctgattatcgatatattaataataaaggcgttattgttcctgatacggcagcgctacgaaaggaggtagaagacgaatttcgcactgtctttgggcaatcaatcaatttatcgccagaaacgccccaaggggttttggcaacaatggaaattgaaaatcgcgatgccattgtgcgtaataatgccgaacttgctaatcaaattaatcccgatattgctggggggatttttcttgatgcaatatgggcgttaatgggaggagagcgtattaatgccacacactcctatttaagtaatgtggaatttatgggagtgcccggcaccattatccctaaaggttcacaagccctaacgataaatggcgcagtatttgaaacattaacctctcttattatcgcagacactggaaaaataactggggatatgcgcgctaaagagtacgggcctatcacttgtggtattgggcaattaaataaagtggcaagttcggtattaggctgggaaaaagtcaataataccacgcacgctattattggccgttatgcagaatctgatattaaagccaggcgtcggcgtaaacagactctcgctaaaaataccatcagtgttgcccaagcaattacatcgtccctctatgaattagccggggttaactctctctcttttcgagaaaacttcactgataaaacattaactatcgatggtatttccttattgccacatagcatttatgtctgtgttgaagggggagacagccatgaaattgccaatgttttattaagaacgaaaacaataggtgcggcgtttaatggtgatattgaaataaatctcttagagccagcaagtggtcaagcatatccgattaaattttcacgacccaaagaagtgacgattttttgcaaagttaccgttaaaaaatcctcttttgatgcacaaaccattattcctgatgcactagaaaaatggagtcatggagagatagagggggataatgggctggtggtagggcgagatgtctctccttttgagatctccgctgccgtcaatgctgtggagccacatttatttgtcacaaaagttgagttatcaacagatggaaaaaattggcatgtagcattaattcccattgccattaatcaaattgcccgcttacctaaaggggcgatacaagtggtgatggtatga

SEQ ID NO: 296757 - DNA, 489 bp, Proteus mirabilis; identical to SEQ ID NO: 293651

SEQ ID NO: 296758 - DNA, 657 bp, Proteus mirabilis; identical to SEQ ID NO: 293638

SEQ ID NO: 296759 - DNA, 2760 bp, Proteus mirabilis; identical to SEQ ID NO: 293637

SEQ ID NO: 296760 - DNA, 1212 bp, Proteus mirabilis
gtgaaaaatcgcactataggcagtgtatttattgttgcaggaacaacaattggtgcaggaatgttggcaatgccacttgctgctgtgggtattggctttagtaccatggtgttattgctggtgggcttatggctattaatgagttacaccgcgcttttattagtggaagtctatcaatacaacgatccccatacaggccttggctctattgcgaaacgttatctgggtattggaggacaagtcgttacaggtttagctttgctacttcttatgtatgctttaacaacggcttatatcagtggtgcgggtgaattattagcttcgactttatcttcttggattggtcataagataaccatcacacaaggtatcattatctttacagttattggtggtgcggtagtcggtattggtaccacttctgtggatatgattaaccgcttactctttacagcaaaagttattttcttaatttttatgctggtagtcatgttaccccatgtggaaaaagtcaacttaacctctatgcctatcgctcagggactcgttctttctgcgatcccggttatttttacctcttttggtttccacggtagtgtacccagtattgtcagttacatggatggcaatatcaaaaaactacgcctaatatttatcgtaggtagcgcaatccctcttattgcttatattttatggcaattagcaacattaggagctattcccaccaccacctttatggggattttagcccaagaatctggcttaaatggtctactcaccgccatccgtgatgtggttgctacaccgcgagtcaatattgctgtcaaccttttcgcagcccttgcactcgccacctctttcttaggcgtagcattaggattatttgattatctagctgatttgtttaaacgcagtaatcgcgcatctggtcgttttcaatctggtttattaacctttgttccaccgctattctgtgcgttatttttccctaactttgtgcaagccttagcctatgccgcaattgctttatctattctcgcactattattaccggcactactggtgtggaaagtaagacaacaaaagcagactacagagcattataaagttaaaggcggtaagccagccttagctattgtatttatctgcgggttagtggtgattggtattcaaatagcgattacctttaatatattgccacaagtgggttaa

SEQ ID NO: 296761 - DNA, 543 bp, Proteus mirabilis
atgaaaaagtttttattattaggagcaatgagcgcattacttatttctgctaatgccaatgccatatcgatgaatgtgcaagcgggtaaacattataccgatgtacaagcaggtttaggtgatgccgattctggactttcttttaacggtaattgggcacgtagtgatcacgatggtcaattaggtagtttaggtgcaaaatttgcgttacctcttggcccattctcagcaagtgttggtggtaaagcactttacctctcccccaaaaatggtgatgacggcgcggcattagctggtggtgttggacttaattggcgtgttttaccttcactgagtgtttatggtgaagcttatgcttcgccggaaggattaacatcaggaagtaaatcctattatgaagctgatgttggtgctaaatacacggtatttaaaccacttcatgttaatgcgggttatcgggtgattgaaattgaaaacgcgcataatcacagtaacaataaacttgctgatggtttctatgtaggagctggtttaagtttctaa

SEQ ID NO: 296762 - DNA, 2145 bp, Proteus mirabilis
gtgtcccgtacaattatgctagtcccaactgatacacgcgtaggtttaaccagcgtcagcttgggtgtaatccgttctatggaacaaaaaggcgttcgccttagtgtattcaaacctatcgcacagcctcgtgttaaaggcgcattagatcaaaccactgcgattatccgctctcactccacaattcaatccgcagaacctttaaatatggattacgttgagtcattactcagctccaataaaaaagatgttctgatggaagaaattgttgctagatatcacgaaaatactgctgatgcagaagttgtactgattgaaggcttagtgccaatgcgtaagcacccttttgcacaatctttaaactatgagattgccaaaacattaggtgctgaaattgttttcgttactgcattaggcaacaacaccgctgagcagttaaaagagcgcattgaatttgctcgtgctgaatttggtggtgtaaaaaatcaaaatatcacaggtgtgattgttaataaattaaatgcccctgtggatgatcaaggtcgtactcgccctgatttatcagaaatttttgatgactcaagcaaagcgattatctctaatatcgatttaaataccatcgaaaaaaatagcccacttcctttattgggttgcattccatggaacttcgatttaatcgctactcgtgctacagatatggcaaaacacttaaatgcgactatcgtcaataaaggtgatattgaaactcgtcgtattaagtctgtgactttctgtgctcgtagtattccacatatgttagagcatttccgcccaggttcattgcttgtcacttctgccgatcgcccagatgtgttagtttcagcatgtcttgctgcaatgaatggcgttgaaatcggtgctatcttactcacaggtggttaccaaatcgatgcaccaattaaacaattgtgtgagcgtgcatttgaaactggtctacctatctttatggttaattcaaacacttggcagacttcattaaatctgcaaagctttagcttagaagtgccagcagatgaccatgagcgtatcgaaaaaattcagaactatgttgctcaacatatcaataaccaatggattgattcactgacagcaaactctgaacgtcctaatcgtttatcaccaccagcattccgttatcaattaacggaattagctcgtaaggcgaaaaaacgcatcgtattacctgaaggtgatgaacctcgtaccgttaaagccgcgtctatttgtgctgaacgtggtatcgcaacctgtgtactgttaggtgatcctgaagaaattcgtcgtgttgctgcagcacaaggtgttgaattaggtacaggtattgaactcgtcaatcctaaagaagtacgtgaaatttatgtacctcgcttagttgaactgcgtaaaaacaaaggtatgacagaagttgttgctcgtgaacagttagaagataacgttgttctcggtaccttaatgttagaaaaaggcgtcgttgatggtcttgtttctggcgctgttcatacaaccgctaacactattcgcccaccactacagttaattaaaactgcacccggtagctcattagtgtcttctgtgttctttatgctattaccagaacaagtctatgtttatggtgactgcgcaattaacccagatccaaccgcagaacaactggctgaaatcgctattcaatctgcagactcagcaaaagcgtttggtatcgacccacgcgttgcgatgatctcttactctacaggtaactcaggtgctggcagtgacgttgaaaaagtgcgagaagcaactcgtttagcacaagaaaaacgtccagatctgattattgatggtcctttacaatatgatgcggctgtaatggctgacgttgctaaatctaaagcaccaaactcacctgttgcgggtaaagcaactgtgtttatcttccctgatctaaacaccggtaacactacctataaagcagtacaacgttcagcagacttggtttccattggaccaatgttacaaggtatgcgtaaacctgttaacgacctttctcgtggcgcgttagtcgatgatatcgtctacactgttgcattaactgcaattcaagcaagccaacaagaaaatgcctaa

SEQ ID NO: 296763 - DNA, 2400 bp, Proteus mirabilis
atgaaaatatcacatttctatcgatggatagtattcatcatactcacaatattggctctttactttactgtactcggagggtatttagtttcattagcaggatcgcctttttatctctttaccggtgtcatgcttcttattattgcagcttgctttctaagtcgaaggaaaagcaccctattactctttaactttctatttttaataacgattgtctggagtatctgggagtcaggatttgatttttgggcactcgcccctcgcttagatattatttttattctaggcttactccttattcctttcacactcaataataatgtttacacttgtcgtaccaataaaattggcttattcacactattagccacaacacttatcattatattaggtagttcactaaccgatcctcatgccattaatggtcaatttacacaacaacagcccaccaactctatatctcctatcggagtaaatgataatgactggcccgcttatggcagaacgcaagccggaatacgctattcaccattaactcaaatcaacagtgataatgttgataagttagttgagaaatggacatttcataccggtgatgaaaaaagagctaatgatgccgttgagataaccaacgaagttacgcctataaaaattgaagataatctctttctatgtacacctcaccaatatttaattagcttagatcccgcaacaggtaaagagaagtggcgttttgattctaaattgcaatataacaaaagcttccagcatatgacttgccgaggggttgcctattataatcaaaataatagtgccgaatttgccaaaagcctcgaagttcgccaaccaagcatatcagatgaatgtcctgaaaaagtctttcttccagtcaatgatggccgcctaatcgcagttaatgcgcaaacgggtaatgcatgccgtgattttggtcagaatggagaaatcaatctgttagcttctatgccttatgcttatttgggtggatataacccaacatctccccctatcgtcaccggtaatactattatcattggtggctctgttactgataacttatcaactcaagagccttctggtgtgatccgtggctatgatgttaatagcggaaaattaatatgggtatttgatactggcgcagaagatcccaatgcgatgccaggtaaagagactcaatttgttcataactctcctaatgcatgggcgcctttagcttatgatgcacaaacggatgtggtctatattccgacaggagtaggtacacccgatatttggggaggcgatcgtcatccattaaaagagcgttacgctaattcagttttagcactaaaagggtcgacaggtgagctattgtggcatttccaaaccacccatcatgatttatgggatatggatgttccttcgcaaccatcactggttgatatcaaaactgataaaaatgaaacaatacctgccatttatatcgtcacgaaaacagggaatgtgtttgttcttgatagaagagacggtacacctattgttcccgtaacagaaaaacccgttcctaccagtgtcaaatatggtccacaaacacaaggtgagcattactcacccactcagcctttttcagcacttaatttagcacccaaaaataagttgcaaagttcagatatgtggggtggcacaatggcagatcagctgttatgtcgtatcgctttccatcagttaaattatgagggaatttatacaccaccatcagaaaacggtacgcttgtttttcctggtaacctcggtatttttgaatggggcggtatttctgttaatcaagatagacaagtcgcggtaatgaactttattaccttgccttttatctcaaaactttatttaaaagatcctcaaaacagtcaagcaattgacgcaggccacggagagcaaggtttacaacccatgacgggaacaccttatagtgttgatattcatccattcttatcaccactaggattaccttgtaaacaacccccttggggatttgttgctggtgttgatttaacaaaaaatgagcttgtttggcaacaacgatttggcaccattagggatagtttgcctaatttagtggaattaccaccattaaaaattggtgttcctgggctaggaggcgctatctcaaccgcaggtaatgtgatgtttgttgctgcttctcaggataattatattcgagcatttaatgtgacgaatggcaaaatgttatgggaagcacgattacccgcaggtggacaagcaacgccaatgacctactctattggaggcaagcaatatgtggtcattatggccggcggacatggttcatttggtactaaaatgggcgatagcttagtggcttatgggttacctgataatttatag

SEQ ID NO: 296764 - DNA, 1224 bp, Proteus mirabilis
atgtctttagctattcgatatcttgcgttattaccacttttcgttattactgcttgccaacagcctgtaaattataatctaccagcaactcaagtggctcaagctcagcctgctattgtcaataattcatggattgaaatttcacgaagcgcactcgactttaatgtaaaaaaagtccaatcattattaggtaagcaatcctctctttgtgcagtgttaaaaggagatgcttatgggcatgatttatcgttagttgccccaattatgatagaaaataatgtgcaatgtattggtgtaacaaataaccaagaattaaaagaagtacgtgatttaggatttaaaggccgtttaatgcgagtacgtaatgcgacagaacaagaaatggcacaggcaaccaactataacgtagaagagttaattggtgatcttgatatggcaaaaagattagatgctattgccaagcaacaaaataaagtcattcctattcatttagcattaaattcaggtggcatgtctcgtaatggtttagaggtcgataataaatctgggcttgaaaaagcaaaacaaatttctcaattagctaacctaaaagtggttggtattatgtctcattatcccgaagaagatgctaataaagtaagggaagatctggctcgttttaagcaacaatctcagcaagtgttagaggtgatgggattagagcgtaacaatgtcacattacatatggcaaatacctttgcgacaattaccgtgcctgagtcatggctggatatggtacgtgtgggaggtattttttatggtgataccattgcaagtacagactataaacgtgtgatgacctttaaatccaacattgcttcaatcaattattatcctaaaggtaatacggttggctatgatcgtacttacacattaaaacgtgactcagtactagctaatattcctgtaggttatgcagatggttatcgtcgcgtttttagtaatgcggggcatgcattaattgctgggcaacgcgtacctgttttaggaaaaatatcaatgaataccgttatggttgatattaccagtcttaacaatatcaaaccaggtgatgaagttgtattttttggcaaacaaggtaatagcgaaattaccgcagaagaaattgaagatatcagtggtgcattgtttaccgaaatgtcaattttatggggagcaaccaatcaacgggtattagttgattaa

SEQ ID NO: 296765 - DNA, 297 bp, Proteus mirabilis
atgagcatgattgttgttgtaactgaagctgttcctcctcgattaagagagcgacttgctgtgtggctattagaagtgagagcgggtgtatatgttggtaatgtttcagcccgaataagagaaatgatttggcaacaaattaatgagtttgctgaagatggtaatgtcgttatggcatggggaactaatactgagtcaggttttgattttcaaacctatggtgagaatcgacgagagcctattgattttgatggcttgagattagtgttatttaagccatataaagaagatgtataa

SEQ ID NO: 296766 - DNA, 921 bp, Proteus mirabilis
atggccttcattcctttaagaccgattccaattaaagatcgacactcaatgatatttattggaatgggacgaattgatgtaaaagatggcgcttttgttgttattgatgaaattaacggtgaaagaatgcttattcctgtaggatccttagcatgtattttattggaacctggaacacgtattagtcatgctgcagttaaattagcagcaaccgtaggaacattactaatatgggttggtgaagcaggtgtgaggctttattctgttgggcaaccgggaggtgcccgatcagataagttattgtatcaagcaaaattagcacttgataatgatttgcgtttgaaagttgttcgcaaaatgttcgaactcagatttggtgaatcggctcctttaaaaagaagtgtggatcaattacgtggaatcgaaggagctcgagttagaaaacaatatcaaatgttagctaagaaatttaaaattgattggaaaggacgacgctacgatccaaaagattgggaagccggagatattattaaccgctgtattagcgctgcgacagcctgtttatatggtgtcactgaagctgcaattttagcagcaggttatgcacccgcaattggttttgtgcatacaggaaagccactttcttttgtttatgatattgcggatatcataaaatttgacactgttgttccagtggcttttaaggttgcatcatataaagcaattgtgcctgatagagaagttcgtattgcttgtagagaagcgtttcgtaagtatcaaacactcaataaacttatccctttaattgaagaagttctttctgcgggagaaattactccacctgaaccacctattgatgctcaaccccctgcaattcctcaagctcacccttttggcgatgaaggtcatagagaaaaatag

SEQ ID NO: 296767 - DNA, 678 bp, Proteus mirabilis
atgtatttatcaaggatctcaatagactattctgctgattatttacactcactattagcgaataagttgccggacggatatacaattcatcagttattatggcggttgtttactgaagaaaaagaacgctcatttttgtatcgattagaaataggaaaaaatggtaaacctattttttatattctttcttctatagctccaactactaagaataatttttttaaaatagaaactaaactttttttacccaaattagttaaaaaaatgaaattagccttttcattaagagcaaatccaacggtttgtattactgataaagaaggaaaacggcatcgtcatgatgttcttatgcatgctaaaaaacaagctcaacttgatggaaaagattacagtcatgatgatattcatcatttaatgcaacaagctgcattaaattggattagttctgatgatcgtttaaataaatggggtatttcattaactcagttacctgatattaaagcttatacacctgagcgtattaaaaagccttcaggaaaaataatgtctttttcttctgttgattatcaaggtgttctaacaatcgaagaacctcatttattttggcaacaatatcagcaagggtttggcagagcaaaagcgtttggttgtggattgatgcttatcaggaatatttaa

SEQ ID NO: 296768 - DNA, 738 bp, Proteus mirabilis
atggcccaatatctcgtttttcgtctttatggtccgcttgctagttggggattgccagcagtaggcggtgatagacaaacagggatagctccttcacgttcagctattttaggcttactgagtgcatcattaggcattaatcgaaaagatgaaagtaaactacttcaattgcaacaaagtgttttagttgcaacaaaacaacttgtaccaagtatgttgttaagagactttcatacggcacaagttccctctaaacgtaaaaatattacacacccaactcgacgtagtgaattagctgaaaaagatcaaaatactattttatctagccgagattatcgatgtgatgcgatatggatcattgcgattaaattaacgggacattctcaatatacgcttgaacaactaaaaaatgcattattaaaacctgtttatatactgagtttagggcgtaaatcttgccccctctctttaccaatgatgcctaaaattgtagaagtagagcaattaaaagaggcattggatactcaatttccttatataacaacatcggataaagcagatagttattggtttcattcagatgggtgggtaacgtatttttgggaaggaaattatcaagatatcaagggagaaaatattatgacattgtacccttgggatgatccgataaatagacagcattggcaatttcgtcaacgtaaaatgtatcaaatgagtgtaaaaagggagagtgaataa

SEQ ID NO: 296769 - DNA, 1035 bp, Proteus mirabilis
atgagtcaatttattcaattacatattttaacttcttatgctccttctaatttaaatcgtgatgatttaggacgacccaaaacagcgataatgggaggatttgaacgtttaagaataagttctcaaagtttgaaacgtcattggcggacatcagagttatttaatattgctctttctggtaatattggtattcgtactaaaaaatttggtttacagctttacgatgcattaattgaaggtggggtttctgaaaaaaatgccaaaaagtgggttgggttaattatagaacaatatggaaaaataaagaaagattctattgaaacagaacaacttgttcatattagccatttagagaaatctttggcatttaatttaattaatttacttataaaagagcaaagagagccaacaaagcaagaattagagagtttaaaaacaataaatacctcagtagatattgcgttgtttggtagaatgttagcttcagcaccgaaatataatattgaagctgcttgccaagttgctcatgctattagtgttcatagtactgttattgaagatgattattttacggctgtcgatgatttaaataatggtgaaacagatactggctcagcacatattggcgaagcaggatttgctgctgctcttttttatagttatatctgtattaataaaacgcaattaattgagtctttagacggtaatgaagagctggcaaataaagcaattcaagcattaactgaagttgcgattaaagtttctccaacaggtaaacaaaatagctttgcttctcgtgcttatgctagctatgttttggcagaaaaaggaagttatcagccacgctctttatctgttgcatttctaaaaccaattgatgatgaagatatggaaaatgcggctattaatgcattaaagtttagaatggagaattttgacaaagtttatggtacttgtgcagagtctcgctatcaacttaatgcagtacaaggggaaggttccctttctggattattacaatttgttgcagagtaa

SEQ ID NO: 296770 - DNA, 588 bp, Proteus mirabilis
atgggatcttataaatcaaaaaatattactttatataattatccagaattaaaaattaatgtattacgttggtgggaaagtctatttttatcaccaaatgaattaagtaaaaaaggtattttaccagcaccgaatcgttataaatctgaattgaaacgttgtgattctattactgctattatgttaaccgaagggtttcgtgctttatggttgagttttcctgtggaccttattaataatgctacaacggaagatattgagcgttgggcaacaatagtagctatattagtttatattacgcaggatagtgaaaaacactttgctactattgcaggtgaaaaagatgagagtaaaaaatcttgtatcagtgaatcccgttttttacaactacaatcttcgcgtacttatgatgagtttattcggcgtttaaggagaattttaattcagattaaagggaaatcatctgtcttatcaatgtgtaaagatattgaaaagtgggttttagaaaaacagcgctttagttctatacaaacaaataaacaaattattattgagtgggcaatgaaatattatcaggctgccatttaa

SEQ ID NO: 296771 - DNA, 1599 bp, Proteus mirabilis
atgaatattattaatcaaccttggttgccttttcgttttcgtgatggcgagattaaaacacttccaatatcagctatttcacatcctgatattattgatttctcattaaatagagccgattttaaaggtgctgcttatcaatttgcaatagggttattacaaacgatatttgcaccagaggatgaagatgaatgggaagaatattttgaaacaccaccttcaagtaaaaaattacaatctgcatttgataaagttgcacatgcttttaatataatgggtgatggccctttatttatgcaggatttttcaactttagaagagcaaaaaaatattcctatagctcagttgctaatagatgctcctggtgaaaatggaataaagcaaaatacagaccattttattaaacaaggtattgctgatgtaatgtcattagagatggctgtgttagctttatttaccttacaaataaatgcccctagtggtggcaaaggtcatctagtcagtctaagaggaggtggacctttaacaacattagtttatcccgcagaagaaaattcaacattatggcaaaaattatggcttaatgtaattaatagagaattttgggaatatgatgaaccaaattttgatgatggtagtgtttttccttggttaataccgctaaatttaaaagaaggaaaaggtgaaaaagtttcacctgatgatgtacatcccctttatatgtactgggcaatgcctcgtagaataagattaaaagtagaaaataaatctgtcacttgtcaaattagtgatatgaaaagtaatttttcagttagatattatgttactaaaaattatggattagactatcaagaaggttggttacatccattaacgccatattattgggatcctaaaaagccagaaatgtttcctaattctattaaaggaagacaaggaggtattcactataatttgtgggatcgattatttttatcaagtaatgaaaatggacaaaaaagcgctactgttgtcagtcattatttaaagctatatcaattattagaattcacaagaaagcctagattacttatttttggttatgatatggataatatgaaaccacgtggatggtataatttagaaatgcctattttccatgtaaaagatgagtataataataaaattattaatgaaataaaaattatccaaaaattaactatagattgcttaaaaagtgtaaaagaacaggtgaaaaaagcgtggtttagtagtcctaaggatatgaagggcgatattagttttattgatttaactttttggcaaagaagtgaaaatatattctttgaagtggtacaaaacattatcgttcaaatacaaaaaaatgattttctaacccatgaacaagccaaaaaatggttaaactctattagaaaaataagtatttctatttttgatgaatatgctttatcagcattaggaacacaaaaatcagttagtgggtgtattaaagcaagaaatggtttaattaaagatctttatagtaataaaagaataaagaagtttgctgaagactttaaaattactaaggaaaatggagaacaatatgggatcttataa

SEQ ID NO: 296772 - DNA, 2694 bp, Proteus mirabilis
atggataaagattattatagctactggggcaagtttaaatcagaaaataatcatgaatactatcatttgcttccatatcatagtttggacgtggctgctgtaggtatgatattgtttccagaaaactcaaaaattataaaagatatttctacttttttacaaatacacccaaaagaattttctaaactgtttttattattgctttctcttcacgatattggcaaattttcttcttcatttcaatatattaatccaaatataatagataaattaaaagtgcctgaaagtaggttttcctatgatggaaataattatcgccatgatcgtttaggttattacttttggagaaaaataaaaaatactattttttcatcaataataatatctaacgctgattataaagaaagaaaaatatctgatggtttttggattatttttgaaacagcattagggcatcatggaaaacctattaataagaataatattgatgagtctatagagaattatattcataaagataatgataaagctgctattgattttactcttgatatattaaaattattttctcccaaactttctgtagaaaatttttatgataaaggatggaaagaaagattaaaacaaatatcatggcttcttgccgggatggtaacactttcagattggatcggttcaaatagagattattttccttattataagaaaaaaataccgttatctgaatattggtttttagccttaaatagagcaaaaaaagctgtattatcaagtggttttaatcgaaattatcaaatatcaccttttatttctgttgaataccattttggttataaacctacaccattacaacaatgggctgaaaaagttacaattaatgaacaccctcaattgtttatattagaagatactacaggttctggaaaaacagaggctgcattaacacttgctcatcgacttatggaagttgatgcagctgatggcttttacttcgggttacctacacaagctacatctaatgcaatgtttttaaggataattaatcactataaaaagatattcgatgaaaaaaaagaagtaccaagtattgtgcttgcacacagtgctagtaatatgaatgaacagtttactaaaataattagagatggtaacgagcgatataatattagtgataacaccgcatctgcacaatgttatcaatggttatcagactcaagaaagaaagcattattagcaactataggggttggaaccttggatcaggcattattatctatgttaccaagaagacaccaatctttaagattattaggactaaatagaaaaattattatttttgatgaaatccattcagctgatgaatttatgtttgaaataatagaaaaactattatcaacacatttacatcaaggtggttcagttattttattaacagcaacattatcacttaaacaaagaaaaagaataatagatagctggtttaatgcctttgatcaaatatctcctgaaatagaatcaaaaagctttccattggcaacacatctaacttgttttccaaaagttataaaaaaagaatatccattaaaaagtaggaatcaagtaagtagaaaagttaaagttgaaataataaataaagaagaacaatgtattgatattattattagtgctataaataatggaaattgtgtggtttggataaggaatacggttaatgatgcgataaaatcatattatgatataaaaaaaagattatctaaagataataattgtttattatttcatagtagatttaatttaaaagataggaagatacgagaagagcaagtattaaagtattttggaaaaaatagtaccgctcaacaaagaaaaggcactgtattaattgctactcaagtttttcaagaaagtttagatgctgatgctgatatcatgatttcagatatttgtcctattgatgatcttattcaacgctcaggacgattacatcgacatacacgaacaaaatatggggattacacatcagaaacgattgataaacgtcgacctcctattttatatgtacatgctcctttatttatagagaccccatcaagctgttggttaacagaacaattttcatcaacagaagcagtttatcgttcacctggtcgtttatggctaacattaagaagtttaactcgattaggtgaaattaatatgccaaaagatgcgagacagttaattgaatccgtctatagtgataatgcttacaatgaaattcctcaatctttaatacaaaaagaaaataatgatataggtgaaaaaaaagccagagtatcaaaagcaaaaattcaattattaaagataaataaaggctatagtgaagaaagttcagaattttggatagaagatcactatgatattagtactagatatagtgatatagaaatggttaatattcttttattaaaaaaaataaaagataattatgttccttggatagaagattctcatttttctattgctttaagtacagttaagatttctaaaaagaaatatgctgataaattagtatcagtaccccaagaggtaattgatacaattaataagcaatatccacaggcacgatatttacaattgtggataccagatgaagatcagtattatcaatatgatcatttaatcggtttttgtgaaagacaggaattgtcatga

SEQ ID NO: 296773 - DNA, 549 bp, Proteus mirabilis
atgaccaacgcatcaaataaaattgccactcatgagatcactattcggccaactcaattggctgatgccaaccaactaccgaagattgaacaatcggcaggaaagttatttagtagcataaaagaattaagttggatcagcgaaagtggcgtacaaagtgttgaggcgcatattcaatttatccatcaacatgctcactgggttgctgttaatcatgacaatcatcccgttggttttatcatgacgcaacaattacctgaaagtgtatttattcatgaattatcggtaagtaaagattggcaaaataaagggattggtaaattgctgatccagacagtaaaaaatgaagctaaattacagcaatttaatgcggtaacgttaacgactttccgcgatgtcccttggaatgctccctattatcagcgtttaggtttccatatcttacttgagcatcaaataccctattctttacaacaaattttagataatgaagtagagcatgggggatttgcgagagaaatgcgttgtgcgatgaagtgtgaaatttaa

SEQ ID NO: 296774 - DNA, 897 bp, Proteus mirabilis
atgaaaaatttctttaaaataagccttattgctagcacggtattggttttatctgcctgtgatcaacttgatttagataataaaaaagataagttttattacagtaatcccagtgaaaaaagtatgagctttgttgttgatgataaaacatatcaggttgagccgggtaaaagtggttatttaacactctcaccgggcgaacatagtttacaagatagtgcaggtaataaatccacttttatggtgtatgaaaacaacaatggtggaattttaaatcctgataattttatgtattaccgtttatctgaagtctatgccgtacaaggtaagggggatcgctttaaaccaacagaatataaagtggttattaatggctatcagttagaaatgccattacaaagtacgaatgctaccttgattgatggcaatgtatttaaatgtacttatacgttaggtgaacctttccccagtgaaattaaaagccataataaaaacgaaatggggaatatcaaaaccaaatgttttgataaacctgaattaatccaatatattatgactgattatggtcaagatctaaaaccactttcccctcaagatgagtataacgatactgttaatctagcgttagactacagtttacctcaaccacaatttactgatcctgatattcaagcagaggcagaaaattgggttgcattgcttgatcaaattaaagaaagtaatgatcctaatatccataaacagcttaaaacaccattacatgaagcaataaataagttatcaaaagccgatagtgaaagagcagtaaaaaactctgttgaagataataaatactataattcttttattcaccaagcgagccaatatcaatcttatgggatcttacctagagattaa

SEQ ID NO: 296775 - DNA, 1371 bp, Proteus mirabilis
atgaaccgtaaaaacctgtttactcgcacagctctcgctgccattgtaggaacactttcctcttatgcaagcgctgccggttttcagttaaatgaatattcaacttcagcactaggtcgtgctttttcaggagaaggcgttattgcagatgatgcgagtgtaggtagtcgaaaccctgccgcattgaccatgtttgatcgtcctgagttttccgtcggtgctatccatattaaccccagtgttgatattaaaggtaaatctccactctctggcgccagcactaatgccggcgatatcgccccaagtgctttagtccccaatattcactttgttgcgcctatcaacgataaatgggcaattggtgcatcaggtactactaactttggtttagctaccgactttaaaaaagattacccagctggtttaattggcggtaaaactgatttaaaaaccatgaacttaaatttaagtgcaggttatcgagttaataaacaatttagtgtcggtttaggcttaaatgcgctctatgctgatgctgaaattactcgccatgtgggtgaagctggtaaactattgggtggtgccttatcccaagatcctaaatatcagggattaggatatcaggaattaggccgttatttatcaggcttatcaccaagtgatcgttttgcacaattaaaaggagatgcttggggctttggctggaatgccggtttattatatgagtttgatgaagataaccgtatcagcttcacttatcgctctaaagtaaaagtgaaatttaaagatggtgattatcaaagtgacttaaaaacgatccctcttcctggtggcaataccatcgtaggtaccgaaggtggcacaatcaaaggtaaacttgatcttaacctaccggagatttgggaatttgctgcttaccaccgtgtcgcccctaaatgggctgtccattataatttagcttataccagttggagtgagtttaaagagttaagagcaacacgtaaaagtgatggccagcaactcttcaacaaagaagaaggcttccgtgatgcatggcgtattgcattaggaaccacttattaccatgatgataattggacattccgcaccggtattgcctttgatgatagtcctgttcctgctgataaacgctctatctcgatccctgaccaagatcgcttctggttaagtgcaggggcaacctacgcatttaataaagatatgtctgtggatgttggtttagcctatatgcacggtaagaaagtgacgattaaagagaagctatctgaaagcttaccattgccggcttatgaatttgaatcatcaggtaaagcatggttatacggtatgaactttaactatcgcttctaa

SEQ ID NO: 296776 - DNA, 744 bp, Proteus mirabilis
atgaagtatcgcctgtgcggtgttgctcttttagtagctttactttcaggatgtgcaagcacacctaacaatggtgacagtcgttctgatcccttggaagggtttaaccgccagatgtttaattttaactattatgttttagatccttacgtattacgacctgtagccgtagtatggcgtgattatgttccaccaccagcacgtaatggactatcgaatttcttaggtaaccttgaagagccagcaagtatgctaaatagcatcttacgtggagattttgaaaaaggggctaagcatttcgggcgtttttggatcaataccgtatttggtattggtggtttaatcgatgttgcaggaatgtctagagaatcaatggaaaaagaagttcctgtaaggtttggtagtacgttagggcattatggtgtgggatatggcccttatgtggtattaccgggctatggcagctttacagtgcgagaagaggggggcgattgggctgatgccacctatccagtactgagttaccttactttctggatgtctgcgggtaaatgggcccttgaaggtattgaaacgcgagctcaattattagattcagatgcaattttacaaaactcatctgatccatatttaatgatgcgtgaagcctatttccaaaaaaatgatttcaatgctaatggcgggaaaacgggtgaaaatccaaacgcaaaagcgattgaagatgatttagattctatcgattag

SEQ ID NO: 296777 - DNA, 741 bp, Proteus mirabilis
atgctggattttttaaaaaattatgacaatttaaccgtcagtgaaaagaaagtattaaagtatcttaccgataatatcgccgatatcccctatttaaatattaatgatttagtcgctaaaacctttgtatcaaaaacggtaattattaatttatcgcagaagttaggttttagtggctttaaagagctaaagtttcaaattaataattatattctttcgcgtaataaaatagaaaagagtgatcactcatcttataaaaaacaactagagaagaatattaataaaagctttaccctcatcaatgaagagcaaattaaagagtgtgctaaaacactgcgccattctcgtaatatttttattgtggcaaggggaacaagtaaagcagtcggttattatcttgaacacttattgtttgcactgggcctgcattgcttttttattaatgattataacttatcagattcgtttacacgtttagtgaatgaagatgacacggttatttttatctctctttcagggggaactaaaaagatcattgaaacggcaaaaattgtgcagttaaaagaggcaaacattatcagtatgacagcctttaataccaatgagttaaccagttatgcgacgcatacgctattttgtttcgcggataatcatgatacgaaaaaagatgataccaagtcacgaattggtttttttattttggttgatttgttaataaatgaaatagaaaatctactttaa

SEQ ID NO: 296778 - DNA, 519 bp, Proteus mirabilis
atgccaactccttgctatatttccattgaaggaaaaactcagggcaacatcactgcaggcgcgtttactgcagattctgtcggcaacatttatgtacaaggtcatgaagaccaaatgttggtacaagcattttctcacgtggtgacggttccgaccgatccgcaatcaggacaaccttccggccaacgtgcgcataaaccatttcgttttaccgtggcattaaataaagcggttcccctgctgtataacgcattggcttccggcgaaatgttgccaaaagtcgagctaaaatggtatcgcacgtctgttgaaggtaaacaagagcacttctttaccacgacgctaactgacgcgactatcgtgaacatcgattgccaaatgcctcattgccaagatccggctaaagccgacttcacgcaacttatcgaagtctccctctcttaccgcaaagttgactgggagcatactgttgccgggacttcaggtgcagatgactggcgtgcaccactcgaagcataa

SEQ ID NO: 296779 - DNA, 2172 bp, Proteus mirabilis
atgtctataacaaattcaaaaaaatatcaaaggctgggtgataaggatggcaacccactgaatgggggtaagacattaacccatggcgggggcagaacatacgcgcaagatctcgctttacaagagcaacatagacaactcatagagaagatcttaagtggcgacatgcaaagtggcttagtgtttacttgtcagattggtggattacccgaagagactttccaagtcacgcaattcgatttacaagaagggatctcacaacttttcactctctccatccaagccgtcagtccactctcggaaattgattttaatgatgtgttaggcatggcttccagtttgacagtaaagcgagatggtcacattctgcgtacagtacaaggtatcttaacggcggcagagcaagggaataccgatggggtaaaaacctggtatcaatttgtgatacgtcctgaaatgtgggtaatgaccctcaaacaagatagtcgtatttttcaagataccaccgttcctcatattcttgagacattactcaatgagtctcacattaaatatgataaacagctttatcacccagaagagcatttgcagcgcgcctataccactcaaaaacgagaaacaatgtatgacttttggtgccgtttagccgcagaagaagggattaatttttggtttgaagaaggcccacagttattttatagcgaccgacatttgggcatgagagcggggatatccttaacctataacccacaatcggatacagatatcaccgatagcaccgccacaacgtggcgctatgttgaacaactctgtagcgatattcgcgttgataaagattacaatcaacttagaccttcctaccccttaagccatcaagtcacaggagaggttcatcaacaacatgaaatatttgaaagttatggacgctttgaagaagatgcacagggacaaccctttaatcagatacgttatgaacaatcacaaaatcagcgtcaagtaggctctgcgaccacaaactgcattgaattagcgccggggcgtatttttaccttgtctaaccaccccagtgcacgcatgaacaccacatggcaggtgattagtatctcacatcacggtgtgcaacctcttgccgacaacagtggcggtgaaggaacgcaattgagtaatcagctttcctttgtgccgagtactcaagagtggcgcccgccttaccgttttaaacctaccgccgatggtgatgaattagccactgtcgtcggcccgccgggcgaagaaatctataccaatgagcaaggtgccgttacggtctattttcattgggataggcgtggtaaaccagaccatagcgcatcatgctgggtaagagtcgctcaaggttggaatggggacggatttggctttatggctattcctcgtgttgggcaagaagtgattatctcttatttaaacaatgatatagataaaccgattatcaccggatgtacctataatggtcgcaatcgttcccccattgatttacctaaacataaaacccgtaccacatttcgcaccaaaacccataaaggagacgggtttaatgaattgcgctttgaggataaaaatggcgatgaggaaatttatcttcatgcgcaacgcgataataatattcatattaatcataataaaacccaatacgttgggcatgatgatagccatactgtcgccaataaccgcaagcatgaagtgtgtcatgacgaatttatccacatagtcaatgagcaaacagtacaggttgatgtcaatcaatttgaacaaatagggaaagaccgtatcacacgcattgacaatagttggaaagaagttatccacgccagtcactttcaggaaatcggggaaaacaagcagtgtgatatccaaaatgattataccctgaaagccgcagggggtatccatacccataccaaaatccacaccttgcaagccagtgaaacggtcattatcaaaggcaaggctgggtcgattcaattggatgcacaaggtgtgactattacaggtaaaattctgctcaaaggcgatgtgtcaataacggggggcgccccagaagtggttactcagttagaagcggcggttaatgaagggttaccattagctgaggattgccgtgcgaaagcgatgaaaaaaggaacggcctaa

SEQ ID NO: 296780 - DNA, 1224 bp, Proteus mirabilis
atgctcttgagtccaaatcccctctataaagcgtattgggttgctcaatgccgttatactcgcaacggtgaacaattcaagggggtgatgaccgtagcaggtacaagtcaaccacaagctattaagcagatgcgccagtactttacggctcacccaggtgaatatacctttgcggactatgacacattaatccctttaatcacccatattgaacaaagttcaaccttagaattaccgttaatacggcaagtacgtgagcaacataatgcaaaggtttcagccgtattagtggataaatgcaacctcacacacccaagaccgtcagaaaaaggcgacattcattaccgtgaggggcaacctacgtttattgaatattcgcatctctatgtcgtcattgacagtggggaataccaccgccaaaccgggcaacatcttgtaccgaaactgcatggctcacaactgccatggaaatcactctatcaaggtgaaactcaagacagccttgaagataaagccccttatttggtacacattgccgccaatcaagccggtcagcagtttctggctcattacttgaatttaccacataaagcgagtctcggattatttatcaatagcctcaaaccctttaccgatattcaccggcaaatgcgaaaactcacctatttatataatcaaaaactggagagttggaatttctttcgtttttatgatgttaagcactttatcccatttattgagtctttgactcacggacagttaattaatgtggtcaatggggtaaatgcgttctacggctatagtgcacaataccccgatggggttgaaatcacctttcacccagattatctgtatgacggcagtaagcgagagccgttatttattaatacctatttatacaatcactacgcgaatatcacacagctgcaaactgtggctaaagctaaggcactgattgaacaattttctcaggtagaaggggatgagttagagggtgacgcattaatgggctactgtatacacgcagcaaattgcagttttttagacgatattcatcaatcaaaagcgttattgtacgacttgcaagcccgctatttgtgccgtcatcaaccgagaacatggcagatcgccaatgaaaaagccgcaccttataaatacaaccaagttttattgagttaccaccgttatatcgcctgtttaaatacccaaggagaaatgaaatga

SEQ ID NO: 296781 - DNA, 3102 bp, Proteus mirabilis
atgactggagaagtgaatgagaaatatttaacaccgcaagagcgcaaagcgcgtcagatggtgaaggcggtaaacgaagcgagcccacgaaacttaccggccgacgcggtggtatgcccatgtgaaaatgaacatcgccctgtttatccggtgcgttatgcatataccaacttttattgtgatttacatttttctacaattgaacaagcaccaaataaaacgttagaagcgagtattcctccttctattaatcaattattgaatgcgaaagatgttactgctagtaaaggattttctgcaagattattaagacaaggttgggtttatgtttttgaagaaggcaattaccctactagaagtaattctagtaataaaagttatcaagaacaaaatgttgatgcgacaaaaggacgcctattagtttttcaacatcaagttacaaccagtgatggcaatgaaaatttcattccatatatatttaagcaattaaaaaatgggggtgtcactttaaagaaaaacggaaatagtaatccttatttagctataccgaaagatgtgaaggaagcgactatcttattcagcgaaagtaaattatctgattacacacttaaaaaaatcatttcatcttctaagtttagatcgaaattaatgcaaaaaatcaattttattgattacaacaataacgattattgtattgagctaaataaagataatttaaatcgacttgttgaggattataaagaagaagttgataaatttaagctatttgttaaagaattcacgcattcaaatataccctcttcttttttttctgataccacaaaaatacccgacttaccacaagatgcaactgttttgattaatcaaataaatagtgttctagattataatgaaaaagcgacattgcttattttaaaagatcccgtaggataccaaaaagatgttttatcttattataatattgtaacaaaattacatttattatatcagaactattatagccatccggataaaattggccaatttattacgagtatacaagaagctagtcatcacattaaagatactgatgaaaaagaaaaaatgcaaacaatactaaaagagagtattaatcagaatgcattagataatgagtggaaaaatattcataaaacatttattttttttgagaaacatcaacgtattgtattatcattgtatgaaagctttatgaataatccggcaatcattaatgaaaacggtggcttaaaacattattttgattatgctttttcatatcacgaacgtataacgaaagaagatgtctttagtattgatttttttaaggaccttaatcaagcttttgatttatattttgatttaatatctccattaatgaattctaccgaaggacaaagaacattagataaattatattcaattaatgatgaagaaaataatagcctgtgggtgggagtgacaaagaaagtaattagtcttgttgctaattcaaaaattatggacgcacttttaaatgcacaagaatatgcagagaatatcgaaaattttgttaataagcttgcgtttatttgctcagatagcattggttttgcatttacaaaaacaagtaagatgctttctcattacgatattaaaaatagactaattaatactaagggtattgactatttagctcaaaagatacttccgatgatactggcattttgcaacacaaaaatttcattaaccgagtttgttaaattatcgggtaatgagcttaaccagtgggtggaacaactccgtaaattaacggaacaaatagtaccaaatctgcaacatcctaaattaaataagcttttttcttggaaacaaaaaataataaatctaggcgaagagactgccgttcttattccgaagattgagatcacagatattactaaaaataagatttatatttatggtaaagatgcattacaggtttccactaagctatttttaaacggtttcagcatgataaccggatcaatccaagcttatacattacaaggcatgagcttatatgaacgtaatgacccattaaaactatccccctataatctgtatacagcacagattattgcgaatttatttgtagcaagctacagtattttaaaagtctctcaagaggcgacaaaattatctcaaacagtatcgagcaccacactgaaattctttttagataaaataaaattacctatgctaacaacagaagtgggaaccaaaagaatggcagcattaggtaagattgcaggtgccgttggtgttgctcttgccactcgagatgcattagaagcttttcatattggaaataataaacaaggtttatcaaatgtagccattgccattggttctatcatgctaatttttgttacagggggatgggctctatttgcaggactgctaatattaggaggctttatctcaagtcaactcaccagttggagtcatttggaaactttgctaaaacacagtttttggggaaatgaagaaagatcaaatttttggaataataaaagacctataacaatcgataaacaactagaagaatatgttaaaaatttcgaacaatatgaaaaacagagtattattgaattacaagaattttataatctattttatacagctaaaatgactcaagaaaaaataccaaatggaaaactccgcttatcttttgaatttactaattttatcccagggatttcagaggtatattttcactttgttacagaggttggttatcacagcggtttggcagaagaaataaaaacacctagttcagcttatgttctaaataaacgaaaagatctcttagaaattagcaaacaattaaaaatggcaagtgaaaaaggtgattggaaccctgaaacaggtatatttaaatttagtttggaagtacagtctcaattagtaaatacatattctgcttttggtgcacatcccaatagccgtataggtattgaagatttatattggtattatcaagtcaatcccgaggtaacaacaccgatgcgttatatcaattgggggggagatacccaagaaaacaatcggcttttaggctttattaacagtgagaatatctaa

SEQ ID NO: 296782 - DNA, 939 bp, Proteus mirabilis
atgagtatttttttcaatcccgctaaacacccacatcgcttaaagccacaaccattgggggagcaaggtgagcgctataacgaagattggcccatgcctgaactcgattttttagagaccgtcgataaacaacagtgcattctagttgataaagaaatacgccgacgtgatgcgtttgctttccctgggtttattaccggaattattgtctttattatggtatttcattttgtttttatggaccactataatcaatatacaacttttaaagacgatattccttattatgaaaaaaaatatggtaacttatatttggaaaacccaaacgatcctaaaatacctccttttgttaaaaatgaatattcccttttcttctatcaagacagtgtgacaattttagattactttaatgcttattatagtcgatatattacatcaacaccctatcaagacacgctattttttcttactatgttcatcatgtctttcgtcttacttggcttgggtggctatcaatcttttttcaaaaaaaatccaatactcgtttttaatcgtgaaagaaatctggtctatacttggcgcaaaaataaggtatttattgcccgctatcctgaaattggtatcggtaaaattggtaaaacacttacctttcaattattcgggttagataagtcaaaacaaactttagtttcagaattatttttccctaatgtctatgtttattcagtctacaataccagtactgactatcacgaccagcgcttcattaattttatcaatacttatatgcgcgaagggcgtgatgccattattccattcgattatcaccgtaaaaaacccaaagtgtattttggcaaaaacccacctcctgctgattttgagcaacaggtcgaacaaattttagcaaagcttgatcaggagaaagaacaccatgcgtag

SEQ ID NO: 296783 - DNA, 270 bp, Proteus mirabilis
atgcgtagtttggtaaacggcagaaagattattttagaaaatgatacaacaaataccggcggtaccgtacttaccggctcttctattgctaaacaaacccaagggattgcctgtgtaggtgatcctgtttattgccctgcgtgtaaaaaaacaggcactattattgaaggggataatttaatgaaaattaaaggtatccctgtcgcccttgaaggacataaagtcgcttgtggctgttcagatggctgtatactcgttgcaacagattaa

SEQ ID NO: 296784 - DNA, 924 bp, Proteus mirabilis
atgaaatatcattccttattaaaaaatttattttatgcaacattttccataatggcgttaaattttagtggcgtcactatggcacaaaataccatgaatgatatttatgttattaatttatcctcaaataatgcaatttgtggtgtgaaaattaatgaattattagtctcggataatacaatggcagccgaaggaagctattctactggtcaaaacatatctagtatattagccaatgggaaaaataccttaggtataattatgtttaatggatcggtttttactggtgaagaaaaacttacccctgatatgtggtgtgaagtcgaacttaagaaattatctgcaaatggcgataacaccttaatatcgggacttagattaaacggaaataatgacgggaaaatggtggtctctgataaatatcaaaataacagtgagcaaatctattttggcggccccagtagagatagtgaatttgatgttttagaagcaaaaaaccaatttaatatacagggcctcccccaatggcaatgggaaaaagctactcccgttactgaagacgatattcctaaaattcgtgctttttatgccgaactacgacaagcatttatcgataaaaatctagataaattaaaaactatggggaaaatatcctgggaagaaatggcctatgccgataatggctctcctgatatcttttggaaatcgcttaattttcaagaacgattagaacaaggatatagacccaatccaataagttgggaaaaatatattcttagtacttacttaaatcaccgtatttttcgttacgaagctggatttgaacgcttatctcctattgagttagttagccctgaagggaaaaattatttttataacccttacctttctattattgatgggaaagtgactattgtccgataa

SEQ ID NO: 296785 - DNA, 678 bp, Proteus mirabilis
atgaaactaatatcttggtttaaaatactttgcgggatgttgttagtcttcttttatcaccatgcatatgcactttatattagtgcagatatttcctctatggagtcgggggaacccttcttttctaagccctatattaatgatactaaaaaaaccaatttatatacatttagtgtttaccaaattgataggccgggttatcaagagcagggcacacctattcagaatggagaaattctttttactccccttaaaaaaattctattacccggggagcaggaattttttaaaattttctatcgaggagaggcggatgagaaagaacgttattataaaattattattagtgaaacgccacttgatataagaaatgatgaagggcaaaaaaaacaaccactgttctaccccacagtaagtttagaaacctattttgttgttagacctaaagatccagatttcaaatatgatttaaatattaaccaaggaatattaaaaaatacaggcaatacttattttagggttttgttacatcaaaattgtgatggtgatgatgactcagagccttatgtattttatttattacccaatcaacaaattaaagatctgcgcataagtcaaaaaagtcgtaagtatattgttatctttgataaatattactctatagggaattgtgagtaa

SEQ ID NO: 296786 - DNA, 1608 bp, Proteus mirabilis
atgaatagcaaaatattttttttactcgtagcaccttgtcttttaaatttatcgctgtctacaaccagtcaagccgctacggtaactaatagttacgtttttattgagaataatgtagataatgaatattttattaccccgagaacaaccgatccgcgtttttcgggtgccaataaatatacgcgttattcaaaatcttcacagctcagtttaggttatatggggtataccaatacatccattcaggccaatcaatatgtcgatatttggctagaaaattctcaaatagataagccatttgtgggtaatcgatgtatgaggcgttattgtacagatgatagtggctattggcctgcgcaatatataggtaaagatggggcttataaaatagttcagactaatactaacggtgaatcggcttatgctcgggggatatttagtgattcggcatacctgtattttcgccaattgcctgtcggcactgtagagacctatagttatagagcctgtatgacaaaaacagactatgatcccagtaaaggcgaatcttgccaaagtatcggcggcagaatgcttgcatcacatgaattcaatatcactaagtcagggcatatcacgttaacttcaacaggtgctttacaagaaatatttattgatagtaacggtaatcccacgattggcttaggctctcagttttgccgagtgggtattgtatcaaaccaaaatggtattatttgtcaggtgattgatcatgaaactactggggatatatttaccaatattaggcttaatttaaaaattaataatacactgatcccttttacgccagcggcaaatacaataaaaattggccccgatgatggcagtaataactggtataattataatacaacatatcccgctaattattattttaaagttaataataaaaatgtttctatctttttatctaatacctttttaaaaagactcgtctctagtaatgtcgactttaaaaatagccaagacttttttaccttttcatttaccaatacagcagtgcctcaatctgggtattatgagttcaccccctcaaatacacttattctgaaaccgagagattatggcataagcattattcctgctgattttaaccctcatcaatctaaaacgggaaaagtgggtaatgaagagccacccattgagtttaattatattgttaccaccagtggccctagacaagcagactctattactgcatctgtagaaggaccacaaacaacattaaaagggcaatcctattgtttattctcctccagtgataaccgacttaatgtgccttttccggcttatctctcatttaaaaatagtgatggtacggatgcaaaatatagagcgagttgtgatagtcatgaaatttcattaaaaaatgcgttatggacagaaacaccatgggatagacctgatgaagacttaggctctttttatagaacgaacctagatttatcttttccaatgaatgatgctaactcatttttcactttagatggtattgattggctaggaacagtctcagccagtggaatggtaacagttaaggctatatggactgggcctgatattaactaa

SEQ ID NO: 296787 - DNA, 684 bp, Proteus mirabilis
atgaataagataaaattaatcctttttttattattgtggtttccattaaaaaatagttttgcagtaaatgtaggtaatataacagagataatatcttctgatgaaagtactcttgccaaagaaattgaaaatacagtaaatacggcaagattagtcaatttgacaatagaaaaattagactcaccacttgaaaatgggaaagttattccggttactgatcccaatgaaattctatcaacaccggctaatctgattcttcccggtcatgcaagtgatgtatttaaaatcatttatcaagggcctaaggatgataaagagcgttattatcgattaaattggaaagatgatcctattgctgaaaatggtataacacaaagctcaaaatcagcgacagcaacaacatctgcaactattagtacaattttagtggttgcacccagaattgagaattttaattatcagtatcatgataataaagtttctaatatcggtaatagttcatttcgtgttgtggcttcaggcccttgtctagcagaaaaacaacaatatggtgtggaggggatgtgtcgcgagcgttattaccttatgccacatttagccgttaaattacaacttgtcgatctcacaaataaaaaatctagcgtaggcatttggcacaaaggagagttcattgttgtcaaataa

SEQ ID NO: 296788 - DNA, 624 bp, Proteus mirabilis
atgttaaataaaaaaatagcatcggtgatgctatcaacaattattgctgcttcttttgctacggctgctaatgcagatactcgtgttgcacaagcaaccgcgacttggcaagcaactgcaattaaagatacaaccagtatgttagttgtcactccattaaaaagtctgacttttaattatgctgaaggccaaaaatcatttaaccaacaaaatggtgcatttgatattgctattcaaggccaatctggcgcaaccgattttaaattatcatcaaaactgattgctaatacgttagcaagaacaactgatgattcaacattaacagttggtgttaaatggaatggggaagacctttctaaaacaactgatgtcgtgttaattgatacatcaaaagggttaacctcaggtttagataatttagctgctgatggtatttacaatggctctgagcgcgctacagatcgtggtgaattcacttttgtaattgccagtgcacaagcagcaggagcaacagccgattttaaatcactggctgatggtgtctgggatggtgatgtaaaagtgcaatttactgccacttgggatggtgacttttctaccgttaaacctaatccagaaccttaa

SEQ ID NO: 296789 - DNA, 294 bp, Proteus mirabilis
atgaaatctaatatgattagtggtcatgttggtatttttttaagaaaagcacgtaaagaaaaaaatatgacaggaaagcagttggcaagattaatgaatgttagccaacaacaaatttcacgatatgaaataggagctactgcaattaccgttgatcaattagcaaattttttattaattttagataaaaaatgggtagatgtatttaaatatcttgaaaatgaattttccgatgagtcgataataaaaagaaatatattttatggaaaggttgtcaaacaaaaaacttcataa

SEQ ID NO: 296790 - DNA, 1197 bp, Proteus mirabilis
atgacagccttaccacgaaaaaatatgtggcagattgtccttactatcattttagtaggaataaatttacgcccttttttaaccgggcctggccctgttattgacaatattattgcttcaacaggcatgagctatagccaagtctcattactcacgttattacccatgattttaatgggagtcggtgctttggttgtgccctttttacaaccttatattcaagctcgtagagggctacaagttgcgatgcttatcttattattagcatcgttttctcgtgcctatgtttctgatggtgatcagttacttattactgctctattttgtggtttaagtgtcgcttatatccaagcggttttccctggcatcatcaaagcgtggtttggacagaaaactcccattatgatgggtctctactcagccatgctaatgggaggaggtgcattaggtgctcagttatcccctgttcttacggcatctgatggcaattggcaacaggctcttgcttggtttgcgttacccgcgagcgtcgcattagttgctattacgctatcaattaaaaagaatatttccgaaaccaataaactgccacttaatacattgatttggcgaccaagaacagccttattaattgttggatttggctttgttaatgccggttacgcttcgatggtggcatggttagctcccttctatcaatcattaggtatgccaagtgcacaaagtggctcattagttgctattttgtcactctttcaagcatcagcagcattaattattccatttcttgctgccaaaaatcatgatcgccgtttttggctacttttaacactgacaagccaacttattggatttttagcgctgatgacaatgccaatgagcgccccttatctatggagtatctttttaggctgtgggttgggtggttgtttctcaatgatgatgattgccgcattagatcatgttcctcatccattacacgcaggagcactatcagccttgatgcaaggtggcggatttattattgcctcttttgggccgctgatcgcagtatggctacaacaagatgatggtagttttacctatgcttgggcttttcatgctgtcttagtgatattaactatgggattatttgcacggttaaatcctcataattataataaggcctatcctactagccatatattgacagattag

SEQ ID NO: 296791 - DNA, 1149 bp, Proteus mirabilis
gtgaaagagataaaaatagttatcgccccagatccttttaaagagagcttaagtgccaaagaggtggcagaggcgattaaacaaggcttttcacgttatttacctgatgctgattattgttgtattcctatggccgacggcggtgaaggtacagtaacgtcattagttgatgctacccatggtcgttttatcacaacgccagtttgtgatccattaggtaaacaggtaacagccacttggggagtgttaggcgataatactactgccgtgattgaaatggcacaggcatcaggtcttcatcttatcccttcatctcaacgcaatcccaatttaacgacgagttatggtaccggcgagttaatttgtgccgcactagatttgggggttaaaaagatcattttaggcttaggaggaagtgccacaaatgacggcggtgcaggtatgatgcaagcgctcggtcttggccttaaagataagtctggaacatctttgccttttggtggacatgcattaagtcaacttcattctatagatatcaatcaactacatccaaaacttgcctctgttgatatagagatcgcctgtgatgtaactaatccattatgtggcgaattgggggcttcaaaagtctttggcccgcaaaaaggggcgacagaacaagatattgagcaactggatagcgcactacaccattttggtacttatcttgagaaaatgacacaacgcactcttatcaatattgcaggaagtggtgcagcaggaggattggctctgcctttgctggcatttacgcaagcaacactttcatcaggtattgatttggttgctaacgctgttgaattagaaaaacagttaatcgatgcagatttggtcataactggcgaagggcgaatggacagccaatcagcgcaaggtaaaaccccgataggtgttgctaaattagctaaaaaataccatcgcccagtgattgcgttagttggtggttatttaccggattatgatgtggttcatcagcagggtattgatgcggttttctctatcatgcctggtgttgccactttacaacaagcctttgataatgctgagcaaaacttacaggaaactgcttataatgtagcgaggctttatgctttatcattgcataaataa

SEQ ID NO: 296792 - DNA, 495 bp, Proteus mirabilis
  misc_feature (477)..(477): n is a, c, g, or t
atggcaaaagaaaaaaaaggttttttctcgtggctcggatttggccgtaataaagaagaaaatactgcacaagagaaagaacaacaacgtttagaggccgaacgtgcagagcaggcgcgtttagccaaagaagaagctcaacgtcaagcgcaactagaagctgaacaagtgcgtttagctgaagaagaagcccagcgtcaagcgcaacttgaagctgaacaagcacgccaagaagcgcaaagagcagaggcagaacgattagcagctgaacgtgcagagcaggcacgtttagccgaagaagaagctcagcgtcaagcgcagcaagaagctgaacaagcacgccaagaagcgcaaagagcagaggcagaacgattagctgctgaacgtgcagagcagactcgtttagccgaagaagaagcccaacgtcaagcgcaacttgaagctgaacaagcacgccaagaagcgcaaagagcaganacgtcaagcgcaacttga

SEQ ID NO: 296793 - DNA, 456 bp, Proteus mirabilis
atggctgccgaaggccaacacattgccgagcatccaagattgtttggcagtggccacgctcggcgtggccacacacaatacgactggcaccattacttgtctgtgcttcagaagaaacctggggcgttgcgcaatggtgcgccatttgctgaattgccacccgcgttcaagaagcttcaatccatcttgctgcaacgccccggcggtgaccgtgacatggtggaaattctggcccttgtattgcaccacgatgaaggtgcggtactcagtgctgtggaattggcattggagtgtggcaagccatcgaaggagcatgtgcttaatctgttgggacgtttgaccgaagaacctccacccaaaccgattccaattcccaaggggttaaggctgacattggaaccacaggccaacgtgaaccgctatgacagtttaaggagagcccatgatgcagcatga

SEQ ID NO: 296794 - DNA, 786 bp, Proteus mirabilis; identical to SEQ ID NO: 16905

SEQ ID NO: 296795 - DNA, 495 bp, Proteus mirabilis; identical to SEQ ID NO: 20174

SEQ ID NO: 296796 - DNA, 840 bp, Proteus mirabilis; identical to SEQ ID NO: 6027

SEQ ID NO: 296797 - DNA, 348 bp, Proteus mirabilis; identical to SEQ ID NO: 6026

SEQ ID NO: 296798 - DNA, 780 bp, Proteus mirabilis; identical to SEQ ID NO: 15299

SEQ ID NO: 296799 - DNA, 579 bp, Proteus mirabilis
atgttacgcagcagggcagtcgccctaaaacaaaggttaggccgcatggacacaacgcaggtcacattgatacacaaaattctagctgcggcagatgagcgaaatctgccgctctggatcggtgggggctgggcgatcgatgcacggctagggcgtgtaacacgcaagcacgatgatattgatctgacgtttcccggcgagaggcgcggcgagctcgaggcaatagttgaaatgctcggcgggcgcgtcatggaggagttggactatggattcttagcggagatcggggatgagttacttgactgcgaacctgcttggtgggcagacgaagcgtatgaaatcgcggaggctccgcagggctcgtgcccagaggcggctgagggcgtcatcgccgggcggccagtccgttgtaacagctgggaggcgatcatctgggattacttttactatgccgatgaagtaccaccagtggactggcctacaaagcacatagagtcctacaggctcgcatgcacctcactcggggcggaaaaggttgaggtcttgcgtgccgctttcaggtcgcgatatgcggcctaa

SEQ ID NO: 296800 - DNA, 1014 bp, Proteus mirabilis; identical to SEQ ID NO: 49376

SEQ ID NO: 296801 - DNA, 585 bp, Proteus mirabilis
atgaatcaaaagattggctatgccagagtttcaaccgacgatcaaaacctgcatttgcagagagatgcgttggctgctgctggttgcgagatcatttacgaggacaaggccagtgggaagaatgccgctagacccgaacttgataactgcttaaaggctcttagacctggggatacgttggtcgtttggaggctagataggttaggtcgtagtttggcagacttagtgaacgttgttacccatctggttgatgagcgacgggttggatttctgagcctacaagaacagattgaaacgaacagtgcttctggaaagctggtttttcatgtgtttgctgctttggctgaatttgagcgaaatttgattagcgaacgtaccaaggcgggattggaagcagcaagagctcgcgggcgcttgggtgggcggaagccaaagttacaaaaaaaagatatcagggagattagggcattactcaaagatggttctattccagtatctgatgttgctaggcgatatggtgtatctagaacgactatttataatcatgtaggggtagtgaatgtacaaaattctagaggggattaa

SEQ ID NO: 296802 - DNA, 990 bp, Proteus mirabilis
atggctactgcggaacaactaaaagcgcttttaaagagtcacgctgaacgtgacgatcagcgtttttactctgttgcccttcaggttgcagccaaagaagctcgacaggggcataataagcttgcgagcgatattaaaaatcttgttgagaaatctcagcgttctaccaataagctgggtctagcatcgtctagaactataccttttgcgcaacagaatcaaagtgagttaaaaggtctattagagctcacgccacacagtgttcgtcttaatgagcttgttctttctgatgacatacaagaacgtatggagaaggtgatattagaacaacgtcagaaggacaaactcagtcagtttggtttgcagccgcgtagaaaacttctttttactggttctcctggaactggtaagacaatgtctgcatctatgttggcaacagagttaaaattacctctttatacaatcgtcctagataatcttattacacgttttatgggagagactgctgcaaagttgcgtttgatctttgatcatataaggcaaacaagagctgtttatctttttgacgaatttgatgctataggaactcaacgaggtgcacccaatgatgttggggaaattcgtagggtgttaaactcatttttgttatttgtagagcaagatgcatcagagagtattattgttgcagctacaaaccatccagagctactagatcaagcactttatagaagatttgatgacatcattaagtttgaaaaaccaaaatttgatcaaatatgccttcttattcaaaatcgtctatcacttttcgatactgatgattttgattgggggatggttgctgaagctgcaaatggtttgagctctgctgagattacccgatcttgtgaagacgcagctaaagaagctgttttgaattttaatgcaaaaataacaagtgaaacactgttaaaggccttttctagaaggcagtcaggtaataacaaataa

SEQ ID NO: 296803 - DNA, 2544 bp, Proteus mirabilis
atggtttctaaaaggaagcatttagatgtagctaggtttttcattgaggaaaattttaagtctaaaagaaccggtcgaaacccaggagttcctggacgaaatagaaaccaacatggaagtcacttaagagatcaatatcagaatttaattgatgcttatgaccaaaaaagagaacatgaagttgatactataacggatgattcaggaatatatgttgaaattattagtgtagatgggtgtaagcttccgttagatagtttggataacagagattttaaactctgttcttgtcaaatgcgggaaaataaagagttcgctttagtcttcatacctgaagatcggcgagatactttccttaaaaaaatacagcagtatttagatcctcaaaaagacggaaaaccaaataaggatggagtatcttttcctcgaaaccatgcattaatagatagtatttctgagattaggcttgcaagcttagagtcattttggacagacccaccagaactttttcccacggaccgagacaacgatgtttggtgggagttatggttgaaaaaaaatgcaattgatggtgttgaaaatatagcagcttctcttgcagaaagagtaaatggtcgtttaggaaatacatccatatcatttttcaattcatttgttgttcttattaaatcttcagttcgtaatttagaaaaagcaccagaattgatttcaaatttagaagaaattcgaaaagctaaggacacacctgttccaatacttagttcttcaccaaaggaacaacaagagtggctgcagagcatttctgatcgagtttctttttcagagaatataacaactagtgtatcaattctggatactggcgttaattataataacatgctgttaagtaaagtgtgttgtgatgattttgcagtttcttgggatcctgattggcctaaatacgatcaatatcaaccactagcaccgtttaatgagcatggttcgttgcaagcaggactagcagcatttgggaatttgatggatgtcgtattggaaaatagcgccattcaactgtcacatgttattgagtcagcaagaattttacctccgcaaggcaacaatgatcccttgctatatggggctataacggtaggaacagcatacaaacttgaagtagataggcctgatttaaatagagtatatagtcttgctgttacttctgatcatgagagagaaagtggcagaccttcttcatggtctgcagaaattgatcaattcacttctggtatgcaagatggaaagcggagactttttgttatttctgccggtaacaacttagatattcgtcctgaccaagactactgggatcaagtaaatctcgcgcagatagaagatccagctcaagcatggaatgctattacagttggggcatatacagaaatgacaacaaatgatgatccctattttgaaggttggtcgccgtttgcgatggagggagatgttgctccatcaagtcgttcttcagtgaattgggcatggagaaagcaagcaccatttaaacctgatgtggttgctgaaggtggaaatcggcttttgtcaccagataggaaggaagttagtaatgaagatacggttggattattaacaacatcaggaagaaccacaggtcaggtttttgagcggggaagtgatacaagcgctgcatgtgctttagtttctcggtgtgcggcccagttaacagccgaatatccagaattttggcctgaaactatccgaggcttaataatccattctgcggagtggactccacgaatgatggagcgatttgggctactaagtgctgtgcatagtcctaaagtggcaaaagaaaccttgctacgtacagttggatatggtgttacaaatatcgataaagctagatacagtgctgatcatgcacttactttgatcgctgagggggagattcaaccatttataaaacctcaaaatgctagtgcatcatccgatcctaaattaaatcaaatgaagctttatcagttaccttggcctttgactgagttgcaaaacttaccgccagagttagaggttaaattaaaagttacgttatcgtatttcatagagcctaaccccggaagacgaggatatcgtacaagatatagctatcaatctcatggtttaaggtttgaaacaatcagaccagggcagtcacttgagaacttccgtgcttacattaatggtttagcaaatatggatgattatgatgggccagagggtgacagtgatgggtggttcttaggagatcaattgagaacaagaggctcagttcattcagatgaatggactggtagtgctcaagatctagctgacatgcacaccatagctgtttttcctgtaggcggatggtggaagtataaaactgcggaagatcggtgggaaaatagagtgcggtttagccttcttgttagtatcgaagttccggatgaaaatgttgatatttactctgtaatagaaaatcagattcaagtagcaatagaaaatcaggttgaaatagaaattacaacttga

SEQ ID NO: 296804 - DNA, 423 bp, Proteus mirabilis
atgtttatcatcactgtgcttgcagcgttttgctgctgcctgcgtttgtgcattccgcaagcgaccaggcttccatatcgcgatctggctgacagctatgtcgcgttcctggcgctcaattccgagcggccaaatacaagagggcctccctcatccgtcagaacgagtgctggatttccggcttactcgatgctccaccccgtctctgtcgccgtaggcgtaaacagagacgggggtatagcccccgacggaagccttgtgcctcaaaggctcaaggctttcgccccgcgcacgaatgtgcgcgaacaataccgccttcggcggttggcgcgcttcgcgcttcctttccagagaatgacacgacagtaccagccggatctgctggcagtttgttccgtcgggacagaccagccagtggaatga

SEQ ID NO: 296805 - DNA, 966 bp, Proteus mirabilis
atgcgctcagagcggactaatccggactcccggaattttggtctccgaagtcgcgatatgggcaaggcaggcctgaacgcactgaaggaaggtatgaagagtttccagtccatagccacgatccatgaccgatggagcgtgtttagcgcctggattaagtccgaacagggcattaaggacatgcgggatatagaaaaggctcatttggtcgcttatgcggcacaccttaatgatcgctatgagcggggagaaatcgcgccatccacggcgcagaactacctgagcgcagtgaatcgggtgatggagattgctagaggcgaccgacaggtacgtgtagaccccgtctccgagggtggacttccaaagcgttcaggcatcgccactggcgaccggagtgtttcggaagcggcccataatgctgctatgggggcaacctccgagcgccttggggctttgctggaactacagcgtaattttggtctgcggttcgaggaatcggtcaagctggatgctgctagggcactaagagaggccgagaaaaccggctccgtgagcataaaggatggcaccaaggggggccgggcgcgcaccgttccgatcaccaacggtgcccaagttagtgcgctccaacgggccgcggccatacaggatggccgcagcatgatcccggccgagcagaattatcgcgagttccggcaagaagcctatcgggagattggccgccatccggtgaacttccacggcgaacggcaccactacgctcaaactcgctaccgggacctgctgggcgcggaatgcccggtaaaagccggaataaagcatggccgcgcccaccatgaataccttgccaaggaacttggagtatccgtggcccacgccaagatgctggaccaggagatccggtcggaggttgcgcgagagctgggccacggtcgtatcgacgtaacaaactcctatttggggtaa

SEQ ID NO: 296806 - DNA, 297 bp, Proteus mirabilis
atggaaaaatgggttagagaaagatcacatgtatatgtccgccacggcggaaagaccgcaaggcgggcgatggtgaaacgcctgatagcgatcctagaggacattgcggccaatgagaaaggcgttaaatccccatcccaggtaggaagagcccatatccataggtactacgccaggcaccagagactgcgtgcgacgacattgcgcgatcacttctatgcgttccgactcctgtgggaattgcttggtcgcgatggtgatcctccccggccaaaggacgcgggagcaccgggttaa

SEQ ID NO: 296807 - DNA, 255 bp, Proteus mirabilis
atgtcaaaaatcgaagttaacggtctgattcttccacttaatgatgcgcatgttcatcaacggcgtggggtaacagccgctagaactgaatctggcgaaccacttcatatcaccgtattgcggtgtcttgatggtcgtcatacgaaaacttactgcggattagcgagagctgataactcagaagacttcgtgaaaatcatggaatggggtgacaaatttgagccaatcgtggattggttcaataccgtccaataa

SEQ ID NO: 296808 - DNA, 318 bp, Proteus mirabilis
atgtacttttccactttcgttttgatcatgattgttaccgttggcgtcattgctttcggagcttccatcgttgccaagttattaaacgcggtgtcgatggcggtatatcggtccttgagaaaaacgcggcccgtacgggtcgtcagtccgctggctactgtcagcagttcattgaacggagaatggttgagagctacctctggtagcaatcaatccggcgttttcgatgctatcgaatgcgcgccgcttgaaggggaactggtttctgagcgagctgcaattgcttccaacaagacgttcttgtcagccaaggtgtga

SEQ ID NO: 296809 - DNA, 270 bp, Proteus mirabilis
atgttgggacaaactcaaaaagaaatccatcaattcgacgtatgtggccgcgtgtattaccgcgaggtcaattacaccgggaaagaaggcgagttggtggctgaaacggtggaggccttatcccatgacgaggcggaaaccgtgtttcaaaacaatctggttgaacatgctcgtgagtccaacctgaccgtggaccgcgtcgaaattacgttcactatcgatctgacgattgctgaaagtgatagcgatgaaccgttcttggttcattaa

SEQ ID NO: 296810 - DNA, 192 bp, Proteus mirabilis
atggaagagacaaccacaatcaccactgagttatctgatcgccatgcttgggctttggctcaactggtcaagcgcatcggctggaacgaagttcggatcaatgcggtcgatgacgacgatgcgtatctgatgagagagggtttatctgcattgcagaagagtcttgctgaatcgggatacgcgcctcggtaa

SEQ ID NO: 296811 - DNA, 438 bp, Proteus mirabilis
atgactaaatgtgatcatgttaatattgaaaacatgaagaaagctgttcaagcattggaccgcgcaattgatgctgatattgatgaacaggtcgttcaagcacttgaatcggaagatgttattgatattggtgtcattgttgataaaaacggaaatcctggcattggtaatggcttgccgtttgatgtctacacctgtaaggatgatgctacgttggtcgctgcggcgctaaatgaggtagatgctttcctgctgtcgcttactgataacccagcccagcaggaacgtcgttctgattatcaggttcaacaagacacaatcctcgctcttgttaacaattttaccgatgttgatttggagaatgtaccaagcttagtggtaggtaatatccaagaagctaaacgggggcttgaggacgctatacaacgtttgtcgtaa

SEQ ID NO: 296812 - DNA, 2586 bp, Proteus mirabilis
atggccttcaagacaccttttaccggaccatctgttccagaaacaccagacaagcttttcagagaactaacccgtaggaagtttccagatgtgttacctcatcagtctgccatgatgaaggattacgcagcgaaggccgtaaacatgacggatgtggcgctacaactacccactggaagcggaaaaaccctcgttggtctgctgatagcagaatggcggcgccgtaaattcaaagaaagggtagtttatctatgcccgaccaaacaattagtttaccaagttgctgaacaagcaaacgataagtatggcctgtctgtggccacttttgttggcaagcagagggacttctcacctgctgacaaagccgactacctccaagctgaaaagatagctataacaacatactctagcctgttcaatacgaatccatttttcgatcaagcagatattatatttgtcgacgatgcccatgccagcgaaaattatatagcatcccactggacgttgcgcatagcccgcctagatgatagatacaagccccttcaccaagccttatgtaacgtgttctcgcctcacttaacgcccacagatttgtcacggcttcgaggtgtttgggaagatgtaatagatcgctcgtgggtagagaagcttgctacacccactttgactcaactcacgccacaaattgtcgaaatattagatgcacacacacaaggtactgatctcgcctatccttggtcactgatccgaggacatctagatgcatgtcatatatacctatcctcccaagaaatcctgattcgcccacttttacctccaacgttctcacatccagcgtttgaaaatgcaaaacagcgtatttatatgtcagctacgttaggtgctggaggagatcttgaacgtttggcaggtagaaaatcgataacacgtctaccggctccggacggatgggacactcaaggtgtgggtcgtcggtttttcatctttccagaaatgtcactcacgccccagcaaactgtagccttgagaaaagaattgatgcaacgagctggtcgaagtgttgtcctcgtaccaagtgatagagatgctgagatgatcgcttcagaagttactcagaatcttaagtatcctgtttttcacgcgagtgacatcgaagaatcaaaggcttcgtttgtaaattctgaacaagcagttgctgtcgtcgcaaaccgttatgatggaattgactttgcgggggatgaatgccgcttgctctttattgaggggcttcctaaagcgatgaacattcaggagagatttctcatgacgagaatggctgcaaacgctctctataatgaacgaattcagacccgtgtagtacaagcaatcggtcgctgtactcgctctttagaagactactcagctgttgttgtatcaggagaggagctgcctgattacctcgcagatcttcgtcgccgccttttttttcatccagaacttcaggccgagataacctttggcgctcaccaatcaaaggacacaggacttgcagatctggtggagaacttcgagattttccttgaaaatgatcgaagttgggaattagtaaatagacaaatcctagatgaacgtgatcgagctcagcagcaatttctgcccgctatccaagaacttgaagaagctgttggtgccgaaatcgactatcagactgctctttggcggcatgactactatagcgccatagctgcagctgacagagttctaggcactttgaaagcgccagatcttcgtggttatcgagctctatggaattatcttgctggttcggcttgctatctagcagcacaagctggcaacacaaccatggcagcaaaatcaagacagtattatcaagacgctcacaaatgcgctccaaacattccctggctgacagcctttgcccgcaaagaagtcggagatgcagtaactattcaagtagatgacattgcgttgcaacgccaagtagaaaacatcgcctcagagctgacacgtctgggtgctactcatgaccgtgattttgctaaattagaacagtcaattctcagcggactacaacatcatgaaacctttgagcaagctcaaaaagaactcggaacactgataggatttaatgcaggaaaaatagaaagtgaaggctctccagatccttggtggatagcagaatctcaatgtatcgtatttgaagactatgtaaacacaactgatggcacattgagtgttacaaaagcgaggcaagcaacatctcacccagactggatgcgggcaaatgttaaggaatctgcggagtgcgagtttctgactgttctagtcacacctgcaaccaagatcagtgctgccgcggttgttcatgcctcgggactactctactggagacttgaagatttccgattattcgcaactcatgctttacagataatccgtcaacttcgaacaaccttcttcgagcaaggagacttagtctggcaagctgaggccgctgaaatacttaagcaacagggaatggactttgcctctatcaaaagggtagttactgccacccccgttaccaagtgcatgcaggcaatctag

SEQ ID NO: 296813 - DNA, 867 bp, Proteus mirabilis
atgacgaagaaactaaccgcaataattcttgctgccggactggcctcaggctgcgcaacgacgacaaacaactaccaatacaagggagaccatagccgcgcctacaacttggcccaggccggaggcctctacgacgccagggattacgacatccccagggaccaacgagacggtgttatcagcaagggatgggatgtcacgggtgacgcactacttttcaattccggacatgggcttggattggactggggcaagtcactgggcttgggcttgttgaccagtgcctttgcaccaaagggcgttatggagcgagacagcgtatttggctgggttccagaaacaaaagcaggtgatgccggagaagcctgggagctgatgtcgaacaccctgctcgatggcattgagaagtccttacagcaggcgaatgtcgactacattgtcgataacaggaatctgcatcaggaccttccccttgtatcggagtacattttctcctcggtgcggatcgttgctcccgagcacggttgccctgactgggaaactgccaaccgagactatgaccaatcctgttacgtggcaacgaccgtgtatgcccccacggaagagccacgaaaagtgcctgatttcctgacggcagaaccaaatggttatggcttctacgcaaatgatgaagcggattactcccgtataaaggtgaacatccccaaaggttctaacatggacaagaaccagttgcttgcaggcatcagccgtgagcttccagcctgggcattcatctttgttgcatcgcaaaagctggataccggtggatacacggcaccggtgatccttacagcagggaaagccgaactatttattcaactgtaa

SEQ ID NO: 296814 - DNA, 3438 bp, Proteus mirabilis
atgtttacaattcactctatcggggactcggcattcttggagcaaatcctgattgcggtgtccatgatcactggtaccggggacttcgagaaaatggtcagcattggcctgctgctcggcctgctcatcatctgtatccaatcagtttttcagggagcaaaacaaatcaacttccagcaggttttgctgggctgggtcatttatgcctgctcctttgggccaaccacgacggttgccattgaagacgcctatactggcgaggttcgtgttgttgccaacgtcccgctattggttggctttgcgggcgggatgatctccaatgtgggatacaccattaccaacctcttcgagaccggatacggggtcatcgtaccgaacgttacggaaagccacttctcggagactttaaagctgctgaatgacgttcgcagaagagcttatgataccggagtcttcaccgctctcaatgcggctaatggcggtggatacgtcgatgtgcgcctgtcctggaacaactacatccgtgaatgcacactgaccaaggttgaccttaaactgatgtctctggatgaacttatgaatcgtcctaccgagacagcgcttcggtttaactcccagctctatggaactcgcctttacctttctacgggtaatcctgatggggctgattacacctgcactgacgggtgggtcgccatcagtaacgccactgcaaatttgaatagccctgtggtggttgacgctttgaacaacttgctgggaattgataccagtgccggtgatgacgcgatcaccaaaatcggcgattcactgcaagctatgggagcttcgacaacatcatccatcgattatttgaaagcagccgtgctggaacccctttactacgaggctgccgctggtcgctatcaggacttacaggactacggctccgcgctgatgattaaccaggccattcagcagcggaatacccagtgggcggcggaacagtccatgttcatgacggtggttcgcccaatgttgaccttcttcgaagggttcatctacgccatcactccgatcattgcctttatcatcgtaatggggagttttggtctccaactggcgggcaaatatgtacagaccatcctttggattcagctttggatgccagttctgtccattatcaacttgtttgttcacacggcggcatccaaggagatgtccagcctgagtagctccgggctggactctatgtatgcgctgtcatcgacaggtgacgtgctgcaacactggatcgcaacgggtgggatgttggccgctgctacgccgatcatttccttattcatcgtcactggtagcacctatgcctttaccagcctagcctcgcgtatcaacggcggcgaccacgtaaacgagaaaatgcaaacgcctgatcttctgcaacaagatccgataatgaaaggtcagccagcgttctcgtataaccagttcagtggtgccatggcttcaggagctgagtcgcttgtcgataaggtgaacatcggacaaaccctgagttcagtggttagcagcagccaggccgcatccgcccaagctacgcggaatttctccgaacagctatcaaactcggttttctccggggcatcggccgagcagagttacgccaggttgcaggggctgggccaaacccttagggcatccgattcgagtcaggctaaggcaatttacggtcaggctcaggattacgcacggcagtacggattgtcggaaacacatactgatgccatagctggtgccatagctatgaaggcttcaggatctgttgatgcaggtaagcttgctgcggtgattggagggccaataggtcgaattgctgctgcgtcgggagcagttggcaaagacgcgccattaaaagtacagggagatatttcggggtctgctgagtccaggacgacggatcagcgtcagcaactgactacggatctagacaagctgacaaagaatttgggcttttccaaggatgattccgcagcgttgacccaagatctggcgcgacaaaccaacaccgagtcaggccagcggttcaccaattcattgggtgaggaacaacgcgagcaactttcccaatccgcgacacaagccgttagcgctcaaaatacgtatcagcgcctttcctccgctcaaagctcaattggcacggccagtcaaatggatatgcgggcattggccgcctctgccgttggtagtccagccgcaagcaccgtgttacagaatgggatgcgtatggcgtcgccggagactcgtcaggccgctgccgaaaaagcacggttctatcaggcattgggaatggattccgcgcaggcgttagccggtgggcaaatttacgcgcttttgaactccggcaagggagccgagcagactgttgcggctgaggctatctcggcggctactggtggtgtcgtcacacagggtgtggggcggtttaacgagaaccagttgcttgtccagcaagctccggcaatcaccggcctttccaacacccagcgactccaagaccccagtcgtatgaacgagaggcagcgtacccaggcctatggcattgtgcctggcgaagaggcggttttccagcagcatgacaagaatatgagccgagtacaggacgttcatgccaatcaaaaggagtcgttccaggatgagcgattggggtcactcagaacgcagataatgaactccaacgtagaatcatccaccgcatccaatatctttgcctcgtccgatggggctggtcgattcttcgacaagatcgttggcggctcaagggcggccatggatggattctcaaatgacttttccaactcgatgaaccaactggcacggatgacgcccgaacagcgcgatcagtttattgccgacgcacacaagggagatcagtacatcaaagatcagtatggccttccagggttcctggctactggtgcggccaacctggggagggacattatcggagcaggagtttccggtttctatgcagccaaggaatggctcaccgggaaatcggacctatccgaggcggccaagggcatgtcggttcgcgagcgtggtatgttcttcgcggcagcgtttgctagtgcgagcgaagcaggcgcagagcatgcagaggcctttgttcagcagtacggagatgagtttcgtaatttggccatgcagaccgcgatacaagagcatggcctccattcggatgcgggtgcacggttgtttgcctcatccatcttgggcgcaagcgatggaaaggaacaggaatatcgggcccaactccggagtgaaatgggcgatgacgccttggcgaacaaaacagcggatatcattgagtccgccgcaggggccggacgagagcaggccggggggtatctggctccagtttcgcgctattttgcagttaagcaaggaggtggttcatga

SEQ ID NO: 296815 - DNA, 357 bp, Proteus mirabilis
atgaatacggcactggtccaactgaaacttcgggaacgccagcttcaggacgaactggaacaggtatgggcaagcatggatagtctgctgggagctcatgaagcgtgcggccccatcactccgctcttggtcatcaatacactgaaactgatgatgctggaaggattcggggattggcttgtaactccagtggagcgagctggtgatgccctggtgaccagcgctgaagctttaaaggtcgccagtagggaaaccggtatttgtccgcatttattgctgggaatgcttagtcgagcccagcaccgccccgtattagtttgcaaggacggtaaactaatccttcgagttgaaggttaa

SEQ ID NO: 296816 - DNA, 261 bp, Proteus mirabilis
atgaaacgtatattttggtgggttttagtactgacaactttgttcgttgcatacaaatttgctggaagcggagggcttattttgtccttaattccattaactattcttatcgccatttttgcgaatagacatcccagagacgcgggttcacaaggtgtcaattttcaggaatcggttaactttgatgaccaggaagacgttattcttaccattcctgatgcttcggatacagggtctgactggcggggaataccttattga

SEQ ID NO: 296817 - DNA, 543 bp, Proteus mirabilis
atggagaaaagcacggattataaatcagggtggctgggccgatggatagccgcccgccacatggcactggctggttatatcaccaagatcatcatgatcgagacgggtctgacgtacaaacaggtacgtaggttatatcaggacatcgaaaacgatggatacgagctggagcgtagatcgcgtacattccgtggtggggccacgcttatccacagtcatacctccaagattcaggcatcactgctgatgcagctttaccgcaatattggtggcgaggacgtgatcagatcgattgatatcaaggcgctgaataaggcgtttcgcatgtatcacgcaattcgcaaggaagttcctggaatgaagggcgctcgatgggctccttttgatatcactgatgcctggtgcttggcatccgaactcagatgtggtgatgccatgcttgaggagtgcggtaattgcgaatgcacgtactttacctcggtcaaccaaaggacctgcgtggagtgtcctttttgcgtcgccgataagagtaaagccgcgtga

SEQ ID NO: 296818 - DNA, 2736 bp, Proteus mirabilis
atgagaaaccaaacactcttcatgagaatggtggccttgctgctgacggtcacaatctcggcactgccgatccatacatatgccaccggcggtcagaatccggacatttcctccgttgggaaagaggcccagtcctttggacaagacctcgccaactcattcagagccaattctggctcggtccaaaatggcacgatttcgatgccaacgctgaaagacggtcaattccagatgaatggcggaagccagataaatgtgaatgacctgtttccaggaaccagcggtggtgacggccaacccgatggctactatttcccggatgccaataaacccgatgtggacatactccaaggtatctacgattccggcggcgatatggacgacgtgggcaacagcgccaagggggcactttggtccgacgcgaatagcgccgctccatctatctcaggcgctgcttacaaagtactcctcgattcagcaaaccgttcacgtcctgatttcagtaatgatccgttactgaacctgagtaaaaagacctacgaagacatggaccttattgtcgatgggtttggagattgctccgccgaaacgaccattagtaagggaactataaatgctcatgttcccgaatatgagcgttgccagcgtgttgttaaaccaagtggtaactgcgatgtgattcattctctgggtataaccagcactgtagaaaacgtatatgtagcctcaaaggggcgaacatggtttaccgtgcaaattgatctaaaaaatgggtcatggaaggcaatatctccatcagatggggaacaaaaggttgcccaaatccctactgttgattacaacgcaatgtgtagtggggttgtaaacttcaaaacggatctcattggttcatgggactggcctgaacacggcatcccagggaagatagattccactgttatttatagggtaaagcaatatccctcttgcgaaaacgggttagtaggtattgtccaaatacaagatacaacggcctctgatgatcttgattgggttcttgggggaaggttttcatttagattcacaaagcaagaagaagataaatggataccgcagtcttgtattgatgatgctcaaaaactacaagacggcttttgcaccggctcaatgaatgtggttgaaggcgctcagaatgacgttgattgcattgttgttaatggcgcaacgatatgtcctggcgactccttttacaacacgttaaagccctcgccacttcctggtgtaccgaagttagcccaaaaagttcgtctatctaaattgcagtgcgattttaatgtcggccaaatggaatgttggactgaccctcagggtgttgagcactgtccaagtaatgacggctctaacttgaactcttgcgctgcgctggaaagcaatcctcagtgtggtttcattagctcagaatgtgttgatggtgcagcaggatcttcggggcaatgttacgtattcaaagacacctatgattgcggtactgatgttgatgttcctacattagagaaaaacacagaatttcaatgtggcggccctatacgctgcatgggggatgactgtcttgacgtaacgaaatctcaaagcacagattttgcaagggctaccgcattactgaatgctgcacagttcttgactcaagacatgagttgtactgacagtgctaccgaggaagggggcgatggtaacgttgaccaaggatgcacagtatttggtggagagcctggtgaatgtaaaattgctgtaggcggggtatctgattgctgtgaaaagcccaccaacatctctcttgctgattatctaaacctaataatggcagttcctaagcttgatggtgcaatcatggccttaggctcggactcaaacccatcagcagtcaaaggcgcatatcagatccttcgcgagccagtattagacggttggacggaggttacccaaccatttacaagttacgttgaaaacctgtccggtgctgttgattcttttactcagccggtcgaacagtttgttgatgaatttattcaacaacttaaagatcaggtaaaagatgtgatgatggatatccttaaatccacaggggaggatgctgcaaccgaagccgcagcagaatcagctgcatcaaaagcagctgaaagtatgatgaatacagctacaacatggctcagtactgcaatgacagtttacacagtatatgttgttgcgatggtgatgatccaaatgatttatgcatgcgaggaagaagagtttacgatgaatgccaaaagagcattaaagaactgctcttatgttggttcatactgtaaaaccaaggtgcttggtgcctgtattgaagaaagggaatcttactgttgcttcaattcaccgctttctcgaatcgttcaagaacaaattcgtcttcaattgggagaatcattcggtaatcctcaagcccctcaatgcggagggattcctcttgaaaaagttgccgaaattgactggagcaaggtcaatctagacgagtggcttggtattctgcaacagaacggcaagttcccggacccgagctcgctaaacctcgatagccttactggtgccggtaacgacttcaacatagacggtagtcgtaagaatgcccaggaaagaacactggaacgcttgaacggcatcgatgtcgataaggcacggcgagacatggcgtccgagatctttccagactgggatggtaagcagtag

SEQ ID NO: 296819 - DNA, 219 bp, Proteus mirabilis
atgaacagctcacaaaatatcaatattggtttagaccataccaacgcagagttacggctccttactatccgagaagtaactgacttgctccagatttctcatgtcaccctcaatcgcctttcaaaaaaaggcgactttcctcgcccggtaagagtgtctcgccaagttcgttacaaagccacagaagttcgggactggatacagaagaaccagcattaa

SEQ ID NO: 296820 - DNA, 1242 bp, Proteus mirabilis
ttgaaagtagcggtttccactgccgattccggtcggtattttcaacaaggtacggcactccatcggattttatcggaagcaccatacttaccgcgatgcagtgacaataagacggctgctaggattaggccccgcgagtatgccatccgctatccctatatgcaggtcaatcgtccaggcatggtttcttggttggtcttcgacctggatcactccaacccgttaatttgggaggacgaaggactccccgctcccaatatcatcgtcagtaaccgcaagaatggtcatgcgcaccttttctacgccatcccccctgtttgcaccactgaaagcgcgagatcgaagcctatcgcctatatgaaggccgtctatgaggctatggctgcacgattaggcgcagatccctcttacagcggcccagtcgcaaaaacgcctgaccatccttggtggaatacctgggaaattcacaacgccgtctatgacttgggtgagttggctgattacgtagatttggccgtaaagccattgtggggcaccgggcctgatctggactcagtttcacattcacggcattgcctgctgtttgaggagttacgtttctacgcctattcaatcgtcaaccgtgagcgtgagcaagggagctttagttcgtttaaccggctgttggaagcctacgcctttaataagaacaatttcaggcttcgtggctttgacatgaatctaacagcagcacaggtcaaagccacggtcaaaagcgtcgccagatggacgtgggaccgctataccggctccagtcgatgccatcgggggatgatgcgacttgatagctccctgccgctgcgagaacgtcagagactgtcggccaagcgtactcatgaggctcgccagaagtccacggaatcacggatacgggctgcttgcaggctgttattgcaacagggcttaaagctaactcaaacatccatagcaaagctcgccaagctatccagacaaacggtggccaagtatctccatatctgcaacgaagtctccgaaagctcaacgaatgtcatcagcttagatgaggttgttatggcccccaaagctgttaagcatggtgtacatcagatacctgccccccgtaggggccgacaagaatcgtccctcctcggtggtgatttgaagtcagatgacgccaaaactagggatgttcattccgaagacctctcaaccaggcccgttgattggcctttaaaagaataa

SEQ ID NO: 296821 - DNA, 369 bp, Proteus mirabilis
atgacagcacaagaaagcgaactgttacaaaacttgaggaatgagatggcagagataaaaatgttgctagctcaggttgttgagaacgctgggagtgacggcaataagtcgagcttaccaccgtctgataaagagtatctgactgttgatgaggcggcggcttacattggagccaaacgttcctacatctaccgtttgactcatgaaaaacgagtatcgtttactaaaccgggagggaatagagttctaattaaacgatcagaccttcaggcgtggcttgaaacgaacagagtgaagtcccaagatgaaattcatcaagatgttgtagcctatattacaggatctcgtcgtggccgcagagcatcctaa

SEQ ID NO: 296822 - DNA, 1215 bp, Proteus mirabilis
atgaaggtatcagtaaacaagcgtaatcctaactcgaaagggcttcagcaacttagactggtgtactactacggtgttgttgaaggggaagatggcaaaaaaagaccaaagcgcgactacgagccgttagagctctatgtctatcagagcccaaagactcaagcagaacgccagcataataaagagatgttgcgtcaggccgaggcagcgcggtcagccagactggttgaatctcacgccaacaagttccaacttgaagaccgggtaaaacttgcttcgagcttttacgaatactacgacagattgacttccaccaaggagtcaggaagcacctcaaactattcgatttgggtttcagcgggcaaacatcttcgaagctaccatgggagagcggaacttacttttgaggaaattgataaaaaattcttggaagggtttaggaaatatcttctggaagaacctctaacgaaatctaaatccaaacttgccaaaaacactgcctctagttatttcaacaaagtcagagccgccctgaatgaagcataccgagaaggcatcatcagagataaccctgtccagcgggtaaaaagtgtcaaggcggaaaatacgaaacgaacctatctcactttggatgaagttcgggcaatgacaaaggcagagtgtcgctatgatgttttgaagcgggcgtttctttttagctgcacgacaggcttgagatggagcgacatcaataagcttacttggagtgaaatagaggaattcgaacccggtcattatcgaattatatttgaccagcaaaaactcaagaacggaggcaattctcttgtatatctggatttgccagattcagcggttacgcttctaaatattcaaaataaggaagggcctgatgatcgagtctttgttggcctaaagtacaatagctatatgaatgtggctctattgcaatgggcgatgagagcaggcataaccaaacacgttacttttcatgctggtaggcatacctttgcggtagcccaacttaaccgtggtgttgatatttattctctctctcggcttcttggacactcagagctaagaacaactgaaatttatgcagatattctcgaaagccgcagagtaacagcaatgaggagctttcccgatatctttgaagaacaagcaaaagaatttggatcttgttgccctcattgtggtcagcaagcaaacccttag

SEQ ID NO: 296823 - DNA, 306 bp, Proteus mirabilis
atggctaagcgtgatttgcacaatgtactgtttccaaagcagcgcaaaatcctgactcattttggtgaagacctattgttagcgatgaaacgacgtggttttacaaaaaagctgttgtgtgaacgtacaggctttgatcataaaaccgtgaacaaagtcttcgcaggtgatccgggcgttgccataggcacttacttaaaagtgatggccgtccttggcatggaaagcaactttgcagaaatggctgcccatgatgaagtgggtattaagctgcaaaatataaaattactggaaggttcaagatga

SEQ ID NO: 296824 - DNA, 1251 bp, Proteus mirabilis
atgagccgtacaatcgtcgaagtctatgctgactggcaaccaatggaagcgcctttgctaattgggcagcttgcttacagcgattcaagccgaggtggcgtgtttagttttgcctacgataaaacatttttaacctcaacctatcgtttgcaaattgatccaatcctaacgcttcactccggtgaactttacaacgatgaagccgataaaaactttcgtgcatttctcgattcatcgcccgatagatggggacgtattttaatgcagcggcgtgcagccattgaagcgcgcaaaggtattcgagcaacaagtcgattaaacgaattggattacttgttgggtgtgcacgactcttaccggatggggggtattcgatttaaacgagcaggctcgaatgcttttttggacgacaattctgaatttactgcgccgccaatgacttctctacgagagctagagcacgcagccatgcagattgaaaaagacgataacatcgacagtgacgagtattatcgctggttaaaaatgctgatttctccaggctcatcattaggtggtgcaagacctaaggcttgtgtgacagatgaacaaggccacttgtggattgccaagtttcccaatttaaatgatacccatgacgtgggggcgtgggagatgctctgttatgaattggccttggcggcaggtgttgacatgtttccaagtgagattaggcagttttcctcagggcatcatacctttttaacaaaacggtttgaccgcgagggtgaaaagcggctgcatttttcatcggccatgacacagcttcaatactatgatggtgaacaatctcaaggtgctagctatttagagattgctgaatttatttccaattgtggtgcacaaaccgaagctgatttagcacagttatggcgacgtatcgtgtttaatattgcggtgtccaacacggatgatcacctgcgtaaccatggatttttattaacaaagaatggttggaagctatcacctgcttatgatttaaacccgatagtgggtaagcatggcctgcatctgaatattaccgatgcagacaacgccttagactaccaattagcgtttgatgtaaaagatttcttccgactttcacaaacccaagctacgcaaatttacgatgaagtattaattgcggttaagcaatggcaaaccgttgctaagcagctagggatcagccgagctgagcaagccatgaaaaaatcggcgtttaacgtttaa

SEQ ID NO: 296825 - DNA, 1128 bp, Proteus mirabilis
atgagtaaatcggtgttatctatcttacatacagagtcgtcttgtggttggggtggtcaagaaatccgcattttgacagaatctcaaggcatggtgcaaagagggcaccatgtgacactggtttgctgtccaaactcaaaaattgccaaagcagcccctgactatggtattgaggttgtcacattaccgattgaaaaaaaacgcggatctgcactgatggcattgcgtaattggttaaaagtccatcgtcagcaatttgatgtgattaatacccatagctcgacagatgcttggttagttgcgctatcttgtgcttcattacgccactctcccgccatagtacgtactcgccatgtatctaccgatgtatcacgttcactgcccacgcgttggctctacctgtcttcaagtgcccatattgtcactaccggtgaaaaattacgccaaaccttacatcaatataatcgttttccgctcagtcaaatgacctcagttcctacggggatcgatttagaaaagttctcgccacaaaataaacagcaagcacgagaaaaaataggtgtgcctaataaacctacattagggattgtggcaacaatgcgggtatggaaaggacataaatacctaatagaagcatggaaaacattgcatctgcaatttcctgactggcaactacttctcgtcggagatggcccacaacgtaaaaatttacaaccgatggttaaacttgcagggttagaagagagtgtctttttcttaggcaaccgcaatgatgtgccggattgcttaaatgcaatggatttatttgccttaccctcttttggtaacgaaggggtgccacaaggtattatgcaagcgatggcttgcggattaccggtggtatcaaccacagtaggtgcaattagtgaagcggtgattgatggtaaaactggttttacattggcacctcaagtacaagaaaccctaatcaattaccttgctaaattaatggcctctgatgagttacgtcaacaaatggggcaagcgtcattagcccatgccaaagctcagtttggtttagataacatgctagataaaatggaaaaaatatttattaacgccattagccttaaagataaatcacgataa

SEQ ID NO: 296826 - DNA, 735 bp, Proteus mirabilis
atgggcattgaaaaaaatcattcaataattaattggcttttattaagtgtggttagcctattatttttatttgcaatcttagggacattagcacgcggggcttgggtcgcattggcgattagtacattacttatcttaatcattaatcgccagtgggtgctgatattaatcagtatattagcctgtgttttattatttataagtattactaatttacctccaaacccagttgtcagtaaattctttcaatataaattaacccaaaccaatagtggactaagatttgatggtggcacccaaggctcagccttagatttgatcttagaacaacctattaaaggctatggttatggtaatcagctttaccataatgtttataatcagcaagtaaaacagcataaaaactgggtctttaaaaaatccattggtccccataatgtatttttagctttctggtttgccggcggtattttggggttaataagtctactctatttttgcgcgtcttttatcgctcaaggtattcaattgatccgcaaaaatcagggaattattcgccaagcagcgctggtgttattaatatcgtttttaggggtttatgtactgcgtggattatttgaaaatgcctatattaatcaagtgggtattttattagggttaatgttagcattgcgctattcattattaaatcagccctcagcgacaccgacccaagaagacaaatccgttagctaa

SEQ ID NO: 296827 - DNA, 1098 bp, Proteus mirabilis
atgaaggaacatatactttttattattgatggattaccgggtggtggcgctgaaaatgtcacgatcaggctttgtcatggcttaagtcaacgtggttatcaagttacattactctcattagcagaaaaatgtgactatgccattcctgcagatattgaactattaattgatgcagatagttaccatggcttattttatcgacaaacagaattaaaacgacgtgccaactcgatggataagacccttcaggcattgtttgcgcgcaaaggcattcctgcgttaattgtctctaacttacataagactgacagaattgttgcactatcaaaacaactggcagataagaatgtatggtattgtattcacggtattttttcacagtcttatttaggcaataaaaaaggtttttcccgctggttaaaacagaagaaaattcaaaaagtctatcagggtaaaaatattattacggtatcaaatgcggcaggacaagatttaatagagaatattaaaattgtccctaatcaattaaaaacaatttataacccatttgatattcaagaaatcagaacactggcatcagaaaataatccctaccaaaagcaggattatttattgcatattggtcgttttcatcaagtaaagcgccatgaccgcttattagaagcgtttgctttagccaatctaccttgtaagttattgattgcaggacagggatcttctgaggtcaccagcaatattaaaaataaaattgttgcactaaatttagaaaataaagtgagcttaattggctttttagccaatccattccctgtgatcaaagatgctaaagcggtggtattaagctctgatagtgaaggcttaggaaatgttttagtcgaatcacttatttgtaatacccctatagtaagtactaattgccttggtgggatcagtgaaattatggagggtgaattagcagattataagtctgaattaaattcagcatccttggctgaaaaaatgcgtttagcttactttaacccgcctaaaattacgcctaatatgtatcaaaaatttgatattgatgaagtgatccgtcagtatatttcattaatttag

SEQ ID NO: 296828 - DNA, 966 bp, Proteus mirabilis
atgaaaaaaccagcatttattatcacattagataccgaaggcgataatctttgggaaaatgagcataatattactacgcaaaatacgcattttttaccccgttttcagcaactttgcgaacgttttcaatttaaacccgtttggctaaccaactatgaaatggcaatagatgaagcctatattgagtttgcacaagatgtgatagcccgtaacactggggaaattggtatgcaccttcatgcatggaatagtcccccaattgttgcgttaacggacaatgatctccattatcagccttatttaattgaataccccaaatcgcagatgcgtgacaaaattgcctttatgactgacttactggaaaataaactacaaacaaaaatgttaagtcaccgtgctgggcgttgggcatttaatgaaacttatgcgcagctattgattgaatttggttatcaagtcgattgctcagtcacacccaaagtcgattggcgttttactaaaggtgatccggcacaatcaggcggtacagattacagtaatttcccaagccatgcgtactttatggatgttaatgatatcagcaaagcagggaattcaacgttacttgaagtgccaatgagtattcaatataaacattccccttttatgaataaaattaagcgagggtacgataggctaagaggtaaacgacgctcaccttcagttaattggttacgccctaaagggggaaatgcccaacagatgattgaagtggcacaaaaatctttagcccaaggtcactctcatattgaatttatgttgcactcttcagagtttatgcctggtggaagccctacttttagaacagaacaagatattgatggcttatataatgatttagaaacactatttaatttcttacaagataaagtacagggaatgacattggctgagtattataaaataaaaaacgaggtattattgtaa

SEQ ID NO: 296829 - DNA, 882 bp, Proteus mirabilis
atgttttttaaaatgggatggcgacaaggttctgctattgaatatcaagaagcatataataaatttgggggaagtataattacatctccagaaatccttaatttcattcatactcgctttgatttagatgaaaaattttatattaaaaaagataaggacaatcaaattattggtgcattctgtacttggcatgataattttttagctggagaacaaaaaatagcaattaaattagaactttatcgttatatgctaaattttgatgagatcatattaccattatctatagaggataatgtatttttacctgtaaatagtaagtttttatccagcaaaaataaagtaataaatgcatttagtaaaattaatgctcatcgtgaaatatgtttagtaaagtccttttcaaagaaaacaattagtactagaaatagagaattgaataaatttattaaaaaaggtggaagtgttattaacgtatctaaatattcagtagaagaattttctgatatttatgatgaactttattttaaaagacgaaatgaacattctcataaaaaagagatacgagaaatattaaacatatttcctgatttaattttcggaaatatattatggctagaaaataaacctgttgcaatgcaatatgtaatcaaaaaagactctccaaactgggtttgttttgattatattaatagcggaatggatatgaattatcctgatttatctctagggacaatagcagcatgggtaaacgtacgtgatgcaattgaatatacaaataaaagaaatttagagttgaggtactgttttggtagaccaacatttgattacaaagaaagatggtgtaaccgttttcctttacaaagagtaatatcaatatag

SEQ ID NO: 296830 - DNA, 930 bp, Proteus mirabilis
atgtttaacactcccgcgataagagctattcgggatcactatcctaatgctcatattacattagtttctagtgaaaaaaataagttattagttgaaaattatgatcaaatagacagtgtggtttattgggataataaaattagaaatctacttcctatagctctacaggcaaaaaaatataaacctgaattagctgttatattacattctcatctcccttatgatgtattatttgcagtcatgtctggttgtcagtacattttacgtaatacttatgatccaatccctgtttggtttaaaaaatggattattgctgatcatgtacccgcttctggccatgttattcaaagtaaacttgatattattcgttatttaggaattgatagcacagacacaagaatggaaattccttgtgaagtaaaacaattagataaatataatagctatattattggttttcagatgggggcttcaacattagagcgtagatggcctgttaaatctttcgttaaattagctcagaaacttattgatattgaaccattattacaaattaagttaataggatctccgcgagaattagaattacctgaagagttttttgcattgttaccaaagagttatcataacaatattaaaaatttagtaggtaaaacatcgttacctgaattactaagtcatattaatacgatggatgtattagtaacaggagatactggccctttgcatttggcgatcgcactaaaatgtccaacagtgagtttatttgcaactgcggatcctaagtggactggtccttatcaggatcttcatttacacatagtgatcgataaaggagctactactgcagatggtactataaaatcaatgaatgatattacggtcaatgaagtatttaatagtaccataagtagatttaagagttgttaa

SEQ ID NO: 296831 - DNA, 798 bp, Proteus mirabilis
atgaaaaaattatcgatcattgtcaatattaaagatttagaacatgtcatctctaggtgcttagaaagcattgaagcgtcattagaattttatcctaactccgagtatgagatattaatgattgatgataattcaacagataacacgcctgaaatactcaaattttttgaaagaaaaaattcatcttttaaatatattagaacaactttttgtaatttgggtaaggcaagaaaatatgcaattacccaatgtactggtgattatattacttttattgatggtgatgattttattgctactgttgatttttctcaattaacaccaattttagataaacagcctgatatcattattactggattgaacgaagtatttagaaaaggtgatgaaataattaaaaccacacttgaaaaaccattatttctaaatagaaaacaagctatcactcattttttaattcataaaaaataccaagctcatctatgtggaaaacttttcaaaaatgatattttaaaatcgattgattatccagaagtatattgttatgaagatgccttcgcttttccagatatactaaacaactgcaataatattgtatatttaagtggaaaattctacaattatattaaagatgataatagtttatctaataatattaacactaaaaaaatagacctaatggctgatgttatattgaaaatgtatcaagtttttcctagcgatttttataatttaattagctgccatgctattgatcatattttaaaatatagaaaccaactaggaaaagaaaaataa

SEQ ID NO: 296832 - DNA, 978 bp, Proteus mirabilis
atgaaaaacaatatgcccaaaattaccgtattaatgtcggtatacaatgatgagaaataccttcaggagtctattgattctatattaaatcaaacatttaaagaatttgagtttcttatcattaatgatggctcaacggataactcattatctatcttaaaagaaaacgccaaaaaagatcccagaataaaactgattattaatgaacaaaatatcggattgatcgcttctttaaacaaaggattacaattagcttcatgcgatttagtcgctagaatggactcagatgatattgccgtttcaaccagactagaagcgcaatatcaatttatgttacaacatcctgaagtcagtgtttgtggtggtgcttttatctaccaagaagagccaaatagaattaatacttatccagaaacacatagtgatattgtgatttctagtctttatgattgctccttagcgcatccaaccattatctatcgtaagcaagatatattatctgttggtggatatgataaagcagacctctatgcagaagattatggtttatgggtgaacttaattattgctggaaaatttaagctccataatcttcctgtaccacttctttattatcgtactcatccaaatgtcgatcgctcacaatataaagcgatacaaaaagatacagcagaaagagtagggcaaaaattattaatgtattttggcattaacgtgaataaagaggattattcattattattggataatgataaaaaaacagtagagcaagtagtacgctgtaaaaggttacttgaaaagattaatcaacaatttaatgctaaagagtatcgacaagagttaatacaaaaaaatgaatttaagaaaagattattagaaagaaaggtattagtaactgatttctcatcatttttaataaaagtaagtgcaagatggtatttcttgataagaaaaataactaaaaaagctaagaaataa

SEQ ID NO: 296833 - DNA, 792 bp, Proteus mirabilis
atgttatctaaaggtactaattttttaatatcaatcattatgccatcgtataattcaggtgagtatatacgaaaatcaattgattctgttctcaatcagtcatataaaaattttgagttaattattattgatgattgctcttccgataataccgttgacataataacctcatatcaagataagaggataaagttattaaaaaatgaaactaaccaaggtgcaggaattactcgtaataaaggattattactttctaatggccgttttatttgctttttagatagtgatgatacttggaggcctgataagctagaaaagcaacttacatttatgttatctaataatatagatttttgcttttctgcttatgacagggtttctgaagataatgcttttatctgtagaattggtgttcctgagaaagtgaattattcagatatgctaaaagtctgttctatcggttgtttaacggttatgtttgataaggataaatttactgatttctcaatgccttcaataagaaaaagacaagattatgccttatggctaaaactacttaaacaaacaccttacgcatatggaataaacgaacctcttggtttttataacataagagagaactcaatttcatcaaataagctaaatgctgcaaaataccaatggaaaatttatagagagatagaggatcttaatctattttatgcttcttattattttttccattatgcttttaatggctttttcagatctaagctcccttctttagccaaaaaattaggtctattgagataa

SEQ ID NO: 296834 - DNA, 831 bp, Proteus mirabilis
atgattataaaatcaaccattccagttggttttactaaacagatgagagaaaaatatcataccgataatattatcttctctcctgagttcttacgtgaaggtcgcgccctttacgataacctttatccatctcgtattgtgattggtgagcaatctgcaagagcagagaaatttgctgagcttttacaacaaggggcattaaaaaaagatattgatgttctttttactgattctacagaagcagaagccattaagttatttgccaatacttatctcgcactgcgtgttgcttattttaatgaactcgatagctacgcccaagcttacaatttaaatgcaagacaaattattgaaggtgtctgtttagatccacgtattggtaatcactataacaatccatcatttggttatggtggctactgcttaccaaaagatactaaacaactgttagccaactacgaatcagtgcctaataatatcattggcgccattgtggaagctaaccgcacccgtaaagactttattgctgattctattatcgctaaatcaccgaagattgttggtgtttatcgtttaattatgaaatcaggctctgataatttccgctcatcttcaatccaaggcattatgaagcgtattaaagcaaaaggcattgaagtagtgatttatgagccagaaatgaaagaagagactttttttaactcaaaactcattcgtgatttagatgcgtttaaagccatgtctgatgtcattattaccaatagaatggcttcagcgctaaacgatgtggaagaaaaagtttatactcgtgatctctttggtaacgattaa

SEQ ID NO: 296835 - DNA, 267 bp, Proteus mirabilis
atgaaaatatttaatatattattttttggtttattaattattagtaattcctcaatcggagatgaataccctattatcacagagaaaatgttaaactcaggatataacaaattagagttgcagtatgatcctcaattacctttgattacaccttaccctgaaaataaagagcttgtttatcctcttattgaaaaggcaaaaaaaataacaattctaatgatagttatcttattgcttccattttctttgttggttgtactaatttaa

SEQ ID NO: 296836 - DNA, 411 bp, Proteus mirabilis
ttgaaccctaaacatggagcagctctattctatcaagccgttatttttgaaaatggttatggtgttgaaaaagatataaacaaagcaattaaatactatgacaaagcatgtcgaataaaaggaaacaaagtgattattgcttgtgaaaatcttttttctatctatctgcatggtaacaaaggtgttcctcaagatttaaataaggccaaagaatatgcaaaatggattgctgaaaatgggagccaaaaatatcaagaatatataaaacgttgggattacattttattttctcttgaattaagtttaaaactaaaagaatgtaaaaaaattgggataaatgcatctatatgtatccgaaaaagcaataatgcactcttggaatatgccaataaaatgtacccaattgagtaa

SEQ ID NO: 296837 - DNA, 666 bp, Proteus mirabilis
gtgggtatctatcattataaaccagacaataatgatcaattaattagtgaattgattcttccacatacgaatgaatcatataaagaaatgcttgcaaaaataaaaaatatcttagctaatgaaaataaaaagcgatttcgttatattcgttatataacttatatttgtttttttattttagtgctagatgctttacttgttaatattacggggagtaatgctataataagagataatttttcagcaggactgataattgtacaaattgcgggtatcctttttatcataggaggcctgctcttattgctaataagaatggccgttttcttttcatttagagaaaatattaaagcaataaaattaaaaaaattaacaccagaaaatccgataatatttaagttttatgatacaggaattacctttaaagagcctcatcaacatggatcattatattggcaagcttttactttgattgaattgacaaatgattatctatatttaagcttatgcccagaaaacacagagaaaggaaaagagactgcaggtatttcagatctttttattctgacggaaaatctaagtaatgtcgatagcctgatttcattattatctcatgaatattttcttagtagttttacttttcgtgataatcgtaaaaagaaatag

SEQ ID NO: 296838 - DNA, 384 bp, Proteus mirabilis
ttgaacaaagaaaaaattatcaaattagcaactaataataaaattcacgttactttaaaagacaattgtcagccaatcataaaagagttatcaattgctaaaattgttgaagagataaacaagctaaatttcactaaaacaataggatatactattgaagaaaaaaataacggcttaatttttatctttgatgatgaactaagtgtaaatgacaaagaaaaatttaatgcttatataaaaaaacaggcagctatttttggaagaaaatttattttttatcgtgaaaataaagttaatatcaacttgaaaaataaagcaatgctacaagaagataatggatatatttttcttgataatcagcatcgttattttcctcaaggataa

SEQ ID NO: 296839 - DNA, 279 bp, Proteus mirabilis
atgggtgatgcattaggacttattgaaactcaagggctagtggcatgtatagaagccgctgatgcgatgtgcaaagccgccaatgttgaattgattggttatgaaaacgttggttcaggtctcgtgactgcgatggtgaaaggcgacgtaggggcagtgaaagctgcggtagattcaggtgtggaatcagcgcaacgggtgggtgaagtcgttacatcacttgtgattgctcgtcctcacaatgacatcaacaaaattgttatcaaacacaaggcatag

SEQ ID NO: 296840 - DNA, 861 bp, Proteus mirabilis
atgaaatacagaataaatgcctcaatttattacgacgcaacggatggcgcgatatcgttagaaaaaggtgacgttgatacacatctgtctattaccgctaatgcgttactcttttattttattcaaaatcccggtgtagtaaatcgtgatgaagtattaaaacgcgtgtgggatgacaatgggctagtttcttcaaatagtaatttaaaccaatatttaagtttattgcgtaaaacatttcgtcattatggtattgaaaatattattgtcactatcgccaaagggcgactagagtttaatcctgatatctctgttgaattaattgatgactcaacactgttacctgttacgcaaacaaatgagcacgaaggtgaagcaaataaaagtaatacaacatcacccattgagacatcgttatcatccgagcctgataatctagacagtgaattagaaaaagagcctcaattatcggtaacatcgccacaaaagccagaaatttgttggtatttagccagtattggttttttatttggcgccatatttcttgtggtgatcatctttttaaatcagcatcaatcaaagcctatcacattaacacctctcacccataatgattgtgaattactctctaacgaggccatgattaactcctctgtcagtgataattatattcgcaattttgacgctgtaagaaagaagcttaatttacagtgtgtgaaaggggagcgctttgtttttttctatggtgataaattacaaactaatggcttagggcgtgtctttttagcgcattgcgctaagaacgaagataatccatttagctattgcgataattacttttactattcttggaaatactaa

SEQ ID NO: 296841 - DNA, 1275 bp, Proteus mirabilis
atgaaacttgagacactttctgttcacgctggttattcacctgatccaaccaccaaagctgttgcggtgcctatttaccaaaccacctcttatgcatttgatgatacgcaacatggtgctgatctatttgacttaaaagtacctggcaatatctacacgcgtatcatgaacccaaccaatgatgtattggaacaacgcgttgccgccttagaaggagggattgcagcagttgctgtggcatcgggtatggctgcgattacttatgctatccagaccattgcacaagtgggcgataacattgtgtcggttgcgaagctctatggcggtacatataacttaatggcgcacacttttccccgtatcggtatcgaagcgcgttttgccccccatgatgatctgctggcacttgaagcgttaattgatgagaaaaccaaagcggtattttgtgaatctatcactaatccaagtggtaatattgttgatattcaagctctcgccactgtggctcatcgtcatggtgtccctttaattgttgataatacggtagcaacgccttacctatgtcgcccttttgagcatggtgctgatattattattcactcactcactaaatatattggtggtcatggtaactctattggtgggatcgtcgttgattcaggtaaatttccttgggctgaacataaagatcgttttgaaatcctcaatacaccggatgtctcttatcatggggttaattatgttgaacactttggtgcggctgcttatattgcgcgatgccgtgttgccccattgcgtggaacaggagccgctctttcgccatttaacgccttcttaattcttcaaggtctagaaacattagcgttacgtatggagcgtcatactgaaaatgcgcaaaaagttgctgaatatttgcaaaatcatcctcaagttgtctgggttaaatatgcaggtttaaccagccacccggagcataatttagcggtacgttatatgtcaggtaaacctgctggtattctctcttttggtatcaaaggcggtgccgaagcgggtgcgaaatttatcgatgcattgaaattgattgtgcgtcttgtcaatattggtgatgctaaatccttggcttgtcatcctgcatcaaccactcatcgccaactcaatgatgaagagctagaacgcgcgggggtttctcgtgatttaattcgactttcaattggtattgaacatatagacgatattatcgctgatctagaacaagcattaaacgccagtttttaa

SEQ ID NO: 296842 - DNA, 2532 bp, Proteus mirabilis
atggttaataagaatactaataaagatatcgtttattttctctttccaagtgtcattgcattgtcattgacgctgtccttttcatcatatagcgcaaaccgatttaatcctgcatttttggctgactctcctgatgccgtcaccgatttaagttattttgaagcaggcaaccgcattaaacccggtgattatcttcttgatattgtttttaatcatgagtatctgcgtagtgaaaatattcattttattagtcaagataaccatgttattccttgtttaaatcgagattattatcaatcactcgggatcaatattaaactatttgctgattttgagaaattctcggcaaatgaatgtattgatattgaaaaaatcattccagattctgttgttaattatgatattgagaaacaagctttaaatattcaagtccctcaagccgcgttagatttgaaagcacgcggttatattccaccagaaaaatgggataacggtataacagcaggtattttaaactacacctttagtggcgctaatagctggggaaattctcataataatagctactacttaaatctacgtagtgggatcaatattggtgcttggcgattacgcgattattccacttggaattcgtcaaacgggaaaaaccaatggaaccatatcaatacctatctgcaacgcaatattgtgtcattaagaagccaattacaaattggtgatagttatacctcatcaacactttttgacagtgttaattttcgaggtatttcattagaaagtgacgacactatgctacctgatagccaaagaggatttgcacctgtagtcagaggtattgctaaaggcaatgctaaagtggtgatccgccaaaacggttatgtgatttatcaaacctttgtttctccgggtgcttttgaaatccgtgatctctatccaacgtcaaatagtggcgacctctatgtcaccattgaagaaaatgatggtagcaaacacagttatgttgtgccttattctgctgtacctattttacagcgagaaggccaaaaacagtttgtcatccaagccggtgaaatacgccaaaataaccaaaataaaaaacctcgctttatacaaggtcatcttatttatggcttaccctatgacaccactgtctatggtggtgcattagcaacaaaagattaccaatcttatgccctaggagcaggtaaaaatatgggtaccctaggtgccttctctaccgatatcacctttgctcatagccaattgccaaataactcaacatcagatggttattctttacgttttctttatgccaagtcgttaaaccaatttggcacaaactttcaattgctcggttatcgttactctacttcgggtttttacacattagatgagacattaaatacgcgtatgtccggttatctgtatgaagataatcaaaaaaaaccgttgagttattttaatttgcataatcgcaagaaagggagcctacaaattaatttatcacaacaactgggggattatggctctatttttatgatgaccaactggcaaaattattggggaactaatgagaaaaatgtcctagtacaaaccggctacaatggcaatattaaagggctctcttataacgtcatttatagttataacagaatgatgaatagtggtcagcgtgaccaaacattgtctgtgggtctttctatcccattacaattgctaatgccgacaagttatcaatccatcaatagcacttatctcacatataattacagccacaataataacggttactcgacacataatgcggggattgctggtacattattggaagacaatacccttaattacagtgttcaacaaggttatagcaatcaaggcggaaactataccggtagtgcggcgttgggttatcaaagtcgctatggcaatttaaatgctagctataactatcatcaagatgctcaacaaattaactatagcctcgctggaggtatgctactccatagtggcggattaaccttaagccaacccttaagcgctaatgccattttagtagatgctcgtaatactgcggatgtaccgattgataatgcgacaggggtttatactgactggcgagggtttgccgttattccctattctaccgcttatcgacaaaatcgagtggcattagacaccaccgcattacccgataatgttgaaattgagcaaaacattaagcaagtgatcccaacacaaggcgccgtcattaaagttcagtttgatgctaaaaaagggtatcgcttattactgacgctacaacaccaaggtcgcccactcccttttggggcaatagcaactgataaacaaaatcatctgtccggtattgttggcgatgatggcttactctacttatcgggtgtccctgattcaggaaaattagagatccgctgggggcataatgcctctcaatactgtcaagtgaactatcaattacccgcctctcaacttgatgaaccttttgtgaaaatgacacaggagtgccaataa

SEQ ID NO: 296843 - DNA, 780 bp, Proteus mirabilis
atgataggacggttattgcggggtggatttatgtccatcatttacgcgtatctttatatcccgattatcattctgatagttaactcttttaactcatcacgtttcgggatcaactggaaaggctttaccactgactggtataccattttattaaataatgacagcctgctacaagctgcagggcattcattaacgatggcagtcacctcagcaacctttgcgacgttgattggttcattggctgcggtggcgctttatcgctatcgttttcgtggtaaaaagtttgttggtggtatgctgtttgtggtgatgatgtcgccagatattgtgatggcgatttcattattggttttatttatgctattaggcatttccttagggttttggtcattactggtgtcgcatattaccttttgtctgccttttgtggtggtcacggtctattcgcgactcagtggttttgatgtcaaaatgcttgaagccgctaaggatctaggggcgggtgaatttactattttacgtaaaatcattatgccattagcgatgccagcagtagcctcggggtggttattaagctttacgttatcgatggatgacgtggttgtctcctcttttgtgactggaccaagctatgaaattttaccattaaaaatttactcaatggtaaaagtgggtgtttcaccggaagtgaatgcactggcaaccatccttttagggctatcattagtattagtattaattagtcagttgatcttacgagatagaactggcaaagcgtaa

SEQ ID NO: 296844 - DNA, 1275 bp, Proteus mirabilis
atgaatattgaaaggaaaatactagtcaaactaaaaaatatacattcacttgatcaaaataaaaaactattacgctctggttaccataatcaatataatacatttttatctaatatttcttttgttccagtattatcatcatcacaattaccacctaaaaatcatctttctcttacatcaaatcatttaaatgattactattatttaaatttacctaatgataacacatatacattagatgaaattattaaaatattaaaacaacatcctgatatagaatatgtgcaaaaaattccaaaattacctgtacagccacctaatattacgccggatttaactcgccatcagcattatttaaaaaccccaaaaataaaatcaaatgaaataactgggttaggtattatagacgcttggaataaaaatgcttatgggcaaggtatacaggtggccgatattgagtgggattttgatttatcacatcccgatttgttagctaataatatcacgccactttttcctttaactgaaaaaaccgatcaagccgaccatggtacggcagtggcggggttaattatggggaaaaaagacggtaaaggtattactgggcttgcttataaattagatatgttttatgccatatcagaattaagcagtggtcgtattgaagcaattattgccagtaaacagaaattacacgcgggtgatattgttttatatgagatgcagacagtttgtgaacatcatgcttatgttcctgctgattatgaaatgcatatctgggaggcaactcgtacattaacagaagcggggattattgtgatcatggctgccggcaatgggggggttgatctcgatttacctttttatgatagctatcgtcaacgtagcgataaccactctatacgtgtcggtgcgggctcgccttatacgctaaatcgtttacctttctcaacgcatggctcccccatacatgtgcaagcatggggagaagatgtgactactgccggatatggtgatctttttcatggtgacgggaataacaaatatacggctaattttagtggaacatcatcagcctgtgcattagtcgcgggggcggctgcggttattcaatcttggtataaagataaaaccaacacggtattaacgccaatagagatgcgagagctactgattaaaacaggaacttatccatcattaaatgaaaagataggccctttgcctaatgtaaataatgccatcttacatttaaaaaatttaatccaatataattaa

SEQ ID NO: 296845 - DNA, 642 bp, Proteus mirabilis
atgggtaatatcgtgcttagctatttattaaagcgttttgctttatttttgttttccgccatgattgtggcaataacaacagggtttattttcctcgatattttggtgctgaataatggtatttctgaaacctcagcaaccgaactggggcaagaacttattgtggctataatatgtcttcttttctttatacctgcttataaacagccagaaatgagagggggatacacactgattatgggctttttcttgtgtatcttaattcgtgagttagatggtttttttgaccaattagcacatggttcatgggtttggtttgcattaacggtaacatttgtctgtatagcgatcgctatcagagaagggaaaaaaacattatatggcttaacccattttataacgcattctagtcaaggaatgcttatggcgggtttactcagtgttttactattctctcgcttatttggtatggggattttgtgggagaaattgttaggtgaagactataaccgcacagtaaaaaatatggtggaagaaggtagcgagttgttcggctatacactctgtttaattagtgttatttggtatcgctattcgtctaaatatcatgttataccgacatcaataaaatttacttattaa

SEQ ID NO: 296846 - DNA, 354 bp, Proteus mirabilis
atgggttttgctatttttttactttctggctgtgctacgccagaaaaatggcaagtaaatatgaaaaatcccacacctttagatatcgctaaaaatctatgcatgcaagaagcaaaacaacgctaccctgagcattatttgagttcaaagccaaattatagctatccttcttcttcaacgataacaatagatggtaaagaagttactattcctaattcaaattatcattcctattctcgttatgatgccaatgaatcagagcgtaaacagtattttgatatttgtatgagaggagaggggtgggaaaataaaaataaagtgactggattactcgcctttttatttaatgactaa

SEQ ID NO: 296847 - DNA, 909 bp, Proteus mirabilis
atgagtttacctgatattcatcgtgtgcaatcattttttttgtcgttgcaagatagtatttgccatgctattgaaaatatagaccaaaaagcaacctttcagcaagataattggcaaagagaagctggcggtggtggtcgtactcgagtgctcacccaaggtgctatttttgaacaagcgggtgttaatttttcccatgtttatggagatgccttacctgcatcagccacggctcatcgccctgaattaagcggtcgtcgttttcaagcaatgggcgtttcattagttattcaccctcttaatccctatattcctacttcacatgcaaatgttcgtttttttattgctgaaaaagagggagaagatcctgtatggtggtttggtggaggctttgacttaacgccttattatggatttgaagaagatgttatccattggcataaagtggctaaatctgtgtgtgatccctttagccaagattattatgctcgatataaaaaatggtgtgatgactatttttatttaaaacatcgtaacgagccgcgtggtgttggtggcctattttttgatgacttaaatacacctgatttcgatcactgttttgaatttgtacaacgtgtcgggcagggctacctggatgcctacttgccgattgtcgaaaaacgcaaatctataccctggggagagcgtgaacgccaattccaactttatcgccgtggccgttatgtcgagtttaatttggtttgggatagaggcacgctatttggtttacaaagtggcggacgtactgaatccattttaatgtcaatgccaccattagttcgctttgcatatgattatcgccctgaacctaatactcccgaagctaagctgtatactgattttttaattcacaaagagtgggtatag

SEQ ID NO: 296848 - DNA, 438 bp, Proteus mirabilis
atggaaatacgtgtattccgtcaagatgattttgaggcaatcattacactttgggaacgttgcgacttgatctcaccagaaaatgatcctgaaattgatattgaacgaaagattaaccactcccccgatctctttttaatcgcagaggttgctggcgaaatagtcggtagtgtaatgggaggctatgatggtcatcgtggctcgctttactatttgggcgttcatcctgagtttcgcggtagaggaattgccaatgcactaatctctcggctagagaaaaaactcattgcaaaagggtgtccacaaattactttaatgatccccgaagagaacgatgccactatttgtatgtttgaaaagcttctctatgaagatcaaaatcaagagaatgcggcttacactaaacgcctaattatcgatcaggacttcgatctttaa

SEQ ID NO: 296849 - DNA, 591 bp, Proteus mirabilis
atgcctaaattttggttacccttgtgcttaagcacaagtgtcttgctattaagtggctgttcatccatggggggaatgtctttttctgcacttaatccaatgaattggttctcaaatgagacgttaacggtttctgcaaatggattaggtaatatcaccgcttcaacggcagtgacagagcaagcgatcgaaaaagagctgggtagccgtttccattaccgacaaggaatggaaatgcaacaaggcaatattatggttattgtgcaagcacttgaagacgaaaaagtacaagtggctttttatggccaagaaaagggcacagtagataaaatcacggtatctgatcctaatgcgaaaacagcgtggggaacaacaataggtacaccatttaaagatatttataaaaaagcatttggtatgtgcagtaacgggccgaaaatcgataaacaaaaaaccattcaatgccaatcagaacaagcaaaatcagtgagctatgtttttgctgggcaatgggatggccctgatggtctgatgccacccgatgaaacattagcaaattggcaggtaacacaaattgtttggcaaaaatag

SEQ ID NO: 296850 - DNA, 1032 bp, Proteus mirabilis
atgggtactataatgaagaacaaaacaatccgaacttttgcattacaggcaaccgttgcattgtctttggttgcgagtagttatgcaaatgcagctcaattacttaatagctcttacgatattgctcgcgagttatttacacagcttaatagtgattttaaaacccaatgggatgctcaacatcctgatgacaaagtcactatcaaacagtcgcatgctggctcttctaaacaagcattagccatattacaaggtttacctgcggatgttgtcacttataaccaggtgacggatgtacaaattttgcatgataaaggcaagcttattcctgctgattggcaacaacgtctacctaataatagctcaccttattattccaccatggcctatttggttcgtaaaggaaatcctaaaaatatcacttcttggcaagatttgacccgtgaagatgtcaaagtggttttccctaacccaaaaacatcaggtaacggtcgttatacctatttagccgcatggggagcgtttgaaaaagcttatggaaatgaagcgcaaacccgtgatgctatgacaaagttacttaaaaatgttgcggtatttgataccgggggacggggggcaacgacctcatttattgaacgtggacttggtgatgttttaattagttttgagtctgaagtaaataatattcgccagcaatatggtgaagatgattatcaagttattgtcccttctgtagatattttagcggagtttcctgtggcatggattgataaaaatgtgcaacgcaataaaacagaaaacctcgccaaagcttacctaaattatttatatagcccgagagcgcaggagatcatcacacaatttaactatcgcgtaaatgataaagcggtgatggccaaaaaagcagatcaatttccagccacttcattatttaccattgaagatgtgtttggtgattggaaccaagtgatgaaaacgcattttgctacagatggcacgctagataaattattattagaaggacgccaataa

SEQ ID NO: 296851 - DNA, 1089 bp, Proteus mirabilis
atgagtattgaaattaatcatgtcacaaaatattttgatcgcactgaagtgttgcatgacgtgaatttaacggtcaattccggtgagatgatggcgctattggggccatcaggctcaggtaaaaccacactattacgtatcattgcaggacttgagcatcaaacggaaggtaaaatctgttttgcagggcaagatgtcagtcgtttacatgcccgcgagcgcaaagttgggtttgttttccaacactatgcactgtttcgccatatgacggtatttgaaaatattgcctttggcttaaccgtattaccacgtcgcgaacgtcctaacaaagccgcgattgataaaaaagtcacgcaattattagagatgatccaactgcctcatttagcacagcgttatcctgcacaactttcaggagggcaaaaacagcgcgtagctttagcgagagcattggctgtagagccacaaattttattactcgatgagcctttcggtgcgttagatgccaaagtgagaactgaattacgcagttggctacgggaattacatagtgagcttaaatttaccagtgtttttgtcacccatgatcaacaagaagcaatggaagtcgctgatcgcatcgttattatgggaaatggcaaaatcgaacaagtgggtacaccgcaacaagtttggcacacgcctgaaagtcgctttgttttagaatttctcggtgatgttaatcatctccaaggtgaaattaatggtgcgcaattacaaattgctggctatcacttacctttatcggttacgccgctctatcaaggcaaagttgatgtttttttgcgcccttgggaaatttcacttaacccgcatagtgatagcttatgtaaacttcccgtcaaagtaatagaagtgactcctaaaggacactattggcaattggttttacagcctattgagtggggaaatacgccaattagcgcagtatggaatgatatgacatcaataccccataaaggtgatatttactatatgggcggtgcaaaagcgcggttatatgcacaagatcgtcccttaacaacagtttcactggcatacacagcttaa

SEQ ID NO: 296852 - DNA, 753 bp, Proteus mirabilis
atgagttattttgaaggcaaaacggtgttagtcactggggctgcaacaggagtaggggaaggcgttgcccaacgattatatcaagcgagtgcaacagtctttataagtggacgacaattagaacaggtgaaaaaaaccgcttacacaatcgatcctacaggtgaaaaagtcatagcattacaagcagatatgacatcacctgagcaagttaaaagcatgtttgaaacaatattagcacaaacaggcgcattacatggattagtgaataatgcaggtattacaggtccgcataatacatcgattgttgattataatattgatgattggaaagcggttatggataccgatattaacggcgtattttacggattgaaatatggtattccggccttactaagaagtggtggagggagtatcgttaatttatcttcgacaaatggtattgtcggtattgccggaatttctgcttatactgcagccaaacatgctgtgttagggatcacccgttcagctgccttggaatttgcacagcaaggtatacgtgtgaatgcaatagggcctgggtatgtagacacaccgcgaatgcaacagttaccggatgaagttcgtcaatggatggcatcaacacatccgatgaagagaatggcaacgcgaaaagaagtggctaatatggtggcttttttactttcagatgagagtagtttttcaacaggcgctttttatgcggtagatgggggatatactgcgcagtag

SEQ ID NO: 296853 - DNA, 1422 bp, Proteus mirabilis; identical to SEQ ID NO: 296589

SEQ ID NO: 296854 - DNA, 381 bp, Proteus mirabilis
atgtgtagaattactcacaaaggtaataaaaatagtaaagtttatgatattacatatgatgattcgggagaagaaataaacgtttacttagatgatgataagcaaggatttatatcattaaataaaatagaaacggataatccaaaagataactgttttcgtataactcaattagagttaggtaaatgcaaacgacaaggaataggcacttactgtttagaaaaacataaagaattatttaattcaattctaactgcaggttcatcagatggacagaaatgtgatgatgggagccatcttactggtgatggagcaccttttatcgaaaaaatgagagaacaaggcattgtagagccagaaccagaatatgatgagtattga

SEQ ID NO: 296855 - DNA, 201 bp, Proteus mirabilis
atgtccgaacaaaatagcttgttgacctgtacagagataaaaactattcaaagatctaacccaacccaagaagtaaatgatttattggctaacggatggaaaatacttaattccgctagctatcactgccaagaaagtaactgtgttatcaataatattgttttaggtagatttccagatagtgaagaaagacctttctaa

SEQ ID NO: 296856 - DNA, 1647 bp, Proteus mirabilis
atgaaaccaattaatcgactttatttatccggtgatgaaacgcaccttgtcgacgttaaaatggtgctggaattatcgcaatgtggccgtggctttattacggctaaaaccgataccgattacacgggtaaattggtgcgccttgatattggctacactgatttactattacgatatttcacgggttacgtagaacgttcgcaaccgtcacaaaatggttttcaaaaattgtttgtgcgggagttagttggtgtattcgacagaatgtggccgtgctcttttcagcatcctaccttaaaacagatcaccgattatctaaaagagcacagcggattacattttgtgttaccggatgccgaatatgtgaataccccaatcccacattacacccataatggcacgggctatcaattattaaatagcctgggaaaagtattcaatattcgcgattatgtgtggtatcaaacgccagacggtgatgtgttcgtggggagttgggcggattcattctggaaagataaagaggttgaaatagacaatcaattctcttctgaacaacgtgccggtaatcaaatgaccattccgatggtgcaaagtttacgccctggtgtgaaagtgaatgataaacgcctagagcgtgtggcgctggataacgacaatatgacgctaacatggattagccccgatgcgattacaggacgagccgaaaaccgcaccatagcccaacaacaaattgataatgcgtatcctgaactttcggcagggttgcacttaccgaaatttgcccgtgttgaagcaccgacagaaaataccacggcaggggatatttcagacccctttagaccaaaatacgccgttgacgtgcaaatggttgatgccgatggcaatgatgtggcacccgtttatcacgcagtgccgttaccattacccatggcaggcaatgagtcggggatgtttcaatatccgcctgtgggttcgatggtcgaaattgcgtttgaaaatggccgtgcagataggccctttattcgccaagtgttaagtcatggcaataccttgcccgacattaagccaggcgaacaactgcaacagcaacgtcaagaggtatcacagcgggtaacacaagacggcacatggcatcgtcaaactgaccaaaaaattattgaagaatcgatgcaccgtgaagttaaaaccgacacagaaaatcgcacggttatcgccagagaaaccaccgtacaagccaccgataaaacgaccgtgataggcacaagcacgttaatggcaggtgccattatgcaaattgcagagggtgactttagccaggcaacacaagccaataaggttgtggctgttggcaaaaacatgacggttgatgtgggccaacagttagaagaaaaaatcggggcagtgcgttccagtatcgctggcgcgatgcaaaaaatcacggcaccggttgtttatttaggtaatgaacaattgaatgtgatgcaatgcatgttagataccttagatgtggtgaatgagttagctgcactcactgcaagtcatactcataataacacgggcggtccgttaaatgcctcagccattagcaacacaggcaccaaatcagcaggacttaaacagaagtattcacctgtcattgggtga

SEQ ID NO: 296857 - DNA, 585 bp, Proteus mirabilis
atgacacagacaccactttacgaaaataacacaccgaaaatcagccaaatcattacgttggcgttggacggtgaagccattttattaaaaaacctgaccgtcacaccctcgatgatgtatcaggacaaagaccaatcaggacagtcctcaagtaccgtcaatagtgagcagggcattaagcccaaagaactccgcatcacaggtactattcctttcaccgaagaaaaaacattaacccgtttatttgcgttagcagaagcccaagagaacggactactaaaacgctatcgtgtcgccaaccgtatggccagtgcgattaattttcgtcttggcacattcaccaatggcattgatgcgtcaaagatggacggtaaacaagcctggcaagtcacctttactttacgtgagcatttatccgtacccgaaaaacgggaaagtcgttcagcagggcaagttaaagccaaaacacaaaatatgagtaataagtcaaaagccaatggcgaaggaacgccagaacaagagcaggaattaagctggtttgagaaaaatgtattgaagccagttaatgatgcgttgggagattaa

SEQ ID NO: 296858 - DNA, 723 bp, Proteus mirabilis
atgaaatggcaacgtaagcgattcgcgctttcaggcgatttaacgggcattacctgttcattattacccgttcacccgtttatttatggtgtcggacaaaacactgccacaggcagttatttaagccccaccaatgcaattcattatattgctaataaaattcagggagtgggtgaggttgatattgtggtgacgatgatttgtgcccgtacccatgacgagtttatcaatgcaattcaaggctttttgggcgtattgcctttgcctgtgtttagccaagttgaacgtatggccaaaaccgccgaaagcctaaatattaccaaaatgcagataccggctaaaacgatagctggtattcctgacccgcaaacattatcaactaataacagccgtgcggtaatcaatgcgggattaattgaaaaagcaaaaagtgaagcctcaagcggggctagtgttgctgggttactttctagcgtaaaaggatttgcggaaagtcgaaaaaatatcttgcaaggcatggctgattcattgacgggcttactggaaaaatcaaccacggtttgggtgttccagggaaaaggtaacggcgcggaattagccgataaaatgaaaaaagaaatccctgaacaagatgcggtttacaccttggctacgctttttgcgggcgatattgatgcaatcaaaggaatgatgcatgacacagacaccactttacgaaaataa

SEQ ID NO: 296859 - DNA, 423 bp, Proteus mirabilis
atgtattattttagtgcgaaaaaaaatttattttatccagaggaaatgaaagatatttatatatcaacggactcttttcctgacgatgttattttagttgataattctgtttttaatgagtttgtcgccaattcaccaccagaagggaaaacaagaggtgttgataacaaagggaaaccatgttggttagatattgcaccacttagtcatgagcaatggttagataaatcaaaacaacaacaacgatttttactggctcacgctaatgaggttattgctcctcttaaagatgcacaggatggcggatatattgaacatgaagatattgctcgtttaatatcatggcaaaaatatcgttataaattaacgaaagtagacttttctaattatccgaatattcaatggccggagaaaccgcaatga

SEQ ID NO: 296860 - DNA, 1929 bp, Proteus mirabilis
atgtcacaatctattattacaacggcatttgagcgctggaaagcccaagagtcgattgatggaaacttgattgtgttagacgagttcgtctttgcacatatcccgaatctagagattgaaaaaccgattgaccgcaatgaaggcttgcccgatgcaaaatatatcgtacatcgccaaaccgtgaataaaacgggcgtcgtcaatcaaaatgcggtggcctattcggtgactatcggtgccgaaattggtgattttgattttaactggattgggctattaaataaaaaatccggcacggtagccatgattgtgcatgcgcctactcaacgaaaaattaaaacccaagcagggcaacagggcaacgtgttaacccgttctttcttgctggagtatttaggggcaagcaaagaaaccgccattaccacacctgcagaaatgtggcagattgattttactgcaagactttctggcatcgatgaaatgcaacgcctagttaataccgacagttacggtgaggcctctttttttgatgatgcgtttttagtagctaagacagggaatcaatattttgtcacaaaaggtattggatacatcggtggtttacgagcggaattaatcacaaaccaaaatatcaccgtgcctgcggaaaataccaaagtttatgctgatgtgagttaccagggcaatattaccagtcgttggcaaactcagattcaactcaccgtcaaacctgatttaaaaaactatattgataatgcaggttttgcgcattttgtgtttgcgatagcgtcgatttcagcggacggaaaaattaccgatttacgccctaaaggaacactggattttcagcaattagatgatgcgttaaagaaacatgctcagtctcgtaatcaccctgatgcaacattaacggccaaaggatttactcaactgacggataaaacgggcactagtcaggcattagccccaacacaaaaattagtgaccgatttacataataacgcaatggcatcagcaaagtcggctaacgacaatgccaatacgcgattaccttcaacaggaacggccgttgcctcacaaaagctggcgactccgcgcaaaatttcgggtgtcctttttgatggcacaaaagatattactttatccgcaagtgatgtcggagcatcgacacctgcacaagtgaatgaagccaaaaccatggcaagcaatgcgcaaaatacagcaaacagcgcagtaaccaaggcagataaggcacaaagtacggcaaacagtgcggttacgaaagccgacaatgcccaaaagaccgctaatgatggcgtgagcaaagccaatactgcacaaactacagccaataatgctaataacaatgccaatggccgtgtgcctaacacccgtaaagtgaatggtaagcagttaaatgcggatattaccttaaacgctagcgatgtgggggcatcgacccccgcacaagtcaatgaagccaaaaccatggcgaccaatgcacaaaatacggcaaacagtgcggtgactaaagccaatactgcacaaactacggcgaataatgccaataacaatgccaatggccgtgtgccaaatactcgtaaagtgaatggtaaggcattaagtgcggatatcaccttaaacgcgggcgatgtgggcgcaggactgaaatcaaccgcaaaccgttcggtaaatggttggtggaaatgtcctgatacgggcatcattattcagtgggggatcacgaaagtgatggataataattttccaataccatttcctaatgctgtttttagtttacaacttacgcatgggccaggtgcaaccaacgcacgctactacggcattcaaactataagtaagagttcatttagagcgtggactgattatgaaatgtggtcaacttattttttagcaataggatattga

SEQ ID NO: 296861 - DNA, 558 bp, Proteus mirabilis
atgcctgatttcaaggaacgattaaaaggcttaaatttgccgtcatggatgaacaaaggcgaacccgcaaaactgttaaatgcggtccgtaaattttggtcaggtgtttatgactggatgttatggccactcaaacaattggacgcagaaacttgctcagaagaattgttatcagtgctggcctatcagcgtgatattcaccgttttaaaggggagccattagatttatttcgcaagcgggtaaaatttgcctttattaatgcccgtgatgcggggtcggtcagtggttttattgccatttttgagcgcttaggcgtgggctatgtcgagctgttagagcgtcagccggatattgactgggatgtcattattttacgggtcagtgacggacaaatcgcaggcaaccccgatttgttgatgggcattattcgccagtatgggcgcacgtgtcgccgttatcgttttgaagtgatcaccaataatcaattagtgatgcggtttggttgggctgattgtgaatatcagacctttggcgcatcactgttacaaggagagtaa

SEQ ID NO: 296862 - DNA, 1185 bp, Proteus mirabilis
atggcgaataaacagcgtccacaaattgactacgagtcggcattaaaagacaacggcatgccgattactgccgatgaaattaatcagcaatttaacaacattgtgaaagaagaaggcttaatcaccaatacgtccaatatgtcaccgttttggcgcttgattaatactcttgtcaccacgcccgttcagtggctcaaagatgtcttgattaatttggtgttcaccaatatgtatctggctactgcatcgggttcatggctagaaatgtttgcctggggcgttaacctgcaacgtaagcccgccaccaaagccaaaggacaagtgcgtttttaccgaatcgcggggcaaaatagtgttacggtgccagcgggtactatcgtgcagacagagcgcattaatgggcagatttacagtgtggtgaccacggaaaccgtgacgattgaaaaagagtctgccctgattacggttgatgccagtgacgccggcggagcctttaatcttgcaccaggctattttcgtattcttcccgttgccgtcccaggcattgaacgggcgcaaaacgaggaaaattggttattggtgccaggtgcggataaagagagcgatgatgatttacgtgaccgttgccgtaatcaatataatttagtggggaactaccacactgacgcggtatatcaaggcatgattgccagtgtcgtcggtttgagtattgaccgcattttctttttgcatgatgcgcctcgaggcgcgggtaccgccaatgcttatttattgttagacagtggcgtcattagtcagccgtttatcgacaaagttaacgattatgtcaacacacaagggcatcacgggcacggtgatgatatgcagtgcatgcccatgcctgaaacacaccatgccattaagttaacggtatttgtgcaaaatctcgctaatttaaccgataacgagcaagtcaaattacggcaagacattgaaaatttagtgcgttgtgcgtttcgtgaaaacaccagttatgatgtgaaaaaaacatggccttactcgcgtttttcattttctaatctagggcgtgaaattcaccgccatttttccttggttgattccctgcaatttaatcaaacggatatcatcagtgaattgagtgtgccccgtttaaaatcgctgtctgtggagctacaagatgcctga

SEQ ID NO: 296863 - DNA, 336 bp, Proteus mirabilis
atggaacaggcgaaatatattgatttactgataacagagcgtgatttcacgctcaatgcgggctttgagccgatattgtgtaataaccgccaaagtattacgcaagatattgcgcatgcgattattgagagtggtttagccacccaattagtggcagaacgtagcccaaccttgcgcgctgatattcgtatgcagattgtgttactggttgaagatgatgagcgactcattccaggcaccattattgttgatgaagaaaacgtaaaaaaattatgggtgaccgtagacacctatgattttggccgtattaatgtcggggtgaattatggcgaataa

SEQ ID NO: 296864 - DNA, 2517 bp, Proteus mirabilis
atgagtacattagattttacactcagcatgattgataaagtcactcagcccttgaaggccgtgcaagcaggtgtgactcaatttgctgaaacctcacaacaggcgtttaaaaatatcgcggtcggcggggcgggcttggctggctccgtctttgcgttaaaaaacgtcttagatcccgcgttagcgattcaagatgcccttgatatggcgaaagtcacgggtgttgatgatggtgcaatgaaaaaaatcaccgatgaagcactcactttcagtgcgcaatacggtaaatcggcagtgcaattcgttgagtcctctctctctatccgaaaggccattagtggcatttcagataatgaactcccgcagctaaccaaaatcagcaacattacggcatcagcactaaaaactacggctgaagaatccaatgcctatatgggcaaaatgttttctcagtttcaaggctatgccgacagcgtgggcaaagtgacattcgcggaagagctggcaggcaaagccgttattatgtcgcaaaccttcggcacgtcgatggctgaaattactgatttgatggaaggggcgcgttctgcaggtacgcaatttggtgtcggtattgatgaacagttagcggtattaggcgagttgcaacgttcattaggcacagaatccagtggcgcgtatgagtcgtttctgtcaggggcaacggacggggcgaaaaaactcggtctatcgtttgttaatgcgtcagggcaaatgctgacgatgcctgaaatgctggaaaagttacaaggcaaatacggcaagtccattgcaggtaatttaaaggctcaaaaagaaattgaggacgcctttggcgattccgcaattgttgtgaaatcactgtttaataacgtcgaggtattacgtaaaaatattaccgcattaggcggtgatgatggcatgaaacgtgccacagaaatggccagtatgttggctaatccgtgggagcggttattgtcgatttgggagtctatccgcattgccgtgggtatgacattgttacccgtgattgtgcccctgatgaataaaattgctgatatggggcaaatgctcgtgcgttggttgaagctattccccaatattgcccgtgccattggttatgtggtgacagggtttattgcatttacggccatgggggcgatggccaatatcgtattgggaattggtcggttgctgtgggtcggtatcttgccgttgtggaaaacgggcggagtattactgtccttgatgaaaggcaaatacgatttagtgacaaaagccacaggcttttttagtggttccctcgccaaattaacgagatttttaaacatcaccaaaatggcctcgttggccacagcattaggatttacctctatcacatggcccgttttattattaattggtttatttgccctaattgcgatcgccgttgtgaaattttggcaacccatcaaggcattttttaaagggtttatgcaagggtttttagaggcctttgactctatgtcgcccgttggttccatgtttgacgatattggcaacgcgttgggtgtggtgtggaaagcggtaaaaagtgtgttcaattggtttacagatttactcacatcgattgaattttcagaagatgcgctcaaccaaacgacaaatgcggggaaaatatttggtaagagtgtcgcgaaggctatcgaattattaacgttaccatttcgaatggtcattaaagcagtgggctggattgtgacggcttttattaatgcatcgaaatggatttctcaaacatggaatgacctaaaaaacaatatcatgactgcatggggggctactgttcaatttttagaacgcatctcccctgtcagagtgtttgccagcttttggaaatccattacccgtatcacgaatttgatgtatgcaggtattgccaaaggttgggatgcagtgtgccagtggtttttctcactgtcacctgtgcaagcctttattgagatttataacgcggtatcacaactgtttgccaatttatggaatggggttgcaggcggttgggatgcactgtgtggctggtttgaaaacttctctattagtgacacttttaacggtatttcagattcgattaaaggtgtttttgatgggctgtggaaatggttaagtgacagctttaacggtgtgtttaatgcagtggccagcaaattaaattatctgcctggcgtcaatatcgatttaaaagaaactgaaaccgccgtcgttaattcggcgttacccagtgtgccggttcaagctgatttgaatgccattaatcaaaaccaaccaaaccgccgttttgattatcagccgtcattgttaacagggaatgagttaaaaggcattaacaaaggtggtttgagtaaagagatcaataacaatcaaaccagcgttgataaccgcaggcaatatggaaatatcacgattaataacggcaatgtgatgtcacctgcggatttggaagagtggggcgcattgaattaa

SEQ ID NO: 296865 - DNA, 270 bp, Proteus mirabilis
atgagtaccaagaaaaacacaattactttagtcgtgatgggcaaagagctggtttttgaacccaatatgaccgcgtacaatggctggttaaatgcgatttctgccgacgataaagtggcgcctactgttacctatttgcgccgaattattgcccctgaaagcaaagaagccttaacagagattttaaatatccctggttcggcaatgcagttactggaaaaagtaaactcagaatatgcgccaaaactggatattgaactaaaaaactaa

SEQ ID NO: 296866 - DNA, 375 bp, Proteus mirabilis
atgaaacaagcaacggcgatcttctttgcgtttgttctggctttttcggcgggctggctggttaaaggttggcatcaagacagtctagaactggtcgcattaaaaacggcgaatgaagtcaataacgccagtttaaaggctcaacaagatttagcgagtcaatcagcaaggacgttagaaaataaattagaggaactcgccaatgtgcaaccgcctgaaatacgcaccgaaattattaagcctgtgttcactaatctttgtgttagtgatgattttgtcaggatgtacaacgaagcaatcgacagtgccgaacgtaccctatcaggaaaatctactgacaaaatgcccgacaacattaccaaagttaaacggtaa

SEQ ID NO: 296867 - DNA, 426 bp, Proteus mirabilis
atgatacgcggaattcgtaataataatccaggcaatatccgtcatggtgcttctaaatggcagggaatgtcagcagagcaaaatgatactcaatttgtgcaatttatctcgcccgaattcggtattagagcactgatgaaactattgcagacttactcaaaatacaacggtaagcaaaatgtgggttgtgggaaaatagatactattgaagaaattatcgaacgttgggcacctgcatcggataataatcacactgaaaactatatccaacgtgtgtgcaaagaaaccggatttaatcgccaagcgtgcttgaatctatacgacaaagagaccgttatttctttagcaaaagcgattgtgcaggttgaaaacggtgaacagccttattcagacaaggtttttgaaacggcgtttaatcggatatga

SEQ ID NO: 296868 - DNA, 294 bp, Proteus mirabilis
atggaagaacataacaaaacactgatttcactgattatcttaggggcattgatagctattggtaaaatgatgtcagggagtgaacctattacgctacgtctttttattgggcgcgttattttaggttcagcggtgtcattaatggcgggagcattactgatttggatccctggtatttcgccactggccattacggggttaggctcagcattaggcattgcaggctttcagttagtggaattgtggctgaaaaaacgaggcagtgatttattaacagggaagttaaaaaaatga

SEQ ID NO: 296869 - DNA, 453 bp, Proteus mirabilis
atgagcggaaaacggatttcggggcagtcgattgattttaatatcgacggtgatttagttcatgttgagaaagtcagtctctcgattacagacaatacaggtgtcgctcaaacgaatggtgtgcctgatggttatgtgaatggggatgtgtcggcggagggggagctagaattatccactaaatacctcaacgtcattacagccaaagcccgtagtgctggctcttggcgtgccattcctttagtcgatttgatgtggtacgcgaaagcggggacggaggaacttaaggttgagtctttcggctgtaaattaaacgtcaccgatattttagacgttgacccgaaaggcggtgccgtgatgacgcataaaattaaatttattgtcacctcaccggactttgtgcgtattaacggtattccatacttagagtctgaattaacagacaaactgtaa

SEQ ID NO: 296870 - DNA, 1119 bp, Proteus mirabilis
atgtggccaactgttcaggttaatcaacataaccaactgcaaggcgaaacaaaggaaattgagcgcattttactgtttattggtaaaggaaaaaccaatattggtaaaactattgcggtcaatacgcaaagcgatttcgatgaggtgttaggaacgccagatagcccgttaaaaagtaacgtgttatcggctatgcgtaacgcaggtcaaaactggtcaggttatgtgcatgtattagcagaagatgccgaagaattggcatttgttgacgcggtgatggatgcacaagcggtcgccagttgtgaaggctacgtattagtgggtgatgcgacgaaagccgttattcaatcggctaaatccttacgctcggatttaatggctaaacatgggcgctggctgtttgccattttgggtgtcggtgcaacgcaagacgatgaaacgtggtcaggctatgttgaacgattgtctgctttatcaaaaggggaagcggaatcctctatacaattagtaccaatgttatggggtaatgaaacgggagcattagcagggcgattatgtaaccgtgcagtgaccattgctgatagccccgcacgtgtcaaaacaggcgcattaaccgatttaggtagtgcgtatttaccgctcgacggtacgggtaaaagccttgatttagcaacactgcaagcattggaaaaacagcgttttagtgtgcctatgtggtatccagactatgacggcatttattggtctgacggtcgcacattagacgttgaaggcggtgattatcagtcaatcgaaaacttgcgtgttgttgataaagtcgcgcgcacagtgcgtattcgtgccattgctaaaattgccgaccgtagtttaaacagcaccccatccagtattgaagcccatcaagcctactttgccaaagtattacgtgaaatgtcacgcagtacacaaattaacggggtgagtttccctggtgaagtaaaaccgccaaaagagggtgatgtggttattacatggaaaaacaaaaataaagttgaagtgtatatcacggtgcgaacctatgaatgcccgaaagggatcaccattggcatcctgttagacacgtcattggagaatgaataa

SEQ ID NO: 296871 - DNA, 687 bp, Proteus mirabilis
atgagcattcaagggcaattaaacgcagaacaactaaaggcattaagagccaaattaaaagatttggaattgccacagaaaaaacgccagcggttactttggcgaattgcgaaatatggcgtaatcgtcgcatcaaagcgcaatatcagaaaacagagtaatcctgatggggaagcatggcagagcagacacggtaaatacaaaaaaaagatgctccgcaatatgccaaaaatgatgcatatccgcgaaatgcccgaaaaagagatggtccgtatttatcttagtggtggtaattatcgcaatggcaataaacctgttgacgcgggtattgtggggtatagtcaacaaaatggcatgacagcaaaaattagccgtaaaaacgcacaagccagtaatatctcgcaaggggcgcaagataaaaaagcgacgccaaaacaggctaaaaaattacgcgcacttggctataaagtgaaaaaagggaaacgctggaaaaaacctgccttaaaagaaattacggaaaatatgcgcttttttcaggcggggttgttaattcgtaaattaagcggtaaatccccacaaagttcgtgggaagtggatattccatcacgggtatttctcggtatcagtgatgaggattttattaagtcactggaacgacaattacaaggcatcggctacggtgcataa

SEQ ID NO: 296872 - DNA, 477 bp, Proteus mirabilis
atgacccgactacaaaaattgacggcgttcttacgtgcaaatttgcctgaacccgtatttgcaaccgaatttagtagtgagatggatgatattacatttaaacgcgctcacaatgatttaggcgaaaaacaatatcaaattttaacgcaagaatatgatgcggtaattgcgtgggggcgttggccttatcgtgaaattgatacacgttatatccccgtattaattgaggcatggtatcaagatttagaaacggattttaccgaacctgatttcgatgatgaaccaccgactattgatgttgatgtgattgacgatgatatcgcgatggttgtagtgaccctgaaattaagtgatgccattgtgttaaaagaagatgagaaaggcctcgtgccctttgacggtaaacgttggttattagctaatcctgaagtgttatttgctgaaaatattgatgtgatcccccgtggtgtgaaatga

SEQ ID NO: 296873 - DNA, 453 bp, Proteus mirabilis
atgttaaatggcgatggcattacctataaaaatgaagaactgacaaatgatgaattttggcctgatttaaatttaggtgattttcaaaaaagtcgcgctattcccgccaatatcgatgctgattttattgctgatgcattattaactacggtcacagagattaattctgaattaaaagacgtaaaaatttattggctatcaaaaggtgttaatcaggcaaaagacgctccaggcgcaaaaataaaaggggtgaatgccctttgtgcgcaatataaaaaagcggtgtatgccagggcaaaagccgatttgttgggtgaatatttgtcgattgtcagtcgagcgcccaatccacagcaagaaagcgacgaattacggtcacggttattagcagaatcaacttttgttattcgcaatatgaaacagttgcctcgcattacggtaaaaatgatatga

SEQ ID NO: 296874 - DNA, 207 bp, Proteus mirabilis
atggaattaattgtaaatattatcctactcattgtaataattccgataattatctgcttagtgctaatagatgcatggtttttgttattaatttggaattggttttgtggatcagcagatattaatttatcagtaccaattaattggggaacggttatttcactaaaaattattattttgttattgaaattaatttttagcaagtaa

SEQ ID NO: 296875 - DNA, 705 bp, Proteus mirabilis
atgctatcacctgctcaaagacacaggcaaaaaattgaaatgcaacaaaagctcgaacagcgacaggctattgctattgctgacggtgaaagtatgcatcttcaagcgcgagccattgagcgggatgtcaaacgactgcgagcactgaatcaaacgtatgaacgtgtggcaatgaaacgagacgaattattgcctatgtatctaccgacggcacaacgctatttagatgaaggcgaggtgtatcaaaacccgatttttgtgtattgcgtcatttggctatttgatgtgggggagttcgataaaggactggactgggcagatattgccatagcgcaaggacagcgcaccccagacaattttaaaagtggtttccctgcttttgtggctgacacaatactcgcatgggcacagttagaagcggaagcaggaaaccccattgagccttatttttcaaggacatttaagaatgtcacggaaatttggcgagttcacgaaaaaatacaggcgaagtggtttaaattccatgcgttagagttattaaaaggcgatgtgggcgatgtaagagctagcgcgattgattgtgtcgatacactgaatcaagccgatgcttatcttgccagggcgcatcaattaaacccgaaaagtggggttaaaacgcatcgtttacgtatcgcttcacgattacgggcattagagcaagagtaa

SEQ ID NO: 296876 - DNA, 1032 bp, Proteus mirabilis
atgtcattaaataatcaacgaattcgtgagcttttagatgcttatgaaagggctttttcggcatcttgtggtgtcgccaatgttaatcgatatttcggactgacagaccctaaagatacacagctacgagatgcgttattggagtctgccgaatttttgaaattgattacggtggctgacgttgatcaattagttgggcaggttgttccagtcggtaacccaggtctttttactggacgttcaaagacagggcgttttggtcgtaaagtcggtgttgaaggcaatgagtacaaattggttgaaacagattctggggcgtttatgccgtgggagatgttatcagtttgggctaatgcgggcggtgaaaatgaatttattaatcgtatgcaagcctttattcaagaatcatttgcccttgatatgatccgtattggttggaatggtaatcatattgctgaagataccaatgcagaaaaataccctaatggtgaagatgttaataaaggctggcatcaaattgctaaagagtggaagggaggctctcaggttctgacggatgctatttcattagatgataatggcgattatcgttcattagatgctatggcgtcagatttgattaacacctgcattccgccacagttcagaaatgatccacgacttgtggtcatggtaggacccgatttagtttcagcagaacaatatcgcttatatcaaggtgctgataagccaacggagaaaattgctgctcaaatgctaggctctacaattgcaggacgtccagctatggttccgccatttatgccaggcaagcgtatggtggtcactattccaacaaatctacatatttatacgcaacgtaatacacgccagcgtaaagcagaatttgttgaagaccgcaagcagtacgaaaataaatatttacgtaatgaaggttacgcccttgaacagccagaactttatgcagctattgatgagtctgctgtcaccatcggtaaagtaactgaaccaactgaaaaagtagaaggttaa

SEQ ID NO: 296877 - DNA, 837 bp, Proteus mirabilis
atgtcacaattaatgacaaattggctctgtattgcgactgcgggcgataccgttgatggtcgaattattgaggaaagttggattttagagtctgcagaactctatgaccgtcatttatatactgcatgtatttggcctgagcatgagcgctggtttggttcaatgggggaagtgttagcgctaaaagcggaacgcgacgaagaaggaacattaaagctttatgcgcaattgcgtcctaatcagcatttattacaagccaatcgcgatggtcaattgctctttacctcagcggaatttaccccaacaggtaattttcgggggacagggaaaacctatctcgaagggttaggggtaacgtgttcacctgccagcgttggcactgaccgattacagtttaataaaaacggtaagaagtttcgttatggtgcactaaaaccattagtgtttgatgaagtaaaacagtttaaggaagaaaagatggctaagggaaagggctggcgtagtatcttcaatattgaagagccaagtgttgatgatatacccgaagaaacaggcgctagtgatgcaatgcaagcactggctgaggcattatctgcacttgaagttcgtgttaccgcaattgaaacacaactaatttcaacagcagaaaaagtagatgatgttgaagatgatgtggaagttatcaaagatgctgttgatacacctgaatttaaacaattgaaagataacttatcttccattttaggtaaatttagcaagttggatacagtggcatcgcgtatccctgggaaaaatccacgtggcggtaaagaaaaacgctttgctaacctagtgtaa

SEQ ID NO: 296878 - DNA, 1800 bp, Proteus mirabilis
atgttttacattatggcgaactcacgatattcagatgaattaataggagtagcgaaatcgctgtacctgcgacgctatactcctgcagaaattgcaaccgaacttaatttgccgaatcggcggatcgtttactattgggctgaaaaagggaattggcaggatttactcagtcatgaatcggttttagatgcgattaatcgacgcattattttgctcagtgagcgaaataataagaccgtttttgaacaagaggaattagaccgtttaattaaccatcatatcaaattgatggcacaacaaaacaaacacgccgagaagctggcacaggcaaaagcacaaaatcaatctggctactcaaatgacaatgagtctgacgatggcgaaccaaggaagaaaaaacgctatcgtaaaaatgatatttccgaattaacaggagaacaatttcagcaatttgctgacaatatgctgtttggctatcaaaaacatttacgcaataacattaaaaaatctattcgtaatattttgaaatcacgccaaatcggagcgacttggtattttgcatttgaagcgctggaaaatgcggtactcacaggtgacccgcaaattttcttatccgcatcaaaaccgcaagctgaggttttccgctcctatattgtcaatattgcagagcaatttttcggcatcacattaacaggtaacccaattcggttaagtaacggggcagaactccgttttctttctaccaataaaaataccgcacaaagttattccggtcatttgtactgtgacgaatatttttgggtaccgaactttaaacatttaaatgaagttgctagtgcgatggcgacccatgataaatggcgcaccacctatttttctacgcctagctcaaaaacccatcccgcatacccgttttggacaggtgacgaatggcgcggaaccgaaaaagaacgaaaaaacgttaaatttccgacatttaaagagatgcaggacggcggacgagattgtcctgatggtcaatggcgttatgtcattacgctggaagatgcgattaaaggtggttttaacttagcatccattgataaattgcgtaatcgctataacaaagacacgtttaatatgttgtatatgtgtgtctttgtcgatagtggcgcatctgtctttaaatataacgatttagaaaaatgttgggttgatgtggggctatgggaagatcattttcctgatgaaccgcgtccatttggtaatcgtgaagtttggggcggttatgaccctgcccgttcgggtgatacctccgcctttgctattttagcacctccttctgtgcctggtgaacggttccgtgttctggccgtttattactggcaaggtatggcatggaaacatcaagcaaaaaaaatccaagaactttatgggcgttatcgcttcacccatatcggcattgatacgacaggtatcggtcatggtgtctatgagatggtgcaagatttcgcaccacgcgaaacaatggaaattcgttatagcctcagcatgaaaacccaactggttttaaaaatggtcgatttagtcgatgaagagcgcatcgaatgggatagggaacaaaaagaaatcaccgccagtttcttggctattcgtcgagacacaaccagcaagggcggtgctatgacatttgtggctgaccgcagtatggaaacaggtcatgctgatagtttttgggctatcgctcatggcgcaatcaatgaaccgttgaatactgataatcaacgtaaatcaaaatggatatttcaaaaggcatcgtaa

SEQ ID NO: 296879 - DNA, 1035 bp, Proteus mirabilis
atggctaagaaaaaatcacggaagaaattatcggttccggttaccgatacccctaaaaaaaatatgagtattattacactgggcaaacccgagccgatattaacaacgcatacggactatcaaaatatctggtatgacaatgaacatgaccattattcactcccgattgatagaactgccctcgctcaattagttaacttaaatgcccaacatggcggggtaatttatgcgcgtcaaaatatgattttgtctgattttttaggtggaggactgagccacgaacagctaaaagcatcggtaatgagttatctcatttttggtgatacagctattctaaaagtacgagattattgggggaacgtcattcaactgtttgtgttgccctcactttatcttcgttgtcgaaaagacaatgattttgttattttgatggaaggtgaaccgttagtttatccgcctgaagatgtcatttttatcaagcaatatgacccacaacagcaagtatatggtattcctgattatatcggtggtatacatgcagctctcttaaatagtgaggcgactatttttcgtcgtcggtattaccacaacggagcacatacagggggtgttttttattgtaacgacccttcactgactgatgaagtggaagcccaaatcattaaaaatctggaaaatagtaaaggaattggtaatttttctaccatgtttgtgcatattcccaaaggcgatcccgaaggaattaaatttatgccgattggggatatttcagccaaagatgaatttaataatgttaaaaatatcagtgctcaagatattttaaccgcccaccgtttccctgcgggactggcggggattattcctggtaatgttggcggactgggtgacccaataaaagcccgcgaagcctatcgacaagatgaagttatccctgtgcaacgtatgtttgagaatgccgtcaatagtgaccctgaaataccgttacatttgcatattaattttaagaaagataacgaccgtttgggtgcagaatga

SEQ ID NO: 296880 - DNA, 255 bp, Proteus mirabilis
atgaaagtgatgaaagtcctctgtcccgcatgcggtgaaaaggcaatcataagaacaacaaatagaaaacatcgccaatttgcagacctttattgtcaatgcacggacttagaatgcgggatgactttcgttttaaacgtcacttttagtcacacgctaagccctagtgcgaaagacgtgaataaaatgattgataaactgctaccggataataaacaaatggcgcttgatttactcaaagcgcccattgcttaa

SEQ ID NO: 296881 - DNA, 183 bp, Proteus mirabilis
atgacagataatataaaaagcatggaagcatttgaaagaattgcacttatcgcaaaagtaggcagttttgattctttcacatcacaggaaaaagatatcgttttatcattaatatttgagttagccgacaatgccagagtggacttattggaagaaaataagccacatagtgtggctcaataa

SEQ ID NO: 296882 - DNA, 213 bp, Proteus mirabilis
atgtatagatactgggttttattttatttattgatatcaatagttctttttatatacagaactataaagtctaaaaaaagctatcatgaaaaatatagcttaggttcagcgatagattattccatgctatggccattttatattttgatagcattctattttttccttgcagataaatatcgtaaatttattggtatgagcgaggataggtaa

SEQ ID NO: 296883 - DNA, 2118 bp, Proteus mirabilis
atgactagtgcggtggagaataacagcgacgtatttatctcaatgcgtcgccaaaaagaagagtttcagccagggctatcgccaaaagcgtccttggctgaacgcattatgtatgatgcaaacccgtttgatattgaattccgtaatagcatcttaggtaatgtgccagattcattggcgatttattttgctacccgatattcaaaaatatttaaaagtgggaaaaaaaatagtaggcgtcttgctaatacatttttacgcaaatttgcacagaatgtattaccaagatacaaccttgttttatcaaagtatcaatttgatggtgttacatcaggttatgattttttccctgaaaaatacgtcgaacaaatttctaacctacacacgttagaccgtggaaccatcaaagagctggcgaacggtatcgctcgctatcttacatctacatttactgaattttgccaacgtgctgattatgagaatgaatcagacggggctaagttcggctacaagaaaataagtaagatcacttcacaaataggcactgtgccaccgtactggaagcagttcacgcaagggcgtggaataacagaagggcaaatgttatcaggcttattacgcatgatgtctgataagtggtggtatggacgtttaaagcgcatgcgcgatttgcgtgctgaacatttggctattgcagtcgggcaggtgcaaaaaagtgcttccccttatatttcccgtcgtgctttacatgagtggatagaacaaaaaaaacgtaactgggattatattaaaagtttcgatttaactaatgagaatggtgagcgtgtttctcttgaagaaatggtattagccagtgtttctaatcctgcggttcgccgttgcgaattgatggtgcgtatgcgtgggtttgaaaacatggctaatgaaatgggttatgttggtgagttttacaccctcacagccccatcaaagtatcacaatgtatacagtaagggcggtttcattgaacaatggaacggtgcctcccctcgtgatgttcagaaatacctatgcaaagtttggtcaaaagttcgcgctgaatatgcccgtgaaggtattcgccctttcggttttcgtgtcgtagaacctcaccatgattcaactccccactggcatttattgttatttgttcatcctgatcacgttgaaaagttgagaaagatttttgcggaatatgcccgtgaagaggatgcctttgagttaaaaaccaaagaggcaaaagaagcccgcttttatgttgagcctattgataaagaaaaagggtccgcaacgggttatatcgctaaatatatttctaaaaatattgatggttacgcaatggatgacgagatagatgatgaaacggggcagaaatgcaaagacatggctaaagcggtttcagcatgggcgagcttacaccgcattcgtcagtttcagcaaatagggggtgctccggtgtctgtttggcgagagttgcgtcgcttgccaggtgatgagcaaattctagcaacggaagatatggacaacgtgcgttttgcgtcagatgtaggcgattggtatgcctacaccgagttacaaggtggtgcgacggtaaaacgccgagatttaaccgtgaggctttcttatgaagtcaccgaaatggggaacgaatacggcgaagatgtaaaaaaaattaaaggggtttactcaccgcttgcgagtgaggactctttctatcttacccgcaccgctaaatgggaactcgttgctaaagtatccacgtctgttaaagggagtggtttggcttttgatggcgcgattagcgccccttggagttctgtcaataactgtacgggggaaacccgaacgattaacgatgaagaaaagggggtaacggaaattttagataatttcaggtcaatcggacatgaaataaccctagaagatgccaaaaaaatgagaaatgggtccggaatagtcattgatgatattgcatttagatgctttgacgatggttctttgataagaacgggcacgacacaactgaaataccgtcaattccatgaaaggaaagcgcgaatttttaacaaagtcaataaattaaggagaataaatgtatag

SEQ ID NO: 296884 - DNA, 252 bp, Proteus mirabilis
atgagaacatcaataccaacccccgtttttatgcctgcgaaaattgctaataacgaacacgctcttgttttagattccacattagcgttggcgcgtaacgaacaaaagcaagtctgtgcggatagatatgcttcccgtattcgtaaactgtctagtttaattattcaaaataaaatggattacgccgacgttgctgaactgttggaaagtgaagcatcagagctagaacgtcaagcgcaagaactggtttga

SEQ ID NO: 296885 - DNA, 348 bp, Proteus mirabilis
atgtatcagaatcaagttgaaaaagaacaaagagcttttcatattccagttgctcaacgtgttgatggattaaatcataccgctaaattacgttctcgccattttggtttacaaaatgaagaattaaaacgcttcttttttgatatgcgcgatagatttgatgattgttatcaagaaaataaaaaattcttaggcgtcattttatatatggcaggtattcccaaagaaagacatgatttaaattttgaagattttaaaacatcggaaatattcgacattattaaagctattaatcatatcaaagccgttacggcattattacctaaacaattagcattaccgcaataa

SEQ ID NO: 296886 - DNA, 510 bp, Proteus mirabilis
atgtttgattatcaggtttccaaacaagcgcactttgataatgcatgtcgtgctttcgcaaatacccataaaggggatttggtgcaaatagctgaaagcatcggcatgaacgcccaaatgttgcgtaacaagttaaaccctgaacaaccgcaccagttaacgtgcattgatttaatgaaactgactgatgcaactgaggacgcctctatccttgatggtgtcttagaacaaatgcaatgtcagccgtcagtgccagttaatgaagtgtgtgattctaatgtacctgcttatttactaacggcggtcggtgaagtggggaagttagcaacaaatacagtttcaggcggtaatttaaataatgcacgtgtcgctgactttaaacgttctgttaatacagcaattcgttgtttaacgttggcaggcataacactatcggcaagattacatactaatccggcgtttgcctgtgcagtggatgcagtcgctaatcttagcccatcaatgatgtga

SEQ ID NO: 296887 - DNA, 231 bp, Proteus mirabilis
atgcgacctaatattacaatcaacataaacacgccttatcttacaattgatgcatttagcaaatgcactggattacctaaatcaaccattcgagacatgatttctgatggacgtttgcctgtacgcgctaaatcaattgatatgaaacggggaaaagtattaatcaatatgcttgccctttatacagatgcatcagaaggttgcaatatttcacttcaaccgaattcgtaa

SEQ ID NO: 296888 - DNA, 591 bp, Proteus mirabilis
atgaaccagccttttgactttgtgttctgtgaaaacagtggcgaggtgttagatagaataatagaagcctatggttttacttcaaaaataatgctagctgaacatttcaatatgggagctagcggtatatcaggaagatataaacgtaataatttcccagctgatatggttgtacgttgtatgtatgaaacaggtgctaatttagagtggttagcatttggtgaaggcaaaccgtttaaccatgaaaaactagataacttaaaaattcctaactttcaactaaaaaacggacaactcatcccctcagaccatatcatgtttgataaagtgatttttcccaatcaatcccctttaccatcagagcctatatctatccaagatggaaatagttacttcattattgataaaaaatataacgatgttttcgatggtaaatggctcatcgaaattgatggaaaaataagcattagagaactgactagaatgcctctgcaacgcgttagggtttcaggtattggaatggcttttgattgtgaaatttctgatatagaaattcacggtcgagtaattactattattgaaaatcagtaa

SEQ ID NO: 296889 - DNA, 954 bp, Proteus mirabilis
atgaaaaagattttttttgtgctaaaaatattaatacttttatttctaactttattttttattactggtttaagtcttactttttcgccagaaatagaaaataaaggtgtatctatatttatgttagttgttaatggtgcgttaattataggtttatcacgcatttggtttttcaataagaaaaacactacaataaaaacaaatatatctacagaaaatacaaactctcataataaagaaataaaaacactccatgacgccaattttgttatccggacaaaagaatcaatagaactacctaagatagccggaagtattcatacagaagataaaacaaggactgttattgctgacgatgtaaaaacttttgttatgaaaaatggtaaatctcttctatggcaaggtataactaatcaagcatcgtttagaatcagagataaaactgataaaatctatggcatatttacacgattatatatatatgatgatggtgaattctatttagaacttacagaccccagcactggtgaagcaacttatattcctgaaaaagaaatcactacagtaataactatcggctcatcaagatatgactttaaagatctttgtaaaaagaaatttaaattagatttacatgaactttttgaatatgcgaaagacattagatacaaagctaaagaaattaaagtaatagctgagtttcctcctatacaaacaacatttacctatttatctaattcaggaaaaattagaagaaccgtagatataaatcaatacaaaaagaacagttatggtgacgagtatgttgctggttattgtcatgtaaggaatgagcatcgaacgtttgctgttagaaggattcaaacgatgatggcaagtgaaggtcataaaaaatattattttcatgattggctaaaaaatgtagttggtataaacaacgatggcaataaataa

SEQ ID NO: 296890 - DNA, 1056 bp, Proteus mirabilis
atggcaataaataaacaaccagatggtcgttggcaagttgagctttaccccaacggtagaacagggagaagaatcagaaagctatttgttactaaaggtgaagctgtcgcctacgaacggcatattttagagcaaaccgtagataaaccttggctaggtgaaaaacaagatcgccgaaaactaacagaactgattgatacatggtatcgagctcatggcgtcacgttaggtgatggagaaaaacggcggtcattgatgatgtttgcctgtgatgccatgggagatccattagcaacagagtttacagctaagatgttctcatcttatcgtgaaaaacgattaagtggcgaaataacaagaactaacagattaaaaacagttactcctcgtactgttaatttagaactcgcctattttagggcaatgtttaatgaactcattcgccttgatgaatggatgctagaacacccattagccaaagttcgttcttataaaactgacgaacaggagatggcttttttaaccaatgacgaaataagactattattagaggaatgtgagagaagtacatctaccgatttaattcatgtggttaaaatttgcttagctacaggggctagatggtcagaagctgaaaatctaacagcaacacaaattagaaataatacaattactttcaccaagacaaaaggaaagcggaatcgttctattccagttagtcacgaactaattgcagaactaccaaaaggtagaggctcaaagcgtttgtttacatcttgctattccgcatttcgttcagcattaaaaagaacaggtatagagttacccgaaagacaatcatctcatgtgttacgccatacatttgcttctcattttatgatgtcagggggaaacattttggtgctacaacgaatattggggcacactgatattaaaatgactatgcgatattcacattttgcccccgaccacttaaatgacgctctaatttataatccactttcacgactaaatattggcgacaaatcggcgacagaaaatcataaccatcattaa

SEQ ID NO: 296891 - DNA, 435 bp, Proteus mirabilis
atgggtgccgcattgttggtttggctccctagcaccttaccagccaataaagaaaatgccccagtcgccatcatggcggtatttttcaatacgcgtaaggcaatctcggtgcctttttcttctttcggtggggtattatctgccgcaattgaggctaatagtacgggtgacggtaattttcccgctgcgcgagcggctcccttgcctttgacacgtacatttttcgagccagtatcgatttcaccatcagggttacttagcccgaacaagctatcgatcccatccgcgacccaatcagcggcatcatcaatcaatccaccgatagtaaagcccgccgccagccctgcaccggcaaaaatggccgcaccggcggccgttgccataccgcctgtcccaatggtcagcgccacagcggccgtccctatcgcggcataa

SEQ ID NO: 296892 - DNA, 420 bp, Proteus mirabilis
atgaattatcaattccaagaaggtgctatcacattaccggatgaagaatatcaagacaatagtcttaatatgctgcgtttccctacgcgacaaggcagtatttctattacgcgtgatgtagtggctccagagataaccctcaatgactatctggctggacagttgtcggccatcaaacgtgaaatgaaaaatgcggtggtaaaagcacccacagattttcgtaccgaaaaaggagttacgggctgtgaaatctattgtgaaaccaaacaaaaagggatccctatttatcagtggatcgccgcttttcgtctcgaaaataaaatagtggtgttgacttactgccaaattaaaccgttttccaatactgagcaggcgcaatggcaagcgttaagagacagttttacgccatcgcccaattaa

SEQ ID NO: 296893 - DNA, 2193 bp, Proteus mirabilis
atgcttagcaaagatccgaaatcaacgcccattgacccggtatccgttttaaaagatgaagccatcaatcaagtgaaaaatagggtgcaatccaaagtgaacgaaacgctatcgacacccacgcaaaaggtggccgggatggcctcagcagaggcctcgctcacgcaatcagccagcgcatcggccaatcgcgtgactgctcatcccctgatccacggtggcggttttaccggtggacaaacattcgctgaaaaccaagcactccaagcggcccatggggcgttacttgatgcattaggcatggacagcctcgaaagtggtttggtgttcacttgcaccattggtggattgcctgacgacacctttcaaatcaccgaatttaatcttaccgaaggattatcctcgctattttcgctgtctatcagtgcggtcagtgccttaccctttatcgattttcagcgccatcttggcttagcctcatcattaacggtcaaacgcgacggggtgttgatccgcaaagtcaacggtatcttagccggggcagtacaaggcaataccgacggagtgaaaacgtggtatcacttcgatatccgccctgaaatgtgggtgatgaccctcaatcaagacagccgtatttttcaacatcaatcggtgccgaccatcttaaaaaccttattggatgaggcccatgttaaagcggattgccaattctaccgtgaagatctacaccctgaacgtctctacaccacccaaaaacgcgaatccgcatttgatttttggtgtcgactggcgtttgaagagggcattaacttctggtttgaagaagaacaactgttttacagcgatgaacatatggggatgacggcgggtattcacctcacctataacccgcaggccgataccgatatcagcgatagcactgccatgacttggcaatatggcgaatatttgtgtgtggatgaaactatccataaagacaacaactttgtgcgtccttcttatccgttgtctcatgaaaacaaaattgagcaggggggacagcacagtgtgtttgaaagttatggtcgttttcaattagacgatgaaggtcgacctctgacacaggtgcgctttgagcaattacgtaacggcagcaaagtggggcaagcgacaacaaactgttttgcactgatgcccggcaaaatctttaccttatctcagcatccccatcagccgatgaatgatcgctggcaagtgatcagcgtcagccatcatggtgtacagccactggcggacaatagcgggggcgaaggcacacaactgtcgaatagcgtctcctttattccgggcacgcaagagtggcgccccccttatcgttataaaccgactgccgacggcgatgaagtggcgacggtggtggggccaccaggggaagaaatctacgtcaatgaatatggcgccgtgaaagtgcattttcattgggatcgtcggggaagtgccgatcacagtgcctcctgctgggtacgggttgccatgggttggagtggaaatggctatggtttttctgcggtaccgcgcatcggcacgcaagtgctggtcagctaccttaatggggatatcgacaggcccatcgtgacgggatgtacttatgatggtcgtaacgcaccaccgattaagttcccagagaataagacacaaaccactttccgtagccaaacccacaaaggggaaggttttaatgaattgcgttttgaagatgcgggcggtaagcaagaggtgtttcttcatgcgcagaaggatatgaataccgtagtccaaaacgataaaggaactacggtaggcgccaatcatactgaaaccgttatgcaaaaccaaaagatctcagtacatggtacgcaaactacggcggttcaagcggatcaaaaaaatatcgtgtttggtaagcagcattcaatcgtggatggtgaagtgttgatcgcatcagcccaaggtattcgtttaattagtggcaactcggcacttcaattaaaccctgacgggactatcaccttagtgtgtaacaactttgatttttacggtcacggtagcggtcggattggtactggtgagttattagatctgaatatggacggggcaggtcccggaaaccttaagatggaaccagataccagcactatcgctcaagcgaaagatcagtttttccctaaaaagtaa

SEQ ID NO: 296894 - DNA, 519 bp, Proteus mirabilis
atgccaactccttgctatatttccattgaaggaaaaactcagggcaacatcactgcaggcgcgtttactgcagattctgtcggcaacatttatgtacaaggtcatgaagaccaaatgttggtacaagaattttctcacgtagtgacggttccgactgatccgcaatcaggtcaaccttctggccaacgtgcgcataaaccgtttcgttttaccgtggcattaaacaaagccgttcctctgctgtataacgcactggcttccggcgaaatgctgccaaaagttgagttaaaatggtatcgcacctcggtagaaggtaaacaagagcacttctttaccacgacgctaactgacgcgactatcgtgaacatcgattgccaaatgcctcattgccaagatcctgctaaagccgacttcacgcaacttatcgaagtctccctctcttaccgcaaaattgactgggagcacactgttgctggaacgtctggtgcggatgactggcgtgcgcctctcgaagcgtaa

SEQ ID NO: 296895 - DNA, 1479 bp, Proteus mirabilis
atgtcactaaatgcagaagctcaagagcaacaagcccccgcatctacaggctctttgcttgatgaaattatggctcaatcacgtatgtctccagaaacagaagcatacgatattgccaaacaaggtgttgctgcttttattagtaatattttcgccagtgaatctgaagaccaacagatcaatcgattattaatcgataaaatgcttgttgaacttgataataaactaagtactcaagttgacgaaattcttcacgcgcctaaatttcaagaaattgaagcttcatggcgttctttaaaattactcgttgatcgcactgattttagagaaaatattaagatcaatattcttcatgcaactaaagaagagttattagaagattttgaattttctccagaaattgttcaatcaggcttctatcaacacgtctactcttcaggatacggccaatttggtggtgaacctgttgcaacagttattggtaactacgcctttaacaatactgcgccagatatgaagttaatgcagtatgttagtactgttggtgcaatggctcacgcgccattcctatcatctgtttcacctaatttctttggtattaatagctacgctgaactgccggcaattaaagatctaaaatctgtttttgaaggccctgcacatactaaatggcgctcactgcgtgaagcagaagattcccgttatttagggttaacagcaccgcgtttcttattacgtttgccatactctccaacagaaaaccctgtaaaaatgtttaactattcagaaaatgttaaacaagaccatgagcactatttatggggtaataccgcattcttattagcaagctgtattaatgatagttttgcaaaatatcgttggtgtccaaacattattggcccacaaagcggcggtacagttaatgatcttcctgtgcatatttttgaagcgatgggtgaattacaaactaagatcccaactgaagttttagttaccgatcgtagagaatttgaactagcagaagaaggctttatcacgctgaccatgcgtaaaggcagtgataatgctgcattcttctccgcaaactcggttcaaaaaccaaaagtcttcccaaatactcctgaaggcaaattggcagagactaactataagttaggaactcaattgccatacatgtttattatcaatcgcttagctcattatataaaagtattgcaacgtgaacagattggctcatggaaagagcgtcaagatctggagcgtgaactcaatatttggcttaagcaatatgtcgcagatcaagaaaacccaccagcagatgttcgtagtaaacgtccattgcgttcagctgaaatcaaagtacttgatgttgatggcgatccaggttggtaccaagtcgctattcaagttcgcccacattttaaatatatgggtgcaaactttgaattatcacttgttggtcgtcttgataaagagtaa

SEQ ID NO: 296896 - DNA, 2724 bp, Proteus mirabilis
atgatccaaattgatctctctactctcgttaatcgattacacccaatagctaagcatgccttagaaagtgcagccgcttactgtgtaagccaccagcaacctgaaattacgattgctcagtttctacaaaaactgatagaaacgccattaactgacattcgtatgatcagtcaaaaaagcgcattagatattaatgcgttatcagagttattagatatcgacattccgccacatcaagttattacacaaagttatcctagtttttcacccttattagttgaatggatgaaagatagctggctattagcgtcaactgaactaaatcacagtgaacttcgctctggtgcattgtttttaactttactacaaatgcctttgcgttatcttgcgaaacctgttgccgatatgcttgcgcagattaaccgcgaccaattaaaactcaattttgatcaatggactgaaggctctgctgaatcgccttttaacgaaaaaacagtatcagaaaaaggtaaccttgccgctgattcattgttagcgaaatttactcataacatgactgaacaagcgcgaaatggtgagttagatccggtcttatgtcgcgataatgaaatcgacttaatgattgatattctgtgccgtcgccgtaaaaacaatcctgtagtagtcggagagcccggtgtgggtaaaagtgcgttaattgaaggactagcactacgtattattgccggagatattcctgataaattaagaggttgtgaacttcttactcttgatttaggcgcattacaagcaggtgctgcagtcaaaggcgaatttgaaaaacgctttaaaggcattatgcaagaagtcactcaatctcctcaccctatcattctatttattgatgaagcacacaccctcattggtgcaggtaaccagcaaggaggcttagatgtttctaatttattaaaaccggctttggcgcgtggagagctacgaactatcgcagcaacgacttggagcgaatacaaaaaatattttgaaaaagatgccgcattagcgcgccgtttccaattagtgcaagtcaaagagccatcatctgcagaagccattatcattatgcgtggcttacgtagtatctatgaaaaatcccaccatgtctttattgatgatgaagcactacgagccagtgctgaattaagtgaacgttatatctctggacgtcaattaccagacaaagccattgatgtattagatacagcctgtgcaagagccgcgattaatctatcttcgccaccaaaggcattatcctctttgaaaacagaactccatcaaatcaatatggaaatggatgtattacaaagagaacactatttaggtttagatgatcattctgagcgtcttgaaacgttagcctcacaagcaagtgctattgagcaacaagcaactgatttacagcaagcatgggagcaacaaaaagagcttgtatctcaaattattacgttacgagcaacattacttaataatgctaccgaagcgactaatgacgatgtcgcaaatgatgttgcaaataatgaagtggtaagtgatataagaacttatagtgaagcagaagatgctgaagataatgctgaagataatgatgaaaaaatagcaacacagcccccctgctcatctgaagaattaaagcaacagttacaacaattagataaacaacttgctcagttacacgacacgcatttactggtttcgcctcacgtcgataaaaaacaaattgcggcggtaattgctgaatggaccggagtaccattaaatcgattatcacaagatgcattatcaattgtcactgagttgcctacctacttggaagagagtatcaaaggccaatcattagccattcaatgtttacacaaacatttacttacagcgcgggctgatttacgtcgaccgggtcgaccgctgggggcgttcttattagcaggtcctagtggcgtgggtaaaacagaaacggttatccaaattgcccaattaatgttcggtggcacacaatatctcacgactattaatatgtctgagtttcaagaaaaacatactgtttctcgccttattggttcacctcccggttatgtgggatatggtgaaggagggatcttaacagaagctattcgtaaaagaccttactcagttgttttactcgacgaagtagagaaagcgcatcctgatgtgctaaatctattttatcaagcttttgataaaggagagatagccgatggagaaggacgagtcattgattgtaaaaatatcgcatttttcctcacctctaatttaggtgatcatgtcattactgcttacgcggataaaccggacgaactagaagatgcactctaccctgaattaacaactttctttaaaccagcattacttgctcgaatggaagtgatcccttatttaccgttgcctgcagaggttttacgacaaattgttgatggcaaattagctcgtcttattaacctgttaaaacagcgtttcaacgcagaaatcaatgtagaagagagtgttgctacggaaattttacgcagagcttctcgtgctgaaaatggtgcgcgtattttggaatctattattgatggtgcgttattgccgcctctttctttattacttctacaatatagtgcacgtaatgaagctatctctcatattcgcttagcgactgaaaatgatgagtttattgcggaggttaattaa

SEQ ID NO: 296897 - DNA, 651 bp, Proteus mirabilis
atgaacgtattgaaaatctttttctgcacattactccctttactcttcacttcaccgggaaaggccgaaaataatcttaatcagaaaatgattgaggaattaactcaatgccgtttggaatcatctcagctaattcgtttagattgttatgacaaaattgcgctttcttcaacatcttcctccaatgcactgcctgatgttactcaaatgggtaaaacatggcgccaagcaacagagcatgaaatgaaacggacgggaaacagtgcaggttttctcgtctcagtaccagaaaccggtgattatcccgtattaatgaccattccagcgattggctttcaaccgcctcgccccatcttaatgctgagctgtattgataacattactcggatgcaaattatcctgccaacaaaacaagatgctggcagtgtgatggtttcaacggataaaacacaatttactgcagaatggtttttacgtgaaaacggttatgtattggaatcaagccgcggtataccgggcatagatgaaattaaacgcttgttaaatgctgaaagattgacgttgaaattatctaataacgaaaaactcaccttcaatatttcaggtatttcacaacaaataatccctttaagagcggcttgccactggtag

SEQ ID NO: 296898 - DNA, 1482 bp, Proteus mirabilis
ttgccactggtagaaatcatgatgaacaatacttcttatgcatggaaacaacagctactgacagcacttgatgaacagcaagtcagtagtgctgtcaatgataatgatgccgactgggaatatattgacagtgaaatgataaagttcggctcactcagtcatggccaattagatattaaagagatccagcgtcgctgtttacacctatttgaaacgcagactaaagattttcggatcttagtccatttattacgtactttacaacatgctggagagccaaaagaattagtattggcagcacagatcctaactgattttaatcgtcaatattggcaaagttgctacccaaccaatatgaaattgaaatcacgtttagccaatcaagttttgaaacggtttgaaacagcgagtgagagtttttgtcatgcagccaatagtgcgatgcgtgatgatattctaggctcgttcgcctttctagcgcaattttggcatgaacaaagcccagcacttgcagaacaaattgatgatctaagcagagattataatcgtattgaaaataacgatgcgccgattattgttgcttcacctgtcgagaaagaagaaaaagtacagactccgccggttagcgagtctatagaaacaccgacaaaaaatagcttaacaccaactattaacgttaaccatcaagatgaaagacaatggaaacaaacattacttcaagtagctgatgttatctgccaacaagcccctgaaagttcagtaggatatcgtatacggcgttatgcaatttggcacgctattacggtcttacctcaagctaatgctcaaggtaaaacgcctttagcccccgtatcaattgaccgtgtaatggattacaaagctcaactgactcaagcgtccattacgctattaaacaatattgaacagagtctctcactctctccttactggttagaaggccatatgttagctgcacaagtagcagctaaattaggttatggggaagtagaaagtggcattattgaagagttacgtatttttttagcgcgtcttcctgaacttgttaacttgcacttttcggatatgacacccttctttcctgaaagtgtacaacagtggttagagcaatataaccaaactgaaaacggtcaattgccaccatcgaatacaaatactgcgatcctagagcaagaagtcttgcaatgttatgaacaacaaggtcttgaagcagccctgaagcttattgaattaaaccttgctagcagatcagagcctagagatagattttatggacaattattgtctgcacaactatttgaattgtcaggtatggattatatggctacacagttataccaacaacttaatacctctgcctcacattattcacttgcagattgggaacccaacttaatacgacaactcatgcaaaaaatagacaaaaagacagaaataacaatgactatggatagggatcaataa

SEQ ID NO: 296899 - DNA, 3549 bp, Proteus mirabilis
atgaaattaccggttttctccatttcaaacattacgagttcggtaaaaaaactcttttttgctgataaatctaaaattgcctcctttttgctatttttattggcattacttcccgctttgctcattatttggatctggtggtgggggccaacatttcgttatcaagattccataccgtttagcgaggtcaccacacgttggttagcaaccgtcgttattgtattgcttgttgtgagttggattggtctagcaacatggcgtcgagttaaaaaattggaagcattaaaacttgatgtcgaattagctgtagttgatccggtaagacaagatcttgattttcaaaaacgttatttaaactattggaaatcacaatttattcgtcacttaaatggtcatactaaagcggtttatttacgcccttggtattttgttttaggtgctaaccaaagtggaaagcatagcttattaaaaaatacggtaaacccattagatattgcgcctagcgacaatattgttaacgaacaaaatattgcattaaatattcaatgtctattaaccgacaatgctgtactttttgtccctaatggtgatctattaacccagccggcaaatcaggctgataaacctcaactttatcaccgtttgtggggcgacttactcaattggatcaaaactaaccgcccaagacaaccaatgaatggcatcgtcttaactgtcgataccctatcgttattaaccaatagtaaggagcaaaatagtcagctacttgctgatttacaaatgcgtattgaagaaatacgcatgacatttaatagtcgcttgcctttatatatcgtcttaaccaagctagatctattacgtggttttgactcaatgtatcaatcattagatgttcaacaacgtaatgaagtattaggtgtttctttcaaccaaaaagcaaaaagtaattggaaaaaggaattaaatcatttttggtcacaatgggtaggccaaatgaacagcgcattaccagaaatgatgctacaaagagcagaaggtaaccagcgtagtgatctatttagtttcgtgcgccaaattgaagggttacaacattctgtatgcacattaattgatgcattgctcatcaataatgagcaacataatatctgtttaagaggggtttatttaacttctgcattgcaaatcggtcaaatcgatgatgtgtttagccaaacagcatccgaacaatatcatttaccgacagcacctcttactacatggccaattaatgatagccacccttattttactacccaattatttagtcaagtgctatttagtgagcctaatattgcagcagaaaaccattattgggttaaaaaacatcggactcgcctattagtcaccactgctgttagctttgtcggcttaatcgcaatttggaatggttggagccactattacgacaaaaactatcgtgctggagaaaacgttcttaatgaggtaaaagcattccgtgctattgagaacaatgctcagaaagatactgatggtagcctacaattaccggtgctcaatccattacgtgaagcaaccttagcttatggtaatcatcgtgataaaaatgtgctcttttctgatatgggtctttaccaaggtcaaaaagtaggcccacaagttgaacaagtctatttacaactactcaccgatcgctttttacctgcggttatgtctgggttgttaaatgaacttaacagtgccgataaaggaagtgaagataagttagagatattgcgtattatgcgcatgttagaagataaaagtggccgtaataatggcatggtagaagattttatggctgattattggagccaactgttcactggtcaacgtgaaaaacaactgcaactaaaagcccatttgcgctatgcccttgagcacacagattggaaacaagagcgtgaaaaagggtttgtttcagccactaaagcctttatgccttttgctggacctataaaaaatgcacaagcagagttaagtgtattgtcactttatcagcgtgtatatcaagccttacgcttaaaggctaatcaagagctttcagcgcctttaaatttacaacatcaaattggcccaagttttaatacggtctttacggctattgatgatgataaattagaaattccacaattcttaacgcgctcagggttattaaactattttatccgccaaaatgataaattggtcgagctaacattacttgatgcttgggttcttaatctaaccaccaacacacaatatagtgaaagtgatcgtaaagaaattcagcgtcaaatcagtgaacaatatcttagtgactatacggctcaatggcgtaatgccatgagcaatttagaaattcgtcaatttgattcaatacaagatgaaattaccgctcttgagcaaattattagtggtgaacaaccattacgccgagcgttacaagttctacgtgataacacggttattccaactattgatgaaaatttaccacttgatgaacaaaaaacactgatggctgagccatcttaccgtttattaacccgcttagatcgcgaatttactcctcaaactgagatattagtcagtaaccaaggggaaaatttacagaatctgaatcaaaaactaaatgacttacatcgttacctattggggatccaaaactctccagtgccggggaaagcggcgcttaaagcagtttcgatgcgcttaaacgataataatcgcgatgctatttttgagctatcacaaatggcgaaaacattaccagagccgcttaaccgctgggtcgatgagttatccgtacaagcatggaatgtggtccaaaaagaagctattcgttatatggaagttgaatggaatgaaaatgttgtcaaacaatacaatacttatattgccggtcgctatccatttaacccagcagctaaacaagatgttcctttaagtgaatttgaacgtttcttcaaaccaaatggaacattagatagcttctatcaacaaaatctgcgtttattcgttgagaataacttagtcaacgatagtgatagccaatcattgatccgcgctgatgtattagcacaaattgaaatagccaatcgtattagagaaaccttctttaatgcccaaggtaatttagaagcacaatatgctattgagccactgtcattaagtggtaataagcgtcgtagcatcttaaatcttgatggacaattgattgattacgctcatagtcgcagccatgtgacacacttggtatggccaaactcaatgcgttccaatattgaaagtaaactgactttagtgcctctttccggtgataaatcgccacgttcaatcagtttctctgggccatgggcacaaatgcgattagttgataatgcaaaactcatcaatatcaaatctaactcattcgatattcgcttcacaatcgacggtggtgatatgacttatcgagttatagttgatgaatctaataatcctttcttcggtggattattcacaaaattccgtttacctgaaacgctttattaa

SEQ ID NO: 296900 - DNA, 1356 bp, Proteus mirabilis
atgttgagtgcgatgaaatcagaaagtttagtgattaaaattgggggatctccacttgatacccctgaatttattgccctgaaaaccgaatttaataaattgagccaccctgctcgaccagaaataagttggacacttattgagtcactttgcttatccctatttaaaaatcatggtatcgacctacaaagcggtgcttactataccattgcaagattacaacagcatggtttaagcggttttactgaaggatgtgagttattagcaaatgttattgtgacttattgggatagcctgtggccggaaaagccaaatcaacgtacagaggtattaaactggtttaataccaaagccagcgctttattaagacaacaatcctatcaagcaaaagatctacgattaatctatcgttcagagcgcgcgttacagttaataatcgataaactggctaaaacaacttgggaaaaactgcctaaaattgaaaacttactgtggtttttccaaaacttagccaaacaaattgaaaagcaagaaaaacagacgcaacaagatagtgccgaacccgttagcgtaccgccattagtctgtattcaacaaccgtcgaaaacaacggacaaagcagcccccacttttgtgattgaaacgcctcaacccgcctcttctttcactgtagtagcaaaaaaaatgagtgcgacccgaggttttatatggggctgtgtgctcagttgcatactgtttttagccgttggatttggtgtacatctctatttaaaacaagagatgaatgcgattacttcaatacctgaaggtgcggctgccaaatggttgtttaaaccacagttaaatagctacgaatatcatttagcattattagaaaaacgttctcctctttctaatttacggctaattgatacgatgcaagaaaaagccaaaaacgcttggcctacagatgcagagcaaatttattttacacgtaattggcaaaatctttatcaaacgcgcttagagaatatgccaattaatgatagctggtctgaaaccgcgacattattacaacaactttctaataaaatagttcagcaagaacgaaatagaggcagttttacactctcttatctaaaaacggcaatttatgatattcaaaaacagcacaataaagttgagccaatcgaagaaaaactgcgacaactcgctgtacaaattgaaacagggcaacctatttctcctgcaactctcaataatattgataataaaattaatgggttattagctcgttattatgatttacaaaaacaagctgaacaacaaggtttaaaacccggctcatattcatcttttggattagatcatgagtga

SEQ ID NO: 296901 - DNA, 1737 bp, Proteus mirabilis
atgagtgaaattaaatatattaaagaaaagcagtacttacaaaaactgttcagtgagtatgcagataaagcgccacatttagcgagcgtacttgatcctcaagatccacaaacaagttatctcttagaaggctttgcttttttatctgctcgtttacaagataaaattgatgatgcttttcctgagatcacattacccctactgcaacgactaaattcccaagccattaaaggcctaccatcaacaacaattatccaaattgaccaaagtgaaattctcccctatcccatggagattaatgaaaaacatttggtgattggcgacaacggggcacaatttagtttctgccataatttcaccatcatgccttatagcattttggatagaaaaattactcagcatccaaaccactcttgtatctctcttgaaatattatatcgtggtgatgtggaattaactcaaacaaatgcacttaatgtttttttaggggaaaataaaaccacctcagacattttattactcgcatttagtcaatattttgaaaaaattgaggtggtacataacggtgaacgttatgaaggcgatcctcttaattatgcttttgaacccaaaattggcaatgactataaaatcttcccacagaaaaataactcattttctgcgccacaacgtttattagaaggtctttatttaccccatgttcatcattttattgagttagatataccacaaatagtgactcaattagattggaaacaacagcagcggtttgttgtgaatatctatttcagtcagcaacttcctttaactcaagaagagtgtaatcagagcttttttttaaactgtgctccagcgattgatagtgaagcaaaacatacacttttaattgattttaaaaagaataaatcaagttatttactccctattccaacccatcactatttggccgatcttgataaaattgagttatcactagagcctcatgagctagcgcgtggcatatactgtcatttttatcctacgacagaattaaccgccgcctctcgtttaatgccccaatttcataaagccattttctattcattaacaatggagaaaaatattactgggcatacactttattatttgaatttctttgataataaaggtgatcctatggtcacaccgcctagtttacattttgcatgtgtttatattggctttgaacaatataaaagaaatgagttaggtctattaaataaacacagcgaaaaaatgcctgatgcagtaaaaacgggaaatatcacattattatcatcttgttatccacctattgtaaataatcaccatttttggaaattgttatctcattacagtgctaatggttcaatgttaatgtcattagatactattaaacatatgatttctgattatattctttaccgagatactgataggcagatcactcgaaaatgtgagcgattattaaatggactcgttgaactaaaaacacatttatatgactatattttaaaaggtaaaccctatcgttgtttatctttatcgctattcattgacgaaacacaatatgaaaatagaggtgaagcttttgtctttactacacatctttaccattttttcccattctgtttatctgaaaatatgttattggaaatgtcagttacactcaatgatcagaaaaacaccacttggtatttatctccctcaccactaaggggctataaatcaatgatttaa

SEQ ID NO: 296902 - DNA, 651 bp, Proteus mirabilis
atgatgtatcacattatacctgtgacaaattatatgcaaaattgcacccttatctggtgtgatgataccaaagaagcggccattgttgatcccggtggtgatgtcgaaacattaattgcagaaattgaacaacgtcaattaaagttgactaaagtgctattaactcatggccactttgatcacgtagcaggaacagctcaaattgttgagcattttcatgtgcctgtttatgggccacataaagatgataacttccttattgaagatttagaacaacagtgtcgtatgtttaatttccccagtggaaaatcttttacgcctgatcaatggttaaatgaaggggatactgtcactattggtaaaaccattactttgtcggttttacattgtccgggccatacaccgggccatattatttttgttaatcaccaaaataaacttatctcgatgggagatgtattatttcgtgaaagtattggtcgtactgatttccctcgtggtaatcatgccgatctgatagcttctatcaaaaataaagtattaccactaggtgatgattatctatttatccccggccatggccctatgtctaatttaggccatgagcgtcaatataatccttttttacaagatgaaatgcccatttggtaa

SEQ ID NO: 296903 - DNA, 1716 bp, Proteus mirabilis
atggcgcaacaagcaattaaaagagcaataacgtattcggtcgtaataggtacacttctctcagggcataatgttattgcctcagaaagtgaaacaccaccgctattcacatcagaaacacctgcattagtacccgcattcacagaagatgtggcaacacaagatacattaaattcaccatcagtgagtaagcaggaagttagcactaaactacaatcttggttaccaagcgaatataaaccactttactttaagcaactcgtggatgtttatcaaagcaatgatttagcactgatttggcaagatgaacaaattacaaaacaactagagcagcaactggcagaggttgccttaactggaattcaaccacaatttggacgttggttaacgctattagaaacagcacaattaacgccagaagcacgagatattattttatctgacgcttttttaggttatatcagctttgttgaacagattaatcaatcaggaacaacactgttatatcgcgctgcgatacaagcattaccggcaccaactgtgcaagctgtcgagcatttccaactcaatctacaacaaaataccttagggcgctttgtcgtctcctttgcaccctcacacccttactatccattaatgaaagaggaagtgcgcaaacagcttcatcaagaggttatttggcccgtcatggaagggaaaaattcattaaagccaaaccaatcggcagaagaagttattgcattaagacaaatattgcgtaacttaaatttactgcctcaattggctgaaaatgagcaagaagtagcaacaacgatttatgatgagcctttaattgctgctgtaaaatcgtttcaagcggcccatggattagaaactgacggtattattggtagacagacgcgtaattggttaaatatgacaccaatacagcgtgctggaattatggcattaaatatacagcggttacgtttaaccccacctattggtgacactggaatttgggtcaatattcctgattactccctctatttttatgctaataatcaactgattttagattcaaaagtgattgttggtcgaccagatagaaaaacccccattatgagtagtgcgcttaataatgttgtggttaatccgccttggaatgtacctacgagtatgacgcgtaaagatatagttccaaaaggaaaggctgatcctagttattttagccgtaaaggttatacgatttattcagggtgggggaatgacgcctatccaattaatccttacgatatagattgggaaaacatctctgcggctaattttccatatcgcatttggcaagcccctgggccaactaactccctaggccgatataaatttaatatgccaaactctgaagcaatttatctgcatgacacaccaaaccacaatttatttactaaaaatatgcgagcaattagttcaggttgtattcgtgtgaataaagcggcgcaattagcgacgatattattaggtgatgcaggatggaaacaagatagaattgatgcagctttaaaacgaggttcaacacaatatgcaccaattccagaacgtatccctgtctatttatattatcaaacagcttgggtagcagaagaaaatgcccctcaatatcgagcagatatttataattatgaccaaagcattaataatgcaacctcttttttagagaatattaagaaatatttgtaa

SEQ ID NO: 296904 - DNA, 714 bp, Proteus mirabilis
atgcgtaaagtcacacttactcttagtgcaattgcgttggcgttaagtttaaatggcgcagcaatggcaaaagttcatatgccagaagttgttagcccaggggttactgttactgaacttgcacatcagcaaccaattaaatgggtttctgttgcagaaattgaaaaaagcttagaaggccaagcaccaatggcggtaggttttgatattgatgacactgttctgttctcaagcccaggcttttatcgtggtaaactggaatattctccaaacgatttcagttatctgaaaaacccagaattctgggaaaaaatgaacaacgaatgggataaattcagtatgcctaaacaagtcggtatcgatcttgttcagatgcacttaaaacgcggtgatactgtttatttcattaccggtcgtacacagactaaaacagagactgtgactaaatatgttcaagaaggtttaaatattcctgcagacaaaatgcaacctgttatttttgccggtgaccaacctggcgcaaataacaaagtaagctggatgcgcgatcacaaactgaaaatttactacggtgatgcagatgctgatatcgcagcagctgatgagctaaatatccgtgggatccgtatcttacgtgctgctaactcttcttaccagccgttacctaaagcgggacaatttggtgaagaagtggttatcaattcagagtactaa

SEQ ID NO: 296905 - DNA, 654 bp, Proteus mirabilis
atggacacaaagcgcgtgggatatactgttgttgatctatcccaatggggacgaaaagaacactttgaagcatttcagtcttttgctcaatgcacctttagccagacagttcaactggatattacttcattattaaaaaccgtaaagcaaaatgggtacaaattctatccgacatttatatacatcattagccgattggtaaataaacatgcagaattccgcatggcaatgaaagacggggaattggtgatatgggatagtgttaaccctgggtacactatctttcatgaacagaccgaaacattttcatctttatggagttactaccacaaagatatcaatcattttttgaaaacttattcagaagatatagcacaatacggtgacgatctagcctattttccaaaagaatttatcgaaaatatgttttttgtgtcagcaaatccttgggtaagtttcaccagttttaacttgaatgtggcgaatataaacaatttctttgcccctgtatttacaataggtaaatattatacgcaaggagataaagttctgatgccactagcaattcaagtgcatcatgccgtatgtgatggcttccatgtaggcagattactcaatgaaatacagcaatactgcgatgagggatgtaaataa

SEQ ID NO: 296906 - DNA, 4458 bp, Proteus mirabilis
atgattgaacgaggaaaatttcgctcattaacattgatcaactggaatgggttttttgctcgtacttttgatttagatgaattagtcacgactttatccggtggtaacggagcgggtaaatccaccaccatggcggcttttattaccgcgatgatccccgatctgactttacttcattttagaaataccactgaagccggttcaaccagtggctctcgtgataaaggattatatgggaaattacgcccgggagtttgttacgctgttttagatgtgattaattcccgccatttacgagctgtcgttggcgtacgcttacaacaagttgccggacgagataaaaaggttgatatcaaaccttttatgatccaagggctacctattgctgaaaatccaacagaaattttgacgcaagctgtcgatggacgccaagcacgtgttctaccacttaatgaattaaaagaaaaagtagaagcaatagaaggcgttgtttttagacaatttaactcgattactgatttccactctgtactctttgatttaggggttattccgaaacgtttacgctcagcaagcgatcgggcaaaattctatcgtcttattgaagcttcattatatggtggtatttcaagtgccatcactcgctctttacgcgactatttattacctgaaaatagcggagtaagaaaagccttccaagatatggaaggggcattacgtgaaaaccggatgaccttagaagctattcgggtcactcaatccgatcgtgatctgtttaaacatttagttaccgaagcgacctcttatgttgcagcggactatatgcgtcatgctaatgaaagacgagtacaccttgatcaggctctatctttacgtaaagagttgtgggatcagcgtaaagcgattaacaatgaagcttatcgctttattgaaatgggcaaagagttagaagagcaacaagcgttatcggctgatttggaaacagattatcaagccgccagtgatagacttaatcttgtacaaaatgcggtacgccaacaagaaaaaatcgatcgctatgttgcggatgttgaagaaatcacattccgtttagaagagcaaagtgaagttgttgaagaagcaacatcaaaaaaagaagagttggaagcgcgagttggatctgcggaagaagaagttgatgaactgaaaagtcaattggcagattatcaacaagcgttagatgttcaacaaacccgagctattcaatatcgtcaggcggtacaagcattagagcgtgcgaaagcacaatgtggcattgatgatttagatgaaaccaatgccgagctatgggctgaacgtattcaagcaaaaattcaatccatcacgcattcattactttctatggagcagaaactcggtgtttctgatgcggccaaaacgcaatttgatcaagcctataaattgatcacctcgattgttggggaagttgagcgtcaaaatgcgtggagtgcggctaaaagcgcattacgtgaatggtcatcacatcgccatcaagccgatcgtgttcaccctattcggatgcaattagctgaattagagcaacgtttacagcaaagaaataatgctgaacgtcaacttgcagagtttaataaacagtatggcaaaaatgttgagcctgatgatctatttactctacaagaagagctagaagcaaagattgaagagctgagcgattatgttagtgattctggcgaacagcgtatgcaaatgcgccaagagcttgatcaactaaagcaacaaattgaaaaattaagaaaacaagcgccagtttggtttgctgcacaagatgctttaacgcaactgtgtgaacaaacgcatcaatcttttgaaacaagcaatcaagttactgaatatatgcaacagttacttgagaaagagcgtgaagccacggttttgcgtgatgaaaccgctgctcgcaaacagcaaattgaagctcaaattgaacgattaagtcagcctagtggggctgaagatggccgattaattactttagcagaacgctttaacggggttttattatcggagatttacgatgatatcaccttagatgatgcgccttatttctcagcattatatggacctgcgcgccatgcgattgtggtacaagatctcggtgcgatcgaagagcagttagcttctttagaagattgcccggaagatctctattttattgaaggtgatccgcaatcctttgatgatagcgtatttaatgcccaagagatggaaaaagcggtacttattaaaagttctgataggcagtggcgctattcacgttatccagaaattccattatttggccgtgcagcacgagaaaaccagctagaaatattatcccgtcaacgagatgagctgtcagagctgtatgccacacaggcctttgatgtgcagaaaattcaacgtgcacaccatgcatttagccaatttgttgggcaacatatttcagtggcatttgatgccgatcctgaagaagatattcgccaattaaatcaacgtcgtaatgaattagagcgcgagttatcacaatatgaagagggcactcagcaacaacgtcagcattatgcgcaagccaaagagtcgctcaatttattaaataaactcattcctcaagtcaatttattattggacgaaacattaattgatcgtgttgaagagctacgtgaagagctttataacgcagaagagtcgatgcgttatttacagcgtcatgagaaagcattaactgcgttagagcctatagcctcgattttacaaagcgacccacaagagcatgatcaattaacacaagattatcaatacgcaaaagaagagcagcaacgttatcaacaacaagcatttttgctggtggaagtggttcagcgtcgtccacattttagttatagcgatgcggttgaaattgtcagtgaaaataacgatcttaatgaaaaattacgtcgtcgtttagaaatggctgaaacagagcgagcgacagcgagagagttatatcgtcaacagcaggcacaatgtgatcagtttaatcaagtactagcctcactaaaaagttcttttgataccaaatcagaactattaagagagcttgagcaagagatgaaagagactggcttgcaaattgatgcgggtgcagaagcgcgagccaaagagttacgtgatcaacgttatgctgcggtgagtgctaaccgtacgcgtattagccaacttgagcgtgatattgcgcttagtgaagctgaacgtgaaaatatggcgaagaaaattcgcaaattagaacgtgattatggccaaatgcgtgaacacgtcgtcagcgctaaagccagttggtgtgctgttatgcgcttagtgaaagaaaatggtatggagcgccgtttacatcgtcgtgactttgcctatctttcagcggatgagttacgttcaatgtcggataaggcgctaggtgcgttacgtcaggctgtggcggataatgaatatttacgggatgcattacgtcgctctgaagatgcaaaataccctgatcgcaaagtccaattctttattgcggtttaccagcatttaagagaacgtattcgacaagatattatcaaaaccgatgatccggttgatgctatcgaacagatggaaattgaattagcacgcttaaccgaagagctaaccagtcgtgaacaaaaactggcgatcagctctcgcagtgtggcaaatattattcgtaaaactatccaacgtgaacaaaatcgcattcgcatgctaaatcagggcttacaagcggtttcctttggtcaggttcgtggtgtacggttaaacgttaatattcgtgaaagccatcaaatcttactggatgtattatcggaagaagaagatagccaatatcaagatctatttaaaaaccaaaatctaaccttctctgaagcgatggcaaaactgtatcaacgcttaaatccacaggctgattttggtcagcgtatgccacaaacggtgggtgaagagctacttgattaccgtaactatcttgagatggaagttgaagttaatcgtgggccagaaggttggttaaaagcagaaagtggtgcgctatcaacaggtgaagccattggtacaggtatgtctatcttagtgatggtggttcaaagttgggaagaagaatcacgacgcttaagaggaaaagatatttcgccttgtcgtttgctcttccttgatgaagccgcacgtttagatgcgaaatctatcgcaaccctatttgaactgtgtgaacgacttgatatgcaacttatcattgctgcaccagaaaatattagtccagaaaaaggcacaacttataaattagtgcgtaaagtctttaatggaagcgagcatgttcatgtggtcggattaaaaggctttgggcaacaaagtgaaaaagataaacatttatccgaaaatattgcagatagttga

SEQ ID NO: 296907 - DNA, 831 bp, Proteus mirabilis
atgctgtttttgctcaaaaaatatcttggtagcctaatcatgccactaccgctgttattaataattgctttttttgcgcttattttactgtggtttactcgttggcaaaaaacaggaaaaagcgtactcactatcgtgattgtgttacttacgctgttaggcatgcaacctgtcgcagatactctattgatgccgagtgaaaaagcgtatcaagcacgttatgaattacgcgaaaactcaccacaagatgttaactacattgtcgttttagggggcggttttacttataatcctgaatgggctcctagtgctaacctgctaaataatagcttatttcgtgttgctgaaggcgtaaggctttattatcgttatcctaatgccagcttaatttttaccggtggtgccggcgtcaataaaataagtagcgccgaagtggctgcacaagttgcacaatcattaggtgttccagcagaaaaaacgatcgccctttctcaacctaaagataccgaagaagaagcgtatgaagtggataaacttatcggtaaacaaccttttttattggtgacctcagcaaaccatttagcgcgagcagaacgtttctttttagctagaggtatgcaccctattgttgcacctgctaatcagctagccattactaccccactgcatccttgggaaaaatataccccttccgcgtattattttcagcatagtgagcgagcatggtatgaatttatcggctcgatttggcaaaccataaagcctagcgaatcatctaatatagaggcggttgttgagaataaaaatgaagctgacaatggcataaaatag

SEQ ID NO: 296908 - DNA, 1254 bp, Proteus mirabilis
atgaaattaagaaatgcaataataattggcgtaatatacacaccatcaatatgccaggccgtagaacaaactagctataaatatatttctattaatcaagactcttcaacaatagttaaacctaatgaaattaatcctaaacaagcagaaatattaatagcaccaaaaaatcccaaaggcatttctcataataaatatgatacatttgatgtaactgatgctggcattattttaaataataaagaggttgccgctgagactattattaatgaagtggttaatggagcaacgtcattcttagcggggaatatcgcggtagctggcaatgcagctcatgttgttatagccaacccaaatggtattgaatgccataattgtagtttttcgaatacattacaagaaacgttaacaacagggaaacctgttatcaataataataatgatgaattaatcggctaccgcttagaaaaagctatcgctcctataaataaaggatataggggtggaaaatcaattgaacatattggaaaaattgtattcagtaacaaaaatgaccgtagttctagtcattcttttaataaacttaatatcatatctaataacattaagttagaaaacggctttatatcttctaaaggagatataagtatttattcaggtaaaagagatatagtaattaaagaaggtgaaagtatcttaaaacaagaatacgctatgcgctcaaatataaaaagaaataatctccccaatcagataatattaggtgataaaaatagtaattctaaagaacaaggtataatttcttctaaaaatatcattatcaatgcttctgatactactatttataattatggtagtttagaaagtagtaaccgtagtaaaaatgccatacaacttaatctaaataaaacaatatttaataaccatggatatattctcgctagaaacggatatttagatctgcaaaataagtctttcttccacaatatggaaagtggaactattggcatgcaatattggcttaatactggtaaaaataacaataactatagcgagacatacatagggttaatacccaaaaatactattagccaaatgaaaaacttaactttagatattagtgaggatagtaatctgataaatgatggtattatcatgacagaacggttacacacacgcgataagaatataagcaatattcaaaataatagagaagatatcaaaatttatactaagttacgcaaaattaaataa

SEQ ID NO: 296909 - DNA, 585 bp, Proteus mirabilis
atgaaatcaataaatataacatttttaattcctctactattactatacttcccttttattgctttatctgataatagaagaggtagtttaccagcgccaataagttgtagctttgacatacctaatagcactaaagttagaagtatacgtcctgattctttccctagcaattatgcaggaaccttagctaatgacagatattctaaaagaattgctatagtttttagtctttgttcagaaaagaatactaaaataactttacgtattgataatacaaatattgattttaataatggttaccttatcaacgatgtaacaggctctgaagcaagtgataatgtgacattccaattaattgatgatgaaaataatcctattgatttaaatcagaaaaatacattcactaaaactattgatgaaagtggtactgcttattttaatttctttataaattatgtcaaaaaagataatcttcgcgcaaagccagggtatatatcttctcgtattacgttcattgtggaagcaaaagatcagattgttgaaaatgataatgaatttgcgggtgtagaaaacagagtactgtag

SEQ ID NO: 296910 - DNA, 1554 bp, Proteus mirabilis
atgtttaaaaacatcagtatagaaaaaaccgttaaagttatgctggctattttatttgtacttattatgagcattatttactttagttatgatgcttcaacacgctcttatcataactttgtttcatcaaataacttaagtcagcaaatgttgctgatgggaaaagcgcgttatcaaatggcggtgatcagagcgaatattaatggcttggatgggcagttaagagtgaatgaaaaaccttctgctaaataccttcatcaaactcaagaatatataaaaatcacccgtgaagagatccaccgttgggcggatgctgaaaagttaaccatggaagggcgtcaggttgctgatgatatgacgaaacgctttgatgagcttttagatatatttaccgatgccttagctaaattacgtaaaggacaattgactacgcactctgctagtcaaaaaatggatgaactcaacgagatcaccatgacatattatgcagtcgccaatggtattgagaataattatattgatattgcgaaaacctcacaacagcgcattatgctaatggcgttagtcacagcgattattgtcattatgctctttatcattatcttacgttggttctcccatagctttatcggcaatattaaagtgcttattaatatttttagtaaaatgagccaaggcgatttaagtatgcgagtagaaaatcacggtaacaatgaatttggtaagctatttaatgaaatgaataaaatgaaagtttcattaagtcaaatgattgcttcggtaaaaaatgcagtaaacaccattagcgtcagtgcaagtgaaatagcaacaggtaatactgacctctcctcacgtactgaagagcaggctagtgcgctacaacaaactgttgcaagcatggagcaaatcaaaaccacggttgaaaaaaatgctgataactcacgccaagctagccagttggcattaagagcgacaacgtcagcacaaaacggcgaaaaggtgatggataatgttatcgaaaccatgtcatcgatttctgaaagtgcaaagaagatctcagatattaatgacatcattaacagtattgccaatcaaaccaatattctctcattgaatgccgcggttgaagcggctagagcgggtgaacaaggtcgcggatttaccgttgttgcagccgaagtgcgtaacttagccagtcgtagtgcagaggcagccaaagagatcaatgaacttattacccattcggtaaataaagtacaggttggatcacaacaagtgagcgaagcaggacgctccatgtcggaaattgtgaccaccattagtcaagttaatgattttatgcaacagattgccttagcctctaatgaacaaagtatggggattaatcaaattgctatggccgtaagtgagatggataccgtgactcaacaaaatgcggcacttgtggaagagtctgccactattactgccaatatggatgatgaagctcatcagcttgccaacttagtctctcaatttaaagtagatgagaaagaaaatactaggcatgcataa

SEQ ID NO: 296911 - DNA, 975 bp, Proteus mirabilis
atgataaattttagctcattttatcaacatattgcgcaagatgaacggttatttcattggcttgatacgctgccggcacaattatcagaatggcgcgcccatgctttacatggccattttgcttcatgggaaagaatgctggaaaacttacctgagattactcccactgaacttaatttaaagcaaggtgttatcgccaataaaaccccagcattaagtaccggtgaacaacttggtttaacgaatattctaaaagcgttaatgccatggcgcaaaggccctttttctctttatggtgtcaatattgatactgaatggcgttcagattggaaatgggatcgcgtattgccccatctttcgcctcttaaaggccgattagttttagatgttggttgtggcagtggttatcatatgtggcggatgcttggtgaaggggctgattttgttgtcggtatcgatcccactcagctctttttatgccaatttgaagcagtcagaaaattattaggtaacgatcagcgtgcccatttaatccctgtcggcattgaacaaatgccagaactaaatgcttttgatacggtattttcaatgggggttctttaccaccgtcgttcaccacttgatcatctttggcaattgaaaaatcagctcgtttctggtggtgaattagtattagagagtcttgtgattgatggtgatgaattccaatgtttaattcctggtgagcgttatgcacagatgcgtaatgtgtactttataccgtcagccaaaatgctcaaagtatggttagaaaaatgcggttttaaagatgtacgcattgttgatgaaaatgtcacatcactcgaagagcaacgtaaaacggattggatggtgactgattcattagaagcattcttagatcctctcgatcacaccaaaaccgttgaaggctatccagctcctaaacgggcaattttaattgcgactaaaccttaa

SEQ ID NO: 296912 - DNA, 1203 bp, Proteus mirabilis
atggcactggtaacacaagctcgcaccttggggaaatactttctcctccttgacaatatgctggttgttttaggattttttgtcgtattccctttaatatcaattcggtttgtcgagcaattaggctgggcgggtgtgattgtcggctttgcccttgggttaagacaacttgttcagcaaggcttaggcatttttggcggtgccatcgccgaccgatttggtgctaagccaatgattattaccggtatgctattacgtgctcttggctttgcattaatggctttagcggataaaccttggatcctttggttatcttgtattttatctgcactcggtggcactttatttgatccgccaagaactgccctcgtgataaaattaactcgcccttatgaacggggtcggttttattctttattattaatgcaagatagtgcgggtgccgttattggggctttaattggcagttggttactcctttatgatttccatttagtttgttgggttggcgctggcgtattcgttcttgcggctatttttaatgcttggttactacctgcctatcgtatatcaaccacgagaacaccgataaaagaagggctaaaacgcgttattcttgataaacgttttgttcagtatgttcttactcttacgggatactttgtactgtcggtacaagttatgctgatgtttccgattgttgttaatgaaattgccggcacccctagcgcagtaaaatggatgtatgcgattgaagctttattatcattaacactgctttaccctattgcccgttggagtgaaaaacattttcgcctagaacagcgcttaatggcaggattatttctgatgagtatcagtatgtttcctgtggggatcacccactcattacatgccatatttcttattatcaccctattttatctaggcactattaccgcagaacctgctcgagaaacattaagtgcctctttagcagatcctcgtgctcgaggcagttatatgggttttagtcgattagggttagcttttggtggcgcgattggctataccggagggggatggatgtatgatattggcaaacaacttgaactgcctgaactaccttggtttttattaggcacaatagggtttatcaccctttacgcactacatcgacaatttaatcgtaaaaaaattgaaacagccatgcttaccccatag

SEQ ID NO: 296913 - DNA, 555 bp, Proteus mirabilis
atgaaagctatttttttgactgctttatttgtattaactagtttagtgactggctgtgatcaaatcagacaatttgatgtcagtgaaaaagtaattaatgactatctgagtcaaaaatcgggattacaaaaacacattggggaagacggtgttgtttctgccgatatcacattaagtgatttagcgatccaaattggtcgtactgagcctggaaaagtgagcttttctggtagtgcttctcttaaaattgattctttgtttggcaaaactggcgcgaatgtgaatttaactttatcaggccagcccttttatcaagcagagcttggggcgatatatatcaagtcaatgaaaattgatagctataaagtgtctcctgaaaaaatggagccagttgtaatggcattaaaaccttacttagatacgactattgcgacttattttgataatcagcctgtttatgtgctcacccctgaaaaaaatagtgcagaagcggctgcctttaaattagcaaaagggattgaagttaaaccgggtaagtttgtgatccaactttaa

SEQ ID NO: 296914 - DNA, 609 bp, Proteus mirabilis; identical to SEQ ID NO: 296512

SEQ ID NO: 296915 - DNA, 456 bp, Proteus mirabilis
gtgttttatctagcccctcgcctacgcaaattagtttatgccattacctttgaactattggctattttattaagcaccttattattagcatttttaagccaaagtggctcaaacaactctcttcccgtcgccatcgctgtatcagttattgcgctgatttggaattatctatttaactctttttttgaatttattgaattaaaattaaaacttgtaaagcgaaccgtcgtagtacggttaactcatgctattagctttgaattaggtctatttttttttactatcccattatatatgtggtggtatagtgttggctttacaaaagcaatcagtatggaggtgaccatattaattttcttttttatttacacttacttatttaccttagtatttgataaattattgcctcgtacttattcgctagcccccaaaaaagaaaaacaaccacatcagtaa

SEQ ID NO: 296916 - DNA, 702 bp, Proteus mirabilis; identical to SEQ ID NO: 293937

SEQ ID NO: 296917 - DNA, 540 bp, Proteus mirabilis
atgagttatcaacatgcaggaatatatgccattgtaaaacgtgttattggttggcttatttttattcctgcctttatttcaacgacagtttcgttgattgagttagctgcgatcccaagagcaaatggcgagggtgttaatgctgtaattaatgatttttttcgagtattagcagaaatggtacaatttaacaccccgtggctagactttttttggcgtcattctccagtacctaacactcaaataggttttagccaacagaatattatcttctttgtgatcttctttttaatgtttattggcttagcactgagtgcatcagggttaagaatgtatcgccaagtgaaatatttaaaagaaaatattcaagatcaactaattattgaacgagcactaaaaagtggtattacagcgcaagagctagagcagaatataaaattgccaagacatacactatttactcaagtcatggtgctgtatatttcacctattattgttatcgcaattggttattttctgctgaaatttttaggctggtag

SEQ ID NO: 296918 - DNA, 669 bp, Proteus mirabilis
atgtcttttaaattgcccatcgaagccgctatttttgatatggatggtttgctaatcgactcagagccgttttgggcacaagcagaacatgaggtctttgcacaattaggtgtcgatttatcacttgctgacagcatgcccgacaccgtcggcttaagaatagatcaagttatcgaactttggtatcaagtatcaccttggcaaggcgtaacacaacaagaagctaaagaaagaatgattgctcgcgttgtacaacttattgaagataaaaaaccgttgctccctggtgttgaacatgccctatctttatgtcaatcattaggtttaaagatagccttagcctcagcatcaccgcattttatgctagagcgtgtacttgagttatttaatattcgtcattacttctctgctgttgtctctgcagctgatttagcgcacagtaaacctcacccagaagtctatctcaatgctgctaaggcacttaatgtcgcacccattaattgtgtctctttagaggactcacgcaatggtatgattgcttgcaaagctgcaagaatgcgctcaattgttgtgcctgcagcggagcagtttaatgacaaatgttggggattagccgatgttaaaattgcctctctcaacgaattaaccaaatctcaattattaggctaa

SEQ ID NO: 296919 - DNA, 924 bp, Proteus mirabilis
atgcaacatgttacattgactcgacgccaatcgatatattcttattcaggggcatttatttttattctggcaatgatagctatcgcgagtttaggcaatgatcgcgaaattgtattgcctgaaatagcggcaatggctattgcattatgggtctaccgtgaacaagactggatgttgcaccctgaaaaggtatttttatggccaaccgttaccgcactgctaggttttggtattaatttattaactttaccctttattactaaacttgttttagtacttatgggtatgctgctattttttagtatattcaaatatagcttggcacccgcattagcaactggctttttacctatcgtaacaaatgcgacagagttttcttttattttttcgattgttatcacaacgtttattttaatggctgttgtgatatttgctaaattaaaaactaattctaatcgtgaagcgcaaattaaacctaatttaatggcaatatatgcagtaattattggcttaagtattattgttgcttctttagctaattatccacatttggcagttttgccccccgttgctgttgttatttatgaatcactgcatatgaaaatgtattcttggcgtatggttatcaaacaatcaatagtgctcacattatctgcaactattggcgttaccttatacctgataataaatcattgggttgttgtcgcattactgagtatgccattaatgtggggactattgtctatatttaagatgagagtgcctgctgtttatgctttcccactattagcatacgtttttcctagagatgcattgcctttactgccgattgcttcattgttcgtttcgtttggctctttaggaatggtatttctttatcgggcggtaacgggcaccttgatgccaatggagcataaaatttaa

SEQ ID NO: 296920 - DNA, 1353 bp, Proteus mirabilis
atgaaactaaaaagaatggtgttgtttatgttttccccttgttttttagctgtgagcgctgctaatgctgggaattgggaaaatacaattaaagaaagctcatttatttctgattctgaacttgagctgactaccattaatatgtggaaatacctaaaaacagaaaaccgttttgataaacaagagcaacgttatagaaaacaagttgctaatgcttggggtcaaaacttccaagctgatttcagatctggctatttaggtggcattctaggattcgatgtttcttattatggtggtattaaattaggagcaagtaaagacttcgcttctcgtgccatattatataatgatgatggtgaagcaaaaggctataacaaaattggtcaacgttttgcaaaagtgagattcgatttagatcctgttttaattaatggtaaagcgggttggtttaccttgaagaatacaggtatttttactaactcacagcgcttatcattaaacagttataacggttattacactaatacggcgatgggtgattggagtttagatttgctgtatctcgacggaaaagttatgcgtcgtgatagcccaaatatcgatagaatgtatttcagtgatggtaatggtgttagacataatattgaccatgttattactggtggagttaactataattccaaaccattaaaagtctattatttctatggtcaggcggatgatgtattccgtcaacacggtttagaaacaaaatataagttaacatcagacgttactctaggtggtgttgtttattaccacgattatggcagtgaaggaaaacgcacattaaccaatgctaatgcaggtaaacgtaactttgataaggatgcatggcactttgctggtactatggaatggcgtattcctgaatcagcgtggaccattcgtacgggtgtgacttataccgatgcgaaaaaagccaatggtgttggtcaatttgcgcgtaacccaattgggaatactcgtggacgctttaactcaccagcttatgcagatattgactatgtgcgtgatggtgaagtgatgggtgcattagaagctgcatacaaagttaacaatgagttgtctgttggtgcacggactaactatagtgaatttagttactccggcgaaagattaaaacaagggcagtttggcttatttagctactggaagccaacggctaatctttctatttcgttaagtggcggtattggttggcaccatcaacaagaaaatgattacaccacaccaaaactgtatgatggtcactcacgacgtgctcactcattatcaggctctatgacaacgacatatcgttttaaaatgtaa

SEQ ID NO: 296921 - DNA, 390 bp, Proteus mirabilis
atgtctaaatcggcaaaaggtacgacagaacggcatggacggaacgtaaaagctaaatctggtttaaaccgctcaatactggagcagggctggtatgaaatgcgccgtcagcttgagtacaagcagctctggcgaggtggtcaggtactggcaataccaccagcctacactagtcagaagtgcgcttgctgtggtcatacagcaaaggaaaaccggcagtcacaaagtcaattcgagtgccttgaatgtggatatacagcgaatgctgatatcaacggggcacgtaacattttagcggcaggacatgccgtgcttgcctgtggagggagggtgcagtcagaccgcccgtcgaagcaggaactcgccgaggtgattcagacatcagtctga

SEQ ID NO: 296922 - DNA, 864 bp, Proteus mirabilis
atgaaaggtattattttagcaggtggttcaggaacaagactttatccaataaccatggggatatctaaacaattattacctatttatgataaacctatgatttattatcctttatctgtcttaatgcttgcaggaatcaaagaaatactgattataacaacacctgaagatcagaatggttttcagcgtctactagctgatggttcacaatttggtatttctattcaatatgcagtacagccaaaacctgaaggattagcccaagcatttattataggtgaaaaatttataggtaaggatagtgtctgcttagtgttaggtgataatattttttatggtcaggccttttccccaaaactaaaagaagcagcgtcacaaactaatggcgcgactatatttggttatcaagtaaaagatccaaaaagatttggtgttgtagaattcgacaaaaataaaaaagtcatttcaatagaagaaaaacctatgatacctaaatctaattatgccgttactggattatatttttatgacaatgatgtcatcaatttagctaaaaaaattgaaccatcaaaacgtggtgaattagaaataacaaccttaaatgaaatgtatttacataaaaataaattaaatgttgaaatgttaggcagaggttttgcttggttagatactggtacatatgaaagcctacttgaagcagctcaatttgttgagactattgagaaaagacaaggctataaagttgcctgtttagaagagattgcgtttaataacggctggattaataaagaaaaaatacttgagagagcaaagttaatggctaaaaatagctatggtgaatatttattaactttagtgaaatag

SEQ ID NO: 296923 - DNA, 1743 bp, Proteus mirabilis
ttgaaaaacaacgaattagaatggcaggcgttacgcccagattacgcctcctaccagactttctttcaaacagcatcgcaattgcctgcatcttcacttcgtgaggttcaacctcgcttatatgaaagcttacagtggctaaataatgcagaagcaggccaatttatgctgttaaaagcagaagattctactgcttatttcgaaacactcgctgatacattacaacaagcagagataaaaaattatcctgttgtaggtgcctatcaagctgagtctaatcaaatttattggcaagataatgtagaaggttcattttcatcatcagaatctattgcttgttgccaatggatagagcctgaacaactttttggttcattttattatcataaagataagctcctcgttaacccaggactgctgcataaagttaatggtggtattttagtcttatccattaaaacgctcttagcacaacccttaatgtggttccgactgaaaaagatggttgaagagcaacgctttgaatggttagtgtggaatgaccatcaagcccttcctttgcctattgaagccatgccccttcacttacgtgttattttagtgggcgatcgcctaagcttagaagagcttgagtttatggagcctaatatcagcagtacggcgctatatggcgaatatgaatacgatatgtatttagaagatgaaaccgccctgagccaatggtgtggttttgttaatggactttgccaaaaatatcgtcttccttcattatctgctgatgcttggcaagtattactgactcagggcgcaagagagcatgaagatcagcttatcttatctctcgatcttgaattcctattacgccaattgcgttatgccatgcgttttaatcatgacgcttatcttggtgctgaggcgcttaaaaaagcgcaagaaaatcgtttatggcgacatagctacttattagaacgaagccgtgatgaaatattacaaggccaagtcactattcacactgaaggtgaaatggtaggccaaataaacggtctttctgtcttagattatcccggttatcccgatctaattggcgagccaactcgtattacctgtgtggctcatattggtgatggcgaactggtcgatattgaacgaaaagcagaattaggtggcaatatccatgcaaaaggcatgatgattatgcaagcctacttaaattctgaattacgattagatcagccacaaccttttagtgcttccgtcgtttttgaacaatcttacggtgaagtagatggtgatagtgcctcactagcagaattatgtgcgctaatcagtacattgtcacaacacccaattgatcaacaaatcgccgtaaccggtgccgtagatcaatttggtcaggtacaacctattggtggtgttaatcaaaaaattgaaggcttttttgatatctgtcagcaaagaggattaacaggatcacaaggggttattataccgctggcaaatgtgcgacatctggttttaaacgagagcgtgatacaagccgtcaaagaaaataagttccatatttggccggttgtccatgttgcagaagctattactttgctaacacatcagccttattacgaagaacaatgtgaaaatccacaatcaaatgaacacttgttagctgttattcatgatcgaataacacaagcgaataatcaggataggcctaagttaccttggttcctacgcttattcagataa

SEQ ID NO: 296924 - DNA, 1227 bp, Proteus mirabilis
atgggggaacattatacccccttaatatttaatacccccaatatgaaactaacagttaagcaagttgatagcagtaagccaaaagaaaatgactacaaactattcgatggaggaggtttatatctattagttacaaaatcaggaagtaaatattggagattgaagtaccgcatagatggaaaggaaaaagttctagctattggcgtctatccgacaataactctcgctgaagccagaaagaaaagggatgatgcaaaacggcagttatctgatggcgttgatcctaacaagataaagaaagataagaaaagggattcaaagtttgatggaagcaatacatttaaaagcattgctctagagtggtatgagggaagaaaagaccgatggtctgaaggttatcgcgacgacatgatggaagcatttgaaaatgatgtttttccatacattggagatcgcccaatagcagagattaaacctctcgaattacttgaagtgctttcaataatggagaaacgtggtgttacagagaaattaaaaaaagttcgtcagcgctgtggcgaggtttggaaatacgccatcatcactgggcgagctgagtataatcctgctccagatttagctagtgcttttattccacaccaacgagaaaattatccatatttattggctgatgaattgcctgagtttttatcttcagtagacaagtatcaaggaagtcagatcgtaagaactgctttaaatatattaatgcttaccggtttaagaccaggagagttacgaaaatcagaatggtcatttatcgactttgaaagtagaacatggaaactaccagaaaaaataatgaagatggggagggttcatgttgtaccaatgtcagatcaggtgatttctttactgcgtcaaatacagccaataagtggcgattaccagtatattttccctagccgaactaaccataaaaaacatctgtccgaaatggcaataaatacaatgattggaagaatgggttataggggcagagctactggtcacggctttagacacaccatgagcacaatattgcatgagaaaggatttaatacagcgtggatagagttacaacttgctcatgttgataaaaactctatccgtggtacttataaccatgcgctgtatttggaggggagaagggagatgatgcagtggtatgctgattatatagatgagctgagaagtaaaaagaaataa

SEQ ID NO: 296925 - DNA, 207 bp, Proteus mirabilis
atggaatataaaatattaagaatggatcaggttttagatagaacaggatatagcaaatcttggacttataaattaattggcaaaggagagttcccgaagcaggttaaaataggttctcgtgcagttggttttattgaaagtgagatagacgaatggatagagcaacgaattaataattctcgttgccctgaaaataccatcaattga

SEQ ID NO: 296926 - DNA, 195 bp, Proteus mirabilis
atggacattatcgactcagcaaatgaaacaaacgaactatatattcaagtgtcattatcaaatcgcaaggtagcaattaaatcatatagcggaatgtgtatctggtgtcaccaagaaccggtagcacctaatagcgcatattgtagtaaagattgcggtgatgatcatgaacagtataaaaggaagaatggatag

SEQ ID NO: 296927 - DNA, 546 bp, Proteus mirabilis
atgaaagctgattatggaggtagccacacaccaaaggaattgcgtgatagatggcaaactcccctacctttattcacagcactggacgctgaatttggtttctatttagatgccgctgccgataaaaataatgctctctgttctcattacctcaccgaaaaggacaactcgttaaattgcgactgggaaagctacggggctatattctgcaaccccccgtacagtgatattcagccttggattaataaagccgaagagcaatgtaaaaagcaattacagcctatcgtgatgttaattcctgctgatacttctgttggttggtttaattctgcattagaaacagtcgatgaggtgagattaattacaggaggaagaatttcatttattaaagctgaaactgataaaactaaaaatggaaatactaaaggctcaatgcttttaatttggcgaccttatattaaaccaagaaagataattaacactgtcgatagagacgagttaattaatatcggcaataaaatattaaatgaatggaaaatagcatag

SEQ ID NO: 296928 - DNA, 351 bp, Proteus mirabilis
gtgaataaatacaccgaactatctgactttgagattaataaagctgtatttcacaaagcaaaaataaagtataaatattttagattcttacctagcggcgttattacttataacatcaaaggcaagtatcaagttttcgacccctgcaataacccgtcagacgccatgccgattattattaagaataagatatgcaccgcatttgatgtattcgcagaagagcatgacggcggtaattgggtggcttcacctgcgtatggttttgcgaatgaagaaactagaagcaataacttatatcgcgcggctatggaattattcttaatgatgaaagaggcggagaatgaaagctga

SEQ ID NO: 296929 - DNA, 174 bp, Proteus mirabilis
atgaaagataaatatagtgtgaacttacaaggccacgaggaagaaggttttgaaattgaaccgacaataaaagataaatttaatttaaaatctccatcgtgggatatatcaataacaaagcaggatttagttaatattaagctcatgatagaggagatattagaaagtgaataa

SEQ ID NO: 296930 - DNA, 267 bp, Proteus mirabilis
atgaataaaaatgaacttcaagtattaatcgattataccaaaggcatgattgcagataataaggagccagaaaagaaagtcattattgcattgtgtgatgagctggagagaataactgaatcagagcctgtcgcttggatgtaccctgtatttcatgatgagaaaatgcaattcactactgacgcagttgcatctgaaaatatagatattcattttcaatctcatggctcaccacttaaagtaacaccgctctaccgcttagattaa

SEQ ID NO: 296931 - DNA, 237 bp, Proteus mirabilis
atggataaatcaaggcagcagtttgaggggtggataaataaaaaccaccctaaatgtagtgagtatcacaaggatattaggcttgaagcatggcaagcatcacgtgagagtttggagattgaattgccagagcgcaaaggaatttgtcataacgaatacgaaagtggttattttgatggtatagataaatgtgaagatatattaattagaagcggagtgaaaataaaagatgaataa

SEQ ID NO: 296932 - DNA, 159 bp, Proteus mirabilis
atgactattgaacagttacaagaagaaaatgcgaagttgaaacaggcgattatcagcatttacacaaacacggaagaaataacactcaatggcgaagatggctattacgcagtaaagcaaagtgttattgatgatgttattgatttaacggaagattaa

SEQ ID NO: 296933 - DNA, 438 bp, Proteus mirabilis
atggcaattaacacaataacggcaagtggaaacttaggtaaagattgcgaacagcgatggacgccaaatggtaaagcggttgcatcttttagtttgccagtgaaacaaggttacggagaacacgaaaaagtatcttgggttatctgtaagatgtttggctctaaagctgaaaagctacctgaatacttaaccaaaggaacaaaggttacagttactggtgagttcgtcatggaagaatggacaagccagagtggtgagaaaaaatcagcaccagtaattatcgttaaccaattagattttggcggtaacggtggtaatcaggcaggaagccagaaaccacagcagaatcaaggatggggtcagccacaacaaccacaacaaccagctacgcagaatgagccgccgatggattgggatgaccaagaaatacccttctaa

SEQ ID NO: 296934 - DNA, 699 bp, Proteus mirabilis
atgattagtaatgacatcattctaagcaaaacaggcatcgatttaacaaaagtagagcaaggaagcgaggaatggatgtctatcaggctcggcgtagtcactgcctctgaggcatggaaagttatctctaagccaagatcaggaacaaaatggtcagacacaaaaaaaacatatttgaacacccttattggtgaagtctgcacaggagtttacaaggaagtatcagcaaggacgctggaatggggtaaaaactacgaattagaagcaaggatgacattcgaattttacaccggattaacggcaaaggaagtgccaataatattcaaagatgagcaattacggatggcttgctcaccagatggcatatgcagtgatggctcaggattggagcttaagtgccctaataacacggacgtatttatagacttggcattgaatggaatcaatgcaatgaaaaaggaatatgtggctcaagttcaatattccatgtgggttacaggtaaggatatctggcattttgcaaattttgacccacggatgccggcaggaaaagaaatcgcatatttccctgttgagcgtgacgaaaaaatgatgaaagaatttgacgagttagtacctgagttcattgaggtgatggatcagggattaaacaagttaggcattcaatttggcaatcaatggagtgtatatggcaattaa

SEQ ID NO: 296935 - DNA, 885 bp, Proteus mirabilis
gtgagcacgtcaattattgagtttgtgcaacaacaagaaccattgttttgtaacgcactaacagatcaaacaattacatgggctaaggaaagccagtttgcaattcaggcattccaacgaaatgacgagctagcaagggtggctatggaaaaccaagctagtgctcaaaatgccatcattaacgtggcggctattgggattacattaaatccagcaagtaagctggcgtatttagtaccaagaaagggttttgtttgccttgatatcagctatatgggcctcatgcacctagctcaagtgactcaagctatcgaatggggtcaatgcaagttagtccatgaaaatgatgtttatgaatccaatggcctagacaccccgccaacccacaaatataacgcatttagtgacagaggtagtgttattggtggttattgcacagtgaaaacagcaagtggtgactatctcacggaagagatgaggttggatgagataaaggctgttgaggccacgagcaagtcaagaaatggcccatggaaaacatggtgggatgagatggctcgtaaaacaattgtaaaaagagcgagcaaatactggcctcgtcgtgaaaggttagatcaagccattgattatgtgaatacagaagctggagaaggaaattattttgatgtttcagcaagtcaaacaaaggacataacgccagcaagcgaggatcaactaaaagctatcacggacttgatgcttaaagttaatggcgaatggagcgacaaattcttcacattcattagtaaaaaattcaaccatcagatatccaatccagagcaattaaccgcatttgaagccaatacgattatcgacatgctaaggaaaaaggcagaagaaaaatga

SEQ ID NO: 296936 - DNA, 252 bp, Proteus mirabilis
atgttaacgaatacatacggactcagaaacgactggtacgaacgccaaatggaaaaacaggcgtttgttaattctcaggaagagaaaatatcagttgatgaggttatggacagcctacccgaagaactactgtgcatggatttagcaaggaagttaaatccggtatttgatgttagccctcaagcacttgatgcagttttagatggaattagaacagctattcagattgggatagataaggagatattgtga

SEQ ID NO: 296937 - DNA, 177 bp, Proteus mirabilis
atgaacgcaaagcagaaacacgtgaaacatcagatattcgcactgttgcgagagtctgaaatgacaaatgagcaaatcgacgacttagtttttcaatggaaaatgaaagtatcgatggagcgtacaaacctcattcagcatgaaatcaacacacgcaaggagcgcgcgtttatctaa

SEQ ID NO: 296938 - DNA, 183 bp, Proteus mirabilis
atgaatattgataaatacaaactttgtttagctcaatcgcaagctgggattgcacgctttctcaaggatgagaacggatggagcgaagcaaacaaaacattaaaaacagcatacggagtgaagcatgaacgcaaagcagaaacacgtgaaacatcagatattcgcactgttgcgagagtctga

SEQ ID NO: 296939 - DNA, 261 bp, Proteus mirabilis
atgggtgatgtaggagacgattttcgagcatacaaggaaatggtaaaagagaggaaattggagcgactaaaaaataacatggaacaactaaaggatatagatattccgtacaccagagattcaagtggaactattcactttcaaacaaagaaaggaaaggttctattttatccaacaacaaacaaatatcagcacaagcgaagcgttaaacgaggtggtctatttaaggctgttgagttagtaaaacgcctcggaatttaa

SEQ ID NO: 296940 - DNA, 942 bp, Proteus mirabilis
atggcaaatgaattagtcgtaattgaacagtcaacggcgctagatttatttacagcgccagaaaaagtaaatcagatgctagagcacattaagtctcttgcagaagaagagcgtaaagaactcgacagtgatttctcagtagctaaaaaccggaaggcttttgcatctctggcgtacaaagttgctcaaacaaaaacgtatatcgacaaggaaggtaaagctgttgtcgataagttaaaagagctacccaaaaaagttgatgctagtcgtaagttatttcgtgacgagttagatctattgagcacagatattcgcaagccactaacagagtgggaagaacaagaaaaagctcgtgaagaagctgaagctcttaagaagcaaatcgagcttgaccacgaagaagctctgcaaatgaacgaattgtttgatttacgcaaagctgaagaagaacgccagcgcattgctcgtgaagaagaaatgaaacgacaagctgcggaacaagcaagacttgaagctgagcgaaaagcacagcaagaaattgaagcggcagcacggcgtgagcgtgaagcaaaagaagccgttgaacgtgcagagcgtgaaaagcaggaagcaattcaacgtgcagagcaagcagcaaaagaagctaaggaaaaggctgaacgtgatgctaaagaagctcaggagcgagccgaacgtgagaaacaattagctatcgaagccgaacgcaagaaagcacaggaagcagaacaagcgcgattagcagaagaagaacgtaagcgtcaggaggaagctaaacgtcaggctgataaggagcatcgtcgcaagtataaccaagaaacattacaggcgttagtcagtaacggatttgatgaaaaattagcaactgaatttattaagctagtcgcaagtaaacaaatccctcatatgataatgaattactag

SEQ ID NO: 296941 - DNA, 354 bp, Proteus mirabilis
gtggcagataaaacaatggaatttaaaggaacgcctgcgccatgggttgttgatattagaactgggtgttgcgctgtttaccagaaaaatagaactaatgatacggctggttgccatcgtgatgatgatagaaatatcgtatatagctcaaaaggtgctagatatgacgaaaaattatgtcactgggttatggatgaagaaactcaagccaattttacactaatcgcaacagcaccagagttattagaacagttaatcagacttcgcaataaaattgcaagctataaaccagatgatgacgatgatttagacatcgttgacgctgtaatcgcaaaagccctcggtcagcagtaa

SEQ ID NO: 296942 - DNA, 273 bp, Proteus mirabilis
atgacaatagatgatttccataatggaaagttacccatgccgaaattatttagagctgttcgagtcgagtttgattcactggttccaaatggccctaatgatgaatattgggtcacaacaatcaggtatgtaagacgagttagacatgctgatggttggcgctggcaattggtaaggacgcatcataagggtttggatagatgggatccatacttagagttagatagggaaggacttaacgacattaatcatgtgtacggactaattaaatag

SEQ ID NO: 296943 - DNA, 276 bp, Proteus mirabilis
atggaaatatggtttaaggagtttgagtcacacgggcgtcagattctaatcaagaaagctcataacgccgatgagtcaaaaatcggggtgcaatattgctggccagagaaacttttcgaggtcgattttggattatggatagattacgacgacaatgatgaggaaggctgtaataaagcggaagaagcacgcaacaagctattcgacaccatcgatcaggaagcagtagataccacagtgagtaacttaattcaaaaactcaagcttgataattag

SEQ ID NO: 296944 - DNA, 174 bp, Proteus mirabilis
atgaatagagattatgtggtgtttgctggagattatgaggactatcaaggtaagtcagtagaaaatataaaattttgtgattcttttcataatttggaagaagcagaaaaatgcatacgtgataaacaacttaatacctatccgatttgcagggttgaaattcactacagttaa

SEQ ID NO: 296945 - DNA, 276 bp, Proteus mirabilis
atggctcaaattacttacttaccgcgcactggtaagacaaattcaaagatgcgtcgttatatcgctagaggtgaattaatggcgcgtaaggctttagaagaagctaatcgcggtcgcactactgaggaaatttgggattcaatcattaagccagttgatgaaacagatgtgctagcaagtttggtgttaagcctcaaatcagcaccagataaacacaaaacattaaaactgaaaaaacagccgagcagtgagttcggggttacggcgagggggtag

SEQ ID NO: 296946 - DNA, 306 bp, Proteus mirabilis
atgaagaaattaatttttttactaatgacatctacctcattattatctcaagcagctaataaatttgatattaatgacgaagataacttcaaaacattgactgtaattatgaaagtatctgagtgcaacaccatgtcttctttatataaattccagcaagaaaataatgtgccaaatggagataagtttatagatgaattcatgaagagtgaggcaaaaaagaaaaacagtaatttagttgatatggctaatgcttgtcaaaaagcactaatagatttcacagagatcacctcaagcaaaaactaa

SEQ ID NO: 296947 - DNA, 693 bp, Proteus mirabilis
atgcgcgaaagaatcaagcaagctaggcttgcaaaaaatatgacccaagctgagttagctgagttggtaggggtgtcaccacaatcagtacagcagtgggaaactagtactgaaccgaggaaaaacagagttgttaaaatagctgagatattggaagttgatgctaattggttgttgttcggaaaatcctccattgatggaaatggtaatattaacggaaccaaatcaaaccaacatattgatactcctgatacagataactacaaggtggaaatgctagatatccaagctagcgctggtcctggggtaatggttcttgatgattttattgagacaataacagctattgaatactcggctgatgaggcgaaaagattgtttggtggtagatctgcttctacaatcaagatgattactgttaaaggtgattccatgtctggcacctttgagcctagagatcagatattcgtagacataactactaacttttttgatggtgacggaatttatgttttcgttttagacaatcagttgtatataaaaagactccaaaagcaatacaagagattggctgtaatatctgataacgcaagatatgaaacgtggtatctagatgaagatagcgttaatgggttatacatccatgccaaggttttagttagccaatctataaaatataaatttcatgggtag

SEQ ID NO: 296948 - DNA, 186 bp, Proteus mirabilis
atgaatgcattggaaacaacaattaaaaaagcaggtggaattccagctttagctaagaagctaaagattagcgatcaggccattagacaatgggagcaaaaaggtcgcattcctcccgcaagatacgctcaaatcaacgaactattcggaataccatttgagcatttagtaaaagataaaaattag

SEQ ID NO: 296949 - DNA, 339 bp, Proteus mirabilis
atggaactatcaaacgaacgcaaatttcgagaaatcgaatcaaaaatcatgaaagggatacttgttactggcgctagagaagtagcaaaaaggacgggtattcacgaatcacaaatatctcgctggcaatctcaacaatccaaaacgcaattaagcttcatacaacgttgtgcaaggcttttagttgctattgggtatgagacaccagatgacacagtgatattgcaaggtgatgaggctagggcgttaattcagatgcttgagcatgtcaaagcaccaaaaagaaaaacctcaaccacggcgaatggtgaggcttctcaacaaatggacttaatttaa

SEQ ID NO: 296950 - DNA, 174 bp, Proteus mirabilis
atggcaaaaaaacgccgatttatcaaccaaaatcaagaagaaagagtacatcctgatagccctgatgggctattagtcgcagcggcaaaaaacaggaatttcggcaagcgatttgtcgaagagtttagaaagcaacaaggaggtcagcatgtcagcggaaataaaatatcttga

SEQ ID NO: 296951 - DNA, 1491 bp, Proteus mirabilis
atgtcagcggaaataaaatatcttgatgattttagacctgagccaaaggtcatggagagcaaagtggctgaccttgataacggctataccagaatagcgaatgagttattagatgcaatcatgcttgctggattaaccaaacaccaattattaatggttatggctgtatggagaaaaacatacggctttaataaaaaactggattgggttggcaatgaacaacttgaaagcatgacaaagattgatagcactaaatgctcaaccgctaaaaatcaattagttcggatgaaagtttttattcaggaaggtcgaaaaattggaatgaataaaaatatttccgagtgggaaactgacattgaccgaaacagtaaaagttttaccgaaacggtaaagaatagctttactaaaacggtaaaaaccactttaccgaaacagtcaaacacaaaagacaataatacaaaagacaaaagaaaagatcccaccatacctcccaagggaggaaatcgaggaggttctctccgtgaagaattaatttcaatcctagaaggaaagtttgatttcgataaggcagataagcttcatgattctgttgagcaaaaattagttgagttgggttatgtctgtgaaagagaatttagagttagcgacagaggggatggtaaagctggtcgagttgatcttctggtttctaatggtgagggtgattcttgtggcattgaaatcgataggctgaatgctagagataaatccattgtaaaactaaagcaactttccgatggtttcgttttggtgagagaagggatcgtgtctgagagatatgatttcgatggaataccagtggtaagcgctcatcctatgtcatcttcaagtgaaggaatttctcgtgaagagataatcagggaagcaagagaagctctagatttttataacaatattactggctctcaatgcagagactttaaaccattcatgactctcttatctccaacccaaagcagagatagatatctgctaagtgatttaatcacagttattgagtgggtggtgtcaacatggaagcgacgtaataactcaatagcaaaaccaaccaatatctgccgagttaatcgcttcgatggctacctatcagatgcgatcaagtggaaaaaccgtgacggtatcaatcctgtcgattgtcctcatgaagaattaattaaaatctggaacaaatacgttcctgaaagagccattgattttcatgagtggacatcacgcagacctgcttacaaagatttggaagctgtctggaatggaaaaactaacaaagggcagtggcgtgaagtaaaacacatggacacctgcttcaagttgatatctcaatcaagtttattcactggcttacaagacaagggatggttaactcttgactggatcttaacgccgacaagatggtcgcaaacctacgagcaagctaaacgagaatataccgaacggaaaaaagggattgtttaa

SEQ ID NO: 296952 - DNA, 1377 bp, Proteus mirabilis
atggaaaataaattcacggattattattcagagcaggctgtcattggtggaatactgattgctacatctgaaaccgaagagattgctatctcagctatcgaaagtttagttgctgatgatttcacttcgtcatctcacaaagccatattcaatgctatgcagagccttgttagaaatggctctaagattgatttggttttactgaatggagagcttgagcaacaaggcaactcaggcattactggcgggttcggctatcttgctgaatgcactaaaaacacatcaagcattcaaatgttaccaggttatgttcagaaaattaaggatctaaccacggctcgaaaaacgcttgctgttctcaatgagggtattgcgaagattagctcatcaaacgttagcaaccttgttgatgttgtcggtgaggttcaatccacaatctcatcaatggacacaggtagtgttgttgaaacacagcacatcatggacggtgtgaatgagtcgataaatattcttgaatcgatgatcaacggcgatatctggaaatataaaactcagtttggcttacctgatattgataaggcatttggtggatttaacaatactgatttgattgttattggtggccgtccgggtatgggtaaaaccatgttcagtacagcaatctcaaaagcgattggattgaagcaaaagaaacccgttgtgttttatagtcttgaaatgccatcatggcagatatcagaacgcatttcatttcatcacgcaggggttaacaagcaagacttacttggtgaagataaatctaagatcaacatggacgaggcttgggctaagttatctcatgcgcttgctgacattcaagaatcaccgatttatatcaatgaccgaccatcaatgagcattcatgagatacgtgctgacgctagaaagatgcacaaaaaaacgggtggtttaggtgtcattatcgttgactacttgcagaaaatgaaaatgaccaaccctgaaaacatgaatcagtcagttggtgagattgcaacagggttaaagaatctcgcaaaagagcttaaatgccccgtagtcgcacttgcacaattaaaccgtaacttagagcaacgaaccaataagcgccccgttaatgctgatttgagagagtctggcgttattgagcaggaagcagacgttatattcatgatttatcgtgatgaaaaatataatcctcagtcagagctaaaagggatcactgaaattatttgcactaaatcacgtcacgctcccggtgcagaaaaaacatattacttcactaacgctcgtggtggtttagatcaggttgacttaaatcgagtaaggatggaatcttatcaagatgaaattgaatgctag

SEQ ID NO: 296953 - DNA, 192 bp, Proteus mirabilis
atgattgttaaaactgaaaaaatgacagatgaacaacttattaattacttaaaagataaatttttattaatcaccaatgagttagcaattgtaaaaactgagtatcctgatgcacaggagagaatcgataaggctgttcgggcatccgttaatgctacggatgtgataacggaacatcagcgcgaattctaa

SEQ ID NO: 296954 - DNA, 444 bp, Proteus mirabilis
ttggaagcagattttctcttccacgaatcaaccaaaaccgcagcatggcaacacctcaaagaagttctagcaacaaaccaaccacaccgaatcattatcaagccttggaaaaacaagcgttcactatctcagaattccacttttcatttgtggtgctcagagataagcaaatatctatgtaagaacaacgccaattacacaccagaaaccgttaaggagatgcttaagcatacattcctaggttacgaggtggtcgatatggttgacgttactacacagcttacagagcgcgtaaggacacttcggaaaacatcaaaacttgatacaggtgaaatgttccactttatggagcaggttgagcgctgggcggtaggtataaattgtttcgtgacgatacctgataactctgaatatatgaaattgaaaagggagcaggacaaataa

SEQ ID NO: 296955 - DNA, 318 bp, Proteus mirabilis
atggctaagagaaataacgcactagagaacatgaaaaagtggatggaagtcattcctcaatgcttgcaaacagaaagccagaaaacctttgaagatgaagtcgttagtcttgagttggaaatgactaaaaaggagtttgtgaaaagaggttttctacctcctgaatttaaaagtgaaagcgaaaagcgtagctggttagaggcagtggttgaactggagcgcatcgataaaaaattaaatcgagcgcaaaaacaggtagagcgtttagaagaaagtcgccgtgagcacattaaccgcaataacttaaacaggaagtga

SEQ ID NO: 296956 - DNA, 432 bp, Proteus mirabilis
atgactgaagaacaatacagaacttatgcgcgagtgatagtggttggtcgtgaatttctctcgtttaatcacaacactatttcatctgttacagggttaacacccgcaagagctggaactattctgagaaagttgcttgcatttaagtgtgtagagcatgttgaaacaaagagccgtaaacgcactcgcccaatcaataactacgcggtaacagacgatgcgattactcgcttaagaaatcagtttgaaaaagaacgactggctaatcttccacttttcccaaaagcgaagaaagttgaagcaaagaaacctagaaaagtactggatgattttatgtgtgggttgtcatttgtcgataaagccaacgtctcaggtatgggtaatccgatgttgatgaagtttgattcattattgagtggggtgagagtgtga

SEQ ID NO: 296957 - DNA, 663 bp, Proteus mirabilis
gtgagtgaagaacgcaacggaatttacctccgaatcaatggtgatcaatatcagcatatttgggtggttggcgatattcatggatgcttcaatctattaaaaaggaatatgtatcgaattgattttgataaagaaaaagatttattgatttcagttggtgacctaatcgataggggtgatcagaatgtcgaatgcctagacttgattaatgagaaatggtttagagctgtacgtggcaatcatgagcaaatggctattgacgctttgtttaatggggcgccttcacataactggctctataacggaggagactggtttttcatgcaggactacgataacgaagttttatcccgagcctgtttagctaaagctgagcaactaccgctaataatcgaagtaaatacagacgggaaaaagactgtcattgcacatgctgattatccatccgatgaatacgagttcggcaaaccagtagatgagcagtatgtcatttggagtcgtgagcgtataggtgacgataacgtccgtgagatcaaaggcgctgacctatttctatttgggcatacaccaatgattaaaggtatcgaaaagcgcgctaatcaggaatacatcgatactggggcagtgtttggttatgggctaactatgagacaaatcaaatga

SEQ ID NO: 296958 - DNA, 144 bp, Proteus mirabilis
atgaactgccaatcatgcaatagaccgctaacagatgatgaggtttatgtatgtggccagtgcgctgatgaatacgctcatttggaagtgatggataaaatcaaaggagagggagatgcagaagctaaggcgacggcgctgtaa

SEQ ID NO: 296959 - DNA, 594 bp, Proteus mirabilis
atgcagaagctaaggcgacggcgctgtaaaatatgccgagaatggtttcaccctaaatacagtaacatttggtggtgttgtccagaacatggagcagaactagcgataaagcgaagaaacaaggagaaagaaaaagcattagcgaaacgtaaaaaggagcaaagagaaaaggaagttaaagcaaaagacaaactcaaagcccgcaagttagcagtaaaacccctctcatatttcaccaaacaagcacagaccgcattcaacgcatttatcagagaaagagacaaggacgagccttgtatctcgtgtggtcgatttcatgaaggtcagtatcacgcaggacactatcgaacaaccggtgctaacccagaacttaggttcgatgaagataactgccataagcaatgtgcaccatgcaataaccatctatcgggaaatatcgaaaattacacacctcgactaatagagaaaattggtcaggaacgtttcgatcgcctaatggggtctcatggattgccaaaatggaaacgtgaagattatgagcggatacgtgatcactaccgagtaaagttaaaggagctgaaagatgttcagtga

SEQ ID NO: 296960 - DNA, 216 bp, Proteus mirabilis
atgttcagtgatttaatcgcagctattgaagagtgcaggtttagagcattaacagaacgcacaggtaataagccaaaacgttatctatctgtcattcagcttagcaatggctttatgaggatagttgaaacaacccaagccaaaagtttaggttatcgcatcatgtactcagtcggttgcgatagatatcacacagtattaccggaggcgagatga

SEQ ID NO: 296961 - DNA, 504 bp, Proteus mirabilis
atgagctatatcggagaaaaggaattaacagatgaacagtttcgctggcttgatgggtggttaaatctgtggggggcgtgggtatattctggtcgtatcgatattcgcatgatcaacatgatttataaattcatgcaaacagttgagccaagtaaaaacccatcaagacctatgtgcaatgacgatgaaggaatgttgatttctcaggtcgtagattcagtcatcgccactgacacacaagcctatggaatattactaagttattacgctcatggttcatctaagctgtcgattgcatcttactatcaccgagttgcaaaaccacgcaaaatgcaaacaagaggggggaataaatacgccaagccatctcatagaacttgcaggagagaagttgacgaaaaactcaaagctgctcagtggttattgtacgaacctctgcgaaatgcaatgaataatcgtaaacgtgtagctaaagtaaagaaaatagctgaactttgctattga

SEQ ID NO: 296962 - DNA, 390 bp, Proteus mirabilis
atgcaagagccgttaacaggcacagcaaccgcctcgttagcgggtgtctctattgtaggtctctattcaggtatggacgcaggcgttgtaatcggtgcgttcgcaggggcggtgatatttgtattgtctgctcatgatatccggctattaaaacgatgggcgtatttcacggttgcatttgcgattgggatattaggcgctgatttcatgtcgtcactactgagtggcattgtcggagatagagaggttgatcgctctgttggtgctatgttctcatcggctggtttggttggtgttttggtaacaatatctaaacccggtgctctcacagacagtatcaacaacgttattaacaacctgatagataaattcagaggaggtggaagatga

SEQ ID NO: 296963 - DNA, 294 bp, Proteus mirabilis
atgaccatctcaatgttttggatttacgtcaattttttctcatgcttattcgctgttattcgtcttgttaactatgagcgtaatggcgctaaatacaaattctttccgtcacttatagcatgggttctcattgttatgctgggttctatcccactacgcatattaacgaatgactacgcccatgcagatccatttgaggtaggaattaatataacgctatgcgcgctaataattcttagtcgtgggaatgtgatgcaaatatttagaggggttagtaaaaatgacactcggtga

SEQ ID NO: 296964 - DNA, 333 bp, Proteus mirabilis
atgacactcggtgagaagcaacgaaagttcactcgcatgattgcggacttaattatctttgcctacgacaacggctatgagctgacgttttcagaagcataccgaacgcctgagcaagcacagttaaatgctaaatcaggtgcgggtattaaaaatagcttgcatacccagcggctagctgtggatttcaacctatttaaagacggtaaatatctaacagcatcaagtgaccataaattgcttggcgaatactgggaatctatcggcggtacgtggggcggtcgattcaatgacggcaatcactactcgttagagcacaatggcgttaagtaa

SEQ ID NO: 296965 - DNA, 465 bp, Proteus mirabilis
atggcgttaagtaatatgaatacgctaactaaggtattagccggactactggcaatatctgcattctggctttggtgggtaatagatgattacgacaaattaagcaaagattacaacacagcaaccactcaattatcacaacaagtcgaaatcaacaaagactatcaagcccgtatcactcgattaaatcaactcgatgttcgtcactcacaggagttagccagtgcaaagaatgaaattgacactcttcgtgatgctgttaactctggttctaagcgggtgtatgtcaaagccgagtgtccagcagtcaccaagaatcccaccgaaagcggaagcaatgaagccaccgcacgacttaacaaagcagttgaacaagattatctacgtctcagagaaatgatagtcgagaacgaacagcaaactttgtatttgcagaattatattaaaacggagtgtttacgatga

SEQ ID NO: 296966 - DNA, 420 bp, Proteus mirabilis
atgaatgagcaggtttcaagggcacttactgatttattggaaaaagcatcaaatggcattgattcaacagttgcatttagtcaagccaatttgccagaggtaattcatcaattactgacgtggaaaatgacaatgggagttatctggtctgttgttggtgtagctcttattgcactggcgatttttatgcctatatgggctaagaaagctaaatctaacggtgctatatggacttatcatgcaggagaaataaattataacattaactcagttatgtatgatttattcagggcgatattaccagtaccaattctgtttcttggtgtcgttattttcataggcggtttttctatgtggttaaagatacttttagctccaaagctatatctaatcgaatacgcagcttcactaattaagtga

SEQ ID NO: 296967 - DNA, 225 bp, Proteus mirabilis
atgacagaaattacagcacagaatcaaatgcgcttagagctattacggttagttggcaatgataccgcagcggctcaggcagctatcgagttcgtaaaagacgatgcgctcaagtttgagttattcaaagacgcatacaaaacatgccagacagaagctcagtttgtagcacgagcacagaaagccgctcgtgatgctcagcaagcactagatttattcacatag

SEQ ID NO: 296968 - DNA, 369 bp, Proteus mirabilis
atgaaattacataaaaaaataaaagtccccatatacggacttaccattcatatctgcgctaccgaggatgttgcaggcagtatctatggttcaggcatacataccccatcaaatatggggcaggttgttcagattgaaaacacaaaaactggtgagatgataatcctcattagctttaaagatgtcgattgttttaatgccgacactatatctcatgagtcagtgcacgccgcatggaaggtgttagaaatagttggtattaaagtagactacgaaaatcatgaggcgttggcgtatctaactggttggattagtaatgagataaataagttttattacaaaattagtgctaatggtgatagctcatga

SEQ ID NO: 296969 - DNA, 441 bp, Proteus mirabilis
atgacaaagaaaaacaaaggtggtcgcccgtctagttatatgccagaggttgcagaagatatttgcaaactgctaatggaaggtgaaagcctacgacagatatgcaaaagaccaagtttacctgcgataagtacggtaatggaatggctgcaaaggcatgaagagtttcgggaacaatacgcgcacgcgcgcgaggttcaggcggaattattagccgaagatatcatcaacttatctgatgcggttattgaagatggtgcagcagttgccaaggctcgtttgcaggttgacgctcgtaaatggtacgcatctaagctggcacctaaacgttatggtgatcgcattcaacatgaacagaaaattactatcactgatttgaatgatgaagaattagataagcgtattaaggagctaagcaatggacagggagcagaaaattga

SEQ ID NO: 296970 - DNA, 1437 bp, Proteus mirabilis
atggacagggagcagaaaattgagcttcttaggctccttgaggaaaaatcccgccgcgcaaatgtctaccgttacaaaacctattacgaaactcgctacccttggcagaagaaattcattgcacttagtagtgagtattctcaaatagcgcttatagctgctaaccgagtcggtaaaacagatacagcgacatacatcgatgccatccatgccatgggtgattatcctgaaggttgggatgggtacaagtttgatcatgcaccgcttatctggtgccttggttactctggtgaaaagtgccgagaccttcttcaagctccaatattaggtcgcagaacagataatggatgggaaggtgggctgatacccggagacagaataattagtaccgaggctgctcaaggggctgcaaatgccgttcgttctgcatacatacggcataaaagcggagatatagccaaaatacaattctggtcatactcacaaggtcagcatgcattgatgggtgacagcgttgattggtttcatattgatgaagagccaaaagaccctactatctatccgcaagtgttaacccgtaccgctacaggcgataaaggtcgcggtggtcgtggcatcctaacatttacaccagagaatggtagaacagatttagttatcagctttatggattctccatcgtccgctcaaacgtgcatgaatgttggatgggatgatgctccacacttgagcgagaaggtaaaagaggatttgctggcctcattcccgccccatcagcgtgacatgcgcacaaaaggtattccgatgctaggccatggtcgtatttatgactttggtgaagagtttataacgtgtgacccgttccctattcctgagcattgggctgtaattaatggtatggacttcgggtgggatcaccctcaagcacacgtacagctagctatcgatttagataatgaagcttactacgttactagagcatggaaggctagcaagacatctcctgctgaggcgtggggtgctgtaaataagtgggctaaagatattcctaccgcatggccacaagatggattgcaaactgaaaaaggttcggggttacagcaaaaagaatattacgaagatgcaggatttaagatgcttaatgatcccgctcagtggcctgataaatcccgttctgttgaggccggtctatttgaaatatatgacctaatgagaacgggccgatttaaagttttccgtggtttgcgtgattggtttgaagaatacaacttctatcatcgtgacgaaaaaggaaagattgttaaaactcgtgacgacttacttgatgctactcgatacgcctacatgatgcgacgattcgctaaacgatttggtgaagtagggaaagttaagcagcgagtaattcccgcaccgattaggccgattaggagattataa

SEQ ID NO: 296971 - DNA, 2091 bp, Proteus mirabilis
atggtcgatagaaacgagcggcttgagaaaatacttcgcaaattcgacctcgattactctgcatctgaaaatgccagaacggaggcgagaaacgatttattctttagtcgcgttagtcagtgggacgactggctggaaaactatgtcacattgcagtatcgcggacaattcgatgtcgtgcgccctatggttcgtaagcttgtcgctgagatgcgtaaaaaccctattgaggttcagtatcgaccgaaggataacgcgacagccgatgccgctgatattcttatgggcatgtatcgaactgacatgcgaaacaatagctcaaagattgccgttaacgtggcagtgagagagcaaatcgaatgtggttacggtgcttggcgactcgttactgagtatgaggacgataacccaactagtaataatcagattatccgacgcgttccaatgcatgagtcttgtactcacgttatatgggattgcaatgctaaggcaatggataagtctgacgctaagaattgcacgatcattcacgcaatgaatattaatggatgggaagaattcgcagaacagtacgggttagatcctagcattcaaccatcattccaatcaccgaacaatgacttacttttcacttggtcgaatggacagacaattcatgttgctgagtattacgaagttgaggaaaagagggagttagtatttgtctatcgtgacccgctaaccaatgatttccaaacgtacccagcgaaagaagctaaagaaaagattgatgaattggctgatgctggttatgaaaaagtaggtgagcgtaaagttaagaagcgcagagtctataagtcaatcatcactagcactggtattttgaaagatagaatgccgatagctggcgagcatattccaattgtgcctgtgtatggtgagtggtcattctttgatgataacgaactgtatgagggggttgtaaggttatctaaagacgcccaaaggttgcgtaactttatattatccaagtctgccgacactgccgctaaatcgcctaagaaaaagccgtttttctatcctgagcagatagaagggtatgaacacatgtttagcggtgaggacgattacccttactatctactcaaccgtactgatgagaacaatgctgacctgcctccttcacccgttgcgtatatggagaatgccgaggtttcacaggctgatgcattgcttctggaagtggcaacggaagcagctaaatcaaccgctcgggtcggtgtcgatactgaggcggctaacgggcaagtagcgttcgataccgttaatcaactaaatagtcgcatcgacctagagacatacgtgtttcaggataacttagctatcgcaatgcgccgtgatggtgaaatttacgcctcaatcgcggctgagatatacgacactaatcgaacagtaacaacaaccgcagaggatggtggtgagaatcagattgagctaatgcaggaagaattagacttccgcaaaggtgaaatgattgttcgcaatgatatccgaggcaagtacgaaacattcactgatgtaggtccatctttccaatcgcaaaaagatgctgctagagctgagataggcgagcttatcaccaaggttccagtagaacatccaatgtggaatgtcatgatgctgacatatgcaaacatgatggaaggtaaaggtgttgaatacatcagagattacgccaacaaggaattgattgttaatggcttgaagaaaccagagaccgaggaagaacaacaatggttgatggaagctcagcaagcagcacaaggcaatcaagatccaatgatggtagcagcacaagccgagcagaagaaagctgaagccgaactggttaacgcacagaatcgcatggctgaaacacaaatcaaagcatttaccgctcagaataatgcgcttgaatcacaggccaacactacattgaccttagctaaggctgaggacttgaagcaaggcgcagtgatgcaagcaattaaacttctgaacgaggttgcacaacagcaacaacaaaatattcctaccgacaataacgtcgagaaaaatcctcaatccatgtaa

SEQ ID NO: 296972 - DNA, 915 bp, Proteus mirabilis
atgagtacaaccaccgaaattcagaataactctgaagaattaaacctgtccgacgatcaggcggcggcatccgtagaaagtcagtctgctgaaaatgccaactcagcagcaggacaggaggaaggattcgagattgtcctgaaagacgatgagaaaccacaggaagtaaagccaagcaataatgctatccaagcagcgaaacgcatcgctcgtaaacgccagcgagaaattgagcaacagatagcagcaattgaaaatggcgaacttcctgaaaacttgcgggtaaatcctgagctaccagaaatgcctaagctggatgattttttatctgatgaggcactcggtaaatatgactatgacacacataaggctaacgctgcttttcaggctgagttgctgaaatggcaaaacaaggctttggatgcaagaagtaaagctgtagcggatcagggtcgtaaaactcaggaatacacacagcaaggtcaacaaatcgctaatgcaatcaaggctcattatgatgcggctgagaagttaaacttgcctgactatcaggaaaaggaagattcagcgttgcaagtattacctcaaggtgtttatgagggtatcgcgcagaactttcccgaaaaatcagccgctatcatttactacctaggtgcaaaccctgaaaaagcgcaagaattgtttagcaaaaaccctgttcaggtcactatcgaattaactcgattagctgatcgtttaactctcaagcctcgcggtacacaacgttcatctgcaccacctgctgacgaacctattagcggtgatattacagcggcaaatgtcgcggcattacaaaagcaaatggatgatgcagcaagtaaaggtgatgttcaaaagtaccgcgctatcaaggctaaattacaaggaataaaataa

SEQ ID NO: 296973 - DNA, 1284 bp, Proteus mirabilis
atggctttaaatgaaggtcaaatcatcacctatatggtggatgaagtagtaaacactatcgaaaataattgtccaatggctcagcgtgtaggtaaatatacgccgcctgctggcgatatgcagcgctctcaaaatactgtctggatgccagtagagcaagaagcccctactcaaaagggttgggatttaaccaataaagcgacaggtatcttggaactctctgtcaaatgcaacatgggcgttccagataatgacttctttggtttacgtgctgatgatgttcgtgatgaaacgtcgttacgtcgtcgtattcgtgcatcaggccttaagctggcaaataacgtcgaaacatccattgctaaacaggcagctgaaactgcctcactggttattgctgatgcgggtgatctatctaacggagcagattcttggggttttgtatctctggctgaatctcttatcttctctcgtgagttaaaccgcaatgaagggttgagttacttctttaaccctgatgattatctcaaagctggttataacttggtgggtaaagatttatatggacgaattcaagaggaagcatacaaatcaggaaccattcaaaagcaaattgcaggttttgaaaatgttcttcgctcgcctaagcttccaactttaaccgctggaacagcaacgggtgttactgtcgatggtgctcagaagttcaaacctgaggcgtggaaagaagatgttgacggcaaccgtgagaacgttgataaccgcacagcagtagttaaagttagcgatggttctgcatttaaacgcggtgataagatcagctttgctggtgttaagttcatctcgcaaatggcgaaagacttgctgactcaggatgcaacatttgctgttgttggtgttgaaggtaataacattaccattatgcctaagccaattgcacttgatgatgcagatttaaaaccagaacaacgcgcatatgccaacgtgaatacatctcttgcaaatggcgcggcaattaatgtccttaacgtgaaaacgtctaagacaaacatcttctgggctgatgattcaattactctgctatctcaacctatcccgcttaaccatgcgctgtttagtggcatgaagacagaggcatttaacattccttctgttggtttaaatggcgttgttgcatatcagggtgatatctcaacactggaaggtaaatgtcgtattgcggtttggtattctgcatgcaccaaacgacctgaagcagttggtgttgggctgactggtcaaaaataa

SEQ ID NO: 296974 - DNA, 210 bp, Proteus mirabilis
atgaaaacgatgctttataaagctaatggtgatgtgaaagtttggggtatgaaccttcagattgtcactgttaacgatgatgaaattgaagattatctaaatgatggttggcataaaaacccaaatgatacacaggaactgccagaaccagaaaagaaacccgctaccaagaaaaaggcggtgaaagatgcagatcacaacgaagggtga

SEQ ID NO: 296975 - DNA, 498 bp, Proteus mirabilis
atgcagatcacaacgaagggtgagttagttgtagcggcgttacgtaaattaggcgttgcttccgatgctacattaaccgatatcgagcctcagtcattagaagatggcgtggttgatttagaatcaatgatgcacgaatggtttgaagatggtgcaggaattcatactggctataagttcgctgatgaagacactcctatcgatcaaggtgatgaacacgggttaaacaagcaagccatcaacgcagttatctacaacctagctactcgtatcgctcccgattatcaaattgcgccgcttgataaggttattacaactgctagatacggcaaagaaagacttatgcgaagctgtgcgttaaagagagctaaaaatgccagatctcatcatccagatggtttccctattggctcaggtaatcgattattaacgatgactggtcagcgatacttccacaggagaaaaccaaatgccaaggatccagatacctcttgctag

SEQ ID NO: 296976 - DNA, 1782 bp, Proteus mirabilis
atgccaaggatccagatacctcttgctagaggtttgcgaaaagacccgcacacagcagattacattgacggtcttccggttaatatgttggccacaccgaaagaagtattgaatgcgtccggttatttgcgttcgttccctgcattagaaaagcgtcatagtgttgatggtgtatctcgtggtgttcagtacaacacgaaaaacaacacggtctatcgagtgtgtggtaataagctttatcgtggacagaatgccattgctgacattcaaggtaaagacagggtgactatggctcactctggttacagtcaagctgtggcgtcaggaggtaaattaaaactctatcgctatgacggtgaagttaaggaattaactaactggcctgaagaaaaagtaattaccgaaggttataaacgtgacgttaaaaaatgggcacacaaagacggtaatgatgattttgtaccgctcacaaagaatgatcttgatgggttcttaacgttaaaaatcacgcctaaaacttctgatggtaaaaccggtaatgagatgcttatcactgagcaaatggtaggcgttaaattatctcagcaggaagaagatgataagccttatcttactgatgttctggtagaaggtgttaagcgcgcaggtggtaaaattacagtcacgtataaaatgaaccttgccaaatctagcgagcaaacagcaaaagacgttactgaatttataatgacgcaagaggtgctagaggtagtcgaaaaatatactcaatacgaattaggtgatgttgttgatgtcgctcgtaatcgtggtcgttatatttggctacagaaaggcggtgaaaggttcggtgttactgatttagatgatgagtctaaacctgatcgctatcgtccgttctacactgctgaatcacagcctgacggcataatcgccattgcctcttggcgtgatatggtgctttgctttggttcgtcaactatcgaatactttaccattaccggatcaacaaacgcgtcacaagtaatatatgcgccacaaccatcttattttgttcagatgggtgttgctggtcgtgatgctaagtgtaagtttggagaatcattcgcattcatcagtaaccctgcaaacggcgcgccttctatttatattcttggtgctggaacggctagccaaatttccacagcaagtattgataagatcattcgtagctatacgtcagacgagttatcacatgcggttcttgagtctattcgatttgatggtcatgagttactcattgttcacttacagcgtcacacgctttgctttgacgcagcaggaagccagcaatatccgcagtggtgcattctaaagtctggactgtatgacgaaacctatcgtgcaattgattttatgtatgaaggtaatcagatcacagttgcagataaaagcgatggtgttgttggaaatcttaccttcaataagtcatctcagtatgacaagcaagtagagcatattttatatactcctatggctaaagccgataacgcaagggtgtttgatttagagcttgagacatcaacaggcgttgctcagattgcagataagttatttctctctgcaacgactgatggcattaactttggtcgtgagcaaatgattgaacaaaactctcctttccaatatgaccgccgtgttctatggcgacgagtaggaagagtgagaaagaacatagggtttaaggttcgtgttatcactaagtctcctgtaacactgagcgatctatcgatgagggttgaataa

SEQ ID NO: 296977 - DNA, 699 bp, Proteus mirabilis
atggcaaatgaaaacctttctacccccatagaaattcaagcctcttatattgttccaaatatcctacctgataactttagcgaaacctatcgacgcatagtgttaagtggtgctgatgatatggcaaaggtagctggtcgtgcaaatgaggctggcgctgaggcttttgatgctcaagttaaaaatgatgaacaagacattattctagatgatcatgaggaaaggcttggtgatgctgagcagactattattctacatggtaatcaattagcaaaccatgaatcacgcatcacaaaaacggaagatgatttatctaagttagaggtaagggttcttaacgttgagcaagacattgatgggctaaaaataaagatacaagaccttgatggaagaatatctgaaattaaagttgattacgtttctctcagtaaaacagaaaaacaaaagcttttatcgcccatcgatgtttcaacatcctactcagtaaacggaactaaagttgttggttctcaagttactggctttacatcagcaacgggtacggcatttaagggctcgtttaatgctaaccaatcctactcattcagcgccgattacacacggtcagaaatacaaactttggctaatggcttagtagaggcaaggcaacgaatcaaggcgctagaagatgcacttcgctcacacggattaatagactaa

SEQ ID NO: 296978 - DNA, 462 bp, Proteus mirabilis
atggaaattaaaattattgataaccccattaggctatctgagtttttaaatgataagtcgaatacggggaatatcgttgatagcaatgatcagtatttcattaaacctgatgcgctttacttgggtatttatgaaggtgttctgttggttggtgttttcgaggtgcgtaacttctggcatacggtcgttgagtgccacgccatctttgatgctggattccgtggtaaatacgcctttgatgcacacaaattattctgcaaatggttgctggaaaatagtcaattcactaactcagtaactatggttcctgataccacaaaatatggtcgcgttattgtgaaaatgcttggcgctactcgtgtcggtcatttagatgatgcgtacatcagtaatggtaaaccggtaggtgtcaccatttatcaactaaaacgcgaacagtacgaggagttattaaaatgctga

SEQ ID NO: 296979 - DNA, 660 bp, Proteus mirabilis
atgctgattatttcagagagattcagaaattcactgctacccatgcatggatatatgaaagggggcggtgatggtggtgcgggcgctcaagctgatgcgactcgtgaagctacagcgttacagcgtgaaatatggcagacaaccatgaataacttggcgcctcttacacctatggcgcaacagtacattggacaaatgcaaaatctgtcaacattagaggggcaaggaaacgcactaaaccaatactacaattctcaacagtttaatgatttagcaaaccaagccagataccagcaattatccagtgcagaagctaccggtgggttaggctcaacagcaacaagcaatcaacttgcatctatcgctcctacgcttggtcaaggttggttggctgaccaaatgaacaactatcagaatctggcgaatattggtctaggagcattgcaagggcaagcaaacgtaggtcagagttacgccaataatacaggtcagttactacaacagaatgcagctgctcaagcggctatggctaaccgtccttcatctatgcaacaagggattatgggtggattaggtggtgctactgccggcatggctattggtggtccatggggcgctgcgataggtggcggtcttggtgttcttggttcattattttaa

SEQ ID NO: 296980 - DNA, 1455 bp, Proteus mirabilis
atggctacatggaaccagcagggatcagggggatttcttggcggtattggtttaaataatactaacgcccccaaagcaagtgacgcaaacgcaactcttgctatgatccgagaaaataatgacctacaaaggtctggagctaataatatcgggttgcagttagcccaagggcttggtgggcttggtgaaatgtacaagcaacagcaagctcaggagagggataaggaattccaatctttgtggggtaaggcgtacgcatctggagatagagacgctatgaggcagttgatggctacatatccagaacaggctgagaaaataacctcgggtatgcagggaatatcagaggacgtcagggaatctttaggaaacatagcatctggctaccggatggctattaatagtggtaatgccactgattacatccgtaaaaacgctgatgagttaagacgattaggtattgacccacagcaggctctagctgtggcaaatgaaaaccccaaaggggctatagagttagctgaccatatcggcatgtctgcattaggccctgataagtattttgatattcaggataaaatcgaaggtcgttctattgatagagataaactttccgagacagtccgtagcaatcaagccagtgaagcgttaacaagagaaggtcatcagatacaggttcgtggtcaaaatatctctgctcaaaactctatgcgctcatctagctcaacaggtagtaaacctgcttcagtgcaagagtatgaatacatgcaatctctttcaccagaacaacgcaagcaatttatgcagttgaaaggcaagggtggaatggagatgaaacctgcgcagttgagcaatgggatgacagccatgatagatccaactccttatggagcaggtgaaagtaaatattacagggggatagacgctaacggaaacatgataacagttcctgttaatgccttgtcatcagtctccgatccttctggtaatgcaggtaagaatttaatgaactccgatattgagatgattaaaaacgcatctgacgaaaaattaaagtctatcactggattaactggtggtgttggtactgagcctttaactgccgatatttcaactagatttagtggtggagaggagagggaactttacagtgcagccaagcgcattcaaggctacatgcaaaatcaaggtattggagccgcaagagccatgggtgcaagtggcattaatacagtccaagaggcgaaaatgttcttccagtcaatgcctcagttagatatgtctagcactgaatctcttagaaaatcaaacctagctatagaaaaatatgttgctgattacaacgcaagaaataatgccaacttaggcgcaccatcaagccagcaatcagcacaaccaacgcaacaagcgcccactaacaatcaaggtgggtattctaatctctggggtgggtaa

SEQ ID NO: 296981 - DNA, 2052 bp, Proteus mirabilis
atggctaaaccatggaaagaggtgatctcatcacctgagtatcaatcactatctagcgaacaaaaagcatcagcgcaagagcaatattttaatgaggtagttgctcctaatgttggcaatgatgtagataacgcaagacaacagttttataccgcatacccacttccgcaatcacaaacagaacaagcaaccaaaccaccacagccagaaaacagctatatcgctggcatgaaacaagctaatcagaatttatcccaagggttacagcaatcgtctgaggacgctaaaggtttccgtgaaaacgtgatcgatgcttttactggtgaaagcaagatgactcctgaagttcaaggactcgaagggatcatgtcttcgccagaaatgaacgcatttaatactgatgcaatgaaagccgcttgggtgcaaatgtttggtaatgataacgactttgtaaaagttatcagtaatatgggcgggcaggtatctcaagatgaaaagggtaacttacttgttgatttaccgtctggtcgctacgcattaaataagcctggtctatcatctgaagatatcatgccatttatcgcgaacgcagttgcatttaccccagcagcgagagcgccaacaatcgttggggcaacagctaaatcagcagccacagacttagccttgcagtcatcagtaagtacggcaggtggtggtgacataaacccttggcaaacggcgttgtcggccggtattggcggtcttggtaaagtcgcagaaaggggagttaatgcgttagctagaggaagtagaggtaacatgtctccagatgcagaaaggttacttagaaatggtgagaataataatgtagatatccttacaagtgatgtatttcaaccaagaaatagcccagcaaggcaaaggcaacaatctggggaacaaagctttttaggtactggagagaggcgagccgtccaagaagagcaaagacgggatttagttgttaatactgaaaggatggttgagcaagagttcggtatttatgctccgcatattatgcaaggagaggttagtgcaggattgcgcagggctaaagagacgcacggtggcgtgataaataacattactaagcaaatgggtgatgccgcactagttcctaatcgaagtgttaatgctctggataatgctattggggagttaggaaatagactgaatccaaaccaggaagccatacagacgctaacaagacttagagatagattgactaatggcgagtcatttgcagggtggagaagcctgagaactcaattgcgagaggatttgcagggtgatgctttagctatgcctaaaggactagacactatttatgatactgtaaatagggctatgacctcagatatgaatacttctgtggctaattctcttggtggggcagctctcaatcagttaaggaatgcgaataatgcttacagagttatcgctagaggaatagaaaaaactggattgaaaaacaccctagagaaaggcgatgtaactcctgagttgattaacaacctaatttatagcaagcgaccaagtgatattgctcgtatatatggcatggttaatgagaatgggcgcaatcagctaagagcagcatatctaagtaaggctcttgaaaaggcggatggctctccagtaaaaatgaccaatgagcttaataaattaataaggcagtctaatggacaggtgtttaatatagtttttaatggaagacaacgccaagttatcgaggggcttagagatgttttagatgcaacgagcagggctagcgtagctaatgctgtcacacaaacaggaatggctaatataagcaggcagaggtgggggttcggcctgcttactgctggaggaacaattgcacaagaagcatatagaggcttagcatctagagtttacgaatcaccaagagttagaaacatgctcttaagattagctaataccccaaggggtagtaccgcctacgatagattagttacaagaatatctgatgcattaacagcaatagggcaggctgaggctaggaaatag

SEQ ID NO: 296982 - DNA, 327 bp, Proteus mirabilis
atgaaatctaaaaatatattcatatcgctaatattgatgtttattatctctccttttgttttagcaatagataaacaaaaagaaaatcatgaactaattatttcagtcgctgatgctggattatttgctggaagatgtagcacttttagtaaaatgtacgagtttcaaaaagaaaataaaataccaaatggagatgaatttattgataaatttattacatcagaagcatcattaggtggatcaaatataaaggaatatacagaggtgtgcatagaatcaataaacgccataaacgaactaaagaaaacaaatcagcaaggcgagtaa

SEQ ID NO: 296983 - DNA, 411 bp, Proteus mirabilis
gtgaaaagatatctattggcgctagctgctatgatccctatgtgtgctaacgcacaatgctgggtcgtttcaaacctaaagggatatagcgcttatgagtctgaaaaatataagtatatagaaaatggcatgagtaatggcatattccaagttgagataaacaaagacaatggcgatgttagactagcctctgacacatttggtggcggtggtttagaatatacccctatatcaccatcatctatggttggcttgtatattaatggcaatacctcaacaatagaaacttgggctatcactgataaaaataaggtgctttactcgaaggtagtcaataatcatcaattggtaactggaacaacatctttaataggcgacgttcttggtaattgctcaggtggtgtaaaatga

SEQ ID NO: 296984 - DNA, 252 bp, Proteus mirabilis
atggcaagagaagatacgcagttcaatctacgacttactgctgaaacaaaagagaagctaaaacaaagagcaaagatgaatggtagatctttgaactctgagcttgttcacataattgatatttatttatcaactccttcatcagtagttgggtatagaagtgatgctgaaaaactagcaaatcaccaagcagaagaagttaaaaaggtggtgttcgatacattagttaaactatataatgataaaaaataa

SEQ ID NO: 296985 - DNA, 2073 bp, Proteus mirabilis
atgtcagatattattcctaatgtcgtcgtatcaatgccatcacaattattcactctcgcaaggaaattccaagcggcgagtaatggtaagatttttattggtaagattgatacagatccaacattaccagaaaaccaaattcaggtttatttagaaaatgaagatggttctcacattccagttcctcagccattaattatcaatcaagctggcttccctgtttataacggtcaacttgctaagtttgtgacagttgaaggtcatagcatggctgtgtatgacagttatggatcacaacaacattattaccctaatgtgttgaagtatgaccctgaccagttgaaacaagaaatcatccaatacaatggcgtggatgtatttaactcaatatcaaaaacaaaatataaaagaattggcaactttgaaacaggaggaaagataagtcgtggcaatgaatgcctgaaattcggtgggtcatattatgcattcaaagacgaatctaaattgccaatcaatgttgagtcaagttcatctccgaatagcgactggatttgcgtcggcgatgcaaatatggggtttgaatctcacacgatatttaattttggtgggaaagatgataacggaacaactgataacagggttgcaatccagttagccattgagtacatggaatttagtggttcaaggttactagctaactcatcaagagatgaaaaattctttggtgtaagtagcttccatcctgattatcaagatgtagctcttgtgatcaggagtataagaaatctaaatattgatggaggaagaaagagaaatgcaagcataagatggacaggagatcaaatgggcgaagccctcttttcagtagaagctgaaaatcatgattggggggctaaaattgacaatttgggtgcaaatgctggaaataaactgaattacgtatttaaagcctctaaggtacagatggcaattgcatcatttcaaggtgggtgttacgaagaagcagtgctagatggcattcatatagcagggtacatgattagttttaataatgtgttttctaatcataatggtagggatgggtttgcattcggtggagctgataaccgaggtggatgggattcccacacaacaacatctataacaatggaatcttgttgggcgagaggtaataagcgtcgaggctattcatttaataatgagttgtggtattcaaacttattatctactggctgcgatggagtcacaccatcgagaactgacgttgcatattatttcgcgtcagctaagggcgtaaatttaacaggaataggcgctgaagagtgcaagaaagttcttgttgctagtgcattctctatgagtgttaatggtattcaaacaagtggaatacatgatgatccagtagatggagtgataaacaaacttgattcgtttattgaggttaccggaaattcaatcacattatctaatcttgcgattcttcctggttattattctaactattttgataacgacgtgattgtgaatgctggggctaataccaaaatcgatcttgattccacatttacacgtagcagggttaaagtaaataaaccatctggaataaatttctatcgctaccctgatattatatattttcctacaggcgaatataacgataatgggttcagtagaaccagtagtgtactatacccatcctcattaatatctattaagccgtcatatacgtcgatatcaggaactgttttgaagcggactatacggtacaaaacagaggaaacagtatataaaggattaattcagatcactccgatgggcgatacaataatatcacttgatgtttcctgttttgatgatggcgagcaagcaggatttacacagaatgttacgatatttaagtcatcatctggatgggttgtcacaagaaaaggtgacagtcaaaaccttttcagtgtagatataaatcagggtagtaacttagtaacgatacaatcaaaagtatcaagcaagctattctttttggttgacatgactttctcttcagatgactccatatgtcggtttctggtatga

SEQ ID NO: 296986 - DNA, 207 bp, Proteus mirabilis
atgaacttagcaaacttacctcaagaagaaaaagacaagattaatgtcgatttagccgccagtggtgtcgcatataaagaacgactcaatatgccagttgttgcgtccgaaattgaacgacaacaaccagcacatttgagagcatactttaatgaacgattagcgttttatcgcgagagaagcaaggaaacgctaaaagaatactaa

SEQ ID NO: 296987 - DNA, 531 bp, Proteus mirabilis
atgatgatttattgttatgatgacaaaataagtgaaattaaaatagaacaactcaccaaattgttatatagatgtgtccttggtggggcaagtgttgggtatactgacgcagaaactcaagtagatgatatgagaaattattggcttagtgttaatcactcattatcaacaaatacgtttaaattaattactgcagtgattgacggacaaatagtcggtgttgttggtcttgaattatgcactaaaccaaacggcaaacatcgtggggagatttgcaaactattagtatcccctgatcataggcataaaggaatagcacagcaattgatgcaaaaggctgaacaaatagcatgggagagagggataacacttttaactttagataccattacaaaaggtatgacggtgagtctatatcgctttcttggttggcaagttagtggtgaaattcctgagtttgctcaagcagttgatggtaagtttgaggctacaaccattatgtttaaacttaagcctgagagtaatagttaa

SEQ ID NO: 296988 - DNA, 822 bp, Proteus mirabilis
atggctacttatttaattggcgatgttcacggctgttatcgtgaattacgccaacttctcaatcaagttaatttcgacgccaatcaagatacactttggttaacgggggatctggttgctcgaggacctgattcacttgaagtattgcgttttgtcaaaagcttaggctcagcgttaaaactcgtattagggaatcacgatctgcatctactgggggtatttgcaaagattagtcgtaataaacccaaagataagcttaatgaattactcaatgcaccagatgctgatgaattaattaattggttacgacgtcaaccgctattacaagttgatgaagaaaagaaaatcgttatggcacacgcaggtattacccctcagtgggatttagcaacagctaaaaaatgtgcccgagaagtagaagccatattaagtagcgatagttacccccttttcattaattccatgtatggtgatatgcccaataattggtcacccgaattaactggcttaccgcgattacgctttagcaccaatgcttttactcgtatgcgctattgttttcctaacgggcagttggatatgatttgtaaagataagcctgaaaatgcgcctgcgccattaaaaccttggtttgatttacctaatcaactaccaaatgattacagtattatctttggccactgggcctctttagaaggaaaaggcacccctgaaaatatctatgcgctagatactgggtgttgctggggcggtgttctaacctgtctacgttgggaagacaaacgttattttatccaacctagtctcacacacttaccataa

SEQ ID NO: 296989 - DNA, 801 bp, Proteus mirabilis
atgcgctattggggaaaattattaggccttatcatcggtagttttgccgggatcggcttttggggcattgtgattggggtttttctaggacacctttatgacgtacaaagaagtaaattaagctatggtgggcgctataatcgtgatagacaagcctatttctttgctgccacattccaagtcttagggcatttaaccaaatccaaaggacgagtgacacaaaccgatatcacattagccagtacgttaatggatagaatgaatttacatggggcagcacgtcaagcagcacaacaggcgtttcgagaaggtaaagaggttgatttcccacttagagccaccttacaacgtgttcgccaaatttgtgctggtcgccgtgatttactgcagatgtttctggaaattcaattacaagccgcatttgctgatgggcagttacatcctaacgaacgtaaaatgctgtttattattattgatgagctcggattttctcgcgcccgttttgaacatatattagccatgatgcaggcggggcaaagttttcattatcaacaagggcaaaattatcagccacaaactcaaggcccaacgctttctgacgcctataaagtgttaggtattaaagagggtgatgatgttaaaacaataaaaagagcttatcgaaaattaatgggagaacatcatcctgataaattggttgcaaaaggtttaccaccggagatgatggaaattgcaaaacaaaaagcacaagctatccaagttgcttacgatttgattaaaaaagaaaaaggatttcgttaa

SEQ ID NO: 296990 - DNA, 885 bp, Proteus mirabilis
atgagtataaactaccttaaatttccagaaatcgatccagttatgttttctatcgggccagtatctttgcactggtacggcatgatgtatttgattggatttgtgtttgcattatggctagcaaaccgcagagcggcaaaacctaacagtggttggcaaaaaagtgaagttgaaacattactttatgtagggtttgtgggcgtgtttattggtgggcgtctaggatatgttttattctataacttaccggtatttttagataatccactttacctatttaaagtctgggatggcggaatgtccttccacggtggcttaattggggtgatctgcgccatgatttggtttgctcgtcgcactaaacgtcacttttttcaagtcgcagactttgttgctccattaatcccatttggtttaggtttaggacgtattggtaactttattaatggagagctttgggggagagtcaccttagataccccttgggcgattttattcccaggctcccgtgcagaagatctacagcttgtcgcgcaagatcccactacactattacctatcattcagcaatacggcgtattgcctcgccacccatcgcaactctatgaaatgttcttagaaggcgtggtattatttattattctgaatatctttgtacgcaaaaatcgccctatgggtagtgtatcggggttattcttaattggttatggtgctttccgtattattgttgaattcttccgccaacctgatgcgcaattaggtttatttagcggtatcagcatggggcaaattctttccattccaatgataatattaggcattatctttatggtgtgggcgtatcgtcgcgataaagccactccacagacgccaacaacacactaa

SEQ ID NO: 296991 - DNA, 534 bp, Proteus mirabilis
atggagttaataagagcaattaatgtttttaacaaattcagtaagcaaggtagaaatatcttcctcaccaaagatttaaaaatgctttttcctgatgagtctccgaaaacattacaaaaatcagttgaccggctgatcgcgcatgatgtgctacgccgagcatcaaaaggtgtatatatctatactcaaggttcattggggccttaccctttagaacgtctggccgaaaatattcgacgaggccactacaactacattagtttggaatccgctctatctcagtacggtgtaatttcacagatccccatcgacagacttacgattatgtccacaggccggtctggagagtttgtaacgccttggggcgttattgaggttacccatactgccaagaagcctcttgaaatactcaatactacggtggaaggaagggggccattaagaattgcaacaaaggagactgccattaaggatctaatgaaggttggcagaaatacacacctcatccaacgtgaggaattaaactatgtctga

SEQ ID NO: 296992 - DNA, 639 bp, Proteus mirabilis
atgctaaagcgtcctttgtctattcaacatcatgattttgcgggttttatgttgatggagtgcctctttgtgatgacgataagtagtattttattagtttgtattggacgtgcttatccttatattatcaatgagttaacttcttcttatcaacaatatcgtttagagatttatctaaaacagcgtttgcagttactggagacgcaattaaggcgagcagggtactgcaatggtgattgcactgttaaaaaagcttctttacctgtaccacttaaaataggtcattatccttatcaccctcatggctcttgtgttttgtttgtttacgatatgaacaataacggccattgggagagtccagaagaacaagagagtgattactttggttttagattaaaaaacggtcagcttgaacaacgtcgtggtgtgcaaaattgtgattcaacaggttggcaacagatcttcgaaaaagaagaaattgaggtgacagaatttatcttaactccctatacacactattctccaataaaaaaacgtgcatttaactatctatcattatcattaaaattccaagcaaaacaaaatattaacctaaaagtacactatcaaacatcaatactattaaggaatatttcgtga

SEQ ID NO: 296993 - DNA, 459 bp, Proteus mirabilis
gtgataacgacacagggaacaataaaggagcaacagggtgtcatcggtctgatggctgcagtaggttttatggtgataagtttatcgttactgacaagttttgcttatcattatcgtcaatgtcaattaatggtgatgcaagagttacaagcaaagcagacctttttattcgctggatctgcgttgtcatggggaatgaccttaacatgggatttatcgccttctcgtctttaccaatggcaatgtcgtacttttactgctgagcctaatatgaaaagctgtttctctttgagaggaaagacaagcgctttactactcggagaggctaaaagtcatagcggagataagatatctcattatcaatggattaatctggttggtaaggaaaaactgcatattgaagcccaacataatggttggctagactactgtccactagttaaagaaggctgtatttga

SEQ ID NO: 296994 - DNA, 3378 bp, Proteus mirabilis
atgttccatatttaccattcaaatcaattatcactacttaaatcactgatggtacattttatgcaaaatcggccactatcatcgccttttgagcaagaagtgattttagtgcaaagtcccggaatgtcgcagtggttacaaatccaattagcagaaagtttgggtattgctgctaatatccgttatccattacccgctacttttatttgggaaatgtttactcgggtattatcaggtatacctaaagaaagtgcgttttctaaagatgccatgacatggaaactaatggcattattgcctaattaccttgatgatccggcatttaaacccttgctacattatcttaaagatgatgaagacaaacgtaaattacatcaactagcggggcgtgtggcggatctctttgaccaatatctggtttatcgtcccgattggttgtcggcatgggaaaatgatcaactaattgatggcttgagtgacaatcaatactggcaaaaaacactgtggttggcactgcaacgctatacagaagatcttgcgcaacctaaatggcatcgtgctaatctttatcaacaatttatttctactttgaatgatgtgcctatgggggcgcttgcgcactgttttccatcgcgtatttttatttgtggtatttcagcattgccacaagtctatttgcaagcactgcaagcaattggtagacataccgaaatctatttattgtttactaatccttgccgctattattggggagatattcaagatccaaaattcctcgctcgtctaaatagtagaaagcctcgacattatcagcaacttcatgaactaccttggtttaaagatgaacaaaatgcatcgacactatttaatgaagaaggggagcaaaatgtcggcaatccactattagcgtcttggggaaagttaggtaaagataatctctattttctttctgagcttgaatatagcgatgtgttagatgcttttgttgatataccaagagataatttactgcatcaacttcaggccgatatactcgatttagaggatttttcacaaataggtcagacgcttgaggattaccaaagtagtgaaaaaaaacggatcatcgccaatgatgatcgctctttgacctttcatgctagccatagcccacaacgggaagttgaggtattacaagaccaattactgcatctcctcgagcaagatgctgatttattaccgcgagatattattgttatggtggcggatattgatagctatacgccctatattcaagccgtatttggtaatgcgcccgcagagcgttatattccttttgccatttcagaccgaaaagctcgccaagtacatcctgtcttacaagcttttatcactttattagaattacctcaaagccgttttaccgcagagcaagtgcttgcattacttgaagtacccgccttagctgcgcattttgccatttttgaaaatgagttgaagctactacggcgctgggttgaagagtcaggtatacgttggggattagatgatgaaaatgtggcctcctttttattacctgtgacaggaaaaaatacgtgggagtttgggttattaaggatgcttcttggttatgcgatggacagtgaggcagggccgtggcaaggggtactgccttacgatgaatcaagtggcctagtcgctgagttagcagggcatctagcagattttttatataccttaagtgaatggcgaacacgattaagcgaaactcgaaacttagaagagtggcttgatatcggtcaacagcttgttgatgccttttttgacactgatgaagagacagagctggtattggcgcttatcacacaacagtggcaaaaggtgataaaaaatggtctagaggcgcactatcaacatgaaattccattagtgctgatccgcgatgaacttacagtgcgttttgatgatgagaaaattagccaacgctttttagccggaagccttaatttttgcaccttaatgccaatgcgttcaattccatttaaagcagtctgtttattgggaatgaatgatgggatctacccacgtaatattcagccattaggatttgatttaatggcagaaaaacgtcgtcgaggtgatagaaaacgtcgtgatgatgatcgctacctgtttttagaagcattaagctcagcagaaaaatacctttatatcagttatattggtaaatctattcgtgacgatcgtgaatgtaatccttcggtattgattaaagagttacaagattatattgggcaaaatttccgtttaagggaagatgcatcattaaatgttgatgacagtgcgcagcgtatcatcagccatttattaacccaacatagtcgagtgccttttgcgccagaaaactttaaaacggatactttatatcgctcttatgccgctgaatggttaccggcagcaagtgggaaaggaactgctcaccaagcattttcaacgccattaaataaaaaaattgagaaagtctctttagatgaactatcacgcttttatcgccatcccgtacgcgcttttttccagcaaagtctaaaaacgaattttgttattgaagagaccgagctaccggaagaagagccttttgtcattaatgcattacaacgttatctattaaaccaatggttattaaaagccttaatcgaagggacatcaacagaagcactttatgaacgcattaaagctgctggaaaattaccagctagtgcgtttggtcaaatttattgggagcaacaaatagaaacgttgcaacctttagccgaaaaagtcagaagtgaacgtttagcaacccattctgtcacaatagaataccaatttaatacgatcccattaattggtcgtttaaatgaagtacaagccgatgggttactccgttggcgacccgccacattaacagctaatgatctactgcaattatggatagaacatctcgtgtactgcttaagtggtggaactggcgaaagccgtttttatggtagaaaagagtcgcaatggtgtctatcaccggtgtctgcggatattgcgtattcaatccttgaaagattgatccaagattatcaaacagggatgaatacacctttagccttattcgccaacagtggttgggcttggttacaagcttgcttcgataaaaaaacacagacgtttttatttgatgatgaagagatacaaaacaaggcagaattggtattaacgcaatatttaaccgatagctataaccgagaaggtgaaatgaatgatatctatattcaacgtgtatttcatcagcttgatgcaccttttcttgaggcagtaaaacagaccacgttagccatatttaagccaatcattccatttataaaaaaataa

SEQ ID NO: 296995 - DNA, 909 bp, Proteus mirabilis
atgagcgaagaacaaacctattgcggatttattgcgatagtcggtcgccctaatgtagggaaatcaacattactgaaccaattattggggcagaaagtttctattacttcacgtaagccacaaaccacccgtcaccgtatcatgggtattgatactgatggtgcatatcaggctatttacgtggataccccaggcttgcatattgaagaaaagcgagccattaaccgtttaatgaaccgtgcagcaagtagctctattggtgatgttgaactggttattttcgttgtcgaaggaaccaattggacgcctgatgacgaaatggtattaaacaaattaaaatcactacgttgtcctgtgctattagcgattaataaagttgataacgttacagataaaaccaagttactgccacatattggttttttaagtcaacaaatggattttctagatgtagtgccgattagtgctgaaaaaggcatgaatgtcgatactattgctaaaatagtgcgtaactgtttacctgaagccattcatcatttcccagaagattatattactgatcgctctcaacgttttatggcgtcagaaattattcgtgaaaaattgatgcgctttttaggtgaagaattaccttattctgtgacggttgaaattgaacaatttgttactaacgatcgcggtggatatgatattcacggtttgattctggttgaacgtgaaggccagaagaaaatggtgattggtaataaaggcgctaaaatcaaaaaaatcggtacggaagcccgcatggatatggaagatttatttgaaaacaaggttcatcttgaactttgggtgaaagtaaaagcgggttgggcggatgatgaacgtgctttacgtagccttggctatgtggacgatttaaaatag

SEQ ID NO: 296996 - DNA, 681 bp, Proteus mirabilis
atgaatactctattagttaaccagttacaaaaaaaactgggttatacttttaaacaaaatgaattacttttacaggcacttactcaccgtagtgcaagtagtaaacataatgaacgcttagaatttttaggtgattcaattctaagttatgtcattgctaatgcgctttaccatcgtttccctcgtgtcgatgaaggggatatgagccggatgcgtgcaaccttagtgcgtggtaataccctcgctgaactagcacgtgaatttgaactcggtgaatgtttacggttagggccgggagaattaaaaagcggtggttttcgtcgcgaatctattttggccgacacagtagaagcgttaattggtgctatttttcttgatagtgatattcaaaatatcgaaaatatcatcttaaaatggtatgagaatcgcttggctgaaatcagtccgggtgataagcaaaaagatcctaaaactcgcttgcaagaatatttgcaaggacgtcatttaccactaccttcttatgttgttgtacaagtacgtggtgaagctcatgaccaagagtttacgatccattgtcagataagcggtatcgaccaacctgttaaagggatgggtacaagccgtcgtaaagccgaacaagccgctgctgaacaggcattaatacaattggagcttgaatga

SEQ ID NO: 296997 - DNA, 1797 bp, Proteus mirabilis
atgaaaaacatacgtaacttttccattatcgcacatattgaccacggtaaatcgacgctatcagatcgaattattcaaatttgtggtggcttaacagatcgtgaaatggctgcgcaggttcttgattctatggatcttgagcgtgagcgtggtatcaccatcaaagcacaaagcgtaacactcaattataccgctgatgacggtgaagtttatcagcttaactttatcgatacgccaggacacgttgacttctcttatgaggtttctcgctctcttgccgcttgtgaaggtgctttactggttgtcgatgcagggcaaggggttgaagcccaaacattagcaaactgttatacggcgatagatatggatcttactgtcgttccggtattgaataagattgacttacctgccgcagagcctgagcgtgtcgctgaagagattgaagatattgtcggtattgatgcgaccgatgcagtgcgttgttctgctaaaaccggcgtgggtgtaaaagaagtgattgaacgtctggtgaaagaaatacctgcgccagaaggcgatcctgacgcgcctctacaagcacttattattgactcttggtttgataattaccttggtgttgtctcacttatccggatcaaaaacggtaaagtcaacaaaggcgataaaatcaaagtgatgagtacagggcaagtttataatatcgaccgtattggtatttttacgcctaaacaagttgatacaacatcgctaagttgcggtgaagtaggctgggtagtttgcggtattaaagatattcttggtgcacctgttggggatacattaacagccgcacagaagcctgcagacaaaccattaccgggctttaaaaaagtcaaaccacaggtttatgcggggttattcccggtcagttctgacgattatgaatcattccgtgatgcattaggaaaattaagcttaaatgatgcgtcactcttttatgagccggaaagttcatccgcattaggatttggtttccgttgtggtttcttaggccttctccatatggagattatccaagagcgcctagagcgtgaatatgatcttgacctgatcaccacagcaccaacagtagtttatgaagtggaaatgaccaatggtgatatcatcatggttgatagcccatcaaaactgccggcactgaacaatattgaagagatcagagagcctattgcggaatgtcatatgttactaccgcaagaatacttaggtaatgtgattactttatgtgtcgaaaaacgcggcgttcaaactaatatggtctatcatggtaatcaggtttcattaacttatgaaattccgatggctgaggtggtattagatttctttgaccgtttaaaatcaacctctcgcggttatgcttcgttagattataacttcctgcgtttccaaggctccaacatggtacgtgttgatgtcttaattaatggtgagagagtcgatgcacttgcattaatcacccataatgataacgcaccgtatcgtggacgtgagttggtggaaaaaatgaaagaattcattccacgtcaacagtttgatattgcgatccaagctgcaattggcaatcatattattgctcgttcaactgttaaacagttacgtaaaaacgtattagctaaatgttatggtggtgacgttagccgtaagaaaaaactgttgcagaaacagaaagaaggtaaaaaacgtatgaagcaaattggtaatgtcgagttaccacaagaagcgtttttagccatactgcatgttggtaaagataaataa

SEQ ID NO: 296998 - DNA, 465 bp, Proteus mirabilis
atggttaaagagtgggcaacagtcgtacattggcaacaagggagggctttactacgttatggctcatcgtccggttgcgggagttgccaagctcgagcagcttgtggctcttatttattaaataaaataggtcctgaaactgttcatcagttagaacttcctgttgagcaacctttagtggtggggcaaaaagtggaagttggtatcccagaaaatagtttacttcgctccgctatgttggtttatcttactcctttgctgggattatttatcgttgcagggatagccagcctgtggctttctagtgagttggctattttttgtagtggtttagtggggggagtgttaggctttttattagctaaaaatattgcccgctggtggagtaaagatgaaggatttgaacctattattttacaaatagggcttccacctaatgaattgcaagtacaatatcaagaataa

SEQ ID NO: 296999 - DNA, 759 bp, Proteus mirabilis
atgaagcaaaagaaagtaaagaaagcaggtttacgcaaaggcgggtttacatttaaacaattttttgtcgctcatgataagtgtgaaatgaaagtgggtactgatggcgttttattaggtgcttgggcgcctatcactaaagcaaaaacggtgctcgatattggtacaggaagtggattaattgccttgatgttagcgcaacgtgccccgcaggttgagcgtattgatggtattgaacttgatgaagatgccgcattacaggcgcgtgaaaatgcgcaacaatcacagtggagttcgttaatccatatttatcatcatgatatttatcaatatgcgcaacaagcgccaactcgctatgatcttattgtgagtaatccaccctattttgagccagcggttgcatgccgtaaccaagagcgcgagcaagcccgttatacgaaaagattgacccatgaaggtttgcttgataatgcacaacagcttattacagatgaaggcctattttgtgtggtgttaccctatttaatcggtgaacagtttattgaaatctcacaaagaaaagggtggaatgtcgtacagcgagttaatattaaagatagtgcagataagccttaccatcgcatattgctagcctttcaaagacagtatcaaggcgaaactaaaccatgtaatattgaagagctgattatccgcaataatgacggtcattacacaacccagttccaatcttgggtcactgatttttatttatattattaa

SEQ ID NO: 297000 - DNA, 1356 bp, Proteus mirabilis
atgacagccacgacattttccagtcttgaacttgatgaaagtttattgaccgcattagaagaaaaaggatatcaacgtcctactgctatccaagcagaagctatccctgccgcaatggaaggacgtgatatattaggctctgcaccaacgggtacagggaaaacagcggcattcttacttcctgctattcaacatttacttgattatccacgaaaaaaatcagggccacctcgtgttctgatcttaactccaacccgtgaacttgctatgcaagtcgctgatcaagcaaaagaattatgtgctcatacccatctagacatcgcaactatcaccggcggtgttgcttatatgaatcacgcagaagtttttagtgagaaccaagatattgttgttgctacaacaggtcgcttattgcagtacatcaaagaagagaactttgactgtcgtgctgttgaaatgctgatcctcgatgaagcagatcgtatgttagatatgggttttgctaacgatattgaaactattgctggggaaactcgttggcgtaaacaaacattactcttttcagccacattagaaggcaatgctgtgattgattttgcacagcgaattcttaatgaaccggttgaactgaacgctgacccttctcgtcgtgagcgtaaaaaaattcaacaattttactatcatgcagataatcttgaccataaaactgccttacttgcacatttactcaaacaagaagaagttaaaaaatcgattgtttttgtacgtaaaagagagcgagtcagagagttagccgcagcattagaaaaacaaggtatcaaagccagctaccttgaaggcgaaatggctcaaacacaacgtaacgaagcgattaaacgtgtagagtctggcaaaatgcatgtgctgattgcgacagatgtggcgtctcgaggtcttgatttagaagatatcacccacgtctttaactttgacttaccgcgcacagctgatgtttatttgcaccgtattggccgtacaggtcgagcgggtcgtaaagggactgccatttcattagttgaagcacacgattatccgctacttggtaaaattagccgttatatccaagagccgattaaatatcgtgttgtagcccaattacgtccagtgactaaagcccctagtcaaaaagcatcatttaagccttctaaaaaagtattagcaaaacgcaaagcgaaaaaagtagaagagaaaaaaaacgtaaaagagaaagtacgcgcacgcgatcgtaaaaatattggtaaacgccgtaaaaccgctactgataaaaccaccatcactgcggaaaaaactaatcatataaaaacagagcaacaataa

SEQ ID NO: 297001 - DNA, 360 bp, Proteus mirabilis
atgaaaacatcagaattaattaagaagctacaagaaatagataaaactgtaccttttgatgctgacattgttactggtgatgactggctcccttgtggtgttgaaaatgtttaccacgccccacccaatacatatattcaattcaactcctatgatgccgacgagatgtggggagatctacaagaaaataataggcgtacatctattgtcgaactatcagcgcgagttagcgaaataaatgatgtagtaaaaatgatagagtccaacccttcaattacagccttggatataataaaagaattaaattccagatctaaacggatgtcagaaatggctaatttattgaaaaaaacagagtag

SEQ ID NO: 297002 - DNA, 414 bp, Proteus mirabilis
atgaagattagagaaaatgatttttgggtttatttttcatctaaaaatgaaagcaatagcacaaataacgacaaaattggtaagtggatgtatttttttaatgatgcggaattcacagaaaaaatatgtcaaaaagcaattttaaatagtgtagtcgagcattgtaaatatacgaataatgctgaatctggagttgcgtgtttttacttaaatattgatgatattgaagggcataaaaaagttattaagttttttttagataataaattaattcccataaataaatcaggtaaatttaagaatatatcattcaaattagacatgcagacaatgaatcgggaatatggagacaagtttgaaggtaagttatcattagagcattttattgatttgagctctggtatttttaagtga

SEQ ID NO: 297003 - DNA, 1437 bp, Proteus mirabilis
atggcacaaccgtttattcatacctctgagctttgctggtcacctcaagaactaggcttaatggcccaagcgattgagtcttgctttttgcaatatcaaataagaggtgaggttgtcggttatgatgaaggcgcaacatttaccctctttagaatcgaattgggtagagggataaaagtctctcaagtgatagcgttattgccagaattgtgtcgttccctgagcgtcgttgatataaaagttattgattttattgcgggtacaccttatatcggattaagagtgactaatacctatcgtcgagtggtgtcttttgttgaatgctttaatctatggagcggaatcaatgggttatctaccctttctgtcatgttaggtgaagatattataggagaaccaataggctgggatttggctcaaatgccacatttacttattgcaggtgtaacgcgctcaggcaagtccatgttaatgcattccttggtaatgagcattttatacagaaactcgccggataaagttcgctttgtgatgtttgatacaagccagcttgaactcagtttatacaacgatataccccacttattgtttcctgttgcctctgattctattgaatcaataaagccattatcgtttttagtctctgaattgcaacgccgtcaaaaattatttagtgcgttaaatcagcgcaatttgagtggttacaataagataatatcaaatgcaaaagagttaggtaagcctatacctgatcctttctggtgccctaatgaaaattatagtgagcatccttatttagacagtgagcctgaaattgttgtttgtgttgatgattatgttcaactcattggcgagtataaacaaataggagaaatgttagttctattgagtcagcaaggttatgcggttggcattcatctaatactaacgactcgtagccctttatccaccagtatcggttcacagcttcgaattaatatcgctacacgtattgctctttctgtatcgtctagggctgattctaatttaattcttggacagtatggcgctgagtcactatttggtttgggtgacatgttatttgtatcaccgagtttctctgaacctataagaattcaaggtgcctatgtgagtgattcagatattagggatgcagtcgattattgtaaacgatggggaagcgtgagttatcttaatctttatgatgatgtccagaatacaaatatgtcagctgaagagcttgacccattatttgctcaagtagttgaatttacggtagaaaaacagtgggtttctatttcaggtattcagagacaatttcgaatcggttataacagagcagcaaggattatagagcagttagaattacagggtatcgttagtgaacaaaattgtaatggcaatcgagaagtattagctccacggtttgatagctag

SEQ ID NO: 297004 - DNA, 3279 bp, Proteus mirabilis
atgagccatatcttcactgaagctaaattggaacaggcgataatagaactgttaggacaacatacaaacaatgctgggcaaacctgctatccgcattatctcggcattactattcctcgcaaaaacaacagtgaagtattgatagtggatgatttgcgccagtatcttgctaaacagtatcaagcagatggcatcaccgacggtgagatcactaagattgtacagcagttgcagtctctccctgcgagtgatctctaccaaagcaacaaaaccttctgccattggctcagtaacggctttttacttaagcgcgaagatcgcaaccaaaaagacctatatatcgaacttatcgatactcaaaccttgcccgaccaattagtaaaattatttgcaggggaagaagtgctatccgtagcagataataatcgctatcggctagttaatcagttagaaatagaagggcaggcgcgagacggcggggtgcaactgcgcatccctgatgcgattttatacgtcaatgggctaccgctggtggtctttgaattcaaatcggcagtgcgtgagaaagaggcaacgctatttgatgcatggatacagctttgtgtgcgttatcgtcgcgatattcccaagttatttgtctataacgccttgtgtattcttagcgatggcgtgaataacaagatgggtaatctatttgccccttatgaattctactatgcatggcgtaaaattaacggcaacgaatcaacggaaaagcagggcatcaacggcctgtacaccttaattgaagggttattccatcctgctcgtttattggacgtactaaaaaactttgttttcttccctgataccagtaagcatgaagtgaaagtgtgctgccgctacccacagtattacgcggctcgtaagctctattacaacattgagaaagagcgtaaacagatcactgcggatggtgaaaatatcggtggtagtggtaaagggggcacctactttggcgccacagggtgtggtaaaagctacaccatgcagtttttagcgcgtctattgatgaaaagcgtcgattttgccagcccaacgattattttaatcactgatcgcaccgatcttgatgaacaactggcaaaacagttttgcaatgcaaaagcctttattggcgatgaaattattgtgcccgtcaccagtcgccaagatttacgtgataagctagcagggcgtgctagtggcggggtattcctcactactattcataaatttactgaagatatccaactgctttctgagcgcagtaatattatctgtatctcagatgaagctcaccgtagccaaatcaatctcgaccaaaaaattatcatcaaccaagaagacggtacggttaaaaagacctacggctttgctaaatatctacatgattcactgccgaatgctacttacgtcggttttaccggaacgcctatcgacgccaccttagatgtcttcggggaaactatcgatagctacaccatgaccgagtcggtaaatgatgaaatcaccgtgcgcattgtgtacgaagggcgtgcggctaaaattgcccttgataacagcaaactagaagagatcgaacgttattatcaagaatgtgaagcccaaggcactagcgaatatcagatagaagaaagcaaaaaagccatggcgaacatgaactctattttgggtgatcctgatcgtattgatgcgctagcaaaagattttgcgcaacattatgaaaaacgagtagaagaaggttctaccatcaaagggaaagcgatggtggtttgtgctagccgtgatattgcttatgcgttttatcagagcctaaaattacaacggccagagtggtttgaagcgaaacaggcaattgacggtgtggaactcaccgaacaagagaaaagcgagttaatgcctttaccaatggtcaatatggtgatgactcgtgggaaagatgatcatgaggcgatgtacaacttactgggaacaaaagactaccgcagagagttagataaacagtttaagaacccgaaatccaactttaaaatcgccattgtggtggatatgtggctgacgggctttgatgtgcctgagctagataccatctatatcgacaagccgctacaaaagcataaccttattcaaaccatttctcgagtgaatcgtcgttttgaggggaaagagaaggggctggttgttgactatatcgggattaaaagccgtatgaatatggcgctggcgatgtattctaaagccgataagtctaactttgaagatgttcagcaatccattgtagaagtccgtaatcacctcaatttgctttcacaggtatttcatcaattcgatagtcgcgattacttttcaggctcgccaacacggcaattagactgccttaatcgggcggctgagtttgtcctgcaaaccaagaaagttgaactgcgctttatgggcttagtaaagcggttgaaagccgcttatgatatttgcgtgggcagtgaagatatcacccaagatgaacgtgaacatatccatttttatttggctgtacgctctatagtctataaattaaccaaaggtgatgccccagatacggcgcagatgaatcaaaaagtgcgagagatgatagcggaagcccttaaagccgaaggcgtggaagagatcttcactttaggggacgaaaaagctgaaaatatcgatatttttgatgatgaatacatggctcgtatcaataaaatcaagttgccgaatactaaaatgcaactgttgcaaaagatgctccaaaaggccattagtgatttccaaaaggtcaatcagctgcaagggattaatttctctaagcgtttccaagcattggttgagcagtataaccaacgcaaagaaaatgatgtgctcaatggcgaagagttcgacgatttcactgcacaaatggcggatatgatttatgacatcaaggcagaaatgatgtcgtttgaggatatcggcatcgatatggaggagaaagccttcctcgatattttgcagcatatgtgccagaaatacgatttcacctacgatgacgacaaaatgctggcacttgctaaggacatgaaacttattgtcgatgacagcacacaataccctgactggagcaaccgggaagatattaaagcgaagctgaaagttgacttgattttgttattacaccgttatggtttccctccagtggcgaatgacgaagtatataaaagtgtactggaacaagccgagaactttaagaaatatcaattggggtga

SEQ ID NO: 297005 - DNA, 1344 bp, Proteus mirabilis
atggggagtaaatggcaacaaatacctttaggtcaattgatctccttacaaagaggtcatgatctacccacacaaaatagagtcaatggtcaaatacctgtcatgggttcctctggattaactggatggcacaatgtgtcaaaatgtacaggccctggggttgtgattggccgtagtgggaattcaatgggggtagtaagttattctgattcggatttttggcctctgaatacgtgcttatatgtaacagatttcaaagggaatgatgaaaaatatatttattatatgcttcaacagattgattttgataaatttaattcaggtagtgcacaaaaatctctaaatagaaatgcagtttatccatacaatgtgatggcaaccattgatatagaagaacaaaaaagtataggtaagatccttgctaattttgaagacaaaatcaccctcaaccgccaaatcaaccaaaccctagaacaaatggcgcaaaccctatttaaatcatggtttgtagattttgatcctgtggttgataacgcactagatgctggtttttttgaacaggatttaggcttttctgaagaattactgcatcgagttgaagtgcgcaaagcagtgcgtgaaagtgataattttaaaccgttatcagaggatattcggcggttatttcctaatgcgtttgaagaatgtgctgagcctgcattgggacttggggggtgggtgccgaaagggtggaagggacagcccattaaaacacattgtgtaaaaattcaaaatggtgggactccaagccgttctaattcagattattgggatggcggcaatataccttggctaacatcgggtgaagtaagacaatcaattgtcacgaatgttgagaacacaattacagacctaggcttacaaaattcatctgcgaagtgggtaagttcttactccactcttgttgctttatatggagcaactgccggtgaggtatctattaatgtagatccattaacaacgaatcaagcggtatgtgcactaattcctaaagaaagttattgttggtttaactacctccaagttcgaaataaaacaatagaaatgcaaaatcaagctgtaggctcagcacagcaaaatataagtaagaggttagttgagaacttaattgtgatatcacctctgccttatattgtggagatctttaaccaaagagtagaaccattatttttgaaatcaatatttaaccaaaaaatggctatggagctaaccaaactccgcgacacgcttctccccaaattgatctccggcgagctgtctctgagtgatataaaaatagatattccagaagaaacacttatttaa

SEQ ID NO: 297006 - DNA, 1605 bp, Proteus mirabilis
atggctaaatcacccgctaagaaaacaaccaaaggctttgaagagaccctttgggatactgctaatcaactgcgaggcagtgttgaatcttctgagtataagcatgtggtactcagtttggtgttcctgaaatttatcagtgataaattcgaagccaaacgcagccaattaatcaaaaatggtcaggaagcttttgttgatatggatgttttctatcaacaagataacgttttctttttgccacaagtatcccgttggtcttatgtccaagagcgtgcgaaacaagatgatatcgcggtgattattgacactgcattatccactatcgaaaaaagcaacgcatcattgacaggcgcattacccgataactacttttctcgccaagggctagagccgaaaaagctcgcttcacttatcgacagcattgaaaacatcaataccctcgccacggaatgtggggtaggggaagaagatctagttggtcgcgtttatgaatatttcttagggcgttttgccgccagcgaaggtaaaggtgggggcgagttctatacgccaaaatcggtagttacattacttgctgaaatgctcgaaccttatcaaggcaaagtgtacgacccgtgctgcggctccggcggtatgtttgtgcagtcactaaagtttgtcgaaagccaccaagggaaaagcaaagatattgcaatttacgggcaggaactgactagcaccacctataaactggcgaaaatgaacttggcggtaagggggcttacgggcaatttaggggagcgccctgcggataccttttttgccgaccaacaccctgatctaaaagccgattttattatggcgaatccgccgtttaacttaaaagattggcgtaatgaagccgaactgactaatgacccgcgttttgctggctttcgcacgccaccaacagggaacgctaactatgcgtggatcttacatatgctgtctaagctgagtgaagatggtgttgcggggtttgtgttagccaacggttcgatgagttctaataccagcggtgagggtgaaattcgtcaaaaacttattgaagatgatcgtattgagtgcatgattgcactacccggtcagctcttttttaccacgcaaatccctgtttgcttatggtttatcagtaaaagtaaacaagccagcgccaaatatggttatcgtgatcgccaaggggaaaccttgtttatcgatgcccgtcacctcggcactatgataagccgtacccaaaaagagcttaccgcagaggatatcgccactatcgctgataccttccatgcgtggcgcagtagtgaaagtgaattgaaacgtcgtattgctgccaaagaaatcggtattgagcagtatcaagataaggcaggcttttgcaaagttgctacccttgatgatatcaaggccaatgattttgtgttaacacccgggcgttatgtgggcgctgcggaggttaaagatgatggtgtggcatttgaaaccaagatgcaggaactaacccaaaccctttatcgccagatggatgaagcggcagagttggataaggctatccgtaaaaatatggaggtgttgggttatggggagtaa

SEQ ID NO: 297007 - DNA, 570 bp, Proteus mirabilis
atggaataccaattcaaatcatatagtaaaggcagcaagaaaaaatcattaccttcttacatctttgttatcctgtactgctcttggttagcttatctatttttgtcgctttatttaggcgataacattgtattatttgaatggtttcctaaatggacgattattattatttttgctattttcacagggattattgggggaatatggcaccctttctttcgcccatcaaagtatgttatcagtgattattattggggggcttttcttggccttatgataattattccaacttttaatgtgcttgcttatttatcattagaccaaacaattcactaccaaacacaatatcatatcgtctcgccagggcctgaacgtcttaaagcccctcaatgtgaatatggtatatggataaaagaaatttataccggggaatgggttttttggtgtattagagatccaaaatcgaaaaccaaggaaaatacgggaaccgtatgggttacagcaaaaacagggcctattggtgcagatattgttgattatcagttttaccctcctaacgctcagcaataa

SEQ ID NO: 297008 - DNA, 384 bp, Proteus mirabilis
atgtcagataaagtaaaaagtgtgttgctgaacgctaaaaactataataaatcagatgaagaaattctacatctacttgttcgagaactacagtatgttggcggtagaacattagcgaatacgatccctcgtaacggtattaaatacgccgaaattgtagatgatgtagccaaaaaatttaagattaaatgccccaaatggttatatatttatatctatttagctaaatcttttaatgcaaacagaccttgttctgctactgtagctattttatcggatgccagcaattatcctagtttaaacgcatcatccccaatattttctaactgcttggctagtaatctagagctggctaagatgtcggtggctgggaaaagacaataa

SEQ ID NO: 297009 - DNA, 696 bp, Proteus mirabilis
atgaaaaaagtattactcagtcttgctatgctgagtgtaatatcaacgccggtattggctaaagctcctgtagctaacttaaaaatcaatggtgatattaaaccaccaacttgtactattaatggggcgacacaaagtgatgttatctttgattacggagtcataagcccaacgcttatccctcaatcaactatctactcttatccagccagtatagctcaaaatacagttacgattgaatgcgatgcaaaaacatatttaacctttgttgcatctgatacttatgctgatacagaattaagtgttaataatacatcaggctggtttcatttagttgataaagcaaatcctgaaaccgcggttggtgcggctttcttcgcatgggataatgtgactgtcgatagcaaacctgcgtatatttcacgggcaaatgatgtagctattacaggggatagttttaataacgttttatacaaaggagcaaccaatggttggacatcagagaaacaatcaggtgttaataaaaactctctaaaattaatttcaggtgaaattttccaatcaaatttcagacaaggaatgacacaaaatacttttattttatctagagatgaattaagtaaaaaaggaatagatttatctaacggtttagattttatgggtgaagccgtcctcacttttaactttggtatctaa

SEQ ID NO: 297010 - DNA, 1728 bp, Proteus mirabilis
atgcaggaaaaagcattaccccttgcgcgtcgtcatgttggcgggcaacaccgtttctttaaatggagtttgctaagcttatgttttatgtcagcgcccttattggctgaccacgtcaaccaagcactctctatcgatgcccgcgagcaacaacgccagcaagaacgagagcgcatgttacaacagcagaacaaccccgttgtggatacgcgtattcaacagcctgatttaacgctacccgattatccgcaaaatgaacaaccctgctttaccatttccactatccgtcttgatggtgagtccgctgccgattttcagtgggcattaaaagccgttaacgacgccaaaggccagtgcttgggtagccaagggattttgctagtcctcaataaagtccaaaatgccattttagaaaaaggttatgtcaccacccgcgtgatggcacaagagcaagatttgaaccaaggtgagttagtcctcacgcttcaaccgggacgaattaatgccattcgttttgatgaaggcacttcatggcgtgggcgtttgtggaatgccattcctgctgcctcaggcgatattctgaatctgcgtgatattgagcaagggctagaaaactttaaacgcgtacccaatgtcactgccgatattcgtatcgaacccggcccaattgatggtaccagtgacttagtggtcagttggcaagaaaagcgtcctgtgcgattaagcttcagtcttgatgatagtggctcaaaaagcaccgggcgctatttaggctctgcgacgctagccattgatgcgccgtttgcccaaaacgatatgttttacgccaatatcagtaaagacttgtttgataaaggcccttttggtaaccgttcttacaccctgaactatttcattcctgttggcaattggggctttgccgccaattacaatgaatataattatcaccagaatattcccaatgccaacgaagtgttacgttatagcggtaagagcgataccgcacaatttactctatcacggctactgtttcgcgaccaaatccacaaaaccacccttaatctgcgtacttaccgaaaaaccgccagtaacgccgttaatgacattgatattgaacaacaacgccgccgtaccgcagggtgggaaatcggccttaatcagcgcagcttcttaggcaatgccacactcgatgccaatattaactggcgtcgcggtacaggcgcctacggcgcacgccgtgcccctgaagaagatacccacagcggcagtgcccgcgtgggcatttttcttggggacatcagtttcaatcaacccttcacgttgggcgaacagccttggcgctggaataccgctttacgaggtcaatggactcagcatgccctaacaccacaagagcgcatgtccattggcggacgctataccgtgcgtggttttgacggagagcaagtactgtcgggtgaaaaaggcctgttatggcgcaacgaactggcatggaatgttttttctaaagggcaagaactgtatttagccgctgattacgggcgtgttgaaggccaaagtacccaataccttgtgggacatcaacttgccggtaccgcattaggacttcgtggctcacttttctctcgtttgagctatgacctgtttgttggcgtgccgttatataagccgaaaaaattcgatacgtcaggagcgacggcaggttttagcctcaaccttgaaatttaa

SEQ ID NO: 297011 - DNA, 2103 bp, Proteus mirabilis
atgaacaagcattgttatcgtttaatttttagccgcactcatggggagttacgtgttgtatcagaactggcgaaaagctgtagcaccgattcaggccaaacacgaggcgtaaatggtaatcgtctatgggtcactctacgccgcacctcattactgctatggttagctttgtggggtacctcagccatggcgagcagcattattgccgataacaatgcaccacaaaaccaacgcccagaggtgatcaatacgcaaaatggacttccacaagtcaatattgcggcaccaaatggctccggtatttctcataaccaatataaacaatttgatgtcgataaccgtggcgccattctcaataactcggcagtgatgacttcaacacaaaccgcagggatgatccaaggtaacccgaatcttgacccaaacaaagcccctgcgcgcgtgattctgaatgaagtcaacagcaataacccaagccaaattaaaggctttctggaagttgcaggcggtaaggcgcaagtgattgtcgctaacccatcgggaattatttgtaatggctgtggcactatcaatgcaggtcgtatgacccttaccacagggaaaccccaatttaaccaagacggtagccttgcaggatatcaagtagaacgtggggttattcgtgttgaaggtggaggattaaatgccgatagtcgccacgatacgcagtatgttgatctgctcgcccgtgccgttgaaatcaattctggtgtgtgggcgaaagaaaaaatagcgatcgttgcgggtaaaaataaggtcgatactaacaataaagccactcccatagagagccaaactgcacaacctgaatttgccatcgacatgggccaaatgggtggtatgtacagcggttatatccatatggtgggtaccgaaaaaggcgtgggcgtgcgcaaccaaggtgagcacatacaagcggataaaaccttaacggtgaaaagtaatgggcagttagtctggcaatcagcaaaaacacaagaaaccgttacccaagccaacggggatattaccttattagccaaagacaaccttatacatcaaggtaaattacacagtggtggcgtcttaaacgtagaaagtcaaacaggttcagtggacaactcggggacacttgctgccctcaaagacgttaatatcaatgcgaaaggcgatatccacagccaaggtaacgtgctcacgggcagtgataataaaagtaagattattaataacgccaatatcatattagccagtgagggaaaaattgatactcgtggcacattgctaagtaagcaaaatatcactgcaacagcaaaatcactggatttaagccaaacacaaatcgcggcatcaaacttggcgctgacatctaaacaaggggatatcgcccttactcaagcaaaaattgatgtgagtgatgtcaaactcagtagtgtgcgtgatattcatactcagcaaattcaaattcaagcccaacaatggaatatcaacgccaataacctagttaatcaaaatggaacttgggtacaaacagggcaaaatgagagccaattttccctcaaagggcaactaaataatcaaggcggtgcgattgaaacccaccgccttaagctcaatgccgattcactgaataaccaagcaggccgattagttgcgttaagcaagagccaacaagattggcagataaaaaatagcattaataatcaacaaggtgaagtcggggcaaatagcaatttaactcttaccgcaaactcaattgataatcaatcgggcaccattaaaagccaaactaaactggctttgaatgccaaagagcaaattgataatagcgcaggtaaccttgtggcaggaaatgccgtcaacctgcaagcaggcaaatcgctgaacaaccaatcgggggcgattaatagccagcaagtcactatcaccacggacaatctcaataatgcactgggtaaactggatacccttccaattcaccgtgctgagagtcccactcatagatttttcgccctttatcaccttttcaacgattacgtcgcccagtaccaccctgttttggggttttacctgaaacagaagtga

SEQ ID NO: 297012 - DNA, 465 bp, Proteus mirabilis
ttggaacgaaatcctgtcactgtggttcctagacaaaaaggtgcagataaagcgctagatagatttttatcatgggatgaattgaagctattattagagctattcaataagcccactatcgactgtcctattaactcagattatgcgcgcctatttctattttgcgtttattctgcagggcaaagaccatgggaaattctggctaatactcgcgacaattgggacaaaaagaacaatacattaacggttccacctcacatttcaaaaacaggcgattatcatgtgatccctttggttcagcctgctattgatactctgaatatccaagagctattgtatccaacatcaaattatctgtttcctgctgagactaaagaaggacacctgctaacatctgaatacgctaaacaattaaataaattttgtaaaaaaatgagtttgagaaatttacacctagagatgtga

SEQ ID NO: 297013 - DNA, 261 bp, Proteus mirabilis
atggatcagaagaacagtatcagtgattacaccgaagcagagtttttagattttgtaacaaaaatctattttgctgagggagctaccgaagaagatgacgataagttgattgatgagtttcgacgcttaaccgagcaccctgatggctctgatctgatttattatcctcgaagtgatagagaagacagcccagaaggaatagtgaaagaagtaaaggaatggcgagccaaaaatggtaagccaggctttaaacaaggttaa

SEQ ID NO: 297014 - DNA, 1863 bp, Proteus mirabilis
atgggacacagtaagcgttcagttgattctcttacggtgactgcggataaacccagtcgaggtgatttaggcagtggcccagtaggaaaaggtgagggcggtgataatcgtcatacctcatctgttaatcagttagatttaagcaaaacccctgagaaaatggcggtgatgtcttatgctgctcttccggtgacggtttatccggttaatggtgtacttgggtttacggttaattggggagccattgattctgctttgatgcaaggttttaatgttttaagcaaagcggcgccctatgtggggagattagtggggggtgctcttgtaggcgcactctatccgagtgataccattatgtccgaagccgaagaacaagcgatgttagagaaatcgcgcgcttttcgtgtggtggataaaacacagccttaccaagtaaccagtttaccggctaaggccgtgacatctgttccagccaatgatataccgaaaaacgctcaagtttctgtcactgtattggctgaacccgtgattaatctagagagtaaaaaacgggaaaatgcctttacccaacaaaaagagccatcacgggtatccgtggtgaaagccatccccaccaataaaccaaatgtgtataccgcgcaaattgtgccaactatgaagccgatgcagattcaaatagcttcatcaaagacagtggcgaaaaaaacggtaaaagtaaatgaagctcctaaggtcgaaggttatcttcctacataccccaattggctagaaacacaccatgctatcgtgcattttgatggcaagcatgagcctatttatgtttcagtatcgagaaaggtttctcctgaacaggaaaagaaacaagttgaagaaatacttcgtcgagataaagagtatttggcgacacatccggtagtagctgcagagcgaaaattagtcgaagctgaaaaagaattagctaaggcgcttgtttatgttaatgataaagagcagcaactgaataagttaaaaaatgaaccattaggtttatctttacttaaccctgttgctcatccattaaaagtagattggcatgaaatctatgagcttcctgactgggggaataaaaatcgtataaaatttgatttttttgcgatgatagaaacgaaggaacggcttaatttacttcttgataaaggtgcagaagcgttatttacggaagaaactgactggaaagaagttttaactaaatattcagaggataaagtaccacaagattatattgatagcccaacggaatcgatattaactctaggagagttctatcaaggcacagcaatagagcaactgacgttagttcgtgaacaattattaaagcaacggacgaagataaaagcggcggaggaagccttagtcattgcgatggaaagtcgtaagaaagcagaggagaagaaaaaagccgctgaggataagcttaataaggagaaaaaacgtaatcagccaggaaccgccacgggaaaagggcaaaaagtgggtgataaatggcttgacgatgcgggaaaagaaaaaggcgctcctattcctgaccgaattgcggataaactgcgagggaagaagtttaaaaactttgatgattttcggaaacagttttgggaggaagtctcgaaagatcctgagttggctaaacaatttaatcctggtaatttaggaaatataaaaaaaggtaaatcacctgttgttcgcgagtcagaacgagcaggtgcccgtgaacggtttgagctccatcatgataaaccaatcagccagggcgggggtgtctatgatatggataatctccgtgttaccacacctaaacgtcatattgatattcacagaggaaaataa

SEQ ID NO: 297015 - DNA, 618 bp, Proteus mirabilis
atgccaataagtcttatcagcactgatacctcgcggccaataactgttactcagcatgagcaagtcaaattatgcaagtctgagtctaaagataagctgtcatcagcgttctcaagtattaaaaatactactaacgagcttgagataaataaatctatagccgtaaaaatgaaagagatttatgatctcaagatagtcatgtgtcagattcaaacagttgcaacaaaacacggtgaaaatgctaccctacgcattaaagatggtcatatcaaatacggtgaaggtagtaattttttaaaaaatatgttacacagcagccgttaccagactgagcgtgaagacctagctcatttgtttcttaacgctaaagagggatctgtaactgctgggatggcaataaaaccatttcaacacctacatgataaaactattagagaagtagaagagttattaaataaacagcttccaactgttctcctagatcctaataatccgacccctgataatccagggcgaaaactcacaataattaagtatgacaattttgaaaaacaagtgtttgagaattttagtgggggcaataagttgctaaagcaatttaatcatctattcaattaa

SEQ ID NO: 297016 - DNA, 252 bp, Proteus mirabilis
ttgaattcgacttcaccggaagcacagcaagcgtataatctgttggaattttatactaaagcatttaaaaacttcggttataccgatgaagaagcacgtactcgtgcaggagtctatgtcggttctatttatgtatttggaggaatgtctgctattgcgaattctggggcttttgttaaacagtttgggaaagatgttgctaagccaaatgtagttccaccgaaaggtaaccaaaaacttgtggtgaattaa

SEQ ID NO: 297017 - DNA, 2379 bp, Proteus mirabilis
atgagcgaactatctaacgaaatttatgaacaaatacagaaacaaatacaaattgttacagaaaaattaacggaaagacaacttgatgctcgattagcagaagatatttctgatgcaatgggcaacttaaatttactcaataaccatatccaagaagaattagaaaaattaaaagaaaatagtgaatggaaacgttttactattgctttttatggtgaaaccaatgcaggtaaatcaactttaattgaagctttacgtttatatctcggtgaggaaactaaaaaagagagtcaggcaaagtttaaagaaatacaacagcagcttggattgacgcaagaagcatttgataaagttcgtcgtataattatggatatgacaaaagcgattgaagaaatacaacaagaaataaccaagttgtcgaaaaaatatgctgagccaattatacaagcagagttaaccattcgccaaatagaagagaaaaatacccaagaatcaaaaatattggcaacacaacataacaatgcaataaacgaaattgaatctgagatttttaacttaaatgaattgttggaaaaactaaaatcagagcaaacttggatacaaaaaataatagcttgcttcttcaaatcccatgaagaaaaacagcttattgagcttaaaaatcactgttcacaagtgaaaaaacaacaacaaattgagctgcaagaactcctgcaatgccaacaacgagaaaaacaacaagcagctacggcacttgaacaaatacaagagaaaaaacagcaagaactcactctattaagccaaaaggaacaagagctacaacaaaaacaacaacaagctgagcaagaaaaaaaacgtttagataatgatgctaagaaattaaccgattttgctgatggacagattattggggatggtcgttctgattttactcgtaataatacttcttttgactttaatgtcgatggacaaacattctctttgattgatgttccgggtatcgaaggtgatgaaacgattgtaagcacgccaattgaagaagccgtacgcaaagcacatgctgtattttatgtcactcgtacagcacgtccaccacaaaccagtgatggtgagaatgcaacgacaaaaggaacattagagaaaattaaaaaacatcttagcgcacaaagtgaggtatggtctatatacaaccaccctgctaacagtccgcgtcaacttacatcaccactattaaatgaagataaccgtaacagtctgatggcaatggatgaaaaattaaaatcagaattacaagaacaatactacggaagcttagttgtgagtgctcgccccgcttatcttgcactgacagaatgtatcgtacctggtagcaaagaagccagagaacaaaaaaagtttttagacaaatttggtgatccaaaaaccattttatcattaagtggtgtaactgattttatcactcatttaaagacaacaattattggcgattatagaaataaaattaagcaatcgaatttaaataaagcttataaaacactcaaagactctttaactgaattacaaaaattgcaaactgaattttctaatttgaatagaaatgtaaaaagtgaagtttcaaatgcaaaatcgaaaattaacgttgctttagatgaatttattggcacattaaatgctatagggagtaagatttgccgtaattttcacgatcaagtacaaacacatatttatgaaaaaattgacaacgatataagcaatgatgaatttaaacatgatctaaaaaatatattagagaaaaaagccatcacgatacaaagtgatcttaaacatgctattgaaaatgaagctaatatttttagcgagaaaattaaaaatattattgaccgttcaagtcaacatttaaaaaatattgttatcaaacaaaatgataatcttaattttgaacaaaattttaatcttaatattaatgttgataatggactacaaataagtgggttaattgccggtggtattggtggtgctataggcattgcttttttagcaaccaatcctgtgggatggacgctagcctttgttggtggagctatcgccctagttagctcattagttggtatagcaaaatctatttggggattttttgactcaagttataaaaaatcccaacaaagaaaagaagttaataagatcttacgtaatgcaaatggaaccatcgaaaaagagataaataaaatcatcggagaaattgagcaagaaatgcgggtagaaatacaaaagatccagaatgaacttgagctaccagtaaaacaatgtactgctatcaatagctcattaagacaagcgaatactgaattaacgactatcgctaaccatataaaatactaa

SEQ ID NO: 297018 - DNA, 1710 bp, Proteus mirabilis
atgagcaatactgtaactgaatttaaatatcagcaagaacagaactatcaaatattacaaaaattagctgaatttattgaaaaaggacgcgattttggtttagagccagatgtaaatttaatcaacaaattaacaacagcactcaaaactgcagaggaaaaaacattaaaagtagctttgattggcggtttttctgaaggaaaaacatccattgcatcagcttggttagaacgtttagataaagatatgaatattagtcaacaggagtcatctaatgaagtgcaggtataccgtttagatgacgatattgagctaattgatactcctgggttattcggttttaaagaacaactcaatagtgctggtgaaattgaaaaatataaggcaataacaaaaaaatatgttagcgaagcacatttagtgctgtatgttatgaattcagttaatccggtaaaagaaagccatggagaggatttaacctggctattccgtgaacttaatctacttccccgtacaatctttgttctcagtcgcttcgatgaagttgctgatatagaagatgaatgggattatcacgaaaatctaaaaataaaacaacaaaatgtaattacccgtttaaaaaacttaattaatttgactgcccaagaagaagaaaacataaaaattgttggtatttcagccaatccatttggtgaaggtacatcctattggttagaacatttagatgaatttaaggaaatatctcgaattgcaaccttgcaaaaagcaacacagcaaacaatagaacaaaatggaggagccactcctattgtaatagaaactcaaaaaagtattattcaagacatattaggcaaacaaatgccaattgtacggcaacaacagagtttattagatgataaattgaatcagctatcagatacggcacaacatttgaacaatgaattgacatcgatagaaagtaaaattaaccgcactcgtttagaattaataaactttgttaatgaacatttcacttcactgattcgccaagtaaaaggtactgatctaaccacatttaatgatttttatgaaaatgaaattggggcagaaggcattgtattaaatacaaaaatagaaaccgaatttagtcgccagtgccaatctatttctagtggattacatcgtattagcctagattttgataatgaaataaatcgatttgaaacctcggttggtgctgatttagctgtcaaaggtatttctagcctaaaaaatatcaaactaaataatactcatatattagctgctcgcgatggcattgtctctgtaggtaaaatggtcggtgtagatttagctaagtatatgaaatttaaaccctggggagcggttaacttcgctgccaaagcaaatgcggccattgctgtcgcgggtcttgttttagaagtatgggatagctataaaaaggctcaagaagaagctaaatttagagatttagtcaaagaaattgtttcaatgctagaaacacaacgtaaaggcctattagaagcgttaaataataaagattttatctatcaactcttccctgcttatcaaacactacaagaaaatcttaaccttgttgtgcaagcaaatgaaagatcatttgaacgtaaaaaatcctttgatgaatggcaacatgagggagctataattgagggagaatatcgcgttattacagcaagttacgcttag

SEQ ID NO: 297019 - DNA, 1674 bp, Proteus mirabilis
atgaccatgaatgaggcagatgcccgcccaacgaactttattcgtcaaattattgacgaagatctggctaccgggaaacataatagtgtccatacccgtttccctcctgaacctaatggctatcttcatattggccatgcaaaatcaatttgcttaaattttggtattgcacaagattatcaaggtaaatgtaatttacgttttgatgatacgaatccagtaaaagaagatgttgaatatatcaactcgattcaaaaagacgttcagtggttaggtttccaatgggatggtaacgttcattactcctctgactattttgatcaactgtatcaatatgcgattgagctgattaacaaaggcttggcttatgttgatgagttgagtgctgaagaaattcgtgaatatcgtggcacactcaaagagccaggaaaaaatagcccttatcgctctcgtagtgtagaagaaaacttagcgctatttgaaaaaatgcgtgcgggtggctttgaagaggggaaagcgtgcctacgtgcgaaaattgacatggcatcaccatttattgtcatgcgtgatcctgttctttaccggatcaaattcgctgaacaccatcaaacaggtaacaaatggtgcatttatccaatgtatgattttacccattgtatttctgatgcattggaaaatatcacacattctttatgtactttggaattccaagataaccgtcgtttatatgattgggtgttggataatatcactattccttgccaccctcgtcaatatgagttctcacgtcttaatcttgaatataccgtcatgtctaagcgcaagctaaatcagcttgtgacagaaaatattgttgatggttgggatgatccgcgtatgccgacaatttctggcttacgtcgtcgtggttatacggctgagtcaatccgcgaattctgtcaacgtattggtgtgaccaaacaagataacaacgtggaaatggcatcattagaagcttgtattcgtgatgatttaaacgaaaatgcacctcgtgcgatggctgttatcgatccggtacgtttagtgattgaaaatatgccagaaggtgaagagattttaactgcgccaaatcacccaaataaaccagaaatgggaactcgtgaagtaccatttagccgtgaaatttatattgatcgtgcagactttaaagaagaagccaatcgtcaatataaacgtctggtattaggtaaagaagtccgtctgcgtaatgcttatgtcattaaagcagaacgagttgaaaaagatgaacaaggtgaaataaccaccatttattgtacttacgatccacagacgttaaataaagatccggctgatggtcgtaaagtaaaaggggtgatccactgggtaagcattccacatgctattccagcagaaattcgtctttatgatcgtttatttagcgtaccgaatcctggtgctgaagaggatttcttatcaaccattaaccctgaatcattagtgatccgtcaaggttttgtggaagcaagtttaaaagatgcggctattgaaaaagcgtatcaatttgagcgtgaaggttacttctgtgctgataagctttcgacagcggataaactggtctttaaccgtactgttggtttacgtgatacttgggcgaagatttcgaaacaaggttaa

SEQ ID NO: 297020 - DNA, 201 bp, Proteus mirabilis
atgaacttcgcaaacctaactcaagaagaaaaagacaagattaatgtcgatttagccgcaagtggtgtcgcatacaaagagcgactcaatatgtatgaaagtctgggggtaacccgaacttacttaccaactggcaagctaagtcgaatattctggctttatctcgactggattttgatggggatattcctagcgctttag

SEQ ID NO: 297021 - DNA, 654 bp, Proteus mirabilis
atgaaaatgaaatggtacgaactagccagatccttaatgaaggaaaaaggcattacttatgatgatttagctgagcgcttttcggtttcgaagggtgccgttggtcattggatgacaggcaagagggaaccatctctacatgatatagcggggatactggcatttgttggcgtaaataatgcagttattaattcagatggttcgattagcatcgaaaaagaagatattaaccatcaaccaccaatttaccaataccctctattcacaaaagtacaagctggcgctttctcaacagaatttaactcatacactcagaaagatgctgtgtcgtggatccctacggccaagaaagccagtgagcgctctttctggttagaggttgaaggtcaatcaatgacagcaccaccaggaggtaaaccaagttttcctgaaggaatgcttattttggttgatcctgatgaagaagtggaattcggagatttctgtgttgctcgtttgctgaatgatgagttcacattcaaacgattgattagagaaggtggaatatcatatttagagccgttaaacccacgctatgacctgatccctattaacgggaactgcacaatcataggtaagataatcaagtcacaatggcctgacgacacgttttaa

SEQ ID NO: 297022 - DNA, 429 bp, Proteus mirabilis
atggtaaataagataataagccggtattgtagttctcctccaagcgattttaatgaggacactgacagattaatagctaccggcccactttacccagatattttatctgcgttagagagatgcgatattaggccagcaacacagagatgtattagtgatatggcgttttacggtatatctggcgacgatataagaaagtggatgaagtcggcagtttcctctggtggctatataaactcaatgtggtgtagattatccccaaatagaaattgtattgttgcttgtgatgcttatcgagttttagttgatatctgcaatccaataaccgatgaattagaggcagtaccaatgtatctgaaattatgtatttccaaaactggaagtacagtgatgcaaatatccgcccatccttctaacttcactgactaa

SEQ ID NO: 297023 - DNA, 564 bp, Proteus mirabilis
atggaaagtaaaaatttatgcccaatttgtggcgaaggacacttgacaactaattcaacaatagaaaccagagaatttaacgggttttcagatgatgttactattcattactcgacctgtaacgaatgtggttgtgataccgctacagatcaagatatgaaactaaaccttagagcaatgaattcattcaaaaaaaaggccttggggttattatcgggatctgaaatattagaaatacgaaataaattagggataagtcaaaaagaagcatctattatttttggtggtggaccaactgcattcacaaaatacgagaacgatgatgttattcaatctatccctatgaataataatataatattagctgataaaagctcggatgcttttagtattctatgtcaaagacaaggtataaaaatagaacctgttgcatctcttaagccagttaatcgaaaatctagcttgttaagtaatgcaccattaccaaataatttaaatagttattttgtacttcattcatctagtgaaagtaaccaatacaacgaaaaagctgagtatcattaa

SEQ ID NO: 297024 - DNA, 402 bp, Proteus mirabilis
atgaatgcaaccataattgcaaaaaaagtaacaaaattagagtttactgagctatttgaaggtgaaatcgaacaagatagccaagttaatataaacattggtagtgatatttttgcaaactcgcaaaataaaaaactctttagaattaagtatccagtaaccttaacgattagagatataataaaagtatcaatatattatgagttcgatttttcaacggatggagaaataactccagatatactagattctgaattagtaagaataaaggctccaagtctagcttatccatacataaagttatatctagagaatataattgcaatatctggctatccgaatgtgaatataccttttattgatttttatgaaacacctttaaatttaaagcaaaaaaaataa

SEQ ID NO: 297025 - DNA, 957 bp, Proteus mirabilis
  misc_feature (883)..(913): n is a, c, g, or t
gtgataaaaaaaatattagatattctccctatttttgggaaaaaagacgtcgatattactgaacaatatcttcaaggctctcttgtcctactggctatatttgatgaaagtttacctaagcgtgcattagattatgtacttacaggtacaaaccctgaaattctatttgaattaaataaactagatgcagcgaaagccgccgtttattttcatcgtgcgggaacattagagtggtggtatgccagtaatgttgatacaggaaagtacggtaaggttatcacccaaggccttaatgcccgccataaactctactcaaaggttggtgaaagtttttccttagagcaagtggcccgttttgccaaagtcatcgctgccgcatgtcaagatatcaatattaaagtaacaacaacgcaagtccccacttgggttatctacctgttagttgatgcgttttataccacttacgataatgcacgtaaccttaatttagaacatcgtaaacattggagtatggagtttatcgccaatatggtcgaagcagaggccaatattgccggtgaaaatgcgttatttgcaatttttgatagaaaagatgtctctgaatattatgccgctaatcttaagcgtatttatgaactgtgtgatttaaaagactatctactttcacatcaagaatttgttagaaaagaattagttgaaaaactttcagcgaatggcttagtcgagctaataaattatctaaataaaaatacgatattacgcgatacttttgcagatattattgttttacttgccactagcagtttaagaaccgtcaaaaaaacggctgaacctattttaaataccttacctgctgaaatcgtaaaagaaaatttaacccatnnnnnnnnnnnnnnnnnnnnnnnnnnnnnnngttttaatgaatggtactcccaaacaacgtacacaagccgctga

SEQ ID NO: 297026 - DNA, 1041 bp, Proteus mirabilis
atgaacagaaaactctctctatggttagcaattgcgttaatgatgtttccacaaattgcagaaaccatttatagcccagcacttactgatatttcaaatggttttagagtcagtgccaatgaagcagggcaaacactttcgctctacttttttgcttttgcactcggtgtcattatatggggtcgtttatgtgatgtcattggccggcgcccaacaatgttagcagggttatttatttatgccattgcttgtattggtgtctttatgaccgataatttttctgtattactgatattacgtatgctttctgcttttggtgccgcagttggctctgtaggaacacaaactattatgcgtgatgtttatagtggtgaagaattagccaaagtattttccgttatgggagcggcaatcgcattaagtccggctattggtatgttaagtggttctttactggtgagctatgcaggttatcaaggggtatttagtggccttgctcttctcgccgtcgttttattgctgtggagtactattgcattaccagaaagtcgccctgcaacaataaaaaccgcaccactagcggaaacagcgataaaaatgctgaaagataagcaaattgccaagactatacttttaattgctttttttaatatcagtctatttgcttattaccaactagcaccttttatgtttgataatcaaggttatagtgcaagtacttttggctatagtggtattgtattagcaataggtgtcggtattggttcttacattaataaagcattattaagccatcattggcaatgtgagaaattagtattacttgcgagtattattgcagtaattagtgctgtaggtgtttatttattgcgcaatcacattagttttattattccaatgatgacaagtgtcgttgcctatggcattgctattccaaatatcttagcaacggctttagcgcaatataaagatcgcttaggcacagcgggtgcactattaggtttattctactatttacttattggtggatatttatcctga

SEQ ID NO: 297027 - DNA, 5205 bp, Proteus mirabilis
atgcataaaaaggatatttcgcgaaaacagcgtttaataagctattgtgttatttatttaaccgctatttacccattgcatcctgcttggggctctgtcattacttcatctgataaaacgataacaataaaccagcaaaataatattcctattattaatattgcaacacctaatgacagtggtgtttctcataatagatttaatgtctttaatgttaataaacagggggcagtacttaataattcgcaagttgatgccaatagtcaattagcaaaaaaaatatctgctaataaaaatttaaaaggtaatacggctaatttaattattaatgaagttgtcggtaatagtcgttcacagttattaggtaaattagaagttgcaggacaacaagcggatgttttaattgctaatcctaatggaattagttgtgatggttgctcatttattaatactccatcaattactctcacgacgggaaagcctcaatttagccctcaaggtacctattcggcactagaagtaaaaaaaggcagtattgttattggtaagcaaggtatgaatgccgatttgcaaaattatgccgatattattagtcgtagtattgaaataaatggaaagataaatgctaaaaatctctctttaatgcaagggaataaccatattgatttcggcaaagggacagtaaatagcattaatggagaaggtgtaaaaccgaccgtcgctattgatacaaaagcattgggtggaatgtatgccaatcaaatacgcttagttagcacagaaaaaggggtcggtgttaatttaactgatattcaaacaaaacaaaatagtatcaatttaacagttgatggcaaaattacctttaatggcaatattcaatctgagcaagatattaatgttagtagcaaagcgctacaaatgaatagtaatgccagcttaaaagcgcaaagagatattacattagcaactaatacgctaacgaatcatagtgatattatcgcagaaaaggatatgcgtttattcgtagataaattcactaataaaggtgaaaaagcgcttattcaagcaaaagataatttatggatacaaaaaaatgcacagggtgaaccaagtagtttaattgaaaatcaatcagccaccataaaaacagaaaagggtgatttgattattagaaccaagaaattggttaatgaatctattactcctttatttaaagaaataaagcaagagcctgattctacatcgtctataaatataggtactcattttcttcatccttacaatagtcctacgaataatttccttataattattttacttgctgaattaaaagaactctctgataaaaagtggtttgatatattagatttaaaaaataatggaggtgttaatgtagaacgctcattatttgaaaagaataaaaagtatgttcctagtgttatttattctggtaaaaatttatatatacaatctaacgagttttttaatacccaatctgatatttttgcaactaatgatcttatcgcaacgggaaacaatgcaaaagtatactattatcggtttggacaccttaataaatgggatctttattctcatgataatgctcatattttttatcgagatgatgtaaataaatataatattgatgaaactaaatttcaaaaaatagttcattttattccctttactaaaattggaagtcattatgaatttattgtagatagtgcttctgaatatatgataaaagcaggtaataatttagttttagattttaaagatagtatagcgttagaacgtaaatttccatttttagaaaaagaaattaaaaagtatagaagaatatctgattttgaaagtactatattagctaaaaatatactattaaatgctaataatttaaatatctcattaaatttaaaatcaagtaactctttatctgttattgctaataaaaatataaatataagtaattcaaatttattatctggtgatattataaatttaacagcaattgataatgttaattctgaaaatatagatgtaacggcaaagcatttttccatcataactaagaatggagatattaattattcatttagccctatagcctcttatactctgaatagcattaaggcaccatttattgatgtgtctgaaaaaatagacttttattcaggtaaaaacatttacatttcaaatgtaataattaatgaatcaaatgaaaaaagtttatcagcattagagaatattaaaataaaacgcgatgagtctttatttttcaacctaatgccaaattttagagatgaacaatatatttcagcgtttttatttaatatggggctttggaaaagtaagaataatataagcttgatggctggtaaagatattgttagtcagggaataaaatattatagtaacaaagaaataacttttaatgcaggacaagatatttttcttgcctccaaattaataaaagaagccgctccttttttcagtgatatttattacccccaactacaatctaaattattttcagataataaccttattttaaatgccgcgcgtgatattgatttaagttcaacagtattaaattcaaaagataaaatcattgtattagcgggtagaaatataaaactgggtgcaaatgcttattccgccatcaaagatccccacgaagatgcgcaagacattcaatatgccaccacatccattatgggaaataaaggtatttctattgcatcatcaggctcactcacaacagaaggaagttcacttaaatcagagggggatattgctatttccagtggtggcaatatccaattgggatcagtaagaacacattttcgtaaagagtcggactcagagttagaagaacttcgtaaacaagtcagtactgaaattaatagcggtaatcatctaacactattatctgagggcagtattttatttcaggcctctcaattggctgctaataaaaagatggatattgctgctaaaggtggatttctttatgcacaggcaatggaagaatccagttactatgaagaagaaaagaaaaaatgtaattggtggacactgtgtgcgactaaaaagaaatataccaaaacatttaataacacaacgaataaagttaccgagtttattgctaatgacgatattaatttaattgctaaagatgatatcactttagaagcaagcaaattagagacagcaaagaatgccaaattaaccagtaaaacaggaggcattaattttaaagcggtgaaagatactgcttttaaacaagttattactcgttcaaaagatatatatatcactcaacgtaatcagggatacaccaagggaacatggctattacctgaactctatattggcggaaagctgactatcgatgcgccaaaaggcatatctgcagatattaaagccaaaaaagagcaatctttagagcaggcattaactgccttaagtaacacaccagaatatgcttggcttaatgcgctccaacgtcaagaaaatattaattggaatttagtgaaagacacttattccagttgggatgataaaacccagcagttaaatccagttgttggtgcggttattgccatcgcggtaggggttgcaacttatggtacggcaacagctgcctcaataggaggaatggcaagtaatgccactattgctgcaggagcctctgcgggggttgcgtcaacggcatcagttgcggcacaagccggttttgcttctttagtttcgcaagctgtggtctctttagctgaaaatcaaggcaatatttctaaaacatttggcgccttaagtcgcagtgatacggtgaaatccattgtcaccagtatggccgttgcaggcgccttgcaaggtcttgaccaatttatgggttgggaccaagcaatacaggggggaacattaccgacaacaggcaagttgcttgcgacggataatgccacatggactcaagttgctcaacgcgttgcctcacagtcagtagtgagttctacactgggcacagccattcaaggtggcagttttattgataattttaaaactgcgctattaagccatatcggcagtcaatttcacgctgaaggtgccaatctcattggtgataacggtgcgatattagggcatgcaggaaaggttttaagccatgcaacattatctggtttatctgcccaaattagtgggggaaatgttaatggtgcagttataggtagcctagctgctgaaattgcggctatttcgctgggcgataacactattaaggctgaggaatggcagaaaagatcagaatcacaagctcaatttgttagattatttggtggtatagcaggtgggatttttactggtgagcctggtggtgtatatagtggtgcaagaggggctgaaaatagtttccgttacaattatctctctcatcatcagcaaaaattgatggaaaaagaattatctgctgaaactaattattttaaaaagacagcaatttatcttaaatggttatcagtagatataggacaagatacagcatttagtggggggcttgttgctggtataccttcagggttatatgaaacgatagacggacttgcttctcttgctacaaatccactcgaaacataccaagctattaaagcagttattcaaagtgataatgctttcgatacattaactcaagcagttaaacaatcgtatatcgagcgtattgaaaaactggaagcagaatatcaaaaagcaggtgtatctggttcatttaatgcgggtgttgaaagcgggaaacttatttttgatctcgtaggtctatttgctggtggtgctggaattgcgaaaggaagttctcagcttatagctaagacatcagctaagattgctacaagaaataaattgatttcttctataaaaagtggacaagtaggattaggtgatcctgatgtagttgatttaataaaagctgatatgcttaaaaacttttatagctataaagctccatcgggtattattgctggttatgtagacaaaaagggtgtttattatgtaacagaaggtaaccatagaatggttgcagcagtggaaatatataatgaaacaggagaaataaaatatattaatcaattgttagacaatggaaactggactaaaatagacaatcccattgttgactcaaaaccattacctgtaagaaaaataaagtga

SEQ ID NO: 297028 - DNA, 333 bp, Proteus mirabilis
atgactaaaaatgaaatatacatagatatgatgtattggattttacctcaattaagaaatattcagtccagaggaatgatagcaaaagcaaaagataaatcttgttattatgagttacagttaattcataatttacccaaaaaaatacttagtcaagattttgatgaaagtgatatctcatttttaaattatcaagctaaaacatatattgaaaaatgcagttcgaaaataagtatattatatgatggtaatgttaggtatataaaaatgttatttgatttagttcctaatgaattacgacatcaattacgatggaatgggccaaccaattaa

SEQ ID NO: 297029 - DNA, 507 bp, Proteus mirabilis
gtgtctatatcaaagaaaaataacttaagagcaagtgtctattttaataatgattattatattataacaaccctttcaaaaagcggtatttatttgattgattttgaaaaaggttataaggttttatccaaagatccatttaatgcagatttgggtttctttacaagaaatgcattaatccaaagcgaaatattagatgctaattcatctgaatatcatgaaatgcgtaataacgaaggattatattctgaatgggtaaaaaaaataattaaagaatgtaattataaaaataaaacgacactattcaaaaatatgaacttatgtaatgtgaatgtgactgatggtattatatctattattccttatgatcacttacgattggatcattggattggtaaaagtatgcctaacaatgcaattattacattaaaaaccaattgtagtgacgaggttttaggtgcttcaataaaaaaagcttttacacgttgtattaactgtaaagtttaa

SEQ ID NO: 297030 - DNA, 513 bp, Proteus mirabilis
atgtttaaattaaaaggtaataaattaagagcaagtgtttattataatgatacttattattttttattaactttttctggtcattctatttatataatggatctaaaaaaaggctataaggttttacctaatgatattattgatgacgaattaggtcattatgccaaactcgctctgattaaaagtgaacaaataaaaggaaattcagataagtttaatcaaatgtataatgataaaaaaacttatcaagactggataaaaaaaataatcaaagaatataattataaaaataaaacagcactttttaataatatgaatcgatgtagcttagagcttacagatgatgaaattactattagtcctctaaaccatttacgtatggatcattgggtaggtgagggaatatctgatagtgcaattattacattaaaagccaattgtagtgatgaggttttaggtgcttcaataaaaaaagcttttacacgttgtatcagtcgaaaaaccatcacttaa

SEQ ID NO: 297031 - DNA, 1257 bp, Proteus mirabilis
atgaaaaaaaacgctctatttactttctcactgttatctgtatttatttcattatcttgttatgctcatcaagatgttattttaaaccctgattcattatcagatgcacaggtatctattaatgatgacacagggagaacacaaattgaagtgataaatactaatcaagatggtaccgcccatatctattataatcgtcttgatgttggtgattttggtttatcattaaaaaataatgctgaagcagaattaattattaatgaggttgtttctaaagatgtttcaactctaagaggtgagcttgagttacaaggaaaaaaggcgacagtggttatagctaatcctaatggaatttcttgtcgtgattgttctttctctggaattaatgatattaaactaattgcaggtagcagtacagggaaattttctaagacattcactatagcaaatataggttctagtgttgtttttgatatgagaaataaattagataaaaatgaatatagtcatattcatcgcaattataaagatatttcatctggaataataaatattatctctaataatgtagacttgattgacggtgatttaaatgctgaatatattcgttttgatatagggttaagtgagtttaatcttggagctaaaaatgattataataaatacagccattttttgttaaggacagaggcaggaataaatagtcgatatttaataataaaagcaaaacagggtaacgtttataatgatggtaatataaatactttgtcactaaatcatgagtcttatagcttaattaatgcaggaaacatagatataaatcaagatgataatttatatagaacagcttatgatgggacgaaacaatcaaaagtaatggtttatcaatattcttctggtcttaataattcatcatttaatgttaaagatagtattctatttatgaaagcggatacgttgcttttagatagaacatttaatattgatgatagttatttatatggaagagtaggaaccataggaataggtaatatatcattgtcgtataatagtgtttttcatattgtcgctgaggatagtatatttcttggtggtaaaatccagggggatggtcatgttatattacaattaaatgatgataaagttgatattgaaggtaaaaacttgttaataggaacagagggattaagattagaggggggaacaaaatataaattaggtagatcaactattatagattatactgaatacaaataa

SEQ ID NO: 297032 - DNA, 1380 bp, Proteus mirabilis
atgtcagataatgtcatctcctctatcggcaccaatcaaactggtgttaataaccgtgttcaattacgcaagacattgacgctaatgcaagtcgtcatgatggggttggcatttttacaacctatgacgatttttgatactttcggtattgtatcaggcataaccaatggtcatgtggcaacatcttatgctattgcgttaaccgctattttatttaccgcagtgagctacgggaaattagtcaagcgtttcccttcagcaggctctgcttatacttatgcacaaaaatccatgagcccacatgttggttttatggttgggtggtcttcattattagactacttatttatgccaatgataaatatcttattggctaaaatttatttacaagccatattcccaggcgttgatccgtggatctttgttgttgcgttagtcgcgttaatgacattttttaatctacgcggaattaacgttgtggctaacttaaataccgttattgttgttattcaagtagctgtaatggtggtatttgttggtttattaattcatggcgtatataacggcgaaggtacaggggagttatggactttccgcccatttgcgtcagtagatgccgaattaatcccaatgataaccggcgcgacaattttgtgcttctcgttcttagggtttgatggcattagtacattatctgaagaaacacccaatgccggtaatgtgataccaaaagcgattttcttaactgcgttaatcggtggtttaatttttatcgctgtttcttattttttacaattatatttcccagatatttcacgttttaaaaatccagaagagtcacaacctgagattatgctgtatgtagcaggggccttgttccagtctattatcttagtgttttcttgtgtgacggtattagcatcgggtatggcggctcacgcaggtgttgcgcgtctgctgtatgtgatgggacgtgatggtgtattccctgaaaaagcgtttggttatgttcatcccaaatggcgtacaccggcatttaacgtactgttagttggctttttagcgctaggggcgatcttttttgatttagttactgctacagcgttaattaactttggtgcgttagtggcatttacctttgtcaatttatctgttatttcgcagttctacattcgtgagcgtcgtaataaagggttaatggatcatattaactatcttatattaccgattattggtgccgcgacaatgggggtactgtgggtaaaccttgaaccaggctctatggaattaggactgatttggggggcaattggtatactttatatggtgtggatcactcgtcgattccgtcgacctatgcctcaaatgccagagaaataa

SEQ ID NO: 297033 - DNA, 2922 bp, Proteus mirabilis
atgaaaaatatcgtaatacctacctcgttaagctgcttttttttacttttttcccattcaacatggtctgaaaccaatatttcacaaaccaagcaacgtattatcgaccaacgtaattattggttagatgaaatcaaaaatggtgttatcacaactagccctcaaaaaggatcgagaaccgccgaattagatagaataatcagtaataattatcaagccattaccggcaaacgtagagaacttgccgaagcggataaatcacagtctcatacttatgtgttgaatacctatgctaatattttatttggtgataaggctaaatcgatcaactttagcgatattcaagcttatcaagatctcaataaattacatagcacaggcacctatgcttatgatacaaataaaaaaagagtacgctcgatagattttatcttaaaagaactttttttacgtggccgaccttatcaagtacttgataaagaaggtcattatcttgataactacaccactataacaggctcatcttatcccagtggtcatacgtggaacggatacaaacaagctgcagtgttatccatcttattccctgaaaagggcagtgaaatgtttgccagagcaatagaatatggtgaaagtcgagttattgtcggggcacacttcgcaacagataccattgcatccagaataggcaattattacctgctgtcacaaatgcttgcagatgatgacaccacccgcacttttgtagagcttgccaaagaagtccgccaaaatgttgctagccaatgcaaaaatcaacattgcttaacgacctcgacaacaatcactaacgatgaaacaggttattacgcaaccaaagatccagagcctgcaccacgcattacccctaatgaaataccaacatctgccaacgctttactgcgtttacgctttgcctatttaaccagagagcaacgacaatctatcttagcgagtaccacctacccgagtaattcattggctggctgggctgcaaacaaagataatccaaacgccaattggggattaattaatctcccgaaagcctataatggccctacttatttctacaatcattttattgttaatcaaataactaatgaatttgactttgctgaatttggtcaacttgatgaatggaaaaatgatattagtgggcctggcaaattaatcaaacaaggtaatggcaccttgatcttatcaggcaataaccattttgctggcgttgaagttaatcagggtcatttactgctcactggtgaaaaccactatgcaaaaaattcttccattaatggtggtacattgcttcttgaaggaacactaaacactttactagatgtaaacaaaggagcattgctattaaatggtgggagcgttgattctcaagtcaatatcaataacaaagggatactttctggtaaaggaaaaattaataagctggccgtttattcaggaggcatcgtatcaccgggtcattcaataggtacaattaatatagataatactgttatttttaattctggtggcaactaccatgttgaaataaattcacaaggtgatagcgataaaataatcagtttgggtacagcgacactgaatggtggaatggttaatgtatcgcttgaaaatagccaaaatctgctaacaaaagatgatgttcaaagtttatataacacaaaatataccattttaacggcagatcacggtgttaatggtcaatttactgatgtaaatccaaactatctttttttaggtaccacactatcctacggtaaaaatgaagtaatattaaatgtcggaagaaataacaccgccttttcaagtgtggctaaaacaaaaaaccaactatcaatcgccaatgcgatagacgcattccccttgggacatcctatttatgaaagcattataagaatggatacagggaatgatgcccgctctgcctataatcaattaacaggtcaaattcatgcggatatcttatctaaccaactcaacaatagccggcaaataaaagaaacactcctctctcaggttaaaaatgcagaaataattaatagagagaaagaaagtgcagataacaaaggtcatgtttgggctaaaattctctctaattgggaaaagacttccaatgatggcaatgcaaatagctatgatgcttccacctatggcgtactattaggtgcagatcaacgggttagtcacgataaaatgctgcttggtattgcaacagggatcaccaaaacctcactatctggtgataacagtcacgcaaatagcgaaaattaccacttatcactctatggtggctatgattttgacacaatcgcgttacgtgctggtgcatctaatacctttcatcgtatccatacaacaaaatcggtcaactatggtgtacagtcagataaaaataaggcgaattacaatgggaacactagccaaatctttattgaagcagcttatcccatcaccctctcagatacacaattagagccttttgttaattttgaatatgccaaaacaaaaaacgccaccattaacgagcaaggtggacgagctgccttacaagcccattcgcaaactctagagtcaaccacctccactacagggctacgtttaaataaccaatggaaatttaacagtaaatcaacggtttctctctatggtgagctaggctggaggcaccaatataacgatgtagaacgagggatccatttacgcttcacacaaacccagcctacatttatagcaaatagtgttgatgctgctcgagatgcactggtggtaaaagctggaacgactatccaaattaatgagacatcaaaagtctcaattggatacagcggactaacggcaagaaatcagcacgataatggtattgatatgaaactctctatcgcgttctaa

SEQ ID NO: 297034 - DNA, 1770 bp, Proteus mirabilis
atgaatgagagtagcagctccacaaaccagcattttattcgtaagttagaaggtattgtcggtaaaaaacatgtattaacccaagagcataaaacagagcgatatcgtaaagggtttcgttccggacagggaaaagcgctggcagtggtattccccggctctttattagaacagtggcgtatttttaaaacctgtgttgaagccgataaaattattattatgcaagcggcaaatacggggttaacagaaggttcaacccccagtggtgatgactatgatcgtgatattgttatcatcagtaccttgcgccaagataaaatacaagttctttctgaatataaccaagttattgcctttcctggcagtacattatggcacttagaaaaagtattaaagccattaggaagagagccacattcagtgataggttcttcttgtattggtgcttcggtgattggaggcatttgtaataactcagggggggcattagtgcgccgcggtcctgcttatactgagttatcactttacgcccgtgttaatgaacaaggtgaagcagagcttatcaaccatttgggaattgatttaggtgacactccggaagagatattaaccaatctggataatcgacattatcatgcgaaacaaattcatgcgacggataaactggcatctgatcatgaatatagtgagcgagtacgtgatattgatgcagatacaccatctcgatttaataatgacgaaagacgtctctttgaagcggcgggaagcgccggtaagctctctgtttttgccgtgagattagatactttcccagcagatcatcgcacacaagttttctatattgggaccaatgatcctgatgagttagaagatatccgtcgccatattctcagtcaatttaaggtattacccgttgcgggtgagtatatgcatcgaagttactacaagatggcagaagtttatggcaaagatacttttttaattattgataagttaggtacagataagatgccagcattatttgctattaaagggcgtgttgatgctgttcttaataaagtgccatttttgcctaagaatctaactgatagaacaatgcaattgatgagtaagttatggcctgctcatttacctgctcgtatgacagaatatcgcgataaatatgagcaccatttaatgctaagaatggcggatagtggtatagaagaagcctcaacttatttaaaagaatattttaaacatgccacgggggattatttcgaatgtacagaagaagaaggtaataaagcctttttgcatcgttttgccgccgcgggtgctgcggtgcgttatcatgccgttcatattaacgatgtggaagatgtgctacctttggatattgcattgcgtcgtaatgatcgggattggtttgaaaaactgcctcctgaaatagaaaaccaattgctctataaattgtactgtggtcactttatgtgtcacgttatgcatcaagattatattattaaaaaaggtgttgacgctaaggcacttaaagcacagatgttagccttactagacaaacgtggtgcggaatatccagcagagcataatgtagggcatctctattatgcaaaaccgcaattaaaagcgttttataaacataacgatccgacaaatagcatgaacccaggcatcggtaaaacctcaaaattaaaatattggggagaagagtgtggttgcgggcataatcatcatcaagctgaagttaatcatatagaaaacaaagaataa

SEQ ID NO: 297035 - DNA, 591 bp, Proteus mirabilis
atgctttattgggctatcatgcaagttaatgataatcacccatatccactttttaaagattgttttaatcgcagtagtttttatgaagattttgaagaataccgagaatataaaggtaatcgttccagtcttgttttttatcctcatggcaatcttattcttgcaaaggatgaaaatgatgaggagttaaaattaagtattcagggtgacaattatcttatcgatcaaattagtcaaaattgggatgaccataattattctccgctgtttatctctgaaggtacaagtgaagaaaaattaaaaactatacgttccagtaactatttaacacgtatttatcatgaagcgattccaacaattaatgatagtttactcattttaggctggagtatgggaacacaagatgaacatatattaaaacaaattccttttaataaaattaggcatcttgggatcgtggtttttatgaatgataattatgaagatacatgtaataatttttattctcgtattcgtcaatttattgatccagacaaaattagtatttattttattgctcataatagcaaagcattatgggctaatgactaa

SEQ ID NO: 297036 - DNA, 285 bp, Proteus mirabilis
atgcgttttaatgtaaaagagtggaatgctgtttctgagttatttacaggaagtttattattaggaaatggttcatcaattgctatagatcctaattttaattactctaatttgttttccaatgctaagttaccggaaaatgtgaaaagtatttttgattcttttcactctcaagattttgaatatatcttaagaaaatttacccaagctacagtaataaataatatcttcgatattgattgtaatgatattcatcaggctcatagtcaagtaaaaaaaccttaa

SEQ ID NO: 297037 - DNA, 474 bp, Proteus mirabilis
atgaagccaatacttgatatgtgttgtggctctcgtatgttttattttgataaacaagatgaccgcgttttatttaatgacattatagctgaaaaacatattttatgtgatgggagagttttaaatataataccagatgttatttctgattttaaaaaccttccattaccagataatactttttatcaagtactatttgacctacctcatttaatcagagttggtaaaaatagctggatgtttaaaaaatacggttcgttaaataaagactcatggaaagaagatttaaaaaaaggatttactgaagcatttcgtgtgttaaagccaaatgggaccttattgtttaagtggaatgaaactcaaatacccattaaacaaatattagctttaactaatgaaaaaccaacggccgttcagcgtgtagggaaaaacgataaaacacactggatagcattttataaagggaacgaatga

SEQ ID NO: 297038 - DNA, 624 bp, Proteus mirabilis; identical to SEQ ID NO: 295489

SEQ ID NO: 297039 - DNA, 885 bp, Proteus mirabilis; identical to SEQ ID NO: 295103

SEQ ID NO: 297040 - DNA, 450 bp, Proteus mirabilis
ttgattaattttggcccatctcgccgtgagcattatccaaatctgcctttctggcgattagttcgcgatggtttttgggagttgcaactaccaaaagagagcgatctatcaaaagataataagcaaccatcgaaaaataaattaattcagcaaaatgtattaggtggatttgaccaagaaagctatcagcttcttataaaaaagccaagtttaatcaataagctagcacaacagattttaagtgaacacttccctgataatgttcaagaagttattgctaaccgtcttgattttcccctacaagaaattcgccaaaaccgagatcccacttttagaaaaaatatcttacgtgcttacaattatcagtgtgctatatgcggttataatctacgttatgatagcgccgtggttggcctagaagccgctcatttgacatcctccacgccctaa

SEQ ID NO: 297041 - DNA, 669 bp, Proteus mirabilis
atgcgtccattagctaattatatcgatcatactctacttgctgcagatacaactgaagcacaaatcaaacaattatgtgctgaagctgttgaacacggtttcttctctgtgtgtattaacacttcttatatccctttagcaagaacttgcctaaccggaagtgatgttaaagtatgctgtgttatcgacttcccatttggtgcaggcctaacagcaaccaaagcatttgaagctgcagaagctattcgccaaggtgctcaagaagtcgatatggttatcaacattggcatgttaaaaagtggtcgttttgattttgtaaaacaagatattaccgcggtaaaagccgcttgcggaaatacaacactaaaagttattctagaaacatgcctattaactgacgacgaagtacgtttagtttgtgaaatgtgttgcgaagtcggtgttgattttgttaaaacatcaactggatacagtacaatgggtgccacagaacaccatgtcgctttaatgcgtcaaactgtcggtgacaaaatgggcgtaaaagcgtcaggtggtgtacgtgatcgccaaacagccttaaagatgatcaaagcgggggcaacacgtattggtgcaagtgccagtgttgcgattgtaacagattcagatgcaccagaatcaaattactaa

SEQ ID NO: 297042 - DNA, 1428 bp, Proteus mirabilis
gtgtggcttttcgatatcattaagaacggcacactggtcgataaccagtcctattttgtcagcgaaggcattttgaaaaatagacgtttaggaaagtcgataacccttagaaccaaatcaaaagggcagtggacctatcctcataacgacgagtctgcaatttggcactttttgaattcggtatctcgtgatgtcgaaaaaacgctgaatgataatatttccgatgctttaatactcttcaatgatgaagattacgaacacaatacagatggcggtttcatcgatgtctctggtacggatgccagaaattttaatctcgacacgggcaatttaatcggatttgttaagcgaggagattactctctgaagatcagctcacgttttggtgatgctttccttcaatacatcattgcagatgccgatggatttctcgaattagaaaacattggaggagaaagtcacgcagacggttacgaatggcttttagcatatctatggaacattaagtttaagagagcctaccgcttgggcttgccaaagacttatattacaagaaatgatcgtatttcccgcgtaaggggaactataaatgctacagattatttccagaataaatcatctggaaaatatttatgctcgtaccgagagcacagctacgatagccctgcaacttcactttttataaaagcttatgaagcagttgcacattactcattttgtcaccaaacacgaaatatctatagtgcatttctgactgccaatcaggggataaaaaggtcacagcaagaaattttgaggacttctcatttcaccaatcctttctacaatgattataacgtgctcattgacttatctaagcaagttattggccggaagggctctgattttgattcgcagcaggattcgagtgctttctttttcgatatttcgatgttgtttgaatatttcattcgtaagctcatcaagcgagatgggttacgcctgctaggtaagttcgagctatgtcaggaaatagcatctggtgcgctcagcggttatatgagaaaacttgaacctgatcttgttatagaaatcgatgagagattattcgtatttgatgtgaagtataaagcatttgattcacaatttggggtgaagcgtgaagatctttttcagctacatacttacatagggcagtatggaaatattgccgcaatcaaggggtgtggatttatttaccctatatcagaagaacgatgggcttcacttaaccttgaaaaaacacagggggtgatttcagatattattcaccagcaagggcaagagataccgttccatgtgctttttctaaaaatccctgaagatacttatattgattttaataggaaaatgaaagagcagtgtagcattttcattgatgccctttattctaaggttcttaatcagtga

SEQ ID NO: 297043 - DNA, 192 bp, Proteus mirabilis
gtgatcgttgttgatcctgagttatcttattcttcagatttattggttgttgcgcgtttggatgattcgaaagaagcaacctttaagcagttggtcattgacgatgaacagaaatacctaaagcctctggactcccaatattcagcaacagcgatcaacgacaacggcaccatcattggtgtcgcacgataa

SEQ ID NO: 297044 - DNA, 1590 bp, Proteus mirabilis
atgtctaatcctatttttcagcaagaagttgctcgccgtagaacttttgccattatttctcaccccgatgcgggtaaaacaaccatcactgaaaaagtgttgttattcggacaagctatccaacgtgcaggaacagtaaaagggcgtggctcaaatcagcatgctaaatcagactggatggaaatggaaaaacaacgtggtatctccattaccacttctgttatgcagtttccttacgctgattgtctagttaacttacttgataccccagggcacgaagacttctctgaagatacttatcgtactttaactgccgttgactgttgtttaatggtcattgactcttcaaaaggggtcgaagatcgtacccgtaaattaatggaagtgactcgattacgtgatacgccaattttgacctttatgaataaattggatcgtgatattcgtgatccgatggaattaatggacgaagttgaaactgagctaaaaattgcctgtagtcctgttacttggccgattggctgtggaaaactgtttaaaggggtttaccatatcttaagagatgaaacctatctttatcaaacaggccaaggtcatactatccaaaactcacgagtaatcaaagggttggataatcctgagttagatgaagcgattggtgatgatttagccgttcaattacgtgatgagctagagttggtgttaggtgcatcacatgagtttgatcatgaagctttcttagcgggtgaattgaccccggttttctttggtaccgcattaggtaactttggtgttaatcacatgcttgatggtttggtgaagtgggccccagcgccaatgcctcgtcaaactgatatgcgagaagtgacagcggctgaagagacattcacgggttttgtctttaaaattcaagctaatatggatcccaaacaccgcgaccgtgttgcttttttacgggtggtgtcaggcatgtatgataaagggatgaaactgcaccaagtacgcacgaaaaaagatgtggtgatttcagatgcattgacctttatggcaggggatcgttctcatgttgagcatgcttatcctggtgatattattggcctgcataatcacggtaccattcaaattggtgatacttttactcaaggtgaaatgttaaaattcaccggtattcctaacttcgctccggaattattccgccgtattcgtctacgtgatccgctaaaacaaaaacaattgttaaaaggtctggtgcaattatctgaagaaggtgcggtacaggtgtttagacccctagctaataatgatttaattgttggcgcagttggggtgctacagtttgatgtcgtggttgcacgcttaaaaggtgagtataacgttgaagccatttatgaatctgtgaatgtatcgacggctcgttgggttgaatgtagtaacgaaaagaaactcgaagaatttaagcgtaaaaatgagcaacatctggcattagatggtggtgataacttaacttatattgcaccaacgatggttaacttaaatttaacccgtgaacgctatcctgatattgagttccatcaaacgcgtgaacactaa

SEQ ID NO: 297045 - DNA, 1452 bp, Proteus mirabilis
atgcgtaagacaaaaattgttgcgactcttggccctgctagttgctcagaacagatgattgaaaaactgattttagctggcgctaatgtatttcgtttaaatttttcacatggtactcgcgaacagcatcagtccacagccgcaactatccgtcaggtcgcaaaaaaacatcgtgtatttatcggcattttagctgatctgcaaggccctaagatccgtatagcgagttttaaaaataatgctattcaattaacacaaggggatagttttatcctcaatgcagatttagacagcacacaaggcgatgaacaacaagtggggttagattacccacaacttgtacaagaagtcacaccagggaatattctgttacttgacgacggtaatatccaattaaaagtccgtgcagtaaataataataatattgagacagtggtcactgtcggtggaaaattatctaaccgtaagggaattaatttactcggcggcggtttatccgcaccagccttaacggacaaagataagcaagacatacacacagcagccgctattcaagcagattatatagccgtttctttccctcgtaatggtgcagatattgaatatgcccgtcgtttaattgttgctgctggcagtcaggcaaaaattgttgccaaagtagagcgtgcagaagtcgtttcatgtcaagccaatatggatgacattattcaagcatcggatgtcattatggtagcgcgaggggacttggcggttgaaattggcgatgcctgtcttcctggtgcacaaaaacagttaattgctcgttgtcgtgctctaggctgcccggttattacagccacccaaatgatggagtccatgattgaaaatcccatgcctacccgtgcggaggtgatggatatcgctaatgcagtaggtgatggcacagatgcggtgatgctttctgcagaaacagctgcaggtaaatatcctgaagaagccgttcgtgcaatggctcgtgttgcagaaggtgcagagcgctcttttgccgccaatgccgaaaacccatggcaatccccttcttactattcacaaacaggccgttggattgctttagcggcgaccacagcagcttttcataatgataaacatctgagcgttgctgctttaactgacaatggtcaatcagtcacgcttctatcgcgctttatgccaaataacaatatctatgcattaacagataaccctgcacttgctggtcagttgactgtattacgtggtgtaacgcctgtcacttatcaacgtcaaaataataatgatggtgatgaaaacatcatgcaaaaactgcaaacagaaggattattaacagatattcattcactcttaatcacccgtttatcgacctttgaaaaaaccggtgaaagtgactgttgtcatctggttccggtaaaacaagttacaacagctttaacttaa

SEQ ID NO: 297046 - DNA, 945 bp, Proteus mirabilis
atgaaaaataataccgattttcgtttcatattagtgatgcgaaaaagtcgcttacaagaattaattgagcgttttaacacttggtcacaagccaaattctatttagaacataaccatgttgaggtaacagattatcttaatgaacataatctctatcaaaaacaactcacagaagctgagcttattttaaaatcatttgggcgttttcagctcttagaaagaggattattgcctagttatcaattttcctctcatgatattgtagtggtaataggtcaagatggcctcgtcgctaatactctgaaatatcttaatcaacaacccgttattgctatcaatccagatccttcaagatgggatggtaagctcttgccctttgaaatagggcaattgaaagagattataattaatacaataaatcacaaaatgccttttaattcggtcacttttgcacaagcaaaaaccaatgatggtcaatcactgttagcggttaatgacttatttattggccctaaaagccacacttccgcacgttatatcttacaatggggagactctcaagaagtgcaatcctcatcaggcattattgtatcaacgggacttggctctacagggtggtttcaatctattcttgctggagccatggccatcaccggaaaagcatcacaccctcttttacaagggtttagctggagtgataaaaaattacaatttagtgtaagagagccatttcctagtagaacaacaggcaccgctttaacttttggcacgattgagccggactctccattgcaattaggatctttaatgcccgaaaatggtgttattttctcagacggcattgaagaggattatttacattttaatgctggctgtattgtgcaaatcaatatcgcagatagacaaggtcaactcatcgcccctaaggggcgtcagcctatttaa

SEQ ID NO: 297047 - DNA, 1017 bp, Proteus mirabilis; identical to SEQ ID NO: 296439

SEQ ID NO: 297048 - DNA, 1461 bp, Proteus mirabilis
atgaagaaatataaaataacgagtgaaacaaaagaatataatggtgttactttatatagaattagaagagtgtatacagatagtccaggaggatggatagaaaatgaaagtaatttaagtagagatgataattgttttatttttgataatgtaatggtatttggtaatgctaaagtcacagataatgcaattataagaaataatgtgaagatctacggtaatgcaatagttaagggaaatagtaaagtaaaagacaatgcagagatttatggtaatgtgctagtggaagataatgtgacaatatctgatgatgttgtaatatatgataatgcagttattaaagataatgcgagaatatctgacgatgctgtaatatatgataatgctgttattaaagataatgctaaagtatcagaatatgctattgttcgtggtgatgcaatagttgaaaaaaatggttgggtgactggttatgcgactgttgagggaaatacaattgtatcgaaaggtgaggttattaagagccaatttggctcttgggatgatattgatgaactaagagcattttatatttatattaatagatataacagtacagcgactgcatatgttaatggtagacatcaggtacctattactatttatatagaggctttagataaaaatggtcgtatcataaaaatagccaaagaagatatttatagaaatacacatattgtaaatgaaaaaaatcttcctattgaccgcaatgatatttctttatctgataaagaaaatggatttgtatttccaagcagtgaagaagcaacattgaactcccctgatgcatctacttgtgttatttatctttctgttaataaagtgatagatacctttagaatttgtgcacagactcacattaaaggaaaagagtatactacagcctttaaaaataattacagtgattatttaaattttatcattctggacgttgcaccaaaaaaaatatttacagaagcagatgtagacatagaaccgctggtaaatcctagaatagaaaaagatgtagaaacatcaggtgatgtcttgacgaaatattatttaaggtttaacggtaataatagaacgataactaagagtgtagagtatgaagaaaataaatcttttcattattttcaaaaaggtcattatcagattattagcacatcgactgataaatatattaaaaaaattccattaaagcctcattattacactaaggaattccattttaaaccagatactttaattccggtcacatcagcaaatgatgaggatggggtatgtttctggagctatagtatagaatatggaaaagcgtttacatccagtaggaaagatgaagaaatgaattgtattatatatgatcaatatggtaatgatcttcaagtatcaattaaagcagatgaaaataataaattaaagttttattttgggtcataa

SEQ ID NO: 297049 - DNA, 1044 bp, Proteus mirabilis
atgacaaaaaatttaaacgtggggattataggctatggttatgcaagtaaaacctttcatgctcccctgatctgtaccactgaggggttaacactatcagccatttcaagctctgatgaaagtaaagttatcgctgattttcctaatattacggtgtatgccaacccacaacgactgattgatgatccagacatcgatttaattgttattccaacacctaataacactcactatacctacgcctcacaagccttaaaaaacggtaaacatgttgttgtcgataaaccttttactttgacactcgatgaagcagaaaaattggcacaacaagcgaaagaagctaagagattactctcagtttttcataatcgtcgttgggatgccggttttcttaccgttcaaaaattactcgccgataaaacattaggtgaagtcagtgcctatgaagcgcatttcgatcgttttagacccgctgtgcgccaacgttggcgtgaagatgccggacttggtggaggactttggtacgatctggcccctcatttactagaccaagcggtatgtctttttggtcaaccttatgcaatcactgctgatattgctcagttgcgccctaatgctaaaaatgctgactactttcatacactattagactatggtcatctgaaagttattttacatgcctctatgttggttgcctcacctacgcctatttttgctattcatgggaccaaaggcagttatgtaaaatatggtttagatacccaagaagatgcattaaaagcgggttatctcccgactgaaatgtataactggggggctgatcctcaagagggtgaattaacattatcgacagagagtggtgaattagtaacaacaaagttaccgactctatcaggtaattatcccgcttattatcagcaaatttatcgtgcgattgcatttggtgaagagagtcctgtcactgtgtcacaggccattaatgttatgcgtttaattgaagccggtagcctttcaaatcaatcaaaaaccacaattaagctgtaa

SEQ ID NO: 297050 - DNA, 144 bp, Proteus mirabilis
atgactttaataaaattaccaataatactagcaacactattatttgcatctatatctgttgccacagtagacaactgtccaccgactaagccagattgtgtagacgaatatacagcttttcattaccctcctgaagaagattaa

SEQ ID NO: 297051 - DNA, 894 bp, Proteus mirabilis
atgatgaatagctggacggggattttaattacacgagcactcgtaggactatcacttagtggtgttgcagccgttgcgatgacctaccttagcgaagagatccatcctgcttatctagccttatcgatggggctttatattagcggtaactctattggtggtatgagtggccgtgttattactggtgttttgagtgattattactcttggcgtgtgtctgtgattattttaggtatttttgcccttgttgctgctatcattttttggcgaatattgccgacatcacaacattttaggccagcaaccttaaaaccacgtaatcttcttatcacaactaaattgcattttagagataaaggactccctcttctttttattgaaggtggcttgttaatgggaggatttgtaactttatttaattatattggttatcgcctattagatgcaccttattcattaactcaaacaaccgttggtttaatttcaattgtttatttgagtggaacttatagcgcatcgaaagcaggcttattaaccaataaatatggattaggtaaagtgtttattgccggtgtttctatgatgctagcgggtatattaattacactatttgactctctagcaattatttttataggtatgcttattttaactacaggtttttttgctgcccatgcggtagcaagtagttgggttggacgtcgagctaaacgaggacgtgcgcaggcctcttctctttatctatttacctattatgcaggctcgagtattgcgggaacactaggtgggatcttctgggtcaattttggttggcttggtgttggtttgtttattgcttttttaatgttaaccgcactattaatcgcactgcgccttaatcgaatagcacaataa

SEQ ID NO: 297052 - DNA, 363 bp, Proteus mirabilis
atggacactcatgaaataagcagtaaaaacatggccctaaaagaagatgtttctatcaacaccacttctaaaccaaacagtccgaaacactatatccagcgtgatgacgcgctttatataaaagtgacagtgtcattttttatggttggtttagccacttttgcattactctactttgtgcaacctatcttacctatcctatcaaaagaattttcagtcaccccagcaaccagtagtcttgctttatcgctttctacaggtcttatggcttgtggtctattgattacagggcctctttctgatgcgtttggtcgaaaaaatgtgatggtgcgctattttgtgcggcttttttcacactattaa

SEQ ID NO: 297053 - DNA, 915 bp, Proteus mirabilis
atgaatatagaacttcgccatttacgttattttattgctgttgctgaagaattacattttggtaaggcagctgagagattaaatatttcccaacctcctttaagtcagcaaatacaagccttagaaagtgagataggggctcgtttactcgaaagaaccaatcgttctgtttcgttaaccccggcaggacaaatgtttttaaaaggatcctatcaaattatggcacaagttaaggcggtagcgacacgagcatcaagaatggaaaaaggagaattaggtgaaatttcaattggttttacctcaacaacaccttttatgcatttggttacgttaagtttgcgtcaatttagggaaaattatcctgaagtcggtattcatatgcatcaaatgaataccaaacagcagatatcaccattattaactggtcacattgatttgggaattatgcgtaatacggtgttacctgataatttgcaccaccagctcctatttcgtgaaccttttattttggcagtttatgaagggcatcctttacttgaatacaaagaaacaggcgtaaatattcaagatattgggcaatatccttttgtattttttgagcgagatgtaggaacggcgctttatgatgaaattattcaattgcttagccttgcgggtattacaccaacgatagcacaggaagccggagaggcgatgaccatcttggggcttgttgctgccggattaggtatttctattgtgacaaaatcatttacccgcatgaaagttgatggtgtgcattatctgcattttgctaattcgaatgctttctctgaagtatggttagtttctcataacaaacgaacgatccccgcagcggccaacaggttgactcaattattgctaaaaaatatcttagaagatcaaaaatcttga

SEQ ID NO: 297054 - DNA, 1212 bp, Proteus mirabilis
atggggatcccgcctagccatattgatcatgtaaaacaatttaatcttggcactgtttttcgattaattgatgaacatggtcctatttctcgtatctcattatctaaaaaagcaacacttgcgcctgccagtattactaaaattacgcgagaattagtcgaagcacaccttattcatgaaacagaatttcctgggttaggatttcgaggacggccggctgttggtttaaagttagagagcaaagggtggcaatttttatgtattcgagtaaataatggtagtctactttttagtttaagagagctagataatcaattagttgttgaagataccttcgactttcctaaacaaaatagtgatgcttttttgcatcatttccttgctgcaatagatacattttttcaacgttatcaatcaagagttgagcgccttactgcaattagtattaccatgaatgcaattgttgatccgattagtggcgttatttatagctctccttactatgctatccaagatatcccgctggctgataaaattcaggaaaaaacaggtgttgctgttttcttacaacacagtgtaacggcttggacgatggctgaatcactctatggtgcagccaaaaataacaccgatattctgcaaattgttattgatgatattgtcggtgcaggggttgtgactaatggaaagacattacattcaaacagccatagtgccgtcgaaatagggcatacaaaagttattgattcacagacgcaatgttattgtggtgcaaaagggtgtttagaaacggaaatatcgatccctcagttaattaaaaaagcacagcacttggcgcaagaaaatcccacctcaatacttaatcaatatccgattacggtagaaacgctatgtgatgctgtattaattggtgataaacaagcattagacataattaatttagtggcgcaacgacttggttttattttagccgtgatggtcaatatttttaatcctcaaaaaatattaataggttcacctctgtgtagagcaaaatctgcacttttccccctgatccttagtagtatccaacaccatgtattacctagatatgcccataacttggttattgaagaaacagaattgcgcaataaaggcacattgccagcggcatcactagtaaaagaagccttatataatggctcattattacttgagttaatgcaaggctaa

SEQ ID NO: 297055 - DNA, 672 bp, Proteus mirabilis
atgttaacacgcttgtttgttacggggacagataccaacataggtaaaactgttgtcacccgagcacttcttcagtcaataaatcgtggcgggacaacagcagtgggctttaagcctatcgcaaccgaattacatgaaacggttgagggtaatcgtaatcgtgatgctcagattattcataattcctcacctattgacgctcgctacgacgaaattaaccctattttgctagaaaattgttatgtaagtgaaaatgcaatagacttccatcaaatttcaagtgaactaaataatttgggccaaaaagctgaatgcgttgttatcgagggaaatggtggttggcgctatttacttgatgataatactttttattcagactgggtggctaaagaaaaaattcctgttgttctagtggttgggatccaacctggttgtgtcaatcactcaattctaaccgcgcaatctattattaatgatggtttagaattagttggttgggtggctaatagaattaatcctgggttaccgcactatgcaaaaattgtagaaaggttatctcaacatattccagccccattgattggtgaaatcccgtatttattgcgccctgaagaacgtgatctctcttgttatcttgacttaagtcagttagaaatcgctcaacccgcttag

SEQ ID NO: 297056 - DNA, 492 bp, Proteus mirabilis
atggaatatttaaatacaaaaattattatcggtagttcaatcatcgctttagcaacactgtattttgctatttatttaatactatatcttattaaatgcgttaggactcaaacgccttttactttaagaaaaatatggaaacaatggttattgagtagtgttattggtctaattggtgcttatattgtacaacttggtgataatcaaagaagaagcgaatttaccaaagaagaggttagctttatgaatgaaaataaagcatatagccaatttacctcggcagacaaagatctcgcgtcaaaaataacccataaatgtacttacaattcagatgctgtatttgaacaatgtttacccaaaatactgacttgggaagcaaaaatttatcaatcatataatgcacatcgtaaaatttctgatagtgaagcgataaaatatacagaagaagaattacgcgataagcataattactggatcaacaaaaaacgctaa

SEQ ID NO: 297057 - DNA, 510 bp, Proteus mirabilis
atgagaattgaatgttatagttggtcagatgttagtgaacaaattctgcagcaagcaatagccttacagaattcagcttttgaggatatgaagggtaatttttatcaggttgatataccttacaagttggtactggcaattgatgataatcaggttatcggacatgtagctgtttatttacgagatgtttacctagattcatttcctgaaaccattggtatattgagttgtgtagtggtggctcacaaataccgaggaaagggcgttgcggcatcattaataaaaagggctcatgctatactgaaagaatattctgttaatttttctattttatttgctgtttctcatgcttattatctctcctctggatatattccgatgaaaaatctcacccgttttattgagaataatgagaagaaagaatttatatataacggtggtatggtgtgtgaattaggtagtcaaaattggaatgtaaatatattagaattaaatggggaagttgtataa

SEQ ID NO: 297058 - DNA, 666 bp, Proteus mirabilis
atgaaagacaaatccgcagaattatctactgggtcaattaatatgaaaaaactagggtatattaaattattagctattaatgtaatattaatagctggttgcaatgaagcaagcagtgaacttacactaaaaaatctgacgaccgcaattaacaagtattatcaaattttttgtattgtgcctcaccctgttccaagcaatagtgtaaaatcctttccagctgaggtaaaaaaagaattaccaggattatttatttcagaagatgaaatggaaataaaattcaagaatgatataaaatactttaatgcatttgaatccattaatttgttagataaagaagtaataaaaaacagccaagaagagataataggttatcgctatagtccaacagctgaaggtaaaaaatatttagagaatgataaaagtcgttatttttgtgctggtaattatgaggttacaagcattgttaaaataaatccgccgattgaagaagcgtttaagaaggttgaagttacttatacctataaagctataaatatttctccttgggttaacaacaagatcattaaagaaacatttccgcaattacagcaagatttaaagcctcaagcagaaaatacaaaaatattaatacttcgaggtaatgtgtggacagtcattaattaa

SEQ ID NO: 297059 - DNA, 1521 bp, Proteus mirabilis
atgaaaagtaagcggagtagtatattaaaacttcaattatcaatgataatactcttatcatcaggaatggcaattggggcttcaaataagacagtagaatttttattgacagagcaggaaagtggttcttctaatgcaatagccgaacttaatttacttgcgaagcaacaaaacccacatgcattgagtactctaggttttatttatgaacatggggttaatacacctaaggatgtgttaaaagcgatagattattatcagcaagcttgtgaacttggtggagactatggttgtggcaatgcctggtatttttatcagtatggtataggtgttgaacaaaatagcaaaaaagcgactcagtttgctaataaaataaataaaaatgatattccattagagatagcgaacaaattaagtcttgaattttatgatgcaaaagtagtagcagaagcgaaccctgatattcgttctgattttattgaaagcttatcacagtggttgacagctggagatgaagtaacacaattaatgtttactaggatgggattaagcaagcaagatacattacatttagcgaaagtatgggcaaatgagtatgaaaatgatgcaaaacttaactttcaaataggtcatttatataattttcgatactcagaactagatagtgaaagaaaagatctcgaagctttgaaatggtttcaaaaagcagctgaattaggagagccaaactctcaaaatattatagcttatttatatgaaaatggtgattggggaataaaacaagaccccaaaaaagcaattgaatggtatcaaaaagccgtggaatccggtgacagtaatgctactatgaatttagctaaaatatattataaaggtgtagatacaaaggttgattatagtaaagcattatctttatttgaaagtgctaaagattataacattggtgaatctgcaaagtatttaagtcagatttattataatggtcagtcagttatatcggactgtaataaagcagcagattattatgagaaatcaatcggcagatataatgaaaagatccctcgggataaatatatagagctctgtcaatccgatagaaaaatgcgtaatgaagttaaaaatgagttaccgagtattgttatgaagcatatttctacatttagcggtgataagggcgcgttaactcagtgtgaattatcgtttggtatttttagtaataaaattattcctgttgaaaatttgcgagtgaaaattcaaatgactgcggagaataactcgaatgatgagccttttatactagagcatatagttgcctttcctccttttggatttaatagtttaaataaagaggaaaatggtggaagaggttatgagaattctaaattagtaccaatctatgatgaaaaaggttgtaaaactcacaaggctaaaacaaaaattctgtctgcaacagcattaattaatggtgaatctgttgatttattagagaagaacttaatttcattcagcgataaaaaataa

SEQ ID NO: 297060 - DNA, 432 bp, Proteus mirabilis
gtgacaagtagtactgagactaatattaaatttaaagatcaatttacatcaacatttacttcaccaacattattagatacttcaccagtaaattccgttaatgttacatgtactcaaggtggaaaaaactatattacaataaaagcttataatagtcttgttagtggaaatatgtctggaatgcttttaaatggaacaaaatcaaacaatcaatcagaagtttatgttgttgcatcattaaaaaatttaacaaatcaaacatgtcaagcgaatgatacaagtgccattagattctttgatggtcactatatacccaatatggataatataaaatcctttaatcaaacttttctatttggtctatgtgctaatggcaaagttatagcagataaatattcaggagctgtcgatgtttcatttatcgttgagtaa

SEQ ID NO: 297061 - DNA, 1077 bp, Proteus mirabilis
atgttacagttcaatataaactcacaaaatggctcaatgccacatattcgtgtagagaatattcaaaagagatttaatcaatttattgctttagatggtgtttctttagagattaaacaaggcgagttagtctgcctattagggccttctggatgtggaaaaaccacattattacgttgtattgccggattagaaacacaagatcacggtagtatctttaattacgataacaacatctcacaccttccccctcaagcccgtgactatgggatcttatttcagtcctatgcattatttcctaacctgacggtacagcagaatattgcgtatggtttagccggtcagcctcgtaatatgattaaagatcgcgttaatgaaatgctggagttagttggtttacaagaccgaaagaaaaaatatccaggagaattatctggcggtcaacaacagcgcgtggcattggctcgtgctttggctcctgccccttctttactattactggatgagccaatgtcggcattagatgcacaagtgcgtgaacatttgtgtgtggagctacgtaatttacagcaaagcttaaatatcactacgctaatggtcactcataatcaagatgaagccatgctgatggccgataggatagctgtaatgaataacggcaaagttgagcagtacggcagtagtgaagagatttacaaccatccacaaacaccatttgttgcagagtttgtaggaaaaggtaactggttacctttcaatagaaatcagcacggtgaggcgatgattggctcacgagaagtccaattaaaacatactgtagtacctcataatcaagggcgtctcttttgtcgacctgaatcaatcaaaattaacccaatacaaaacaaacataatcaatacgatgccaatatacaaaatgtggtgtttttgggaagtcgttgcattatgaagtttgaattagaccatttaccgggacatttattacaagccgagatctctgctgctgagctacatagtattcaaaacggtaaagttaaagtgactttaccggctaatgaactacacatatttgcgtaa

SEQ ID NO: 297062 - DNA, 240 bp, Proteus mirabilis; identical to SEQ ID NO: 36218

SEQ ID NO: 297063 - DNA, 537 bp, Proteus mirabilis; identical to SEQ ID NO: 16554

SEQ ID NO: 297064 - DNA, 474 bp, Proteus mirabilis; identical to SEQ ID NO: 52832

SEQ ID NO: 297065 - DNA, 525 bp, Proteus mirabilis; identical to SEQ ID NO: 16553

SEQ ID NO: 297066 - DNA, 789 bp, Proteus mirabilis; identical to SEQ ID NO: 235392

SEQ ID NO: 297067 - DNA, 498 bp, Proteus mirabilis; identical to SEQ ID NO: 16552

SEQ ID NO: 297068 - DNA, 372 bp, Proteus mirabilis; identical to SEQ ID NO: 16551

SEQ ID NO: 297069 - DNA, 378 bp, Proteus mirabilis; identical to SEQ ID NO: 16550

SEQ ID NO: 297070 - DNA, 1617 bp, Proteus mirabilis; identical to SEQ ID NO: 16548

SEQ ID NO: 297071 - DNA, 1527 bp, Proteus mirabilis; identical to SEQ ID NO: 16547

SEQ ID NO: 297072 - DNA, 1668 bp, Proteus mirabilis; identical to SEQ ID NO: 16546

SEQ ID NO: 297073 - DNA, 2109 bp, Proteus mirabilis; identical to SEQ ID NO: 16545

SEQ ID NO: 297074 - DNA, 822 bp, Proteus mirabilis; identical to SEQ ID NO: 16544

SEQ ID NO: 297075 - DNA, 13860 bp, Proteus mirabilis
atgtcaaaaattttaaaagatttagagtttacttttacaggaaaacgttatggtacagatggaaatgacgatattgatgccataggttttggagggatcatttatgcaggaaagggacacgatacaatcacagtcggaacatttgcagttaccgcttacaccggagacgggcacgattttgtcagagggggaagtgcttatcttaagattattgatgagaacggtgatttagatgtcagaggattaaatgcatggggagaaattgaaaagtccggtcatggcgatctgaaatatgttggtgcttctgccgcgattaagattaatcatactggatatgaatatggaaatatcaattattcaggagctgctattgcaaatatcatcacccgtaaaggcgcaattagtaatatcaactaccaaggtgctggcggttacaatcaaatttggcatgaaaccaatactggcaatatgacgtttaaaggggggggaggctataataaattggttcgtacttggtttaatagctatcaaaattcaaaaggaaatattaattttgaaggattaggcggaggcaacggaatcttctctcgcgttgaaacaggtgatattaaatttaccggaggtggcttagaaaacgtcttaatacgcgaaggtaaatcaggcgatatctttatgtatggagcaggagccaataataggcttacacgtatcagccgaaatactgatacctataaagaaacaagtggcaatatctatttttcgggggggggaggttataatcatatctattccaatatagcacaaggcaatatcacattttatggagctggggcttacaatgagatcattcgtacaactcaagttcatcctcataatgatttattagttgaatatacgaaagctgaaaatatttttctaacaagtgcttatatgttaaatctagacttagataaaagtattaattttctaacaagtgataataagcaaaatttcgaatccggtaaacctgttgaagtaaaagcgattaaatcattgcgagaaccaaatacttatttgtttaaaacaccgggcccaggggataccaatttattcatatcagactatggtcgtcgagattatacctttaataaagtcaaaatttacaatgatcctgaaacgggaaaacttcaatacgattccgaactttggcgtataacgcctgatagtggggacattaggaacatacgttttgataaaaaaaattttgaggatacctataatcttagtgtggtcaataattgttggaatacattagaaaaacaagaaattatcgaatcaccacgtttcacaaaaataaatgctgatagccactatcaattatctaatttaaaagtatttcaacacattaatacagaacaaatccaaagaaagtctctagaaacaatcaagttgggcgtagcacaagaactttttaaagacgataattctgctgaatgctctggtgatatcaatttcacaggtggtggcgctggtaatgtcattaaatctgatgttacacaaggtgatatcaattttacaggtggcggcatagcaaatgtaataaaacataactctaattatggtaataccaactttactggtggaggcgcagccaacatcattgtaaaaaaaggtcaaagaggagacctaacatttgatggaggaggattagcaaatgtcttactacatcaaagtaaagaaggaagaatgaacattaatgctactggtgccacgaatgtattaatccgaattggtgacggtgaatataaagcacatcttacggcattagggaatgtttctattcacaaaggacaaggtgatagtcatatcacaatgttaggaggattaaatacccatacccagattgatagtcatcagcgtgataaggctttatggcgagcattaggcggacttaatgtcatgacacaagtcggtgctggtactattacatcgttactcggcggcggtggaaatgtcctgactaaaatgggtgaaggcgacctaagtagcatcatgttaggtggtgctaatatcattacacatatcagcaataacaaaataaaatcaaacacttacactatcaccctaggtggattaaatattttaacaaaaaaaggtcaaggtgatattttagccataatggggggaggtggcaatgtcctaacacatatcggaaacggtaacatacatggcgttatgcttggaggtgccaatatcttaactaaagtaggtaatggtgatctttcaggcattatgctaggtattggtaatgtactaacacatgttggcgatgggcaaaccctaggtataatgggcgctgtggggaatattttcactaaagtcggtaatggaaccagtatgggtgccatggtcggtggtggcaatatattcacccatataggtaatggtgaagcttgggcactaatgggaggtttaggcaacgtctataccaaaataggcaatgggaatactttggcactaatgatcgccaaagggaatgtgttcactcatgtgggtgatggaatgtcggttgctctaatgttagcgataggcaatatagccacaaaagtgggcgatggcatgacattagctgcaatgattggcagtgctaatatttttactcacattgggcatgaagaaacctttgctgcaatggtgggtaaaggtaatgtccttaccaaagttggcaatggattaacattgggattaatgctaggtgtggctaatatttatacccatgtcggtgatggcattagtattgggctgttttctggtaaagcaaatatcatgaccaaagtgggtaatggaaccacattatcagcgatgtttggcaaagccaatattatgacccatatcggtgatgggataactggcatacttgcattaggccaagccaatatcataacaaaagtgggtgatggcattgcgggaatcattgctggtgcgaaaggaaatatcgttactcatgtaggtgatggaataaccgctgcgatcctcggcggaaaagcgaatattttaacaaaagtgggtgatgggctcaccgtaggtctgctgatttcaaaggtgggaaatattatgacccatattggtaatagcaccacgattggttttgccaaaggcaacgccaatatcatcacaaaagtaggctatggtttaggcattaatgcggcatggggtaaagctaatattttcactcatatcggcgatggtgaacgatataacttcgccaaaggaaatgccaacatcattaccaaagtaggtaatggacaagaaacctctgttgttaaaggtaatatcaatattattacacacgtaggtagtggaaataattatactggtgcatggggcaatgggaatgttgtaacacaaattggtgatggtcgtcaggtcgccttagcaaaaggtcatgcaaatattgtcactatgctcggaaaaggtgacaactatggcatagtttggggtaaagccaatatttcgacaaaagtaggtaatggcacgcaagtcaccatagcaaaaggccaagcaaatattacaacaaccgtaggtgatggcctaggtgttaccgttacatacggcaacgcaaatatcaatactaaagtggggaatggtgtatctgtaaacgttgcttgggggaaatataacgtaagtaccaaagtgggtgacggcttaaatgtttcggtcatgaaaggtaccgctaatgcaaatatccatgttggtaacggtttaggtattaacgcctcttacgcaaaaaacaatgtcatcgttaaaattggcaatggtgatatctacagcttatcggttgcttctagtaatactcaaagtaataaactcgctactttcttcggcaatataaaacagagtgtacttggtgtggtcgggagtcaggctattaactatttagtacaaggtgatgatgtaaccacttccggctcccgcaaaggcaaaggcgctattcatttaattgaaaaatcttcaatcgacggtttcaaaatgaacaaaatcgacgaagtgaagagtaacattgatataaatttaaaaggtcatatcacagaggtagaaacccctagtttaagtgatgttaatacagatgaatccaacttaaccaataacagtccgaatttgatcataaatggtgactttaaacatggatttaaacctgtaacagaaggttggaatattgcatatactcaggataaaattacagcaattagccaatatggacatagagcctctattgatacaccaactaatactaataataaagattattgggatggtggacttatagcagaatacaaggaagaatatgaaccaaatatcgctatatatcaagatattagtggtttaatgcaaaatgaggtgattgaattaagttttgagtatgaacgacaagataatacgccaacagagaataaattaagtgttatctggaatggtgaggttgtcttcacttcatcaagtgatgataagtcaatagcatggcaacaacaacaaattaaattaaccgcaaatgcagaaaataatcgtcttatttttaccattccaggctctgatggcttgcaaggaaataattacagactaagaaatattgtcgctaaatcagctgtagcaaatataaacaagcatatctcagattctgatgcgacaaaaaatgccctcgctgacaaaaagaaggcagatgccaatcgtcaaaaactaactgatgaaaaacaacgcctattagaccacatctctaccacacagactgaacttgaatcgaccgatcaccttgcactggagaaaaacggccatagagaacgcgatgccattcttgaagaagctaattcagtaacacacaatttgaccacagttggtcaaacactggaagtactcagcgaatattcacaagatgcccccccctcagatcaaccatggagtgagccattcgcggaaggaattttaaaggatgtacagaagagcttaattaatactaaaaaaattgtttcagtgcctgttaataatattaaaactcagtatgttgcaaaccttacaaaggtgaaaaaatcgataaaaaaatcggaatatggcgttattcaaagtgaagaacattgtcaagaagtgcaactcgatacttccaaagcaaaaaatgatgcagataaaagatactcagacgcgatagataaaaaaaatagtgctcaaatggcagagaaaaaagcatcaaccatggtggaagatgcgagatcacgaggagatacggagcaaaaaacagcgactagcatatcggataaagcacaaaaagaagctaaatctgttcaactgaaagaaagtgataaacctaatcgtcacagggcgcatggtagcggtttatccggagaagcggcctatgtagagggggctgatgataatccatccagttatatcaaaccaatatcaactaaaaaaaatgatggtcgtttcaataataaactgacaacatttaatcaggaattacttgatgatgctcagcaagccattaatcgtttaagcattaatgctgggatccgacaaaaatcggcaaacgttcttccctcttttacatcagaccttaatggagatgacgtagcaacctatcaacaaccttctcttcgttcaggcaatcttcaatatcacaaaataggagctatcgcggtcaatctttctggattaggcgaaagccccatttttgaaacgctaaaacaaaaattcaatgtaaaaattaagaatagaaatacttactttacttttattttggaaaaaaatagtggtcgtatccaaaaaaatatttatttggataacatcaatgatcccactcagcaaaaaataatagaacactttattttagctaattattcaaattttgaagcaatgcctaatgaacttcatttagaaaatgacaaaattaaatcaagtcataacaacaaagataggatacttgcagaatacgtagaacataaatggcaaatgctaactgattcaaaagtcatgtcagttgatgaactacataaagttgcaagtgttaaaggcaaaatacaaggcgaaagttataaatcaatcattacaactctctcggaataccatgaaaaagaatcgaatacaaactgcttaccaatagagaaattgagagtgctagctcagttgcgaaaccaaattgatggttacctattaggacaccccgactctgaacgcaatgatggattgaaacagttacaaactcaagtcaatacacgttataaacacgcatcggctttaatacaagatagtcacaccatcaacgctgatagcagctttagtcgcttatacgattcactttcaaatgccaatttaaaaagaagtaaacacatttatattgatattaacggacactttgtcactgaaggaaaaaacaatctgcaagggaaaaatagactaaccagcggaaaagaagtgattgagcgagtaaaaaatgccgtagaaaaagaatatggcgcaccgattgccaataaagtcttcagtcaatttgcaaataatgaattcgctgaaaacggcgagggtattgatgtttcagggttaaaaaaaattcacagagctattgagcgggaactatctcctcatagtgcaaccttatatatctggaaaccaagcaatcatagtaatttgggacacgccacactacaaataggtcaaggtcgcttactgttaaacacagaagacgcacaaaataatcataaagaaaactacatcagttggtggcctaacaaggcgaagtcatattttgatgtgatgggagtcccctcacaaccaaaagagtcgttagcatcggatgttgcagcagaagaaaatgatggctttggtttaaattacaaatataaagaactaaacagatatgaccgactcatgaatattgcgaaaggtgaaacggtcaccactgcagatgatttatctcttgcagacgcaaaaaatatattgacgatcccaaattatatagaaaattcaaaaataccgcgaacaattggacagccttttattgatgaatgggtaataactcagaaaaaactcaacaacatcgccacaaattttctggaagctgtacaaggtaaatttagtggaaataccataactataaatggtgccatgatactattgacagagcccacgttactatcaaaaagaaaaatcccactttctgttgcacagccttttattgaacaatgggataatataaaaacacaacaagaagatatatctattcaattattaaaagcgatgaagacttggatacaagaaggtaaggatccaacgttaacgaaaaaacgaattgctttagtagaaaacgaatttgctgagcaaaaacaaaaaagtattgacagatttaaaaccagcttacctgatgaaggacgagtattccgtattaatttagaggggttagacgttgctgctatgcaagctgaatggcaacgaattaaaaattcacctaatggtcgttatcatttattaacccaaaattgttcgagtatcgtagcgaaaattttaaaagcgggtggcgcagatgaactgattggctataactggcaacctaaatataatatttggacaccaaatcaaatgttcgcatttgctcaagagttacaagaagcgcaaatggcacgacaacaaagtagaatgattccacctaacttacacgcgttgtcaggttctgaaaatatccgtcaagagctagaaaacacctcccctcttatttctgctgaacaaaagctcaatattgtttttagtgaacaggaaacgggttttctactgacacaagcatcagatgaaacgaatgaaaaatttatttatataaaaaatggagataatcaagaacaacaaaaaataatgagtaattttatactcactcattatcgtgattttgactctatccctgagcaactttatttcttagataatacaatcgtgtcactcgataaaaaccattcacgaatattatcagaaaaagtcggtgaaaattggcaacctgttgcctattcgaatctaatgactgctgatgaattaacctccgctgcagaggtgacaggaaaagcacgcggtgaaaattataaagcgatcattcaatcgcttagagattatgaattacaaagtacaaatacaaacaacacaccaatagatatatttcagcaactatccacattacgtatacaaattaatagttatctgcttaaacaccctgattcaaaacgtaacgaagcattgcaacaattacgcgaccaagttgatatacgttataaacatgcttctatcttattaagtaatagccagcaagttgattcaaataatacttttagttatttatatgagattttttcaaatgctaacttaaaaatcaacaaacatatttatcttgatgaaaacggcaactttgttacaaaagggaaaaataatttacaaaaccaagacaaacttatcagtggtaaaaatgcaatcacaagcattaaaagattggtcgaaaaagagtatggcagtgaaattaccaatcaggtatttaatcaatttacagaaaatgaatttgcccaaaatggccatggtattgacctgtcaggattgaaaaaaattcaccaagcaattgaacaacaagtttcaccaatcagttctacactatatatctggaagcccagcaaacatagtcgcttgggacatgctgcgctacaaataggttctgggcgcttacaattagatagcgatagtgtgcaggataaccatgataataattatgtcagttggtggcctgccgggagcaaatcgctcgcaaacccactgaatattacaacagaaaaaaatcctgatttaaaattacgctggtatgatttaagccaaccagtgagtcgctcaacaaatttcatgactttacaaattgatattcaagaagaggaaaagacgaatttcaaattaaataaagatgaaggggaaaatgacagacagttaaaagaatttagagataaaacgaatcttacccgaggtctcgaaaatattacacctgaaatcgcaggcttactgttgaatgctcctcattggataccagaaacacttatcccacctgaaatttcacacccctttattaaacagtggaaaagcccaaatagtaatctacttgaagtatcaacaaacttttcaatcgcagtgaaaaactggctaaaagtcgcctttccaacagcgatgattaaccaaacctttgcattggaaatcaagaaaattaaagaaattgaagaccgaaaaacagaaaatttcaaaacaagtgtcgctgatgatacaaatgatggcgtggtgtttcgcattaatctagagggacttgatgccgccgccatgcaaaaagagtggaagcgcattaatagccagtctgatcctcgttaccaattattaaccaagaactgttctagtattgttgctagaatattaaaagcaggcggagcagatcaactgattggtcatcattggaaacctcgatttggcatatggacaccaaatgagttgtataaattttctcaaaagatacaggaagcacgcttagcccaaattgcggtacaacaaggcaaacctatacattctaatttacaagcattatcagaccacaataaagtggctattgataatgacggtacatcaccaaacgagagaaaaaatcttagcccattaacacgtttttttaatgatcattttttcggcagctatgaacgtcgtagagacatgacaacggtgatgagaataaaaaatgaagaaaaaataacattaaaaggggatgcaggccgtcttacaggatcatattacagaggaaacgacaatattccagaagctaccgataagaaagtagtactatttttacatggttcaaattcccctaccgaaaaacaatcctctagtttttatcattattataaccaacaaggcatcgatatgttagcgattaacatgagagggtttggcgaaagcgatggctcgccaacagagcaaggaatgtatgctgatgcacaaaccatgttccgttatctcgttaatgataaaggtatcgatcctaaaaatattattattcatggttattccatgggggcaccaattgcggctaaattagccagcgatatttcagctaacggtcagcatatagctgggctattcttagatagaccaatgccaagtatgtcaaaagcaattgaatcttatgatgaatatagccttaagaaattgactggacaactcgcaaaaaaaatcaatggccaattctccgtagaaaaaaatctacagggtttctcaaaagatatccccattatattgctcactgactgtggcgagctgggcattggtggtgaaaaaatgcgcactaaattacttgataaaggatatctagttaaaggagaaagaaccgatgtttctcatttagagagccttaagttgatgaatcaatacggtaaacaaataatatcaagtttactatccccagagtatgtaaataacaccaatcacagaaatgcgttagattcgatacaaaacccgataaaaaagaataaggtgactgattgggggatggtatatgtaaaacccaatgataatgggggtgatagtcgttttgatagccagattattatccaaacagaggatgatccgatagtcgctcaagcagcttcggcacttgccgctaaacatgccaaaaatagtatcgtggtacaattggatgccgatggtcattaccgcgtagcttatggcgacccagcacaactttcaggtaaaatacgttggcagcttgttggccatggtcgtgaaacaaccgaaaataatcatttacgccttagcaactacaatgctgatgagctttccaatcaattggttaaattcaataccgtattcagcaaagaaaataatatcaatacaactcctgaacatatcagtattgtcggttgttcattaataagtaatgacaagcaggcaggatttgcccaccagtttatcaatgcattagatcaacaaggcattcgtagtagcgtttctgctcgagtaacagaggtcgccgttgatagcaatggtcacaaatacaccaaagataacaacggagagtgggtagccaaacaaaaccaaaacaaggtagtgttaaattggaataaagaaggcaaaatcacgactgaatttgagcaaatacataatggtgttgctgaaggtgatattgatttgactaaaataggtgcttcagctgacaacaaagtacgtggcgcaattgcagataataatgaagtctttaccgcccccaaaaaaggtaaaaaatcaaccaaacaaagctcatcaggaagtgataattcatcactaagctattctggcaatatccaagtcagtgtgggtgacggcgagtttacaacggttaattggggaacctctaatcttgggatcaaagtaggtactggcggatttaaatcactggttttcggtgataacaatgtgatggtacacgttggtaatggtgatagtaaacatagtgttgatattgctggctatcaagctttcgaaggtatgcaattatttgttggtacacgtaacgtcagctttaatctggggcgtagtaatgatcttattgtgatgttagaaaaatcaattccaacccctccactgatcaacccttttgatggtgctgctagaatcaccaaagttctagagtcaatcgcatgctcaggtgaaaataatgataatgattggttgtcggtacaaaacgatcagtggacactcgctggcgctaaaaaatttgccatagatatgtcaggaatagaccaaacgagcaatgttgactataaaacactgactgatctgaattcacagaataagcgtagtagccgtggattaaagagtgatctagaagccacactaaacaaaaaatataaccagtggttaggtggtagtggcaataacaacgagatgggaaaaatcagccgagctgagcaacttcgtcaactagatagtaaaatcgcttttaatttcgccattggtggtcaaggtgctgatattcaagttactgccgggaattggaacttgatgtttggtgataatatccagtctattatagacactaatcttggctcattatttggcttaatgacgcagcaatttacagcaactggtatggtgaaaaccacctttacttataccccccaaaacttaccaactaagttaaaaaataaattgctaggtcggttagccagcgtgagttcagacacgactctgggggatatttttggagtagactctaccgcagatggaaaaataatctctcgtaatggtgagcccattgatgttgtcgctattttgaaagatatgctcgctgtagtgactgagtttggaggtgaacaactgtccgcatttactgatccgactaaattattagataacctccaatcatctattaatctgggcaaggatggtattatttcatttgctgaaagccatggtttaaaagaaaaagcgacagaagatcaacaaaatgaatctgaagtttcaattaacgcccaaacaccaataacaacgagtcaaactgaaaatagcaagatcacagaggaaaatgatcgccctttcggcttcaattcgctaaatatccccaatctatttgccacaatctttaataaagataaacaaacagatatgcgtgatctcgcagaaaacctcaaagaaaatttagcagctgatgtactgaacatggagaagaaaacgctcgatttcttgcgtaatagtggtcatttaaaaggcgatggtgacatacatgtctctcttggcaactataatttcaactgggggggagatggtaatgatctcggcgcttacctaggagataataataatttttggggtgggcgtggttcagatactttctatgcaacggggatctcaaatatttttactgggggttacggaaatgatctcggcgtcttgatggggcgctcaaacatgatgtttggaggcgatggagatgacactgctattatcgccggtcggatcaataatgtctatttaggtgacggactcgataaagcatttgtctttggggaaggcggtgaaattcacactaatgcaggtaatgactatgctgtcactaccggtaactacaatcgcattttcagtggtagtgaacaagattttgttgtcacaattggtaaccacaaccaaatatccttagaagaaggcaatgattttgccaaaatttttggtaactacaataggttgaatggagggggcggtgatgacgaaattcaactaatgggttatcacgccgtagttgatggaggcgatggaaatgatcaactaattgcagcttcattctcgaaatttagccttcttaatggtaatacaggtaatgatattatcatattaggtggatatcagaaccacttcaaaggtggaaacggtatcgatagcttcctgattaataataatgtgattgattgttatatagacgatattagccaagaagataatattgtacttggagatattgattggaataaattatggtttgaacgcagtggctatgatttaaagatctcacatattcgcttcccacaaaatacaggggaacaagccacatttgagcgcattggctcaactacttttactgattatttcaatggtaatcaggcaaaaatcgttatcgcaatgactgataaagatcactctgatcagcgcgaatatacggctttatcaagcaatgcactcgctattcaaattcaggccatgagtacatttcctatgaaggcaggcgcatccggatttttcgataatataagtgatgaggctaaacaaatgatagccgtagcttggacagatacaatttcaggaaaaggcatattagtgtag

SEQ ID NO: 297076 - DNA, 153 bp, Proteus mirabilis
atgtgtaaggtttattgttctagttatttattacttaaatcaaatgactttaatttacaagataagttacgtttaccgagtagcactgatatctatttattaactgagtttattggtaaaaacgaggctggtgaaaaatgcctattagattga

SEQ ID NO: 297077 - DNA, 1533 bp, Proteus mirabilis
gtgctacttgctattatagagcctatctatcttttattacgagataaactttatgcttttgtttcttgtaccctaggtgccgaattctcagggaaaatttatcaacaccttattcggctacccagtcagttttttaatcaacgtcaatctgggcaaattattgctcgtattcaagagcttgctcatattcgccagtttattactggctctgcgttgatgatggtactggattttatttttattatcgtatttctttcagtaatgtttgcttattccgtattattaacttggataaccatagcagcattagtcgtttactttttattttggctgatacttggccccatgatccgttattgggttgaacaagagtatcaagcaaatgctgataatacgagcttattaacagaggctattaatggtatagaaaccataaaaataacagcaacagaacatcaatttattgaaaagtggcaatataaactcactaattatatccttaagcgtttttcagcggccaaaaaagcgttatttgctcagcaattaattggggctattcataaaattactatggcaattatcttgtggcatggtgttaatctgattatgaaagcgcaattaagtgtgggagaattagtggcttttaatatgtttgccacccatattacacaacctattttacgtttagcccaactttggcaagatgttcaacaaacaggcatctctatacgtcgtattggcgagatcgttaatactcccacagagcatcaacatcaaggacttgctactgtacataatattgcaggaagtatagtattttctcatgtacgctttcgttatacagccaatactccagatgtgattgagcaactctctttttcgatccccgcgggcaaatttattggtattacaggcccctctggttcaggaaaaagtactatcacacgtttaattcaacgtttttatactcctcaacaaggccagatttatattgatggtatggatctcgccattgccaatccccttactttacgccaatcaattagtgttgttttacaagataattttttatttagtggcactattatggaaaatattcggttatcaaaacccgattgtagtgaagaagatattattgaagcgagtaaattagccggcgcttttcattttattactcaactccctgagggatttaatacacaagtgggtgaaagaggtagtaatttgtcaggaggacagcgtcagcgtattgcgctagcaagagcacttttacctgatccacgaattcttattttagatgaggcaacatcggcgttagattatgcctcagaagcggaaattttagccaatcttccggctatttgtaaaaatagaacggtaatttgtattgctcaccgacttaatgctatttctatttcagattatatttatgttattgataaaggtcgtatattagaagaaggtacacatagcgatttattaaataagaaaacactttatcagcaattgtggcaacaacagacacagcaataa

SEQ ID NO: 297078 - DNA, 735 bp, Proteus mirabilis; identical to SEQ ID NO: 294601

SEQ ID NO: 297079 - DNA, 303 bp, Proteus mirabilis
atggaaaagccctctaaacgggatatgaaaacactatcagatatgccaaagccaattattattattgaactaattggtattgtgctattggttatcgcttacttatatattaatcaatatatgacttcaccggaatggttaacaacctatacagggcaattgaccttggttgttttaggggtgctttgtatgatcccacctgcaatacatatcgtttggcgagcgatctatcgtttaaccttcttaggtattgatactaaggcaactgaaaataaaaagaaaaagccacataacgaaaaataa

SEQ ID NO: 297080 - DNA, 7077 bp, Proteus mirabilis
atgacgacgttaaataatgtaccttccccacgccccagttctattacgagaaaagtcgcttggcttaatatttttatacaattagcatttcctattgtgacaaccatgcctacgcagacttttgccaatgagaataattttaaaaaacataatattagcgatataaatcaacaaaatacttatcaagtcaaagcgggtgataccccagaatctatcgcaaaaaaatttaatataaaactatttaaattgattgaagctaatccacaacatgtatcgttaacgggtgagctaaaaataaatgatggaactattcttaatattcctaatgaatatttattaaaaaaaaagtggctcaataatcaagatgaggcaatcccctcaacagagggcgaagagctcgctaaaattattgttgataattcatttttactcaataaaaatatcgatgtaacacaatatgcaattagccaaatctccagtaaatccaatcagaaaatagaacaatggcttaatcaatttgggcatgcgcgagtttcactttcagcagataaaaatctcaccttaaaaaatagctcagcggaattgttaattccattatatgaacaaaaagagaagctgatctttgctcaaactaactatcatcgcaaagatcttcgtagccaatttaattatggtattggttatcgctattttactgaaaaatttatggtcggcattaatggcttttatgatcatgatttaacgcatcatcataatcgtttgggaattggcgccgaaatttggcgagactatttcaaattaagttctaaccattatcaccgtctatcaagttggcgagcctctaataatatcttagattatagtgaacgccctgcgaatggttgggacattcgaacagaaggctattttccagcttatccacaattaggcactaaattaatctttgaacaatactacggtaaagaagttggtctatttggcaaagataaacgggacaaaaatccacatacctacacattagggattaattatactccgataccattagtcacattaaatgccgagcgtcgtattggcttacatgatcgtgctgataataacttgaatatcaacttgtcctaccgcataggagaatcactcgcttcacaacttaatcctgataatgtcaaagcaatacgtacattagcaggaagtcgttatgactttgttaatcgtaataacgatatgattttagaatataaaaaggaaactttagttttcctttctatggttgattcaataaatggttatgctaaagaggagcgcgatttacaagttcaagtaaaaacaaaatatccgttagccaatattgaatggtccgcaagtaagttaaatgcccaaggcgggcaaataaaacatcatggtggaactcactacaccgtgattttgcctcaatatcaaattggtgcaattgagaaaaatagctatatcattagtgctgttgccattgatacccatggcaatcgttcagcgcctgttcaaacaacggttattgtagataaatcgttaatcaatacgcgtaatagcctattttcacctaaacagagccaactattcgctaacggtgaagcaacccaaaagttaatattatccatcgttgataatgataatttacccgttgatattgatagtaaagaaattactttacagcaacagtctgatacagaaaaaggcaatagccgtatttctactttctctcgtttagctgctgggaaatatcaattaacggttacagcaggaagcataccggaaaaattaaccctaacccccgtattccgtgataataccttcaactcagcaaccgtgacacttattgccgataatcaaactgcccatattgcaaaaggcaacctaacggttacaaaagataacgcgccagccgacggtaaaagtcaaaataaaatcaaagtacgagtcactgatagcaaccacaatccattggctcattatccagtcaactttactgccagtaatggtgctaatgtcattagctcaagaaaaacggatgaacaaggtgagattattgcttcagtgactaatactcaagtagggagttcgcagattggtgtacaagtaaaagggataacctattcgactgaagtccattttagtgtggataatgatagcgcctatattccacaacaaaacttcacgatcacaccaccactttctctagccgatggtaaaacagaaaaaaacatttcattacaagttgttgataagcaaaataatccgatacccgctactcatgtgacattatcggcagataaccaagcacaattaaaacaaaccatattaaccacagacgagcaaggtaaggcgaccaccactatgataagtaaagtcgccggtacggtcaccgtgagggccaaaataaacgacaagatgactcacgcgacaacccaatttatcgccaaccaagctaagggggttattgtctccataaccccatcctctacaactcatgtcgcagatggtcaaaccccggtcatccttactgcattagtacaagatcagttcggtgagccgctccctcatgcacaaattagctgggaaactgagcacgataaaagtattgttaaaattgaacataccacaatgactaatgagcaagggatcaccaccaacaagttaaccagtacacaagcactcagtgtgcgggtaactgcgcgtataaataacaatgcctttactgctgagccaattacttttattgctaatgggcaacaagctttgattagtgaattattggttaataaaaatcagattgttgcagataagcaagatcccgcagaacttactgcaatagtaacagataaactgggtaatcaacttcctgatactattgttaattggcaagggagtgctggtactcaatttgctcagcaacaaactaagaccgatgctcaaggtatcgccaaaaatacgctaacaacatcacaatcaggtatcacaaccatcaccgcgcgattaaataatggtcaacatgcacaaactaacttagttgccgttgcagatctcaaaagtgccactctcacattaacgacattaaataataagcaatctgccatagcagataaccaagatagcattaccgtagtagcaaacttaactgatgcttatcataacccattgaaaaatatccctgtctattggcaatcaagtattaatcatattgatgaaactactactcaaacagatgaaaaaggcagaacgcaagttgtcatttcaggaaccaaagcacagccaacaacaattaccgcctatttatcaaataaagagaaaaaaagcattcaggtaacctttgttgcgggagcgccagtgcaacaaaatagttatttgacgattgaaccacaatctatcattgccgatggcaatgcctttgctgtgggtaaaatagacctgcgtgataaatttgataatccggtaataggtcgtagtaacgatattgcgttaattggggataacagcaccatccaattcagtaaaatcacagaaacggctaacggcaattatcaagcacatattagaggtacaaaagcgggactcagtcaaattaccgccactattgatagtattacggtaacgcaatctttaggatttttaacagataataaaacagtcaagatccactccgttaaggttatggcaccttataccgtaacagcgaatggtaaagacaaagtcattattcaagcacaaatcaccgataaacataacaatccagtatcaaaaggcgttactgtcggttggataagtgatctcggtaagcttgcagcaccattaagcatgaccaataagcaaggaatagctgaaattaccctctcaagtactcaggcaggaaaagcgaaagtaacggcagtgctcaataaccaacaatctgtcaatgctgatcacattgtcacctttacggaaggtgatatttcggcctctctttctactgttgccatattccctgacactattgtagcaggggcaaataaagcgaccgtaacaataaccttaaaggataaagaaggtaatttattgcccaacttagccaataaaatcaccttaacgccgcagactaatttacaaacaacgattacgccctttaaagagaaacaaaaaggcatttatcaagcccaagtgagcgcattaaaaaccggaaaaacctcgttatcggctcacgttgctccattagcaataaaacaatccgtttctttaacggtgctccctaataacacaacagcaaaggtgaaaaactttactattagcaatatgcaaccacatgctggggagtccattacttataaagcctatttggttgataaccatgataatcccgtcggtataggtgtacctgtcgcttggtcaacgaatgaaggtagtcaactcgaaacaccattaacttttacagatgataatggtgtagcaatagttggattatctcgacgctctgtcggtgttgccaaagtcagcgcaatattagcaacaggtacttatatagcagatgatgttcactttttaacgggtcacattgatgaaacgatgtcagaactgtcgttgaacccgagtcaaatcattgctaatggcaaagataaggcattattgacatttgtgattaaagataaaaatggaaatatcatccccaaccaacaagtaagcggattttctaaaaatccaaccatcaaatttagtcaagcacaacaaatatcaccgggacgctatgagattgaaataacaggaactcaatcgggcacagcacaaattggtgttatggtaaatggcacccatttcaaaaaacaaaaaatattacaacttaatgccgatgtgacgacatggaaaatacgcgctgttgaggttgatagaacaaccataaccgcaggagataaaggtgttaactaccaagcaactgtcgttgatgccaataataatgtattacctaatgttattgtgtcatggaaattactcggatcagcagatgattatcattacagcacttatactaatgataaggggatagcaacgaatcgagtgactagtcatgtcgcgggacgcttgaagatgagcgcttatcttgattctaataattataaatcaacacaagatattactgtaataccggctgaaatagatattcataaatcaacctttaatagtcatcgtcgttctataaatgctgataataaagatagtacgttattaagcgtaaaattaatggataaatacgataatactattgatggtaagaatgttgagattaaaactatcagtggtaagcctaattttagtgacaatccattaaagtcagtgggcaatggtgaatatcaaacaaatgttacagcaaatacgatgtccgatattatcttaaccgctcaagctgaaacaataactatcgcagagccattgacgattaaagtggctatccctaaatctgaaattacctttgagaaacctatccaacaggaaatctacaaatcaactgtgattgatgcgttaagttataaaggtgtaccacaaaatatgcaggtaatatggtcaagctctgatcctactgttgcttccattgatacaacaagtgggcaaatctccatgaaaaaggctggtactacaattattaccttacaaaccttaggtaatgagcaatatccatcagctaaaaatagctatcctttagtgatagaaaaagcgccaccaaaactgaaagtaacctctcctcacaccatacaatcgatctggaatgatggcattacccatcaaataacagcggaatttgataatccagaggttaaaaatacccccattcatttctctagtagcgataccttggtagccaccattgatagtaaaggtaacttaaccgccattaaaccaggaaaaacaaaaatagtaatacaaagtgatgctacagataaattcctagctgatagccaaactgtagactatcagcaagaaaaagctgcactaagttattattttaaaaagaattatattgtattaacaactgattctgctgcagataaattattgatggctcaaagccctacgccagatgtccccgttgaagcgaatgcaacttggtatagtagtcaacctaacatagttgaaatcaccccagatgggattatcaaaaaccttaatattgggcaaacaacattaacacttgaggtgaaaaataataattattttcaagatcatgagcaaagctataacgtcattatacaagcatcgcctcgcatcacaattaactcatttgagtttctatctgcgggagagagcaaatcaaatacacatttggatgatttaacttggcaacctttatacacttcagacgatcagtttattgttaaatggtcttcatcagacacacctaaagcgattaacttcgagttatttgatgaaaacggcacttctatcgccttagaagaaagacaaaactatgcacctaaatataatatacatgacccagtaaaaattcaggtaccgaaacaatatctaaccagtccaaaacaattaacactagaagtcacaacctttgatagtaataatcagccttatgtcgatcctaaaaagtataaaattaatattgactattttcctgccaataacgcatataaaataatctctcttgattataattctaaatttatctatacagatacaggtacccttgcttcatcttgtcaaaatggttggtcaaccactacaacacatcttattttaacgccaagattagtatttaaaggtgagccgaaaaagttactttatcccatttatattactacggaattatatgatgtaacattaaatccatcggataaactcatcggacatattaatgagaaattaacttatccagataagattatatttagcgagcattctaaaaaaatagctgaaatatcgccgacatcagcacactacgcattagacgaagaatgtagaattaatgattctggtcatggtacgttaaaagcaaatataaccataggtaacagatccagttatcttaaaaaagaatttcattgggatggccaaatagggggatatttttaa

SEQ ID NO: 297081 - DNA, 1458 bp, Proteus mirabilis
gtgtctgaactatctactctatccccacaaccattatgggatatttttgcaaaaatttgttcaattccacacccttcataccatgaagaagccttagcgtcccacattatggcttgggcgacagaaaaaggtttatctgtagagcgcgatgcggtaggaaatattttaatccgtaaacctgccaccaaaggtatggaagatcgtaaaacagtcgttttacaagcgcacttagatatggtgccacaaaaaaataacgataccgaacacgactttaccaaagatcctatccaaccttatattgatggtgaatgggtaaaagcgaaaggcaccacattaggtgcagataatggtgttggtatggcttctgcacttgctgtattagctgacgatactgttaaacatggccccttagaagtattgttaaccatgacagaagaaactggaatggatggtgcttttggactacagcctggttggttacaagcagatattctgattaatacagactcagaagaagaaggcgaaatctatatgggttgtgccggtggtattgatgttaaaaccacggtagacctcacttatgaagctattcctgcaaaccatatcgtcaaaaaactggtactaaaaggcctaaatggcggccactctggtggtgatattcatttaggtttaggtaatgcaaacaaattattagcgcgtttccttgctgaacatgcggatgaattagcactaaaattaattgatttccatggtggtacactgcgtaatgctatccctcgtgaagcgcatattatttttgctattcctgcggataaagcgactcaattaaatagcattaccacagaatttgaagcgctattaaaaagtgaattagccattgctgaaaaaaatctagctatcgaattaacagatactagcaccgaaaaaccagtatttactgctgattgtcaatctcgcactatcaatttacttaatgccatgccaaatggtgttatccgcatgagtgatgatgtggaaggtgtggttgaaacctcattaaacgtcggtgtagtgagtattgttgacgataaagtagaaatcctatgtttaattcgctctctgattgatagcggtaaaacttatgttgttagcatgctgacagcattagccaaacttgctcaagcagatatcgaaaccaaaggtggttatcctggctggaaacctgatgcggattcaccggttatgcacttagtacgcgacacttatcaacaactatttgataaagtgccaaatattatggtgatccatgcaggtcttgagtgcggtctattcaaaaaaccttatccagatatggatatggtttctattgggccaaccattcgcggtgcacattcaccggacgagcgagtacacattaagagtgtaggccaatactggcaattactgactgccattttaaaagcgatcccagctaaataa

SEQ ID NO: 297082 - DNA, 462 bp, Proteus mirabilis
atgagcgaaaaatatgttgtaacgtgggatatgttgcaaatacatgcccgtcaattggcacaacgtttgttaccagtcgaacaatggacaggcattattgccgtcagtcgtggtggattagttcctgccgcattacttgctcgtgaattgggtatccgccatgtggatactgtctgtatttctagctatgatcatgaccatcaacgtgacctcaaaatcttaaaaaaagcagaaggtgatggtgaaggttttatcgttgttgacgatttagttgatacaggtggcaccgcaaaagttatccgtgaaatgtatccgaaagcacattttgtcactatctttgctaagccagaagggcgtccgttagttgatgattttgtggttgatattccacaaaatacctggattgaacaaccttgggatatgggcgttatgtttgttccccctgtttgtgataaaaaataa

SEQ ID NO: 297083 - DNA, 1251 bp, Proteus mirabilis
atggcaaataatacaaatctttctgaaacgttatttaaacctcgtgctaaacatgcggaaacctcaacgttaatacagtacacacaccctaaatctaatattgattcgtactctgtacttaatgggatgagccagcaaaattggtatcgcacaattcaacgtctacagtggatctggcgaggtatttcccccatagagatcgaagaagtattaagtcgcattgctatttttgatgcgccacgcagtgatgataaatttattgatacagtcgttggctatcgacgtggcaactggtcatttgaatggtctcatcaagcaatgatttggcaacaaaaagcgttacgagagacctcagaggaagcagccgctgattgttggttacgggcggcaaacctttatagtattgctgcttatccatttattaatggcgattttcttgctgatcaagcggtagtattggcgatgaaagcttttgaaaatgccatgaaattctcttcatttgaagtaaaaaaactgacgtttaaattaacaggtaaaggaactaccagtggatttttacatctacctaaagagtgtaaagggccttatccaacagtcattttttgtggtgggttagatagtctacaaagtgattatgttaacttttttaggcgctacttatcaccaaaaggtatcgcgatgttaaccgtagatatgccatctatcggttattctgttaagcagaaactcagcgaaaatacctgtcaattgcatggtgatattttacagcagttgggagatattccatggattgatcacactcgagtgggcgtaatgggatttcggtttggtgccaatattgcggtgcgtttagcctatctttatccaaaattgattaaaggtgttgtggcattagggccattaattcatgccttttttactcaagcggaattacagaagaaaatccccattatgtatcttgatgtactggcgagccgcttaggattattaaatatagatgaaaacaatctcagactatcgttaagtagttattcactgaaaaaccaagggttgattggtcgtcgtatgccagtgccgatgatgagtgtttattggaaaggggatgaaattagtcctaaagaggattcgcagctcattgctcgctcttctatggatggcgatatagtagaaataaaagaaaaaccactttataaagggcttgaacaggcattaaccaaaagcgcagattggatctatgctaaattaatataa

SEQ ID NO: 297084 - DNA, 1104 bp, Proteus mirabilis
atgagtagcagccaaacgctggttgttaaattagggacaagtgtactgactggtggttcacgacgtctggatcagtctcatattgtagagctggttcgccaatgtgcaaaacaacacgaaaaagggcaccggataattattgtcacgtcgggagcaatagcggcagggcgtgaatatttaaactaccccgatttgcccgcaacaatagcatctaaacaactgttagccgctgtggggcaaagtgctttaattcaggtatggaagcagctatttgctatttatggtattcatattgggcaaatgttattaactcgcgcggatatagaagatagagaacgttttttgaatgcgcgtgatacactgcatgcattattagataacaagattattcctgttatcaatgaaaacgatgccgttgctactgcagaaataaaagtaggggataacgacaatctttcggcattagctgccattttaggtggcgctgataaactcctgttacttactgatatcgaaggtctatatacggccgatcctcgtagcaatccggatgcgaagcttattccagaagtttttgatatcaacgatgaattacgtcaaatggccggtgatagtgtctctggtttaggtactggaggtatggcaactaagttacaagcggccactgttgcagggcgtgctggtattgacgttgttattgccgccggtgttaagcctgatgttatcagtaaagttattgataatgaacctgtcggaacactctttcatggtttaaaaagcccccttgaaacgcgtaaacgatggatttttggtgctccagtcgcaggggttatcattgttgataatggggctgaaaaggcgattaaagagcaaggtagttctcttttacctaaaggtattaaagaaattaaaggtgacttttctcgagggtgtgttatccgcattcaaagtttgcaaggaaaagatcttgctcatggtgtcgcgcattataatagtgatgcgctacgcttaattgcggggcaccattcgcaagagattagtcaaattttaggctatgagtatggcagtgttgcggttcaccgtgatgatatgattgtgagctag

SEQ ID NO: 297085 - DNA, 513 bp, Proteus mirabilis
atggaaagtacaatttaccttataggacctagaggtgcaggaaaaacaacagtaggtaaagcgctttctctatctttagattatcgatttattgatacagataattggataacagataaatatcaacaaactatttcttctatggttgaagcggaaggttgggatgtctttcgccaacttgaatctgatgcgcttattcaagttagccaacctaaccaagttatttcaacggggggagggatagtgttggcagaaaaaaatcgtgtttatatgaaaaattcaggtgtaattgtttatttacaagcttcacttgaaactttagttgagcgtttatctcaagatcctaatgaggcacaaagacctagcttgacgggaaaaacattagtttcagaaatacatgatgttttaattaagcgtgagcctttatatatgcaatgcgcagatattattgttgatgctggattatctattaatgatattattgaggtcattctcgcaaaactcgctaaataa

SEQ ID NO: 297086 - DNA, 2160 bp, Proteus mirabilis
atgatgttgatagcgttttttaaaacactatttaaattcttatttcgagtaagaattgaaggactaattaatcagttttcacaatatgaaaaatgcattattacgccaaatcatacatcgtttattgatggtatattattgcgtttatttttaccgattaaccctgtctttgctgtttacacctcagtggctaatgccaaacataccaaatggctcagtcgttatgcggatattgttcctttagatcccgctaatccaatggcggttcgccaattagttaaagaagtcgataaaggccgtcctgttgttattttccctgaagggagaattacggtaactattggtttgatgaagatttatgaaggtgctgcgtttattgctgctaaatcaggggcaaaagttatccctgttagaatagaaggtgctgaatttagctacttttctcgagtgcgtaaaacgttaaatataaaagcaaagctctttcctaaaatcacaataaaagtgctacctgcggttgatttacctatgcctacagcggaaaaatcagcagagcgccgtcgcttatcgggagaaaagctccgtgatattatgatggatgctattatgcaagcacgtcctaatatcacgctctatgaggcatttttacaaggaatgtctcagtttggtcgtttcagtcctcttatttcagatattaatatgaaagaggatagttatcagggcctattgaaaaaaatattaggtgttagtcgtattattgaacgctataccgaacctaatgaacgaattggccttttacttcctaatactaccgttacggttgcggctttatttggggcgacaatgcgtcaaagggttgtggcgatgcttaactatactgcgggtagcttaggtgtacaaaatgccatgaaagcggcatccattaaaacgatttttacctcacgccaatttttagagaaaggaaatttattacatattccagaacagactccggatgcaaactgggtttatcttgaagatctcaaagatagcattactagagaagataaacgctggattgcacagcacttactcactcctcataaagcgatgttagcgcaaaaatcgacggatgcagcagttatcttatttacttctggatctgaaggcactccgaaaggtgtcgttcatagccactccagtttattggcgaatgtagagcaaattcgcgctattgctgacttttcacccagagataaatttatggctgcattaccgttattccatgcttttggtttaacggtaagtgtattagcacctatctgcttaggggcacgagtattcctctacccaagcccactacattatcgtgtagtacctgaattagtgtatgaccaaaattgtacagtattgtttggtacttcaactttcttaggcaattatggcaaatttgctcatccttatgattttgctcgactaagatatgtggttgcaggggcggaaaaactgtccgaatcgacacgagtattatggcaggataaatttggtattcgtattttagaaggttatggggtcactgaatgcgctcctgttgtctccattaatgtaccaatgagtgctaagccatataccgtggggcgtttattaccaggcatggaagggcgtttaattcccataagcggcattacggatggtggaagattacaactgcgtggccctaatatcatgcttggctatttgcgcgttgagtccccttataaattagaacagcctacagcaataaatgccgaaggcatcgaagaagcgggttggtatgatacgggagatatcgttgctattgatagcgaaggtttttgcactattaaagggcgtgtaaaacgttttgcaaaaatagcaggagaaatggtttctcttgaaagtgtagagcaattagcggctaaagcctcggaaggcaaccatgctgtggtggcggtaaatgatccacgtcgaggtgagtcattagtgctttttaccaccgataagcaacttgatcgcagtatgttatcggcattagctaaatccactggtgtggcagaaattgcggtaccaaaagatattcgttttctcaaagaaattcctgttttaggaagtggcaaaacggattttgtctcgttaaagcaactcgctgaacaggaaaataattaa

SEQ ID NO: 297087 - DNA, 1095 bp, Proteus mirabilis
atgatcatgcaaaaagacgcactcaataatgtcaacatcagcgaagagctggtgttaattacgccggaagagttaaaacaaaaatacccgttgagtcgtaatgatctgcatgccattactcaatcacgtcaaactatttctgaaattgttcaacgtcgtgatccgcgtttattagtggtatgtggcccttgttctattcatgatgtcgatgttgcgttagattacgcaaaacgtctaaaagtcttagcgtctgagttaagtgatagtctgtatattgtgatgcgtgtctattttgaaaaacctcgtacaacagttggttggaaaggtttaattagtgatccgtttatggatggcagttttgagatggaaaaaggcttacatattgcccgtaaactattaacagagttggttcagttaggtttacctttagctacggaagccttagatcctaacaatcctcaatacttaggtgatttatttagttggtcagctattggggcaagaacgaccgaatctcagacccatcgtgaaatggcatcaggtttatcaatgcctgtcggttttaaaaatggtacagatggtaatttagatacggctattaatgcgatgaaagcggcttctatgccacatcgttttatgggcattaatcaatcaggacaagtctgtttattacaaacacaaggcaatcctgatggacatgttattttgcgtgggggtaagaaacctaattaccatgaagaagatgtcgcgttatgtgaagctcatatgataaaagcgggattaacaccatcattgatgattgattgtagtcatggtaattcaaataaagattttcgtcgtcaatctgtcgtggttgattcagtgattgagcaaattaaaaaaggtaatcaatcaataacaggaattatgttagaaagccatattaatgaaggcaatcagtcatcagagcagcctcgtagtgagatgaagtacggtgtttctgttactgatgcatgtattagctgggaaaccactgaatcggtgttaagaaatctgcatcagcaaatttcgccagttttagcacagcgtgcagcgcaactaagaaaagttagctaa

SEQ ID NO: 297088 - DNA, 1125 bp, Proteus mirabilis
atggctgaagaattacaaaatttgcgagagcaaattgatcaggtggataaaacattgctttctttactcgccaaaagaatgcaattggtagcagaagtgggagaagttaaaaatcgccacgggttacctatctatgcaccagatagagaagccgcaatgcttgcttctcgacgtaatgaagcagaaaaaatgggtatttctgctgatttaattgaagatgttttacgtcgagtaatgagagagtcatatagcaaagaaaatgataaaggctttaaaacacttaatccccaattaggcaaaattgtcattgtgggggggaacggaaaaatggggagacttttttctcgtctctttacactttctggctatcaagtggaaagtcttgaagcggatgagtggcaaagtaaatctccggctatttttgcggatgctggtatggtgataatcagtgtcccaatccatttaacggttgatgttattgagcaattaccgcccttgccagaaaattgtttattggtagatttagcctcaatcaagcaagcgcctttagaggcgatgttaaaagcacataatggccctgttttaggactacatccaatgtttggtccagatgtgccaagtttagcaaaacaagtaatcgcttattgtgaagggcgagatttatcacattttgagtggttgcttgagcaacttatggtgtggggagcaagagtagaggctattactgcacaagagcacgataaaaatatgagttttatccaagcattgcgacattttactacttttgcatatgggcaacatttggtgaaagagaatgtcgatttagccagtttattaagattatcttctcccatctatcgtttagagctagcgatgattggtaggctctttgctcaagatccacaattatatgccgatattattttatcttcacaagaaaacattaacttgatccgtagatatcatcattcattaggtgaagctatagccttattagatataaacacaaaagatgaatttattggctcatttaataatgtaagtgattggttcggtgattatgcttcacaatttatgaaagagagtggtgcgttattacaaaaagccaatgatagccggatttag

SEQ ID NO: 297089 - DNA, 435 bp, Proteus mirabilis
  misc_feature (295)..(304): n is a, c, g, or t
ttgaaatatatttttgaaatcctattgaaatatactgatagaagaataaataaaagggaaaaaattttttcatcttttatttataagattttttttccacgttcatataaaaaatcattgaataaattaaaacaagaaaaaatatcaattgatagggcgaagaattatattgatttttcaatagaatatttaaaaaatacatatgaaaagaaaggtaagatagtgccaggaaaaaaattaagggtgattaatgaagaaactattttagcaatgaatattaaattgattgaggatnnnnnnnnnnctattttagcaatgaatatgaaattgattgaggatatatcattctctcatgatatgcttagttatattttaaatgacgataaaaatataaaaaaaatattaacatctatttatatgccaattaaagcttga

SEQ ID NO: 297090 - DNA, 1308 bp, Proteus mirabilis
atggctggcttattgaccctcaatgagaaacgtgaaaaacagcatcaagtagaacagcgtaatcaacaggcattaaaacaattctctgcgctatatcaacagcgtaaaggggaagataatttaaatgcacgtaatcactggctacaagtggaaaaagtgggttttccagcttatcgacacgaagattggcattatacgccattagatgagacgctcagtcagcaatatcaaatgttgccaccttttgaggtacaagatttaattgagcaacgggcgctctcatttgattgctaccgtatcgtgatggttaatggtgcattttcaccggctgaaagtagtcaagattttggtccataccaagtgacattactggataaccaaagtgaattaccgcaagccattaatggtgaagtgttcttgcatttagttgaaagtttagcgcaacagccgctattcattaccttgaaaaaaggcgtagtggcagataaaccgctttatatccttaatattacacaaggtcatgcagggcaagaagttaacagtgctaactatcgtttccatcttgatgttggcgctaatgctcagatgcaagtgattgaacactatattagcagtgatggtgaaaaccgccattttactggggcgagattaaccgccactattggtgataatgcctcgttcaaccatattaaacttggttttgaaaatgacattagccaacattttgcccataacgatttaagcattggacgagatgctcgtgttaatagttacgcattcttgttggggaataaactgagtcgtcaccatactagcgctgcactgacgggtgagaacagtgagctatcaatgaatagtgtggtattacccaaagcgaacgaaattgccgatactcgtacttggctcgtgcatggtgagaaaaattgcctaagccgtcaattacataaaagtattgcaatggatgcagggaaagccgtatttaatggcatgatcacagtcacccctcaagcgctgaaaacagatggtcaaatgaccaataacaactcgttattaggtgataaagcacaaattgatactaagccacaacttgagatctatgctgatgatgtgaaatgtagtcatggtgcaacggttgggcgtattgatgatgagcaactattttatctacgttcacgaggtattgcgttaagtgaagctcgcaaaatgatcattcatgcatttgctgccgaattaacggaatcattagaaaatagtgtgatcaaaactcatgttctagagagaataaatcaacgcttatcagaggtataa

SEQ ID NO: 297091 - DNA, 2376 bp, Proteus mirabilis
atgtccagcaatagcctcaccccgtgcaatgtactttggtataaccaattgggtatgaatgacgttgatcgtgttggtgggaaaaatgcttccctcggtgaaatgatcactaatcttgcggaactgggtgtgtctgttcctaatggatttgccaccacagcgcaagcgtttaatgattttctggaacaaagtggtattaatcagcgtatttatgagctactcgatagtattgatgttgatgatgttaatcaattagcacaagcgggtaaccaaattcgccaatgggtgattgatacaccttttacccctcagtttgagaaagatattcgtgatgcttatcagaccttaagtgaaggtgaatctgaagcctcatttgcagtacgatcatcagcaaccgctgaagatatgcctgatgcttcttttgccggccaacaagagacatttttaaacgttcaaggtatcgatgcaattttagttgcgattaaacacgtgtttgcttcactgtttaatgatcgcgcaatttcttatcgtgttcaccaaggctatgatcaccgcggtgttgctttatctgcaggtgtccaacgtatggttcgctctgatttagcttcatcaggggtgatgtttactattgatactgaatcaggctttgatcaagtagtctttattacctctgcttatggtttaggggaaatggtggttcagggggcagttaacccagatgaattctatgttcataaaccaactttggcgaaaggtttaccggcaattgtgcgccgtaacctaggttctaaaaagatccaaatggtttatgccgatagcattgagcatggtaaacaagtccgtattgaagatacgccagaagcattgcgcaatcgtttctctttaactgatgatgaagtgcaagagctagcaaaacaagcggtattgattgaacaacattatggacgtccaatggatatcgagtgggctaaagatggtcataatggtcgtctatatattgttcaagcgcgtccagaaacagttcgttctaaccaacaagttatggaacgctatcagttaaatgaaacaggcactgtgattgtagaaggtcgtgcaattggtcatcgtattggtagtggtacggttaaggttatccataacttaagtgagatggatagaatagaggcgggtgatgtgttggtcaccgatatgacagatcctgattgggagcctatcatgaaaaaagcctctgcgattgtgactaatcgtggtggaagaacctgtcatgcggcaattattgctcgtgaattaggtattccagcagtggtaggttgtggcgatgcgacggagtgtattagcgaagggcaagtggtcaccgtctcttgtgctgaaggggataccggatttgtttatgatgggaaactcgatttttctattcaaagctccgcaatcgataacatgccagaacttggcttaaaaatcatgatgaacgtcggtaatcctgatcgcgcctttgactttgctgggttaccaaatgatggggtaggccttgcgcgtttagagtttattatcaaccgtatgattggtgtgcatcctcgcgctttactcgaatacgaagatcaaacagatgcactaaaagctgaaattgatgaaatgatggcgggttatgcatcacctgttgaatattatattggtaaattaaccgaaggtatcgcaacactcgctgcagcattctggccaaaacgtgtcattgttcgcttgtctgattttaaatcaaatgagtatgcaaacttagtcggtggcgatcgctatgagcctgatgaagaaaaccctatgttaggtttccgtggtgcgggtcgttacgtatcggatgatttccgtcgttgttttgcactcgagtgtgaagcagtgaaacgtgtgcgtaatgagatgggattaactaacgtggaagtgatgatcccatttgtacgtacggtgcgccaagcagaagaagtgatagatgagttagcacgtaatggtttaaaacgtggtgagaatggcttaaaagtgattatgatgtgtgaaattccatccaatgctttattagccgatcaattcttggctcattttgatggtttctctatcggctctaatgatatgactcagttaacattgggcttagatcgtgattctggtgtcgtctcatcactgtttgatgaacgtaatgatgcggtaaaagcgctattatctatggcaattcaatcagcgaaacgtcaaggtaaatatgtcgggatctgcggacagggcccttctgaccatgaagattttgcacaatggttaatggaagagggtattgatagcttatctttaaacccagataccgttattaaaacctgggtgaaattagcacaacaataa

SEQ ID NO: 297092 - DNA, 2043 bp, Proteus mirabilis
atgtctcaatcatcgcgatgcataaaggtgagtgttttagttgttgcaacagcgattagcagtgcattcgctgaaaataaaaatcaaatctatggagaaaaaaatagcggggagagaaacacacaaataataacggtttatgcaacaggtaacgagcgagatagctttacattaccaatgatgtcgaccgtcataaaaaataacagtgctttgacagaaacggctggaagtgccacggagttgttgcgtcatataccgggcatttcaatatcaggagctggccgcacaaacggtgaaactattagtatgcgtggctacagtagtaacggtgttttgacactagtagatggcatacgccaaggtactgatacaggtcatattgacagtatttttgtcgatcctctactcattaaacaagttgaagtggttcgtggcccttcagcacttttatatggaagcggcgccctcggtggggttgtggcatatgataccgttgatgccagcgacttgcttgcaaaaaatgaacatggtggtgtgcgtgttacagcccttggtaatacggcacaacagagtcaaggatttggcattaccgcttttggtcaacaagacaatttcgatggattactcgccctctccgctcgtgataaaggtacaactcgctatggaggcggttatcgtgcgcaaaacgatgaaacaatcattaacttattatctaaaggacgttggtttattgatgatagcaatacgttaagtggccaattacgctattatcataacaacgcacaacagcctaaggatccacaactcgccaataacccaacaccggctaatgtagcgacaaatcgtactacaacacaaaaagatgcacagttaacctatcaatatcatcctagtgatatgtcatggattaacctaaaaacacaagcctattacagcgaggtagatattaatgcgaaaacacaacaaaaaggatttgaaggtagagagcaaaaaacctatggcattaaaattgaaaatcgcactcaattagccacctacccctttgctgctcacgctttaacttatggcggtgagatctataagcaaaagcaatcacccagtgcaaatgccgaaagcttccctaaagcagatattcgttttatgtcaggctggttacaagatgaaatgactttacgtgatgtacccatttcattcatcgtcggtacaaggtttgataaatatagcagtcaaaatgatcgttatgatgacatcagcgctgataaatggtcatcaaaaggagctgttagtattacacccacagattggttaatgctttatacctcttatgctcaagcttttagagcaccaacaattggcgagatgtataacgatgctaaacattttgatgccccattccccggagcaccaaccaattactggcgccctaaccctaatttaaagcccgaaaccaattcaacaactgaatacgggttcggttttcaattcgacgacttattatctaataatgataatctgaaaattaaagctgcccatttcaatacgcgtgcaaaagattatattgatacagatgtcgctatttttcagggatatacacaatcgacgaatattccaagagcaactatttggggttgggatatcgagatgaattatcaatcgaagttctttagttgggatttggcttataaccatacaaaaggaaaagataatgccagtaatgcctctattacctctattgagccagatacattaaccagtcgcctcgatattcccgtacccaatagtgatttttccgtaggttgggtgggacaatttactaaaaaaacagattttacaaaacatgatcgctttaatcgcccgaccaatcgccaacaagcgggttatggtgtcaatgatttctacctccgttatgaaggtagtgcttcattaacagggctaacaacctcactggtactgggtaatgcatttgataaaaaatactactcttctgcgggtattcctcaagaggggcgcaatgcaaaagtactggtgagttatcaatggtaa

SEQ ID NO: 297093 - DNA, 795 bp, Proteus mirabilis
atgatggaaaatcaacacactccattattatatggcaataacttgagctataaaatcggcaataaaactattcttgaggatgtttctattgcacttaataccggtgagcttgtcacaatcattggtccgaatggtgctgggaaatcatcattattacgtttattgaccggctatactcccccgacacaaggagaatgtttttttaaagggaaaacttactcacagtggaatagtcaattattagcgcaaaaccgtgctgttatgcgacaaaacagccagctatcattctctttttctgtagaagaagtcgtcgctatgggaagagcgccacatgggcaaaaacataaacaaatcgcaatagaaaccgcgctattacaaaccaattgtttaaagcttaaaacaagagattaccgtcaattatcaggtggagagcaacaaagagtgcaacttgctagagtgcttgctcaactttggcaaccgacacctgagaatgttgcgctatttcttgatgaacccacatcggcacttgacctctaccaccagcaacaaagtttgcgtttattaaagcaactggtcaaaacgcaaaatttgatggtgtgttgtgttctgcacgatctcaacctcgcctccctttatgctgatcgtattttattactgcatcagggaaaattagtttgcgaaggtacacctcaagatgtactcaccgctgagaatattgaaaaatggtatggcgccgaggtcagtgttaatactcatcctgagttatctcaacctcaagtttttttacgcccataa

SEQ ID NO: 297094 - DNA, 846 bp, Proteus mirabilis
gtgagtaatcaagacagcacacaacaaaagaatatttatcgtcctgcaccgcctcgtttggtgcaagtaaaacgtatagtagatatcacgccgggcatgcgctctattacctttactagcgatgacttggacaattatccaagtcacacaggtggtgcccatttaaaaatatttttacctgtagaaggccaaactaaaccaacaattccaacactcactgacaaaggccctagttggcccgaaaaccaaccaagagcgatagtacgaacttacagtgtgcgagctattcgtcctgaattaaaagagcttgatattgaatttgcggttcatgaagatgcagggccggccattaattttgctttaaatgccaaggtaggtgattatattggcattactaatcctggagggcctgatcccctattggctcccgcctctcattactatatggcagccgatcccagctcattacccgctttaatggcattaattgaaacaatgtcacccgatgtacagggtaaagcggtgatccgcatagaaaatgaatcagatcgccaaatcattgatgctcctcaggggctagaaattgtttggctagtcggctctgttgaaacacaaactcaacctctgattgatgaatttatctcttggtcgttaccaaaggaagatgtggcattttggatcgccggagaagataaaattatccgtgcactaagacgttatattcgtcgtgataaaggctatgagcgcggacagatttatgctatcccttattggcgttttggctttaatgaagaaggttatcatgcagagcgtcatcatgttatggataatgaagatgtaagctaa

SEQ ID NO: 297095 - DNA, 384 bp, Proteus mirabilis
atgaattggtacttagaggttattaaaaataattatgctaatttttcaggtcgtgcgcgccgaaaagaatattggatgtttatagtggtaaataccattattttagctgtgttatatgggatcatgttctcttctatcgacagttatactggtgaaatgagtggcacaggctttgctgctttgattattatcggtatctactctttagcaactattattcctaatattgccgtgacagtgcgccgttttcatgaccaagatagatctggttggatggttttattatcatttattcctttcgttggcggactgatcctgtttatttttatgtgtttagatggtactagaggtgaaaatagatttggtcttgatcctaaagcctaa

SEQ ID NO: 297096 - DNA, 399 bp, Proteus mirabilis
atgcaaaacgaaacagatcctgaaaatcttactttactcgatgaatctacctcaacaagccttgttccttatcgtggaattagattagcgaataacccaataaataaattaatgaggaaaattaaacagaaactcgccacgctaaatgaaattaatattgtcacattagtcagttggattgcaacagtcactgcctgtggtatgtatgtctcttatattccacaaataatggacaatcttaatggcattaaaactagcccattccagccttttgttgcagccataaactgtttattatggacttattatggcgtgaaaagtaaagaatatcccgttgcgattgctaatgctcccggtattctattcggtactattgcttgccttactgcaattatttaa

SEQ ID NO: 297097 - DNA, 2850 bp, Proteus mirabilis
atgtggcattctagtcatatcaatgaacctcagaacaatgatgaacagattatggtccagatagcagaaaacccctttatccttgtagatggctcttcatacctttatcgtgcctatcatgcttttcctccgctaactaatagcaaaggtgaacccacaggggcgatgtatggtgtgttaaacatgctacgcagcctaataattcagtataagcctagtcatgtggcggttgtgtttgatgctaaaggcaaaacattccgtgatgagttgtatgaggaatataaatctaatcgcccaccaatgccagatgatctgcgtgagcagattgagcctttgcatgaaatggttcaagcgatgggcttaccgttactttctattactggcgtcgaagctgatgatgtgattggcacattggcattaaaagcagccagtgatggtcgtaatgtgttaatcagtaccggtgataaagatatggcacagctagttacgcccaatatcacacttatcaacacgatgacgaatgttattttaggccccgatgaagttaaagaaaaatatggggtgccaccggagttgattatcgactttctcgccctgatgggtgactcatcagataatattcccggtgttccaggggtaggtgaaaaaacagcattagggctattgcaaggacttggtagcttagaggatatttatcaacagcttgataaaatagccacattgagtttccgaggtgcgaaaacacttggcgctaaaatggttgaacatgagaaagttgccaaactttcttatcaattagcgacaattaaaacagatgtagcgcttgataaaacctttgatgacttagtggttaatgaacctaatttagataagttacttgaaatgtttacgcgttatgaatttaaacgctggataagtgacttacaaaatggtggttggttagctcaacgcagtagccgtaaagcgccagtcccctatagtgcagaagtcgcaacaccaaaagaacagccatccgcagacaatttcccggttatctctcaagagaactatgagtctatattgactcatgaaagcttaatgcgctgggttgaggtactgaaaaaagcgcccgcttttgcgtttgatactgaaacagatagcttgaataatattgatgcacgtttaatcggtctgtcatttgcggtagagcctggcaaggccgcttatattccattgcgtcatgattatctagatgcaccagagcaattacctgttgatgaggtactaactgctttaaaaccgattttagaagataaaaccatcttaaaaattgggcaaaacctgaaattcgaccgcggcattatggaaaatgaaggcatcgaattaaacggtatttattttgataccatgttggagtcttatgtcttaaatagtgtgagtagccgccatgatatggataccttagcggaaaagcatttaaatcataaaacgacgacatttgaagagattgctggtaaaggtaaggggcaacttacttttaatcagattgaggttgaacaagcgaccttatatgcagcggaagatgctgatattaccttgttactgcatcaagcgctttatcctcaaatagaggcgattgcaccgctaaaacacgtttatcatgatattgagatgccattagtccctgtgctttcacgcatggagcgtaagggcgtattgattgacgcacaagtgcttgccatgcaatcccaagaaatcactcaacgtttagctgagattgaaaaagagacattcgcgttagcagggcaagaatttaatctctcttcacctaagcaattacaagagattttatttgaaaaactcaatcttcctattatcaagaaaacaccaaaaggtgctccttcaacaaatgaagaagtgttagaagcgttagcgcatagtcatgagttacctcgtttaattttagaacatcgtggattggcaaaattaaaatcgacttatacggataaattgccgttgatggtcaatagtaaaactaagcgggtgcatacttcatatcatcaggcggtgactgcgacaggacgtttatcttctcgtgatcctaatctgcaaaatattccagtaagaaatgaagaggggcgtcgtattcgccaagcgtttattgcccgtgatggttttaaaatagttgctgccgactattctcaaatcgaattacgtattatggcgcatttatcgcaagataaaggtttgcttgatgcttttgctcaagggaaagatattcaccgagctactgcatctgaagtgtttggtatacctttagacgaagtcacctctgaacaacgtcgtagtgcgaaagcgatcaactttggtcttatttatggtatgagcgcatttggtttatcacagcagattggtgttgaacgaaaagaagcacagcgatatatggatctctattttgaacgttatccaggggtattagattatatggagcgtacccgtaaacaagcgtcacagcaaggctatgtggaaacgttagatggacgccgtttatatctgccagagattaattctaaaaatgcgatccgacgtaaagcatcagagcgtgaagcgattaacgcacctatgcagggaacagcagccgatatcattaaaaaagcaatgattgcggtggataattggatctgtcatgaatgccctgatgatgtacatatgattatgcaggtacacgatgaattagtgtttgaggtacgagagtcatatttagaaaaagcaaatgcgatgatccataagctcatggaaagtagcatggagcttgctattccactgaaagtcgaagtcggagtcggtaataactgggatgaagcccattaa

SEQ ID NO: 297098 - DNA, 1335 bp, Proteus mirabilis
atgaagacaaaagtgattttgttctctatattgctattggcgggttgccagcaatctaagagcataaaacccgatttgtctgcgataacacccacatctttagggacttcaacttcttaccaaccacaatatgatataaaaaccaatttgtggggttatgtagtaagtgaattaaaaatggatatccctgacaatgaaaggatttcgcagcaagaaacttattttttaaataatccaaaacatatacaaaccgttgcattacgtgcagagccttatatgtattggattattgaggaaatagaaaaacgtaatctaccgatggagcttgcactggttccggtggtggaaagtgcgtttaatcctcatgtcacctcttcagctaaagcggcgggcttatggcaatttgtccctgtcacagctaattattatggtctagcacaaaatcaatggtatgacggtcgccgtgatgttgtcgcttctactaatgcagccttagatttgcttgagcgcctttacattatgtttgatagcgactggcctttagcattagccgcttacaatgcgggcgaaggtcgtgttatgcaagcgataaaagctaatgagagcaaaaacctacctaccgattactggtcactttcattacccaaagagaccatgaattatgtgcctaaaattctcgccttaagtaaagttatccgtgacaatgaagccgatatcactttcccgaaaagtaactatcgcgataaatcattagccgcaattgatattggcgaacagataacattaagcaaagtcgctgaacttagccaattacctattacaaccgtaaaagactataacccaggctataagcgcgggatcaccgcaccaaatggccctcatgttattttacttcctcgtaataaacttgcgcagttccaaaatgcgtttgctgacgaagcgattttaaagaccatccgtttagcggtcgctaaagccaatcagtcgattaaacaagaaggcatttataaagtccgctccggtgattcattttatgccattgctcgacgttataatatgagcgtaaaagagctacaacgactcaatggattaagtgcaaaaagtaccttattagttgggcaaacattaaaaattcataatgcaggtagtgtgaacaatcgtccgacaggcaaaccaaccggcgcttcaccaagttactataaagttcgtcaaggtgactcttattacagtattgctcgtcgtcacaatattaatcttaagcaattaatgagctggaatgctgatatcaagatgttaaaaccgggaacgcaattaacgctttacttaaaaaaatag

SEQ ID NO: 297099 - DNA, 2112 bp, Proteus mirabilis; identical to SEQ ID NO: 294874

SEQ ID NO: 297100 - DNA, 519 bp, Proteus mirabilis
atgtctgatgaaaaacaggctaacccactttttcgggatgcaatggcaagcttaggtgctgccgttaatattgtcgcaactaatggtgatgcaggatgctgtggtttaacagcaacagctgtatgttcagttaccgatactccaccgacagtgatgatttgcatcaatagtaaaagccaaatgaatagtacgtttcaagaaaatggcaaattaagtatcaatattttaaatcatgaacaagaagagatggcttgccattttgccggtatgacaggtctggcaatggctgatcgctttacccaaccaggatggcaatatggcgcattacagcaaccgatattaaccaatgcactcgctagcctagaaggtgatatttacgatgtacgccaagtaggtactcactttgtttatatggcagagataaaaaatattgcggttcgagaagatggcgatggcttaatttattttaagcgtcgcttccatcccgttaaacataaattagtcacaaccaccgcttaa

SEQ ID NO: 297101 - DNA, 276 bp, Proteus mirabilis
gtgctttggataaaatggaagcaattcggcggcccatgtactatcaataatgggttggcattgtgtgcattacaccactctgcctttgatatgggtgcaatcagtattgatgataatatgaaattattagtttctagcggtgtgaatggtaatcaaatggtagagcaattattttggcaattttcaaataaggtaattggcctacctaaaaacacaaaagaacatccgaaggatacatttatccattggcatcgtgagcaagtgtttaagctatag

SEQ ID NO: 297102 - DNA, 480 bp, Proteus mirabilis
atggctaaccttatttatcttactatggaaggaaacaaacaaggtcttatctcaagaggatgttcttcattaagttctattggaaataagagtcaaataggaaaagaagataaaatttttattttggaatttaaaagttccattactagacatcaaaatatcaatcatttaccaatagactttataaaacttatagataaatcatcccctttaattcttagtgctatatcaaataatgaagtactaaagctgatatttgatttttatcggacttcacaggatgggaaacaagaaaaatattattcaatccttattcaaggggctcaaatagttgacttttcaacacgctacccacatagcttaactcacaacatgagccaacctgaagaactaatctcagttaattattcagatattacatgcacccatcacatggccggcacatctggttatagtattaaagagaataacgttttttaa

SEQ ID NO: 297103 - DNA, 201 bp, Proteus mirabilis
atgaagaataaaataattagtggttttaaaaaatcgattgcatttttgtataaacaatttagtgatcttatccatatagctattacagcagtactatgttatctatgttttcttttttcacccactctgccaatagcaataataggatgtattgttattataatagttatgttcttacttagtatgtttgtttttccttaa

SEQ ID NO: 297104 - DNA, 612 bp, Proteus mirabilis
atgtttttacatcgggaagatttgggatatcaatatgatgagatccatgatgcagtatatgaaaaatatggtaaaaaaactaaagaagaagatgagcgaattttaagtttaatttggaaaattgttaagagtcctgatgttattatagatgccgttgaaataattattaatgatttgatggattcatctcctgaagaaagaaaggagaaaataaaaaattatgctgaaactacaaggaatataactgaaccattaatacaaaaacaaatggttaagaagttgttagtatatgcgattgcctatataatagctcaaaagataatcaaagacatcacgaaacatgccttagtgaaaagatttattacttggcaactgtcggctttaacaacatatggtctttttgaacaaatggttaaagcatctgatagattgaaaattaaatatccaagattatatttaaaattaaaacctgataatttagatcttacttatttttttattgagcctcatatgggttcactaattgaaacttactattatggtgatagttcagtatttacagatgaattaattcttaagcatttagatggattacttagtaatgaagaataa

SEQ ID NO: 297105 - DNA, 180 bp, Proteus mirabilis
atgaaacagcgccaatgccaagttgttgtcacattacgtaccctaaccggtcgtaagcgctctcttttttccaaaaagctattttttaaaacccctctcattgaggggttttttttggtctgtagaaaaacacatatcgcaccatttatcgtatcatcaaaggagaactctaatgactaa

SEQ ID NO: 297106 - DNA, 387 bp, Proteus mirabilis
atgtcttacgaaattaataccgaaaaagcccctgcagcaatcggcccttatgtacaaggtgttgatttaggtaatttagtgatcacatcaggccaattacctgttgatcctgctacgggtgagtttgtgtctgacaatgcggcagagcaagcacgtcaatctttagaaaacgtcaaagcaattattgaaaaagcaggtctaaccgttgctaatatcattaaaacgactgttttcgtaaaagatttaaatgatttcggtactattaatgcagcttatgaagctttctttaaagagcataatgcagcattcccagcacgctcttgtgttgaagttgctcgtttaccgaaagatgccaaagtagaaatcgaagttatcgcgatccgctaa

SEQ ID NO: 297107 - DNA, 282 bp, Proteus mirabilis
atggctgatactcaatggtcaatctatattgtcagaaatcgtcttggctctctttataccggaataacaacggatgttgagcgacgatttaatcagcataaaaatggaactggcgcgaaagcactaagagggaaaggcccattatcattggagtttcattgccaagttggcgataggcaacaagcgtctcaacttgaatatcgtttaaaacagttaaaaaaaatacaaaaagaaaagctgatcattgatcagccttcagacgttgcacagtatttagcataa

SEQ ID NO: 297108 - DNA, 534 bp, Proteus mirabilis
gtgtttaataaaattcgcacccgcctagttaaagatggccctcgtttcttgcgttaccctttgcaaatcacgccatttgctttgcaacgtgatattttagaacagtttttaagttggcaattccgcgaagcattagctgagggggatttacacttcttagaagataaatggctaaaggtagaaattaaagatttacatttgcagtggtttatcagtgtttgtgatgataaattaatcgtaagccgttctgaaaaagaagatgtaagttttagtggtaatgctaacgatcttattttaattgccgcgcgtaaagaagatccggacaccttgttttttcaacgacgcttacaaattgagggcgatacagaacttgggttatatgttaagaacctaatggatgcaattgagttagactctatgccatctgtattgcgttttggtttactacaattggctgattttgtgaaaagtggccttcaagatgaagttgaagacaccgcacacagccatgaactgagctcaacttcatgctaa

SEQ ID NO: 297109 - DNA, 996 bp, Proteus mirabilis
atggaattgttgtgcccagcaggtaacttacccgcattaaaagccgctgttgataatggtgcagatgccgtttatatcggcttaaaagatgacaccaatgctcgccattttgctggcttaaacttcacagaaaagaaattgcaagaagccgtcaattacgtacatcgccaccagcgaaaactgcatattgccattaatacttttgctcatcctgatggatttgaacgctggcaaaaagccattgatatggcggctcatttaggtgccgatgcattaattttggccgatattgctatgctagagtacgcagctgaacgctatccacagatagagcgtcatgtatcggtacaggcgtcggccactaatactcaggcaatcgcattttatcaacgcaattttgatgttgcacgtattgtactaccacgcgttctttctattcatcaagtcaaacaattggctcaaagtagtcctgttcctttagaagtctttgcctttggtagtttgtgcatcatggctgaaggacgctgttatctttcctcttatctaactggtgaatcgcctaatactgtcggagcctgttccccagctcgttttgtccgttggcagcaaacaccacaaggtatggaatctcgcctcaatgatgtcttaatagaccgttatgctcctgatgaaaatgcagggtatcctactttatgtaaaggacgttattttgttgataaacactgctatcacgccttagaagagccaaccagcttaaatacgctagcgctactacctgaacttatggctatgaatattgcctctgtcaaaattgaaggtcgccaacgtagccccgcgtatgttactgaagttgcaagagtatggcgtgcagctattgaccaatgtaaaaaagatcctcaaggttttaaaacccaaccgcgttggatgagtgcattaggaaaaatatctgaaggaacacaaacaacattaggtgcttaccaccggaaatggcaataa

SEQ ID NO: 297110 - DNA, 879 bp, Proteus mirabilis
atgaaatacgcattaggctctgtactttattattggcaaaaagaaacacttgagacattttatcagcaagcaaaacagagcgatgctgatattatctacttaggcgaaacagtctgtagcaagcgccgtgagactaaaccacaagattggattaatctggccaaagaagtggctaaaagtggtaaacaagtgatcctttctaccttagcactactacaagcgccttctgaactaaaagagatagcaaagctggtggataacggtgaatttttagttgaggctcatgattttggtgtgatcaatatgctttatgagcgtcatttaccttttgtagcaggccatggattaaactgctataacgcttatgcactacgtttattacagaaacaaggcatgatacgttggtgtatgccagttgaactatctcgtgagtggttaaataatcttttaattcaatgtgaagaattagcgattagagataaatttgaagtagaagtattcgcttatggtcatcttcctttggcttattcagcgcgttgttttactgctcgctcggaaaatcgtgctaaagatgattgtgaaacctgctgtcaaaaatacccacaaggccgtcaggtattatcacaagaaaaccaacaagtgtttgttttaaatggtattcaaacgcaaagtggctactgttacaatttaggtaatgatttaacttcaatggcaggtttagtcgatatcgtccgtctttcaccgcagtctgatgaagtttttactaccttaaaacaatttcgccaaaatgaacaaggcgcacaccctattaacaccatccatcatcatgattgtaatggttattggcgtaaactggctggtttagaattagttgaataa

SEQ ID NO: 297111 - DNA, 933 bp, Proteus mirabilis
atgataagctataaaaaaacaatgcgttttttattgtatttaagctgcggtttattttcaaactcagtactatcatttacttgtaaagtcgcttcaacgggacaaattgtcggtgatggtgctgctaatatacgcgttaatttaacgcctcgagttgaagtaaaccagaatttggtagtggatttatctcaacaaattctttgtaaaaatgattcttatggtggacctagagatccaatagacgttgaccatgttaatttagttagtggaacgacttttggaggcgcgctgaataattttgacggctctttattatggtataacagttattatcctattcctctttattacgatacaaaagttattaatattaaagacagaaattttatcccactaaatcttagattgtatttgaaaagtattggtgctgcgggagggaagcaaataaataagggggatttaattgcaaaaatagaaatgtacaaaattgcagattgggatggtgggcaccctcgtttttttacatggaatatttacgcattaaatgatgttattatgcctactgggggctgtgatctttctagtagaaatgtcacgattaatcttcctgaatatccgggtaatgcgcaacctattcctttatctattttttgtcctagacaacaaaatatttcttactatttaacaggatcaacgtctgatgtgaataatacggtctttaccaatatatcatctaactctcctgctaaaggggttggaattaaaatatcaaataataatggtgttattcctgctaatacaccggtcaaattaggcaatgtgacgaataatagtgtgagtttaaggctatctgcttcgtatggtgaaacgggagaaagagtaagagcgggtaatgtaaaatccgttatcggtgtgacctttgtttatgagtag

SEQ ID NO: 297112 - DNA, 543 bp, Proteus mirabilis
atgactaataatattaagggtattttgacaacactatggttatttttcttatcattatcatctaatgttgcatattctgccgatagcattattcaaataacaggttatatgagagataacacctgtgcagttgcaccagaatcacaataccaaactattgatttattaaataatgaagttaagcggttatataaagtgggagaaacaacaccctttattccttttcatataatactggaaccttgtggagaatcagtgattgctgtgaaattctattttaatggtatttcagatagaaataatccttcattattagcgttagatccgatagcaacatctgcttctggtgttggaatacaaatattagatagtgaaaggtcacccattcctattaatccaagtagtgaccaacttaaatggatccccttagttgcaggaaaaagtaacaccgtttttttctatagtcgattaatggcatccgatatgcctgtcttagctggaaaaattaaagccagtgccacttttacactcgagtaccaatag

SEQ ID NO: 297113 - DNA, 1083 bp, Proteus mirabilis
ttgaagttagtggattgccacaaagttactacgatactcaatattactcaaaaaataggtgatcaatctacgttatatattattggtactaatcagcgttattggaattctaaaaaacaagataatcaattacagataggccttaatactattattaaaggtattaatttaggcctaaattatagcttatctaaaacatcatggaatgatagtaaagatcagatgttagcatttaatactagtattccttttagtaactttatgcgttctgataatgattctatatggcaaaatgcgagtttaagtactaactcctcgcataacatgaagaaacgttttaacaatactatcggattaaacggtacattattggaagataaaaacttaagttacaatattcaaacaggttattctcatgaagaagaatcggactcaacaggatatgcctcattaagttataacggttcttatatgaatagcaatataggttataactataccgatacatcacatcaaataaattatggtatgagtggcagtattttagctcactcaggtggtataacacttagtcagcctatatatcaaacagcggtgttagtaaaagtacctgaagttaaaaatataaaattagaaaacaatagtggcattacgacagacagtaatggttatgcggttttaccttatgtttctgaatataaagaaaaccgtattgcattggataccaattcattctctaacaatattgaaatagataatgcggtgaaaagcgtagttcctactcgtggagccattagtgcgatcacatttgagcctagcgttgggataaaagcaattacgacattaacccataaagggaaaccagtacctttcggggctatcgttgattcaggtaataatactgggattgtggcagatgaaggaaaagtttatttaacagggttatcaccttcaggacaattaaaagtgaattggggtagtaagaaagagcaacaatgcttagtaaattacacattaccaccacaagatccagataaactttatgttgaatatagtgcagagtgccaccctattaaggaataa

SEQ ID NO: 297114 - DNA, 1026 bp, Proteus mirabilis
gtggctggatttattacctatattttaaatgggagtaaaactcgcaacgatggtagcccagatactcattttactcatctcaatttacaaagtgggatcaatcttgggccatggcgtcttcgtgataactctatttattcttatgattctattaataaatcaagttggaaacatctgaatacttatatagaacgtggtattaataaattatattctcgtcttattattggtgatagctacacacaaagtgaagttttcgacagcatcaactttagaggctttcaactgtcatctgatgaagttatgttaccggatagccaaagaggttttgctccgattattcgaggtgttgcccggactaatgccgaggttactatacagcaaaatggttatgtgatttaccgtaactcttttccaccgggtccttttgttattgatgatctctattcaacaagtaacagtggcgatttagaggtaaccattaccgagtctgatggttcaacacaaacctttactgtgccatattcatcagtccctttattacaaagggaagggcataccaaatattcagtgactgtaggtagttaccgttcgggtaatgatgagcaggagcggccttattttttacaaggatcagtgatccacggcttacctgcgggttggaccatttatggaggaacccagttatccaaaaattaccaagcggcaagtattggggtaggtaaaaatattgggcgttttggggctttatcatttgatattaccgaagcgagatcaatactacccgatgactctacacaccgtgggcaatcgatacgtattctttataataaatctatcaatgaattaggcacaagggtgcaacttgccggttataaatatgcgacgagtggtttttatactttagcagagactacttataaaaaaatgagaggaaattatatacaaacggaggatggtgttgttgaagttagtggattgccacaaagttactacgatactcaatattactcaaaaaataggtga

SEQ ID NO: 297115 - DNA, 1560 bp, Proteus mirabilis
atgactgtttcccgtagaacttttatcaaaggtcttgccgccagtggggctgcaatctctgtttctacacctgctcttgctacttcaggtgactttacagcaagcaaacgcactcgaccagaaaatgcacctaacttattaattgtttttcctgatgaaatgcgagcccatgctctacagtttatgggggaagatccatcgattacaccaaatcttaataaatttgccaaacaagccaaagtaatgacacaaatggcatcaaattaccctctatgctccccttttcgaggcatgtttatgacgggtcagtaccctgtgcgtaatggtatcacaggtaatgcccatgattacggtggaaaagtaggtattgacttgtctccttacgcaaaatgctggtctgacgtacttaaatccttagattatagcactgggtatattggcaaatggcaccttgatgctccctatgagccttttattgaaagttacaataatccaatagaaggtcgttattggaatgaatgggctgctccagataggcgtcatggttttgatttttggtattcttatggtacttatgacttacacttgaaaccgatgtattgggcaaacgatacacctcgtgataaaccgatttatatcgatcaatgggggcctgaacatgaagccgatatggcaatcaagttcctcaaaaatgaaaataatcaatttagagataattcaaaaccgtttgcattagtggtttcaatgaacccacctcactctccttatgatcaagtaccgaaaaaatacctcgatgcttatcaaggtaaaacatcaaaagagttaaatacacgccctaatgtacagtgggacagtgaatatcaagaaggttatgggcctcaatatttcaaagaatatatggcaatggtcaacggtgttgatgagcaatttggtcgcattgtcgatgaattagaaaaacagggccttgcagataatactctcgtcgttttcttctctgatcatggcagttgcttaggatcaaatggacaagcaacaaaaaataatccgtatgaagaatcgatgcgtgtccctatgatgtttcgcttaccgggtaaaatcaaaccaggttttgatgatgcattaatgtcagcacctgatatttacccaactattttagggttacttggtttatcagaatggatccctgattcagtagaaggcacagatcttgcagatagagtcatcacaggcaaaggcgacacagcaaactctcagctttatctttttattccttatggtgaaccttcattcggtaaacgaggtgtaagaacaaaaactcatactttggtgatagataggcaagatgggcaaccattaaaatatactttatatgacaatgtgaacgatccatatcaaatgaaaaatattgccaaagataatatgcctttaattgataaattaattaaagaagaattaaccccttggttagaaaaaacaggagattcttggagagcgactgagtttattacagcgacaacgaataaattaaataaaaaaatatcaatatgtgaagaaaaataa

SEQ ID NO: 297116 - DNA, 1476 bp, Proteus mirabilis
atggttattgaaattgcatctaaaccacggcctaaactgccttatgagcaccctgatgtaaaaatttatcaacgcttatttaaagaaaacataatccggcgattagtcagaaaatcggcttatcaccgtcatgataatgctattgctgatttttttaaggatgagacacactctcttttttcgctctgtgaaagacttactcagtatattacagaagcttttcatcactatcaggtttggggttattcccatgcctattaccccggtagtcctggtcaacaaaccgtcagaaccgatgcgctagaaggggtcagtcgagtacttcctttacttgccgcatggacagtaaatagcaaaaaaagcacattactaggtttaaaccagcaaatttaccatttaccctcaatgataaaacaaagctttattcatggaacagatcctcttcataaaggctattggggaaaacttgaaaattacgatcaacgaatttgtgaggcatctgatctcgctcttactctttggatcagccgtgaatgggtttgggatacgttatcttcggagatcaaacagcaaataattaactggtttgaacaagttaatcactgcgaaattgttgataataactggcattttttcccactaaccgtccaatttgttattaaagcactgacaggtaaagataccattgcccattggcgttatgaaagattaaaagaattttatgtcggtgatggatggtttcgtgatggggcaaaaggtaattatgattactacaatgcgtggggattttattattctctttattggctagcgcaaattgatccacaatttgatcatgattttattactcaatccctgaataattttaatcaacactacctttattttatcaccccaaaaggtattcctttttttggtcgtagtgcttgttatcgtcttgctgtttctgcgccattactcgcaggcgttgatttacaatgcccttttgtcaaagttggagaggctaaacgggcttttgaaagcagcttacgttattttatttctcaaggtgcactcaaaaatggcgctcccactcaagggctatttaatcatgatgctcgtttagttgataattacagtggtccagcaagctctttttggtcattacgggctgtcattatcgctctttattgtgctgatcgtattaatttatggcaagcaccatcacttcctttacctatcgaaaaaaatgactttcgtttcgaaatacccgctatccaagcatcaattatcggggtgaaagcaacacaagaagtcagtgttatttttcgagaggattatacacaacaacaatcacctttaactcgccgtttagaaaaacaaacgcgagtacaaaaaatcacagaaactgtaattggacaatcaagacgccctaaaaacaacctattacgcaaaggagtcaccagttacagttctaaaatgacacatttcttctga

SEQ ID NO: 297117 - DNA, 972 bp, Proteus mirabilis
gtgaaaataaatagaactgtcgccattattggcgaatgtatgatagagctaagtggccaaccttttttgccacaacaacagcgttttgggggcgatacattaaatacagcactgtatttagcgcgcctcattcctacattacatccgcaatatataacaggtttaggcactgataattacagtgccttaatgcaaaaagcatgggaaaaagaggggatcaactgccagtcagtgatcaccattcccgaaaaacttcccggtttatatgccattgaaattgatacttgtggtgagcgtagcttccattattggcgtagtgatgccgctgcacgttatattgcaacggacaaccgttttgcaacacatctagataccttgcccgacgatagtgttatctatcttagtggtatttcactggccattttaacgccgaaaggaaaagaagcgttaatcacgcaattaatccgccttaaacagcgagggctcaccttaattgtcgattcaaactttcggcctcgtttatgggatctaatacctcatgcgcaagagtggttcgaaaaactatatcgactcagtgatatcgctttagtcaccggagatgatgaacaagctctctggcaacaacccagccttactgagcaaaaaattgtcgaacgccttcatcaatggggcaataaaaacgtcattgttaaactaggagcaaaaggggctttctggtctgatggtgaaaataccggttatatctgccccaaaccgatacagcatgtcatagacactacggcagccggggattcttttaatgctggttttattgctgcatggctacaaaactaccctttgcctacatgttgtttatggggaaatacattagcaggattagttatccaacatcatggcgccattattccccataacatcactgattcattctattcactcatcaaggataaccatgagacagtcaattgttga

SEQ ID NO: 297118 - DNA, 888 bp, Proteus mirabilis
atgcaaaatcaagtcgcacaatcaatgaaaaacagtatcaaggtatacttggtaaactcatttactcgtgatcattgcggtggcaaccctgccggagtcgttctcaatcctcccaagctaacgacagaacaaaaaatcgccattgctcaacaagttggattttctgaaacggcatttgtctattcgggtgatgacactgattttaaagtagatttttttactgctgaaggagaagttgatttttgtgggcatgcaacattagcggtttttttcactctgtcatcgcttaagttactcaaacctggcgattatagccaaaaaaccaaggcaggaattttaaccgttaccattaatcacgataatattgtgatggaacaaacgcttcctattacccgtaaggggccttgtgttaacgatgtcgcaaaggcgctgggcattctacctgaagtgatagaaaagacagatttaccaatagagattgtctcaacaggattaaacgatatttttgttcccgtacaatttggctatttagatgccttacagcctgactatcaagctatcgctgctttaagccataaatttgatactatcggctttcatgtctttgaacttagtcatgatcaaaatattactgcccactgccgaaactttgcaccacgctatggcattaacgaagaatcagccacaggtagctcgagcggtgctttagggtgttatcttgttcatcaccttttgccaaacaaaaggcaatttttgttcgaacaaggtagagcaatgcaatgctcttctttaattgacgtatttattgattcgacagcaaaaaacgtcactcgcgttcaagttggtggaaaagcgacattgattggtacaaaaataattgagatctaa

SEQ ID NO: 297119 - DNA, 1509 bp, Proteus mirabilis
atgatcgattttaaactgaagttaaattatcaacgcaaatataacagcagtgatatcgatattgatgatgaaatgcagatctcgcgccaatttgaaagcgatcgcgggcgtattattaattcagcggcgatccgtcggttacaacaaaaaacacaggtatttccattagagcaaaattcggcggtacgaagtcgattaacccattcgctggaagtacaacaaataggccgttatatcgctaagcaaataatcggcgaactaaaaaagcataataaattagaagaatatggcttaaatgaacggattgatagcgttgaaagtttaattgaaatggcgtgtttaatgcacgatattggcaatcctccttttggtcattttggtgaagctgcaattaaacattggtttcgtaaggtgttagcacctgatgcttccatagaatttgataattgtccttttttacctattcgctattcagcagaccgacatttaaatgaattaaaacagactttgcgtcaagacttatgccatttcgaaggcaatgctcaggcaattcgcatggcgcatcacttgttaaaactcaatttaacctatgcgcaaattggctgtgttttaaaatatacacgtccagcttattggcaaggtgctacgccgaaagaatttagctatttaatgaaaaaaccaggttattactggtctgaggctgaatttgttaaggaagtacaagagaaacttgcaatgaaagatttttgtcgtttccctctgacttatattatggaagcggcagatgatatttcttattgtattgctgatttagatgatgcggtagaaaaaggtatttttgatatcaatcgtttagtgcagttattaaaaaatgcatggagtgaaagtggtgcggtaacagaaggtgatctgtttgatatcactgttaatcgagcttttaagaaagttgatcaaaatgaagctaagcgtagcatgcaagatcaattttttatgtatttgcgcgtctatattaccggaaaattagtaccttacaccgcctatcgctttatcaagaacttacctcaagtttatgaaggcagctttaaccatgctttactggaaggaaagagtgctgaacatcgtttattggcaacgttaaaacgagtggcgcaaaagtgggtatttagtcaccccgaagttgaagagcttgaaatgaagggctatcgagtgatcagtgggttattggatatttataagccattgcttttattatcgaccgatgattttctaagactacataaatataatgaacatcctcattatgttattgagacgcgtttatatcataagctttcgattaaacataagcttgcttataatgaagcattagaaaaaatttacgatattaatagtgaagagggaaaaaccttagagttttattatcgtacaagattgatacaagattatatcagtggtatgaccgaccattatgcatatgaagaatatagaaaattaatggtatgtgattaa

SEQ ID NO: 297120 - DNA, 708 bp, Proteus mirabilis
atgagagttggcgtaataggtgcaatggaacaagaagtcaaacttctgcgtgaacaaattgaaaactgcgaaatagtctctcgtggtggttgtgaaatttatactggcaaaatcaatggtgtagatgttgcattactaaaatcaggcattggtaaagtggcagccgccatcggtaccacactattacttgaacattttcgccctgatgttgtgatcaacaccggctctgcaggtgggttagatgcaaaattaaatgttggcgatattgtcgtatcaacagaagtacgttatcacgatgccgacgttactgctttcggttatgaaccaggacaaatggcacaatgcccgccggcatttattgccgatcccaaactggtcaatattgctcaagagtgtattggatcactaaaattaaatgccgtgcgtggattaatctgcagtggcgatgcttttattaatggtgccgagccattagcgcgtattcgtcgtactttccctgaagtcgtcgctgttgagatggaatcaaccgctattggacatgtttgccatcaatttgatacaccttttgttattgttcgcgccatttcagatgtggcagacaaagaatcgcatttaagttttgatgagtttttatctgttgccgcacaacaatcaagcttaatggtcactactatgcttgataaattaaaaacagagactcagttttaa

SEQ ID NO: 297121 - DNA, 189 bp, Proteus mirabilis
atgttacaacgagaagcaatagaagccgttatgatggagttagcccaccagcaagggcaatcactcaatgggcgtgatcggttagcgattagaacaggtgtagcacagacaatacaggctaaagaacgtcacagacgaagaatgacagcacctacctaccaatggacgaagccagcaccaaaaagataa

SEQ ID NO: 297122 - DNA, 144 bp, Proteus mirabilis
atgagtaaatctaatctcattgcctttcgtctccctgctgaactacaaaccctgtttaatgatgctgtatcgaactctggtagcgataaaacagcgtggatagtcttccactatcaaagagaagttaaaccgtccagacagtaa

SEQ ID NO: 297123 - DNA, 249 bp, Proteus mirabilis
gtggaacgcctagaatcgtctgtcgcatctttaattgctggtaaggcagatatcccaccgtatacctataatgagtcggctgttgtttctgtggttaattctgtgctgtctgagggtgtaaccaatgggcgcattattgctgaacggattaatgaggcaggctatcaaactaaggcaggtaaagcgtgggataaagatatttattcagcgtggaagcgctacaaaaatattgcaggaaaactaagataa

SEQ ID NO: 297124 - DNA, 681 bp, Proteus mirabilis
atgaaaaaagaaggtataatggataagttattaaatatttccatgtgggttatgtttttctgtgcaggtatagccttgtttttctattcctcagatatggttgctataacgttttttgtcttaggttgttgggttcgaatattctcagaaagacaagtactggtttattttataaaaactaaacttattatttggtcttggggtgttattttttctgctagttacttttttgcaggaaaatatctaaattttcgttttcaaatagaacctgattatttaaatacttcaccatggatagcgtcgattctttttagtatcttatttgcatttgtattactggaaatcctcgtgattatcgctttgtgtttatccttatttatgggcaagaaggaaatgacatttaagtgggataaggtggtaaaaaagaaaagtataaaaagtatcgccttgactctatcttgtactttttttggcattttaccattactaattggaataacaggagaagaaaacaaaatattaatggtgagtttaagaatggactcttacgcggtgtctgattgtggaaaaattcaacctaatgtttcgtatttaagaaaaaatgaaaattattgctataagttcgaaccttggtttgatcttagttaccctaaaataattgagagtaagaaaggcaattaa

SEQ ID NO: 297125 - DNA, 141 bp, Proteus mirabilis
atgggattcggtattggtatttatgccctcattgttctaagagaagggctgagctttaccttggaagtgaggacttggcctgcagagaatgttggaagcttcattatgccagccagagcgaaagcagcattgaccgattaa

SEQ ID NO: 297126 - DNA, 873 bp, Proteus mirabilis
atgtcagcaagaattatagatgggaaaacgattgcgcagaccatcagaagtgaagtggcagaaaaagtaaaacaacgtattaagataggaaaacgtgcaccgggtttagcggttattttagtcggtgataaccctgcatcgcaaatctatgttgctagtaaacgtaaagcttgtgatgaggtaggatttatctctcgctcttatgatctaccggatactacaagtgaagcagaattactcaatctcattgatactctaaatgaagataatactattgatggtattttagtgcagctccctttacctgcgggaattgataacgtcaaagtattagaacgtattcatcctgataaagatgttgatggcttccatccttacaatattggtcggttgtgccaacgtgcacctaagctacgtccttgcacccctcgtggtattgtcacactcttagagcgttgcaatattccaatgaatggcttaaatgcggtaattattggtgcttcaaatattgttggtcgcccaatgagtttagagctactgcttgcaggctgtacaacgactgtcactcatcgttttactaaagacttacgttttcatgttgaacatgctgatttggtggttgtggcagttggtaaacctaactttattcctggtgaatggataaaacctggcgctattgtcattgatgtcggtattaatcgccttgaaaacggtaaagtagttggtgatgttgatttcgcacaagcctctcaacgcgcggggtggatctcccctgttccgggtggtgtaggtccaatgactgtagcgactttgattcaaaatacgttgcaagcctgcgaagaatatcacgatcctgatataggaaataattaa

SEQ ID NO: 297127 - DNA, 981 bp, Proteus mirabilis
atgcaacaacttgttgatgcgttttcccgcaaatttttctatttacgtctatcaatcacagacgtgtgtaatttccgttgcacttactgcttacctaatggctacaagccaaatggtcataagtcctttctatcactggatgaaatccgccgactgactcactcttttgctgaattaggcacagaaaaaatccgtttaacgggtggtgagcctacgatgcgtcgagattttactgatattatcgcgactattaatgaaaacccagccattaaaaagattgctgtgacaacaaacggctatcgtttagcccgtgatgttgcacaatggcgtgatgcggggctaagtgcgataaatgtcagtgttgatagcttagatccccgccaatttcatgccattaccgggcaagataaattccatcaagtgatggaaggaatagacgctgcttttacggcaggttatgacaaagtgaaagtcaatgttgtgctaatgcgcaacgtaaatgataaaaacttgcctgattttctccattggatcaaagacagaccgatacaactacgctttattgaactaatggaaactggtgatggtagtgatgtttttaatcgctttcatttatctggtgaagtgatccgccaacgtttacttaacgaaggttggctacaaattcctcgcgcccgtagtgatgggccagctcaagtctttactcatcctgattatcaaggtgaaattggtcttatcatgccttatgaaaaagacttttgtgtcacctgtaaccgtttacgcgtttctgcgattggtaatcttcatctttgcttatttggcgaaaatggtattcctttacgcgatttattggctgatgatgcgcaacaacaagctctacaacagcgtattcagggtggacttcttcataaaagagaaacacattttcttcatcagggcgatagtggtattacccctaatctttctgtgattggtggataa

SEQ ID NO: 297128 - DNA, 444 bp, Proteus mirabilis
atggtaacccttattgatattaataaagataattgggaaatatgtgcagaattatccgttagcgacgttcaagcgcaatttattgcctctaatctttattcaattgcagaagtccaatttttaccatcgtttaagttgaaaggtatatcctataacaatgagctggctgggatggtgatgtacggtatagatcctgacgatggaaattattggatttatcgatttatgattgacgttttttttcaaggcaaaggcattggcaaacaagcaatggcattggtaattgatgatattaaggcgaataatcatcaacacatcccgttattaatcgtcggatatcaccaagacaataaacttgctcattatttttaccagcgttcaggctttaacttccaacgtgttgccgattggggagaaaatatagcgcagctacaattggtgtaa

SEQ ID NO: 297129 - DNA, 2109 bp, Proteus mirabilis
atgtccctttctcaatctgtaaaaatgcaaatcagccaatggtataaagcattacctgagcatattgaaggctttattccacgagcgcctcagcgcgaaatgattgctgaagttgcgaagacattttctgatgaaacggggcgacatctaattattgaagcgcctaccggagtaggtaaaacactctcttatcttattcctggtattgctatcagtcgggaagagaaaaaaccactgattatcagtacggcgaatgtggcgctacaagatcaaatttacagcaaagatctgcctttactaaaaaaaattattccagacctgacttttactggggcttttgggcgaggtcgttatttatgtccccgtaatttagaggcaatttgtgcaacagaaggcgagcaaattgatttaatgttcttgctggaagataaagttgatgtcgcaaccagtgcggaaagggagatttgccaagagttaaagcacgattttaccagctttggttgggatggtttgcgtgatcaccataaacgagcattaacggatagtttatggcgcaagattagcacagataaaatgaattgcttaggtcgtaattgccaatactatcatcgctgtcctttttttctggcccgtcgagaaatagacgaagttgatgtggttatcaccaatcatgctcttgtgatggctgcgatggaaagtgaatcggtgttacctgatgcaaaaaatattttattagtattggatgaagggcatcatattcctgatgttgctagagatgcgcttgaagttgaaggggaaataaccttatcggcattaaatatgcaacttgataatatgactcgtcatgtcagccaatatttagcacaatttatcccagtcaaaccacccaaattagccgatcccattcgttttgatgctcatattgcaaaaatgcgcgaagcctatcaagacgttgaacattttacccgcgcgttattgcctgagcgcagtgaaaatgatgaatatttatttccattaggtcaattacctgaacaattactattatgttgccaagacttatttaagctaaccgatggtttaaaaatgttaggtgagtcgattcttaacgacttaactgagcgaacagcaaaagaagatgttgtacgtttacatcgcgcgattttaaccaccagcagaatggttggttatctggaaaatatggcaaaactatggcgacttgcgacattagagcagacatcaaaagcacccgtttcgaaatggcttactcgtcgttatgataaaaagcagtcacatctctatttacattgtgctggtattcgcgttagtgaacagttaacacaattattatggaaaaatattcctcatgtggtgatcacttctgccacactacgttcattaaacagtttttcgcgtattcaagagcttacaggactaagtgaacactttgatgatcgttttattaccttgtcatcgccttttacacatgaaaggcaagggaaactcgttatccctaaaatgcgttatgaaccgacaatggcgaatgaaaaagcgcatttaaaagagatggcacgctattttcgtcaaggaatggtagaaaaccaccatcgagggcaattagtattatttagtagtcaacgggcgatggaaggttttttagaggaagttaaagatctacgtttgagtcttttagtccaaggagatcaaccgcgctatcgtttagtggagacacattgtaagcgtattgatgcgggcgataatagtgtgttaattgggttacaatcttttgctgaaggattagatttaaaaggtgactatttaacgcaagtacatattcataaaattgcttttccacctgttactgatccggttattgtgacggaaggggaatggctaaaatcactgaaacgttatccttttgaagtgcaaagcttaccaagtgcatcatttaatttgatccagcaagttgggcgtcttattcgtagccatcattgccatggtgaagttgttatttatgatagacgtttattaacgaaaaactacggttcacggctattaaccgcgctacctgtctttcctatttatcagccagatatacctaaaacagaataa

SEQ ID NO: 297130 - DNA, 891 bp, Proteus mirabilis
atgttgtcagccagacactcagctaaattacaggtgttctaccctgtgcttcttttgcttctttctatgctatcaatacaaagtggcgcatcattggcaaaaagcctgtttcctgttattggcgcccccgcagtcacagcattacgcctttttttaggtactctgatcctgttttttatttttaaaccatggcgtctaagcttttctcgtagtgccataatgccactatttttatatggtttatcattaggggcaatgaactacttattctacttggctcttgaaactattccattaggtattgcagtagcacttgagtttacgggaccgcttgcggtagcgatgttttcttcacgcagagcaatcgattttttatggataatcttagtgattgctggattagggttattactgccgattggggataatattcacggactcgatcccctaggcattttatatgcattaggtgcgggtgtcggttgggcactgtatattgttttcggacaacgtgcaggaaaaggctatggcgcagcgacagtttctattggctcacttatcgccgcctttatctttttccctattggtatgctacaaagtagccctgagctagtttttagttggtctatattacctattggattagctattgcgattttatctaccgcttttccttatactttggaaatgattgcacttacccgtttaccggcaaaaacctttgggacattgatgagtttagagccttgtatgggggcttttattggtattattttcttacatgaacatttaacgttaatacaatgggttgcgttggcatttattgtgttagcgtcaattggttccactgcaaccatgaaaagaaaaaccaaaattgaaaaagtagaataa

SEQ ID NO: 297131 - DNA, 1422 bp, Proteus mirabilis
atgcaaaaaggaaatatatgggttgtcgatgatgatagctctattcgctgggtacttgagcgagccattacacgagaaggccttacatgtaaaaccttcgaacacgctaatgacgtcctcagtgcactcaatagtgaacttcccgatgtattattatcagatattcgtatgcctgatattgatggtttatctctattaaaaagcgttaaagagcaacaccctacgttgccggttattatcatgacagcgcattctgatcttgatgccgcggtaaatgcttatcagcaaggggcatttgattatctccccaagccttttgatattgatgatacacttgcactcattcatcgtgctattacgcactatcgagagcaaaaacaacctaatacaacagaaactaaccttcaatctgtctctgacatgattggcgaagcccctgcgatgcaagaggtttatcgcattattggtcgcctttctcgctcatcaattagtgtgcttatcaatggcgagtcgggtactggtaaagaattagttgcacatgctcttcatcgccatagtccgagagcacaagccccttttattgcactcaatatggcggctattcccaaagacttaattgaatcagaactttttggtcatgaaaaaggggcatttactggtgcatctcaagtacgccaaggtcgttttgaacaagcaaatggcggttccctctttcttgatgaaattggcgatatgccactggatattcaaacccgcttattacgcgtcttggctgaaggacaattttatcgtgttggcggttatgcccctgtaaaagtcgatgtacgtattattgccgcgactcatcaagacttagaaaaacgcgtaatggaaggtgattttcgtgaagatctctaccatcgactcaatgtaatacgtattcaattgcccccactgcgtgatagaacagaagatattccaagcttagcgcgttattttctccaaaaaaccgctcgagaacttggtgttgaaactaaagtactccaccagcaaagtttacattgcatgatggaataccactggtcaggtaacgtcagacaattagaaaacgtatgtcgttggttaacggttatgaccgctagccaagagattatgccgcaagatttacctcaagagatccgccaatcagatgagaagagcaaatcgatacctcgtatctcctctcaacattggtcacaacatctttcattatgggcggatgaggtattcagtgaaggcaaagaaaatattcttaatgatgctctaccacaatttgagcgcaccttactactcagtgcgctttcctatacaaaaggccataaacaagatgctgcacgtttattaggatggggaagaaatacgctgacacgtaaattaaaagagttaggtatagaggagttttaa

SEQ ID NO: 297132 - DNA, 1818 bp, Proteus mirabilis
gtgatcgaaaacttgcgtaatatcgccatcatcgcccacgttgaccatggtaaaactactattgtcgataaattactacagcaatctggcacgttcggtgaacgtgaaaccgttgctgagcgcgtgatggactctaatgatctcgaaagagagcgcggaattactattcttgcgaaaaatacagcgattaaatggaatgactatcgtattaatatcgtagataccccaggacacgccgacttcggtggtgaggtagaacgtgttatgtctatggtagacagcgttctattgctggttgacgcgatggatggcccaatgccacaaactcgctttgtgacacaaaaagcgtttgctaacaacttaaaacctatcgttgttatcaacaaagttgaccgtccaggtgcacgccctgattgggttgttgatcaggtctttgatctgtttgttaacttaggtgcgactgacgaacaactggatttcccaattatctatgcatcagcattaaatggtattgcgggaacagattataatgacatggctgatgatatgactccattatatgaagctatcgtcaaatatgtagagccgccaaaagtcgatctggaggggaccttccagatgcagatttctcagttagattataataactatctgggtgttatcggtattggccgtattaagcgcggtaaagtaaaacctaatcaacaagtgactatcatcgatagcgaaggtaatacccgcaacggtaaagtaggtaaagtattaggtcatttaggcttagagcgtatcgatgttgacgttgcagaagctggcgacatcattgcgattacaggtttaggtgaattaaatatttctgatacgatttgcgaagtaggtgctgtggaagcattacctgcattagccgttgatgagcctactgttagcatgtatttctgtgttaatacatcaccattctgtggtcgtgaaggtaagtttgttacttctcgtcagattttagatcgtctgaaaaaagagttagttcataacgtagcactgcgtgttgaagagactgaagatccagatgcattccgtgtatcaggtcgtggtgaattacacctatcagtactgattgaaaatatgcgccgtgaaggttacgaattagccgtatctcgtccgaaagttatcttccgcgagattgatggtcgtaaacaagagcctttcgaacaagtcactatcgatattgaagagcagcaccaaggtgatgtgatgcaagcgatgggtgagcgtaaaggtgaaatgcgcgacatgcaaccagaaggtaaaggacgtgtacgtttagactacattatccctagccgtggcttaattggcttccgtactgagtttatgacgatgacatcaggtactggtttactgtacgcaacattcagtcattatgacgatgtgcgcccaggtgaaatcggtcgtcgtaataatggtgtgatgatctctaatggtcagggtaaagccgttgcttacgcgctatatagcttacaagatcgtggtaagttatttgttactcatggtgcagaagtttatgaaggccaagttattggtattcatactcgctctaatgacttaacagtaaactgcttaacaggtaaaaaactgacaaatatgcgtgcttctggtacggatgaagcgacaacgctgacgccacatatcaagcaaacattagaacaagcattagagtttattgatgatgatgaattagtggaagtgactccacaatctattcgtttacgtaaacgtcatctctcagaaaacgatcgtcgtcgtgcttatcgtagcaaagactaa

SEQ ID NO: 297133 - DNA, 135 bp, Proteus mirabilis
atggtcaaaaggaaaaatcggtttagtccggcgcaaatagaactatggaaaaaggagcaagaagaccaagaacaacgagatgcctggcttactgaaagtgaagaggcgataaaacgtcatatgaaagacttataa

SEQ ID NO: 297134 - DNA, 324 bp, Proteus mirabilis
atgggtgttctaactgcaggagactatgttagtgacgtagacccaatgacatatttaacagtattaagtaaagaagaggcttatcgtcgctgggattcttatggctctattggtaaatataaaaataagcttttcaaaccgttaatttttcctgatcccgctatttatctaaataatgcaagacgttacttcgtttcattaccatgctatttggatcgcgtaaaaccgatagaagatattagaaataatagtattttaattcatgtaaaagatacaacaggaataaacattggagctgaaagtgaatggattaaaattgaataa

SEQ ID NO: 297135 - DNA, 417 bp, Proteus mirabilis
gtgaatggattaaaattgaataaattttttatttttccaatattattgattttatctttaatgacgaccatcattttactgatgtttcctggtgacagagaatataccaagttaaatttcgtttattattacctatatacttttgatgaggtcaaaaaaatagattttatatcagatgaatatatcattatctatagacccatagatggaaattcaaatgagtccaatgatgttattttttttaatataaaacctgaaaagaacatagctcttattgataatctatctaaaaatggattcaccttgacatatgatgatttctataaagaagagcgatgggttaaagataatatacatataaaaatatctattgatgaaaaatcaagaaccacatcactttttgttgagaaatcttaa

SEQ ID NO: 297136 - DNA, 309 bp, Proteus mirabilis
atgaagactattaatgaaattgctaatttaatagcggaacaacgtaaaaaattaggtattgagcaaaaagatatgtatctacgtatcggtatgaaacagcaacaataccaacgtatagaatcaggaagtgatttaaaactatcaaccttattaagagtattagaaggactagatttagagttatcaattaaggctaaaaattctaatataaaccctatgattgcaagtactgtgatagcgaataaaagcgaaattgatttgaaagatgatggggatgatctcgacttttggtttaaaacagaggaataa

SEQ ID NO: 297137 - DNA, 1263 bp, Proteus mirabilis
atgaataaacaaatcgagaaagtggaaggccttaatattcagctacatggcattgatgttgcgattattgcacattatgctggtgggaataacatactgacgtttaacccccattttgtcgatatgccaaaagaagagcgaccgacttttacattaaggcagttatttgaccctaattatttaaataaacctcaaattcgcacacagaaaatctcgccagtgctatctaatttattacctgaaggtgtattaagggaatatacggcgggtgtattgaaatgtcatattgataatgaatttgctattctggcttatttaggggcaaatttaccaggtgctattttagcaacccccataaaagcgggggcgcttcctagttgggcacttgagtatcgtttatcgacagaacctctacaaatcgatgttaaacatgctgataataaattttctttagcgggagtacaggttaaattttcttcatcttttattaaaggtcgatatcatattgatgaagatacttcacaagatatgtggattataaaaacaccgtctaccattcataaaaatgttcctgttaatgaatatacttgcatgaaactagctgaaagtgttggtgctgatattcctgaaataaggcttattgaattacatcagttaaaaaatttacccgatattcaattacctaatgagccatatgcttatggtattaagcgttttgatcgtaataaagaaggacgtattcatacagaagattttgctcaagtattcgggttatttccgtcagataaatatcagaaagttaattatgagcagataggtagaattatttatgaaacaagttcggagcgtttaaaagatattcagcaaatggctagaagattgcttattaatattttattgggtaatggtgatgctcatttaaaaaactggacattaatttaccgtgatcgcatttcccctcgattatcacctttatatgatgttgtatttacagaaccctatatcaatgaagataagctagctttgaatatggctggtacaaagtactggtttgatatctcaatggcgcattttgagcgctgggctaaaaaagccgatttgccttgggttgctattaaacctcatttacttgatgtggttacgaaagcaagagaacagtggccttcattattacaacagcttccaatgcttgatgagcataaagagaaattagtattacattgggcacagttgcatgatgattttaaaatcataggaaaataa

SEQ ID NO: 297138 - DNA, 879 bp, Proteus mirabilis
atggacaccaatttatctactcgtcttaataaatatatcagtgaaagcggtatctgttcacgtcgtgaagccgaccgttatatcgagcaaggtctggttcttatcaatggtaagcgcgcaggcattggcgatcgcgtaacggctggcgatgaagtgaaagtgaatggacgattaattgaagcgcaagataattctgagctggtgttgatcgcactgaataaacctgtaggtatcgtcagtaccacagatgaaggtgagaaagataatattgttgattatgttaaccatagcacccgtgttttcccaattggtcgtttagataaagattctcagggactgatttttttgactaaccatggtgatctggtcaataaaatcttacgggcgggtaactcccatgaaaaagagtatttggtcacggttgataaacccattactgatgaatttattcgcggtatgggggcgggtgttcctattctgggacaaaaaaccaagaaatgtaaggtgaaaaaagaagccgcaatggtatttcgtatcaccttagtacaaggtctaaaccgtcaaattcgtcgtatgtgtgaatattttggttatgaagtcaccaagcttgaacgtatccgtattatgaatgttagtttggcgggattacctgtcggggaatggcgtgacttaacggatgatgagctgataaagctatttgatgctattgaagcatcaagctctgaagcccctaaacagaagcaaaataaacctaagaaacagataagtagtaatgcgaaagcgttagggatccatattccgaaaacaaaagccaaagagacggaaaataatacgcgtaaacgctttgcacaaccagggcgtaaaaagaaaaaacgttag

SEQ ID NO: 297139 - DNA, 540 bp, Proteus mirabilis
atgttgaccccaactaaaaactctgcactcgaatacttaaaaagtcatccatctactaaagaattttatatagaaactattgggcaattttttacttatctcaaagattctattctttcattgtttaatagtgatcataaatttagctatttaggaaagatgtctgttgcagatttcaacttaatgtatattagaaaagatttgcatacttttttaactaatccatttctcaataaatcggaacataaagacaaagtaggcgctcttcagtactcatttgattacttgcagaatcaagcccatattacacctaacctttacaatgtttatcgctctggaaattttgagcctaacgaattgatttcacaattaattaattacggcaataagcttatcaaaaataatttaagcaccgaagaagcacaacatggtaaatatgttatagaaacattaaaagaggtattgaataatttagaaaaattatccaatacagaaaaaatgagactcagaatattaagtatcgttaatgaacggaagtaa

SEQ ID NO: 297140 - DNA, 1215 bp, Proteus mirabilis
atgtatcatctcgatgtttatggcacgctagtcgcggccactttggttcttttactcggacgtaagttagtgaaatctgttccttttttagaacggtatacgatcccagaacccgttgcaggtgggttacttgttgcagctcttttacttgcattaaaatcatttatggactgggaaattagctttgatctctccttaaaagatccactgatgctcgctttttttgcaacaattggtttaaacgcgaaccttgccagcttaaaagcgggaggaaaagcgctgtttatttttgtgtttgtggtcgttggattacttttagttcaaaacacagtaggtattgcattagcagaaatgctaggccttgatcctcttatgggattattagccggttctattaccttatcaggtggtcatggaacgggtgccgcttgggggaaaacattcgttgaaagctacggctttatgagtgcctctgaagtggctatggcttgtgcaacctttggtttagtgttaggtggattaattggtggccctgttgcgcgttatttaattcgtaacattccaaccccaggcgcaggcagtgatgatcatgaaatgcctacagcctttgagaaacccgctacggggagaatgatcacttcaatggtgttattggaaaccattgcgatgatttctatctgtttaatggcagggactttcttatctcagttactagaaggtacggctttctcattacctacctttgtgtgtgtactgttcattggcgttattttaagtaatagtctatcaatgctcggtttttatcgtgtatttgatagagccgtttctgttttaggtaacgttagcttatcgttatttttagcgatggcgctgatgagcttaaaattatgggagctggcatcactggcaatacctatgttggttattctcggtgttcaagcggcagtaatggcattgtatgcaatttttgtcactttccgtgttatgggtaaaaattatgatgcggcaattttggcagcgggtcactgtggtttcggtttaggcgctacgccaacggctatcgctaatatgcaagctgtgacagatcgttttggtccttctcatcttgcattcttagttgttccgatggtcggtgcattctttattgatatagtgaatgcgatagtgatcaaattgtatctgatgctaccattctttacgcctatagcagggtga

SEQ ID NO: 297141 - DNA, 615 bp, Proteus mirabilis
atggaattaaatttatgctggtggaatataggaatatctccaccgacaaaatcaaaacagaacgtcaagactgaaaaagttggcttagcgaaaaaatatcttgaagaacttatcattaaaaaaacgcttgatatcattgcgttgagtgaggtttctgaaaacgaaggctacgcttttaagcagttggcaactcaattaaaaatggggtatatcgatctctcaggaaaaataggccggattattattgatatatcattaatatatcaaatgaataaactagagtttatttcaagtaagtttttaactaaactccagcctgataatagaatggtaagggtaggcgttgctgttgtatttaaagaaatcgaacatcaaaaaataatcaccctttttttatcacattggccatcaatattaagtgctaatgatacaactcgagaagtggcagctgcaggattaagaagtagtattaataaactctttgaaaataatggagatgatgttcagtttatttgtatgggggattataatacagagccttattctaatgggatgcttaatatattgtatgcgacaagagattatcatttaataaaaaagaaaactattatttaa

SEQ ID NO: 297142 - DNA, 684 bp, Proteus mirabilis
gtgacgccatataacatattgattgttgaagatgaaaaagagatcttacgattcgttcgccttgcattagagaacgaaggttttcgtgtttatgacgcctcagaatgtcaacgaggattaatagaagcagcatcaagaaaacctgatttagtcattcttgatctgggattacctgataaagatgggctttgctttattcaagatttccgtcaatggagtagcacgccgattattgtgttatccgccagagattctgaacaagataaagttgatgctttagacgctggagctgatgattatttaactaaacccttcggtatgagtgaattactagcccgggttcgtgcttcattacgtcgttttgtcaaacaagaaacagaaacgactcaatttacatttggtgatatcactattgattgggttaaaagaatagtcactcgccaaggcgtacccattcactttactccgaccgaatttcgtctactcagtgaacttgtcaacaatagtggaaaagtattaactcaacgtcatttaatgcagcatgtttgggggcctaactttgtagagcatagccattatttgcgaatttatatggggcatctacgtcagaaaatagaaaccgatcccacctgtccagtgcacttaattactgaaacggggatcggttatcgttttatgccttaa

SEQ ID NO: 297143 - DNA, 2703 bp, Proteus mirabilis
atggaacaagctccgcagtggcaacgcccttctcctgatgatttgctggcattaacgcgagcaccccatcgaggacgattaaagatcttttttggtgcctgtgccggcgtaggtaaaacctacgccatgttacaagaagctcaacgtttacatcagcaaggtattgatgtcttagctggggttgtagaaacccatcagcgccaagaaacggcacaacaacttgagggattaccgttattaccgccattaaaattacattatcgtggtagaaagctctctgcctttaatttagatgcggccttagcaagacatcctgcggtgatcttaatggatgaattggcttttagtaatccacataaatgtcgccatccaaaacgttggcaagatgttgaagagttacttgatgcgggcatcgatgttttaaccaccattaatgtacaacatattgaaagtcttaatgatattgttggtagtattactggcattcgcgttcaagagacgattcctgattatatctttgataatgctgatgaagtggttatggtcgacttaccaccagacgacctacaacagcgcttaaatgaaggcaaagtttatctggcaggacaagcagagcgtgcaatagagcatttttttcgtaaaggtaatttgattgcattacgagagcttgccctaagacggatggcagatcgcgttgattcccaagtaaaagaattccgtgatagccaaggtggtacgcctgtttggcatactactgatagtttaatggtttgtcttggtgctcatggaagaaatgataaattagtgcgtactgccgctcgttatgctgctgcttttggttgccaatggcatgctatttatgttgaaacaccaaaactacatcagataggtgagcataaacgccgtgctattttacattccctcaagttagcacaacacctaggggcaagaacggcgatcctttctgataatcaagcggaaaaagcggtgatccgctatgccagagagcataatttaggcaaggtgattatcggtcaacgcccctatcaaaagtggcaatggttaaaacgttgggtccgtatgcgtttcgcagaaaggttagcgcgttatgcacctgacttgcatgttatcagtgtcgctttaaatgaagaagagccgcgttataaaacaaaaacatttgtgccacaaaatgataaatggcgccaaaatcttaaaggctatctaacagctattggtttatgtctagctattacgctcttttcacgtacttttttgttagcgttagataaggcgaatttagttactctttatttattaggcgttgttcttatcgcgctattttttggtcgtcgcccttctatttttgccgctttaatcaatgtgataagctttgatttgttctttgtacaaccgcatttttcactggctgtattagatatgcagtatttagtgactttttccgtaatgctcattgttgggttagtggtgggtaatttaactgcgggaatgcgttatcaaacccgggttgctcgttatagagaacaacgcactcgtcatttatttgaaatgacccgagagctgagtcgggcactgactttagaagaagtggtacgtactagttatcattttttatcaagtgcttttgatgccaaagtttgtttattaatgcctaatcatcatggtgaattaacgccatacaatgctgaaggtatgggacaacttcccattgatagtggtattgcccgttggtgttgggataaagatcaaatcgcaggtgcaggaacggataccctacctagtgtcccttatcagttgcaccctattagcgcatctcaacaagtattagcgattttagcgattgagccaaataatctacgccaagtgcttattcctgaacaacagcaactcttacagacatttaatggcctaattgccaatgctcttgaacggttacagcaggcggaaatggccgaacaatctcgtattaatatagaacgagaacaattaagaaatgcgctcttagccgccctttctcatgatctaaaaacaccacttaccgtcctgtttggccagtctgaaattcttcttctagacttaagtgctgaaggctctgctcatactgaacaagtcagtcagatccgccaacaaattttgacgacctcccgcttagtcaacaatttactggatatggcacgtattcaatcaggtgggatccaagtcaacttgcagtggcatttactgcaagaaattgctggaagtgcagtacgttcactctcttatttacttgataaacacccattacaaattgatattccagctgatttattactctattgcgatagtctgttaattgagcgcgtgttaactaatttgttagaaaatgcagtcaaatataccgcatcacaaactaaattaggcataaaagctacggttgaagaggatcaaattcatgttgaagtttgggatgaaggcgcaggtattcccactgaacaattgcagcttatttttaataaattttcacgtgcagtaaaagagtccgccattccgggggttgggctgggtcttgctatttgcagtgctattatccacttacatgaaggtaaaatttgggctgaaaataataaaaaaggtggagccagttttcactttgttttacctttaaaatcactaccgaatattgatgagattgaaataaaacagtga

SEQ ID NO: 297144 - DNA, 687 bp, Proteus mirabilis
atgaatgctatctatttaaagaccaagtggtttttctacttcttaggcctattaatggtttcatctatctttatggtaaaagcaatggcaaattctgataaagcagatctagtaacactggcacaagagggaaacttgccagaattaaagcgccagatagcgcaaggagagaatattgaacaacgagatatcaaattgcgtacaccgctaatggcggctactcatgcgaatcaaattgaggtggcaaaatacctgattgaacaaggggctaacgtcaatgcccgcgatgctatctatgattcaccttatctttatgctggagcgagaggattgcaggaaattttagccttaaccttagcccatggcgcagatctgaatagcatcaaccgttatggtggtacggcattgattcctgcggcggagcgcggccatgttgccacagtaaaaaccttgattgatgccggtgtagatgtcaatcatgttaatcgccttggttggactgcgttaattgaagccattattttaggtgatggaagtcaaaaatatgcagatatcgtgacgttgctgatcgatggtggggcggatgttaatttagctgatggatctggacgtacaccattaaccttagcgaaagataaaggctataccaatatcatcaatattcttcaacaagcaggggcaaaataa

SEQ ID NO: 297145 - DNA, 462 bp, Proteus mirabilis
atgtcagataagcaatttatacagcaagccatttcgcttgccacagagaatgtgaaagttggtgggcgtccctttggcgcggtgatcgtgaaaaatggccaagtgattgctcatgctgttaatcaaattacagcgacaaatgatccaactgcacatgcagaattattagcattacgagaagccggaaaagtgttaggacgagcaaaattggatgattgtgtggtttatgccagtggccaaccttgtccaatgtgtttggcggctatgcgtatggcggggatctcacaaatattttatgcttactctaatgatgatgcccagccttatggattatcgacagccaatattgctaaggcattaagagtcgctccggagcaacaagaagggttgcaatttgtgcaaataaaacctgaagacgaaaaacaaccggcactttatcagctttggtctcaacaatcttaa

SEQ ID NO: 297146 - DNA, 612 bp, Proteus mirabilis
atggaacaacaagttattacagatatttctctctctgcccgtattattggggctgctttctattacccaccaactgaaaaaagtgacattgttgagttactctcaagcggcaaatggttaactgaatggccttatggctctgaagaagaaaaacaacgcattgcctcattattggcgcaaactacctatcaagatgaaacattagcacaagcctatcaacgtttatttattgggccttatgcgctacctgcaccaccttggggatcggtgtatcttgatcatgagaatgtcttatttggtgattcaaccttagatttacgtgaatggatgctggagaatggtattgatattgccttgactcaaaatgaacctgaagatcactttggtttaatggtgatgatggtggcatgggttgcagaaacacgccctgaaaaattaactgaactacttgctgaacatttattaccttgggcttatcgctatctagagaaattgtcattacaaggagcattcccttattatgaaggtcttgccatgttagcaacgttaacgcttaaaagctggcaatccctactctcgattactcctgttgaaaaacagctattttgctaa

SEQ ID NO: 297147 - DNA, 861 bp, Proteus mirabilis
atgggcatgggattacatgaatggccactgatgttctttaccgttattggtcaaagtgtggctggcgcctttattattatgggttgcgccattctttcaggcaaactgcctgaagcgttaaatcgcaaagtgcattacagcatgtttggtttgtggttattaatggggattggttttttactctccatgatccacatgggaaccccaatgcgtgcctttaactcttttatccgttttggtcattcatcattaagtaatgaaattgccagtggtgccacattctttgctttaggtggcctatattggctaattagtgtgttaaataaaatgcctgctgcattaggtaaattgtggctagtggttgtcatgatacttgcggtgctatttatcacggctatttcgcgagtttatcaaattgatactgtacctacttggtataatggctataccacagttaacttcgtactaaccgcatttattggtggtcctattttagcggcactgttaatgcgtattgccggttttaacttaaattgtattagtgcattaccgctattaagtgtcatcgccattattatcagtgctattgtggctacctctcaaggctttgaattgggttcaattcaaacctccgtacaaaaagcggttgatttagttcctgattacggttttttaatgggcattaaattgattgccctaacattagggttagcttgttggatagcaccgttattacgcaaaaataatccttctgtttctttaatggtgttaggttttattttggtgtttgttggtgaatttattggtcgtggcgtattctatggcttacatatgacagtaggaatggctgttgtaggttaa

SEQ ID NO: 297148 - DNA, 618 bp, Proteus mirabilis
atgtcaacgcaatatggtttttatatcgattcaagtcgttgcaccggctgcaaaacctgcgaactcgcgtgcaaggattttaaaaatttatcccctgaggtcaatttccgccgtatttatgaatatgccggtggtgattggaccgagcaagatggtgtgtatacgcaaaacgtttttgcttactacttatctatttcatgtaaccactgtgacgatccggcttgcgtaaaagtctgtccaagtggcgccatgcacaaacgcgaagatggttttgtggtggtaaatgaagaagtgtgtataggctgtcgttattgccatatggcatgtccttatggtgcaccacagtttgatgaagtcaaaggccacatgaccaaatgtgatggttgttatgagcgtgttgctgaaggtaaaaagccaatttgtgtcggatcttgcccattgcgtgcattagatatggcaccgattgaagagttacgcgctaaatatggtgatcttgctgaaatagcccctcttccatctgcgaaatacactaaaccgaatattgttcttaaattaaatgccaatagccgacctgtaggtgacaccaccgggcatctggctaacccagaggaggtttaa

SEQ ID NO: 297149 - DNA, 2445 bp, Proteus mirabilis
atgaaaaacatcaaagagatgacgttactttccacccccctatctcgccgacgctttgtcaaagtgggagctgctggtggattagttgcaacggcaggtggattatctctcccctttagccaagccatggcttcggagcaaacagcgccgacatctaccaataaagaaaaagttgtctggagtgcatgtaccgtcaattgcggtagtcgttgtccattgcgtatgcatgtcgttgatggcgaaattaagtacgttgaaacagacaataccggcaatgacgtttacgacgagttccatcaagtacgagcttgcttacgtggtcgctctatgcgtcgacgtgtttataatccagatcgcttacgttatcccatgaaacgcgtaggtaaacgtggtgaaggtaaatttgaacgtatctcttgggatgaagcctttgatactatttccgacaccatgaaacgcctgataaaagattatggcaatgaatctatttatctaaattacggtacaggcaccctcggtggcaccatgacaaaatcttggccaccaggagcaacccttattgcccgtttaatgaattgctgtggtggttatctcaaccattatggcgattatagtactgcgcagatcgcggcaggcttaaattacacctatgggggatgggctgacggcaatagtccttcagacatcgaaaatactaaattggttgttatgtttggtaataatcccggcgaaacacgtatgagtggcggtggtgtaacttattatgttgagcaagctcgtgaaaaatcagatgctcgcatgataattattgatcctcgctatactgatacgggtgcaggtcgtgaggatgagtggatccccattcgtccaggtactgatgcagccttagttaatgcgttagcttatgtcatgatcaaagaagatttagtcgataaacccttcttagataaatactgcgtaggttacgacgaaaccacgatgccagaaggggcacctaaaaacgcccactataaagcctatattttaggtgatggcgcagatggtcaacccaaaaccccagaatgggcagcacaaattaccggcattcccgcggcacgtattgttaaattagcccgtgaaatcgccggtgctaagccggcttatattactcaaggttggggcccacaacgccgttcaaatggcgaattagcctctcgcgctattgcaatgctcgctatcttaacaggtaatgtgggaataaatgggggcaataccggtgcccgtgaaggctcttacagcattccttttgtccgtatgccaaccttaactaaccctgtcacgaccagtatttctatgtttatgtggacagatgccattttacgtggccctgaaatgaccgcaacacgtgatggcgtgcgaggtaaagataaactggatgtacctattaaaatggtctggaactatgcggggaactgcttagttaaccaacattcagaaataaaccgtactcatgaaatcctacaagacgataaaaaatgcgaaatgattgtggttatcgataatcatatgaccgcatcggcaaaatatgcagatatcttactgccagattgcacggcatcagagcaaatggatttctgtatggatgcttctgcggggaatatggcttacgtgattttcgctgaccaagcgattaagccacgttttgaaagtcgcaatatctatgagatgaccagcgaaattgctaaacgtatgggggtgggtgagaaatttaccgaaaatcgtacccaagaagagtggttacgccatctttatgagcaatctcgtcaaaatttaccagaactgcctacctttgaagaatttcgggcacaaggtatctttaaaaaacgtgatccacaaggccatcatgtggcttaccgtgaattccgcgctgatccactcaacaatccgctgacaacgccatcaggaaaaattgaaatttattcttcgcaattagctgaaattaaagcgacatgggaattagcggcagacgatgtgattgatccactgccaatctactccgcaggttttgaaagctatggcgaccctgctatggataaatacccattacaaatgacgggttttcactataaagctcgtacccactcaacttatggcaacgtagatgtattaaaagcggcttgtccacaagaaatttggataaaccctgttgatgctacaaaacgtggtatcaaacacggcgatttagttcgtatttataacgatcgcggtgaagtacgtatcaacgctaaagtgacaccacgtattttgccgggcgttgtgggattaagtgaaggggcttggtataacccagacagtaaccgtattgatcatgcaggttgcattaacgtgttaacgacccaacgcccttcaccacttgctaagggtaatccttctcacagtaatcttgttgaagtcgtcaaggcgtaa

SEQ ID NO: 297150 - DNA, 1245 bp, Proteus mirabilis
atgttttcagaagaaagacgacaggaaatctatagcattattagggaacagaaaaaagttaaagtggctcagctagcggaaagattcaacgtcacattagaaacgatccgcagtgatttgaaatacctcgaaaatgaagggttgatcaaacgttgtcatggtggcgccatactagggaaacaagaaataaaaaagatcagtaaatttagtgatagttttgatatctcatgcttactacacgatttattgatcgtcaaagaacataaaaagaaaacaccagaaggtaaagtgtgtgtattaggctcttttgtggtggacattattgctaatgttgatgcatttcctcgtgtaggggaattggtaaattcaaaaggaaactcaataggtccgggtggaaaagggacgaatcaagccatttctgccagtttttctgatgcaaaagtgcatttaattaccaaagtcggtgaagatcattttagtaagtacgcttataaatatttgcaagagagcggtattgattcatttactatttttcaaacagaaatagagccgacaggtagctcaattagctatttagcagataaaacccaaaataatattacggctacctatttaggcgcaaataacacttttaccctgcaagaggtcgatatctcactgccttatattagtgaagctgacgtgttattactgcaaggggaaattaatattgatgctaatgtgaaagccgcttcttttgctcattctattaataaaaccgtcatacttaatgtcgctccgtatagcgatgatttaaaacaactttatttatatgtagattttattacgttaaacgcttaccaagcttcagattggtcaggtattgaaattaatacgattaatgatgccaagcaagccgtagagattattgccggtaacgaaaagaaaaaagtgattatctacatagatgaattaggcgtggtgtattttgatgggaggaatacttttcatattccgccactaccttctctacgtgttgatacgatggcagcaacagatgcttttaatggtgcatttgcctcaaaaatagccgcaggaggcacaatgccagaaagtgttttatttgctagtgctttcttgtctgcatttatagaacaaaaaggggtgacttcaatgccttcactgtcacaagtacaagcacgtcttaaattaagaattgaagatattcgaccacaagtaatctgcaatgagaaaaggtgcatataa

SEQ ID NO: 297151 - DNA, 945 bp, Proteus mirabilis
atgaaaaaaactctcttagctctgaccctatgcagttctgtttttactgttcctgcttttgcacaatggcctgaaaaacctattacgattattgttccttgggctgctggtggcaataccgataccgttgctcgtttagcagcaaaaggattacaagaagaattaggtgtgacggttaatgtcgttaataagaccggaggaagtggcgttgttggacatgatgctattaaaaatgccaagccagatggttacacattaggtattgccacggttgaaattgcgatgatgcatcatcaggggatgactaatttaacctatcaagattataccccgatcacacgtttagcggtaatctacggtggattacaagttgcaaaatcatcgccttttaataatgcacaagaaattattgattatgccaaagccaacccagggaaattaaaagcgtcagggagtggattaaactctatctggcatcttaataatattggtatgttacgtgcagcagggttacctgataacgcaatccgctttattccttcccaaggagccagtgcggcattacaagagttagcttcagggggcgttgatattgtaacgtcttcattaggtgaggctgacagtatggtcaaagccggattagtcaaacatatggccattatgtctaatgaaaaatcggcattttatcctgatgttcctctctttaaagaagcaacaggttatgattgggatttacaagcatggaatatgttagttgcccctaaaggacttgataaagaagcacaagataagcttaccgcagcaatgaagaaagtttatgcttcaggtgaattagctgaatttgctaataaacaaggatttgaagtcattgaattgtatggtgatgatgcgacacaatttatggccaatgaagataaaaagtttggcgaaattataaaaaaataa

SEQ ID NO: 297152 - DNA, 609 bp, Proteus mirabilis
atgactaatattacactcgataatataaaacttgctgtacaacgtatcgcgattgcctgtgaacagtctcaaaatagactatgtgaagcagatagccaacttggtgacggtgatttaggggtaaccatgcaaaaaggatggcgacaaattgctaacgatgcccaagattggcctgacgatttaagcaaagcgctttttcaatgcagtaaatcattacaaaaagcctgtgcgtcttcttttggtactttgcaagcaacggcttttatggcaatggccaaatattgcaaagaaaaccacctgcaagaaatagcgcttactgatatttccccactattgacggtcgcataccaaagcatgatggcgagaggaaaaggggaattagggcaaaagtcagtattagatattctttatcatttatctgaagatctagcgtcaatctcatctctgactgaactaaaacccacagctttaaaaagtattaataatacgctaaatgaatttcgccctaagcctaatttattgggacgtgcccgtatgttcccagaaaaatcgataggattagacgatcccggaatgttagcgattaacgttattgttgaagcaatttga

SEQ ID NO: 297153 - DNA, 972 bp, Proteus mirabilis
atgaataaattagcgcttcctacttaccaagatgtggttgaagcacatcaacgtattttgccatatcttaataaaacacctatcttaacctctcgcactattaatgagttaacgggtgctcaattctattttaaatgcgaaaactttcagcgcataggcgcttttaaatttcgcggagcaatgaatgcattatcacaatttacggacgaacagcgcaaaaatggtgtgataactttttcatcaggtaatcatgctcaagctattgcactatcggcaaaattattaggtattcctgctacaattatcatgcctgaagatgcccccaccgctaaaatgcaagcaacaaaaggttatggtggtagagtcattctatataaccgttatacacaagatcgcgaagagataggacaaaagcttgctcaagaagaaggattaactttaataccaccttacgatcatcctcacgttattgccggtcaaggtactgcagctaaagagttattcgaggaagttggtgagttagatatgctgtttgttcccttagggggaggtggtttactttcaggttcattattatcaaccaaagccctttcgccacattgtagaatttttggtgttgagcctttagcgggaaatgacggacaacaatcattacgcaaaggtgagataatttatattgatacgccaaaaactattgcagatggcgcacaaactcagcatttaggcgattatacttttgagatcattcgcaacaacgtagacgatattttaacagcaacagatgaagaactaatttctgctatgcaattttatgctcagagaatgaaaatcattgtagagcctacaggctgtttaagtttagctgcagctcgtcaatttggtgataagttaaaaggcaaaaaaattggcattattatcagtggtggcaatgtcgatattatgcaatatggtcattttttatcacaaaaataa

SEQ ID NO: 297154 - DNA, 399 bp, Proteus mirabilis
atgagttcacatcttgtgatgcaaaatattgaagctctttcatcgccaggggggcactactctcatgttgttacagccaataatatgtcctttatttcaggcctattacctttagataaaaacggcgtcccattaacggataaacctattgaatttcaaattaatcaagtgcttgaaaatttaaacgcttgccttataggaataaaagcacaaaaaaccgatattgcccaagttaagatgtatattacagacattaacgaatggcctgttgtcaatgagttatatgcaaaatggattggtgagcataaaccggccagattagtcgcgggtgtaaaagagcttcattttggcagtaaaattgaaattgaagccatggtgatcaaggagcaaactttatga

SEQ ID NO: 297155 - DNA, 759 bp, Proteus mirabilis
atggatgcacaactgtataaagagtttaaaattatagaaaaagcgttttggtcagagatatgtgaaaacaatattcgtattggtgatcatacccactgctttatgacaccgatggacgcgcctatttttaattttatctaccttcgccaaggcgctagcgaaaatactttccaacaagcaagtacgctgttctcctcgcaaaaaaaaggtcacatgctggttctgccggaatctctgttgcctgaatttgaagagataataaaaaaagcaggttatacgggtgacggtatgacaaccgctatgtatctctcattgtctgatgcgacttatcccccctataaaaataacccgtgcgatattattttaactaaccatgatcttaaacagtgggcgcaaccattgaaaaccgcctttcctgttggtgacgatacgataactaatgaatatattcgttatcaccaaaaagcgttagataatggtgcgacgatccttcattatgcattattagttgcagggcagcctgtatcatcattaacgctgacattacatgataaactagcaagatttgacgatattgggacggatattgcttatcaaggcaatggttatgccacacatctaattactcacgtattagagttttgtcgagagcaaggtgtcgagcgttgtttcttagatgcgtcagcggatggtctagcgctatatcgtaaatttggttttaagccactttttaactatttaagctttattaacgaataa

SEQ ID NO: 297156 - DNA, 2022 bp, Proteus mirabilis
atgcgattaaatcccggtcagcaaaaagcagttgaatatgtgtcaggtccttgtctggtcttggcgggagccggctcgggtaaaacacgggtgataaccaataaaattgcttatcttattcgtcaatgccgttattctgctaagcagattgctgcggtgacttttaccaataaagcggcgcgtgaaatgaaagagcgtgttgctcaaacattgggaaaacaagaggcaaaaggattaatgatctcgaccttccatacattaggattggagattattaagcgagaatacaaagcattaggcataaaatccaacttttctttgtttgatgatcaagaccaatccgcattattaaaagaattaacggtagatttattagaagaagataaagatttgctatcacagttaaagagtcaaatctctaactggaaaaatgacatgctcacacctgagcaagtgattggtagagcacaatcgcagcaagatcatacttttgccgagtgctttcgacgttatgagcaacatttactaagctgtaatgtattggattttgatgacttaatcagtaagcctaccttgctattacgtactaatgaagaagtaagggcgcgctggcaacagcgtattcgttatctgctggtggatgaatatcaagataccaatacaagccaatatgagttggtgaaatggttagtgggtgaaagagcccgtttcactgtggtgggggatgatgatcagtctatttattcatggcgtggtgcgcgtccccaaaatctggtgttattgcaaaaagatttcccacagctaaatgtgatcaaactggaacaaaattatcggtcatcagggcgtattttaaaatcagctaatattttaattgaaaataatccccatgtatttgaaaaacggctgttttcagaattaggttatggggatgagctacgagtattaaccgctaataatgaagagcatgaagctgagcgtgtagcgggggaactgattgcccatcattttattaataaaactaattataaagattacgcaatactctatcgaggtaatcaccagtcgcgtatttttgaaaagtatttgatgcaaaatcgcattccttatcgcatttcgggtgaaacctcgtttttttcccgtgaagagatcaaggatattttggcttacttaagagtgatcactaatccggatgatgatgctgcattcttacgtatcgtcaataagcctcgtcgtgaaataggcccgatgactatccaaaagttgggggagtgggctaaagtccgtgataaaagcttatttaatgcctgttttgacttgggattaagccaaacgttaacagggcgaggtttaagtgcattacaggctttttcacagtggatggcgcgaattgtacaacaatcagagcgtgagcctttgctcgctgtacgtgatttgcttcatgaaatggattatgaaagttggttatatgaaacctctagtagcgcgaaagcggctgaaatgagaatgaaaaatattaaccagcttttttcttggatgagtgaaatgcttgagggggatgagctacatgaacccatgacgctctctcaagtggtcaaccgttttactctgcgcgatatgatggagcgtggtgaaaccgatgaagagttagatcaagtgcaattaatgacacttcacgcctcaaaaggactggaatttccacatgtttttctggttggcatggaagaggggatcttgcctcatcaaagtagtatcgatgaagataacgttgaagaagagcggcgtttagcttatgtcggtattactcgagcacaaaagacattaactttcacattatgtaaagagcgacgtcaatacggtgaattaattcgtccagagcccagtcgttttctatatgaattgcctcaagacgatctccattgggataccaataaaaagaaagtgttaagtgctcaagaaaagcaagaaaaagggcaaaaaggggtcgctgggcttaaagcgatgctggcgagacataaaccttag

SEQ ID NO: 297157 - DNA, 1509 bp, Proteus mirabilis
atgctgaaatcctcatcactttatgctgctatcgatttaggctctaacagctttcatatgttagtcgttcgtgaaatcgcgggatctatccaagtattatctcgcgttaaacgtaaagtcagacttgctgctggcctaaataaagaaaacgagctgtcagagcaggctatggagcgtggttggcaatgcttgcgactgttttctgaatatctcagagatattcccgcagaacaaatccgagtcgttgcaactgcgaccttacgtattgctaaaaatgcagatattttcgtcgctaaagcgtctgaaatattaggcaatgcggttcatgttatcagtggtgaggaagaagcacgccttatctatcgtggtgttgcccatacaacgggtggtgcagaacagcgcttggtggtagatattggtggcggtagcacagaattagtcaccggtacgggggctaaaacgacacagctaatgagtttgagcatgggttgtgtaacatggctagagcgctattttagcgatcgctcattaacagaagaaaactttgctcaagcacaacaggcagcaaaagctatccttgcacctgtggcagaaaaacttatccaacaaggttggcaggtttgtgtaggggcatcgggcaccgttcaagcattacaagagatcatgattgctcaaggaatggatgaattaattaccttacctaaattagagcgactgaaacaaaaagccattgagtgtggcaagcttgaagagttagaaatcgaaggccttactttcgaaagagcgcttgttttccctagcggattagccattctgatcgctatttttgaaaccctgcatattgaaaatatgatcttagccggtggtgcactacgtgaaggcttagtctacggtatgttgcatttacctattgagcaagatattcgtcaacgtactttgcgtaatattcagcgccgtttccaaattgatattgagcaagcccatcgtgttcaacaattagcagagcattttttcattcaagtcagtaaaagttggcaattagataatcgctgtcgagagctactttccagcgcttgtgccttacatgaaatcggcttaagtgttgattttcgccaagcgccttcacatgccagttatttagtttcccaccttgatttacctggttatacacccgcgcaacgacgtttaatcgcctcatttttaagaaatcagaaggggattatcgatctcgcacctttgaatcagcaaaatgcgctaccgataaatcaagcataccgcttggtacgtttacttcgcctagcaattatttttgccagtcgtcgtcgtgatgatactttacctgcactgcgtttacgtacggaagatgaaaaattaatcattaccttgccacatcaatggatcgctgaacatcctttacgtgcggaaaatcttcatgaagagatacagttacaaagctacgttcattggccattaatgcttgaagagcaaaataactcacgcataggttaa

SEQ ID NO: 297158 - DNA, 1299 bp, Proteus mirabilis
atgagcaaaacatatttgacagaaaagaagttttccgacttcgccttgcatccaaaagtgatagaagcccttgagaaaaaagggttctctaattgtacacaaattcaggcattgacgttacctatcactgtgaaaggtcatgacattgctgggcaagcccaaacaggaacaggaaaaacgttggcgtttttaacctcgacgtttcattatcttttaactcaccctgcaaaagaagggcatgaaaagaatcaacctcgtgcactgattatggcgccaacgcgcgaattagctgtgcaaatttatacagatgcacaacctttagcacaaagcactggtgttaaaatgggtctagcctatggtggagatggctatgacgaacaacttaaagtattaaataacggtgtagatatcgttatcggtaccacgggtcgtttaattgactatgtaaaacaaggtcacattaatcttaacgctattcaagttgtcgtacttgatgaagcagacagaatgtacgatctgggctttattaaagatattcgctggttattccgtcgcatgccaaatgccgcagagcgtatgaatatgctcttttccgccacactctcatatcgtgtcagagagttagctttcgagcagatgaataaccctgaatatgtagaagttgaacctgaacaaaaaactgggtttagcataaaagaagagctgttctatccttctaatgaagaaaaaatgcgtcttctgcaaaccttaattgaagaagagtggccagagcgctgtattatttttgctaacaccaaacatcgttgtgatgatatttgggcgcatcttgccgcagatggacaccgcgtaggtctattaacaggtgacgtgccacagaaaaaacgtctgcgtatcctagaagattttacccaaggtaatattgatattcttgtggcaaccgatgttgcagctcgtggtcttcatataccttctgtaacacatgtctttaactatgatttacctgatgactgtgaagattatgtacaccgtataggtagaactggacgtgcgggtaaaagtggtaactcaattagcttagcctgtgaagaatacgcgttgaatttaccggcgattgagacctatattcaacatgctattcctgttagtaaatataacagtgatgcattattaactgatttacctgagccaaaacgtcgtcatcgtcctcgtcaaggtcagcctcgtcgtaataattcggcacctcgtagaggaaataatactcaacgtaataaccgtaataaacgcccgagtcactcataa

SEQ ID NO: 297159 - DNA, 630 bp, Proteus mirabilis
atgccagtcactattagcatttcagatgatgtgtacggaagattggaagcgttggctgttggattcgacacgccagagagagtgatcgagcgcttactcgactccgttgaggatagcgggtcgaaatccactggaaacaaacctgctctcactttcgttcctgatgagccagctttcaaaaatgagttgatagcgcgtaaaaaagcacaggtcgtacttcatctgaaaaatggggatcgagacgtgatccactggaatgcttctaggtttcagcccagctcaaatctgcgagctaacttgtggtcaggcattctgaggaactggaaggataaagggatcgtctcagcagagctgtcagttctaccccaaggtatcaaccaccctgacgacaacaccgatctcctaatagctatcgccggagaggttcactggacgcttgaagaggtagagcagtacttcgttgattatgacctggtaagtagtgacgatggtcacccctactactacctcgcaaccttcagtgaagagactcctgacaagttgaagcaaattgccgggttgaacagcgctaatcaactccatttggatctaaacatcgttccggatgaagatcctggcgagatcgagtag

SEQ ID NO: 297160 - DNA, 1683 bp, Proteus mirabilis; identical to SEQ ID NO: 121645

SEQ ID NO: 297161 - DNA, 909 bp, Proteus mirabilis; identical to SEQ ID NO: 121646

SEQ ID NO: 297162 - DNA, 1218 bp, Proteus mirabilis
gtgaagccagcgccacactggccactgcatccggctcccagggaaggcgaagccttgtcttcgtggctcaaccgcgtggccctttgctatcacatggaggtgtccgagctgctggagcacgatcttggtcacggccaggttgatgacctggacaccgcgccaccactggcgctgctggcgatgctctcccagcggagcggcatcgagccggaccggctgcgttgcatgagtttcgccggctgggtgccttggctactggacagccttgatgatcagattccagacgcattggaaacctatgcgttccagctctcggtgctgctgccgaaactccgccgtaggacgcgattcatcacgagctggcgtgcctggctgcccagccagccgatacatcgcgcctgcccgctctgtctgaacgacccggcaaaccaagccgtactgcttgcatggaagctgcccctgatgctgagctgcccgctgcatggctgctggctggaatcctattggggcgtgcctgggcggtttctcggctgggagaacgccgacactgcgccgcgcaccgccagcgacgcgattacggtgatggaccggcgcacctggcaggcactgacgaccggccatgtggagctgccgcgccgacgcatccacgctggattgtggtttcggctactacgcacgctgctcgatgagctgaacaccccgctttcgacgtgcggaacctgcgcggggtatctccgccaagtctgggaaggctgcgggcatccgctgcgtgctgggcaaagtctgtggcgaccgtatgaaaccctgaacccggcagtacggttgcagatgctggaggcggcggcaacggcaatcagcttgattgagatgagggatataagcccgccgggcgagcatgcaaagctgttctggtccgaaccccaaaccggtttcaccagtggcctgtcggcgaaaacgccgaagcccgaacccgtcgatcactggcaacgggcagtccaggccatcgatgaggccatcattgaagcgcggcacgaccccgagacggcacgctcgctgttcgcgttggcttcctatggtcggcgcgaccccgcttccctggaacagttgcgcgccaccttcgcaaaggaaggcatccccccggaattcctgtcacattacgtgcctgatggaccctttgcatgtcttagacagaatgacgggttaagtgacaaattttga

SEQ ID NO: 297163 - DNA, 615 bp, Proteus mirabilis; identical to SEQ ID NO: 108024

SEQ ID NO: 297164 - DNA, 366 bp, Proteus mirabilis; identical to SEQ ID NO: 121650

SEQ ID NO: 297165 - DNA, 1647 bp, Proteus mirabilis; identical to SEQ ID NO: 180726

SEQ ID NO: 297166 - DNA, 144 bp, Proteus mirabilis
atgaaaaagctgctttccgcccttgccctcgctgccgttgttgcccccgtgtgggccgccacccagaccgttacgctgtccgtaccgggcatgacctgctcggcctgtccgatcggcgatttccaaggtcgatggcgtcagtaa

SEQ ID NO: 297167 - DNA, 435 bp, Proteus mirabilis; identical to SEQ ID NO: 237408

SEQ ID NO: 297168 - DNA, 561 bp, Proteus mirabilis
gtgcaggggcaccgcatcggctacgtccgggtcagcagcttcgaccagaacccggaacgccagctggaacagacacaggtgagcaaggtgttcaccgacaaggcatcgggcaaggacacccagcgcccccagctcgaagcgctgctgagcttcgtccgcgaaggcgatacagtggtggtgcacagcatggaccggctggcccgcaacctcgatgacctgcgtcgcttggtacagaagctgactcaacgcggcgtgcgcatcgagttcctgaaggagggcctagtgttcactggcgaggactcgccgatggccaacctgatgctgtcggtgatgggggccttcgctgagttcgagcgcgccctgatccgcgagcggcagcgtgagggcatcaccttggccaagcagcgtggcgcgtaccggggccgcaagaaagccctgtccgatgagcaggctgctaccctgcggcagcgagcgacggccggcgagcccaaggcgcagcttgcccgcgagttcaacatcagccgggaaaccctctaccagtacctccgcacggacgactga

SEQ ID NO: 297169 - DNA, 705 bp, Proteus mirabilis; identical to SEQ ID NO: 61560

SEQ ID NO: 297170 - DNA, 816 bp, Proteus mirabilis; identical to SEQ ID NO: 46213

SEQ ID NO: 297171 - DNA, 705 bp, Proteus mirabilis; identical to SEQ ID NO: 61560

SEQ ID NO: 297172 - DNA, 519 bp, Proteus mirabilis; identical to SEQ ID NO: 233743

SEQ ID NO: 297173 - DNA, 2967 bp, Proteus mirabilis; identical to SEQ ID NO: 59353

SEQ ID NO: 297174 - DNA, 219 bp, Proteus mirabilis
atgccgtggactttttcacatcctgccgtcgttttccctttaaaacagtctcggattggcaagtaccttaacttgcctgcattagtggtaggaagcacttcacctgacttactctactcttttggtttatatcaatcagccaccacagcacataatttagtggggtggttctatactgcgtttcctttttgtcttttagtttttatctttaattattag

SEQ ID NO: 297175 - DNA, 516 bp, Proteus mirabilis
gtgtcacccattccactagataactcaataaggttaaattggcgtgatttaagtctatttgttatttctctgtatctcggtgctgtgactcatattgtatgggattctttcactcatgaaacaggcactgctgtcagaattttttctatcctacaaactcaattactgcagggaatgaccgatagccaagaactggctatttataaactattacagcacttaggctctgtattaggacttatttatctttgttggaaatatgtgcagtatcagcgaaaacaagagagtgatatacaaataagaaatcgtcttaaattgtttcgtctaataggtatcggattaatatcagggttatgtgcattcccgttagcatggcaaaatgccgataaaggagaggggattaatgttaatcgatttattttccttgagctttctttagctgtgccttttttctttggattgatgataattttaggattatggttatatgctaagcagaaaaaacagctcttttag

SEQ ID NO: 297176 - DNA, 1041 bp, Proteus mirabilis
atggataaaaaaattaaaaaaagcctagcacgcgtgatcaccattattgtttttttgataacgctcattttattatggcaaagtattcatatatcggcattaaatcctcttagtgaagatgccatcattgatgcaaataaaattaatatctcagcctcggtgcctggacgcattgctgctgtttatgtcaaagaaaatagtaaagtcaaaaaaggcgatttactgtttacacttgatcccacaatgtacgcactcagggtagagcaagcaaaagagcaactacagattgcacaagcgacattaagcaataagcaacgtattattattgcggaaacatccaattcagaagtggcacaagagcaaataaaacgtgcgcaggtcaatttatcattagccacacaatcattaaatcgattagaacctttattagcaaaaggctttgtcacagcacaacaagtcgatgatgctcggacgttaaaacatgatgctgaagtgacattaaaacaagcacagaaacagaatgaggcatctgaagcacttattaataataccgattcagaagaagcattagtcaagtcattaaaaacatcgcttgccatggcagagtgggagttaagtaatactgaggtaagggcgccaagtaatggatatatcgctggggtcgttttatctcccggtgaatttattttgtcagggcaatctgtttttactttaattgactctgatacttggtttgcttcggcttattttaaagagacagatttaaataatataaaaattggtagctgtgtggtgatttactccatgattgataatcaacaccccattaaaggtaaagttgaaggaattagtcggggagtcatgtcgaccgatctgattaatattccaagagacttaccttatgtacctaaatcattaaattgggttcgggttgagcagcgttttcctgtcaaagtcattattactgaaccaccagaagcactcatgcgcatcggtgccactgctactgtaaatattgtacctaacgatgatgactgttaa

SEQ ID NO: 297177 - DNA, 1473 bp, Proteus mirabilis
atgataaaatcggccattaatcataaaaaatatattctatcatcgtggttaagtttattacttgttggatgtattgatactagcgattatgggaaatactcagcacaacaaccgatgccttataataatacaaactatatggcagcttctgagcaatacctcgccacacctcagcaagagcaaaccactaaaacgagctatggattggccgagcttatcgatcttggtcagcaaaataatcctgaaacacggattgcttggttattagcgaaaaaatcagccaccgatattggtatggtagaaagtacttatttgccgattattaccgcaacggcattggcaggttatcaaagaggaaaagtagatttacccgccaatccaattgttgatgatattaaaacatcaaacagtgcttttattccagcattaacctttagatggcttatttttgacttcggtaaacgaggagctttagccgatgccgctaaacatgcttctttggcaacaaaccttaattttaatctgatgcatcaaaaaataattcatgatgtttctgttgcctattttagttatggtgcggcccttaaaaaagtcactcttacccaagaggcactgcaaagaagcaaagatattttatatgccatagagcaaaaacgtgcgcggggattagcaaccgtattagatgttgctttagccaaacaacaagttgcccaagtagaattacaacatgtgttagctaaaggtcatgaaaaagatcaatatcagttattactgtctgcaataggtgtctctccctttgaaaagataaaagtgaattatgataatgacgcgcgcttacctgatgatatttccccattgactcacgatgtgataaaaaaagcgttatcacaacgccctgatattttagctcactatgaattagagcaagcggcattaaaaacggcacgctctgttgaatctgactatttacctaaagtatatctcgccggtgctcttgctggtggttcggggcattttgatgttcaggggttacctgaaattagccaacgaacttcatcgtcgaatattttaattggcgtgagtattcccttatatgaagggggcatgcgtcagtcgcgaatgagcaatgctcaatcagatatccaattagcacaagaaaatttgcgcaaaagccaagatacggcaatcaaagagatctctctcagtgagaatgcgttaagatcggcccttgaagcaaacaaagcggctaaaaatctcgttgataccgcacaattaagttataccgccagtgtcgatttttttaacaatggactaggtacagtaacggagattaatactgcagaaattgcactattaaatgcgcaactctcacatatagatgcttatacaggctcattaattgccgcagtagatttagcctttgctttaggggatattgatcagggtttatctaatatacaccttgataaatag

SEQ ID NO: 297178 - DNA, 1353 bp, Proteus mirabilis
atgtttattggctttgactatggaacatcaaattgttctgtggcaatgatgaaagaggggaaaccaacgctattacctttagaaggtgagaatgtttatattccatctactctttgtgcgccaacccgtgaatctgtttccgaacatttatttcgccacttaaatattaaacctaccaactctattggcgaacaactattaagaaaatcaatcgcgtttaatcgtgatgaagatattgaattagtgcctgaggatattgttttcggtcaggcggcattaagtttgtatctaaaagatccccgtgatgtttattacgtcaaatcgcctaaatcttttcttggtgcctcaggtttacatgagatacaaatcagcttttttgaagatttagtgtgcgccatgatggccaatataaaacaacaagcggaacaaagcacccaagaaaccattactgatgccatgattggtaaacctattaattttaatgggttagggggagaggctgccaataagcaagccgagcgtattttaattaatgcagctaaacgggccggctttaaacaggttttatttgaatttgaaccagtagccgcaggtttagaatatgaatccacattaaccaaagaccaaacagtcttggtagttgatattggtggtggtacaacggactgctcattgattcaaatgggccctagctatcggggtaaaaccgatcgtgccagtacactattagcgcatagtggacaacgtgtgggtggtaatgatcttgatatctacctagcttttaaacagctaatgcctttatttggcatgacagggctaacttcatcgggcataaaattgccgttaaaacaattttgggatcctattgccatcaataatgttgaagcacaaaaagatttttattctcaacaaaacttagcggcattaaatcaactacgtcgtgatgctcaagagccagaaaaaataaaacgcttaattgaagtctataatgaaacactaggatatggcattgtccgcaaagcggaagaggcaaaaatggcattatcagattgccatacctatttagccagcatcgcgttattaagtgaaacattagaaaccaatatcactcgccagcaaatggttgaagccattggatcccctaaagataaaatgattgatttggtcaatgatgccgtacaacaagggggcgtggtacctgatgtggtgtttatgacaggaggctctgcgcgttcaccgattttatgtcaagctatcgagcaacagttacctaatgtgcctattgtaaaaggtaatgatttcggttcagtaaccgcagggttagcccgttggggtgaagtttgttttaaatag

SEQ ID NO: 297179 - DNA, 1026 bp, Proteus mirabilis
gtgtaccgcttccaaaatgattataatgaaattgcacatcctgcggtcatgaaggcaattacagatacagtaggtcaacgttatgatggttatggtatggataccctttgtcatcaagctaaagaattaatcaaacagcgaattaaacaacccgaagcgcagatccatttttttaatggtggcactatcactaatttaaccgctatttctcactttttacgcccacatcaagcagtaatttctgtcagcaccgggcatattgcgactcatgagacgggagcgattgaggcaacaggccataaagtgatcaccactttttctgctgatggtaaattgaccccagatttattgaggccgatcctcgctgaacataacgatgaacattgggtgcaacctaaacttgtttatataaccaatgccactgaaattggcacggtatatcgtaaagccgaattacaagcgttacgcgaattttgtgatgcacataatttatggttatatcttgatggtgcacgtttagcgacagggttgatgtctgataatagcgatctgacgattgaagatatcgcacacttaacagatgctttctatattggcggcacgaaaattggtgctatgtcagcagaagcattagtgatttgtcatcctgcattaaattctgattttcgctttagcttaaaacaaaagggcggattacaggcaaaaggttggttattaggggcacaattcgcggcattatttagcgacgacctctactttaaattaggtaaacatctcaatgagatggcctcacaattagccgcattctttattgagcatggttttgattttttagcaccaccagaatctaaccaagtgtttgtcattttacctaatgatattgcagaaaagctaacgcagcagtttgtttttcatcgcatattacttgacgatccacagctaagctgtttgcgcctttgtacttcttgggcaacaacacaacaagatattgatgattttaaagttaaatttcttaaacttatttaa

SEQ ID NO: 297180 - DNA, 1455 bp, Proteus mirabilis
atgtatttagggctagacttaggcacatcaagtgttaaagcgatcatcatgaatgagcaaggtgatgtcgttgccagtcattctatacctttaaccctctcacgccctcatcctcaatggtcagagcaagatccacaagcatggtggcaggcaactgatgaagcgataaaacaactgagtcgtactcaacctatggaacagatccaagccattggtctcagtggtcaaatgcatggcgcggtattacttgatgcgcagcaaaatatattacgccctgctattttatggaacgatggtcgcagtgtgaaacaatgtttacgactggcaaagcaataccctcaatttaaagaaattacgggcaatttagttatgcctgggtttacagcgcctaaattgcaatgggtcgcagaaaacgaagcggagatcttttgtcagattgctcatgtgctattaccaaaagattttctacgttggaaaatgagtggtaattttgccagtgatatgtcggatgcggcgggtacactgtggttggatatgcaaaaacgcgattggagtgatgaattattagcggcaacggggctttctcgatgtcaaatgccgacactatttgaaggtaaccagataacgggttacttactgccagaaattgctaaaaaatggcaaatgaaacaagtaccgattatagcgggtggtggtgataatgcagcgggtgcaattggtgtaggagtatatcaaccgggtcaaggaatgctctctttgggcacatccggtgtctattttgttgtcagtgaaaagtttctccaaaacagtgacaatgcggtacatagtttttgccatgcattgccacaaacttggcacttaatgtcggtaatattaagtgcggcttcttgtctagattgggcatgccaattaacggggatcagtgatgttggtgcaatgtttaaagaaatagaacagcatgcacattctgatagttccctactctttttgccttatctttctggtgaacggacaccttataacaatgcggatgccaaaggcgtattttgggggttaactcaccaacatcagcgtgcggatttatgtcgagcggtgttagaaggtgtcagttttgcgttgaggcaaggaattgaagtggcggataaggctggacaacacgcagacaatataacgttaattggtggaggggcaagaagtgaatattggcgacaattactagctgatattacaggaaaaaccttggattatcgtcaaggtggtgatgttggtcctgcgctgggagctgctagactggcgcaattagcgataaatccggctcatttatcacaaattattctttctcagccaaaacttgaaacacgtcatgttcccaacttagaaaaacataaggcatatcaagataaatataatgcctttaaaaagctctacacacttattgaaacaatgaaaatataa

SEQ ID NO: 297181 - DNA, 315 bp, Proteus mirabilis
atgatcgctgttatctttgaagttcaaatagccacaagtaagcaggggcaatatttatctttagcatctcaactaagaccattactaaacaacattgatggatttatatctatcgagcgctttcaaagcctagcgacggaaggaaagctattatcgctttcttggtggaaaaatgaagatgctatactgcaatggaaaaataatattttgcacagcaaagcacagcaggaaggtaaaaagagcatttttgatttttataaaataagtatagttaaactagaacgttgttatgagtttacaagtactcacacgtaa

SEQ ID NO: 297182 - DNA, 702 bp, Proteus mirabilis
atgaataattacaaaacaaaaacggaatatgagcatactttggagtcagcaatagccgcggttggagccgctattgcggatatttccagagtaaaaatactctgtgctttgatggatggaagggcatggacagccaccgagttgagcattgttgcggatatctccgcatctaccacaagtagccatttatcaaaattactcagtagcggccttatttctgtgatctctcgtggtaaatatcgctattttcgattagctagtgatgatatagcaaaagttattgaaaatttgatgagcttctcaacagttcatgtatcacaagcaaaaatcaccaccccagaacatttaagaaaagcacgtacatgctataaccatttagccggtgaaattgccgttaaaatttatcaggtactttgccaagaagaatggataacaaaagatggaacagaaataactgaattcggagataaacgctttaaattgatgggacttaatttccaagcaaaacattcgcgcaatatttgttgtccttgtttagattggagtgaaaggcgttttcatctaggtggacaaattggcagtgcattacttaatcatgcacagacacaaggttggataaaacgccaccaaggatatagagaagtgacgattaatgaaaagggcaataaagcttttgcccaatattttaatataacaatatga

SEQ ID NO: 297183 - DNA, 465 bp, Proteus mirabilis
gtgcgtattaataagaactccctaataccatatatatcaatatttatcagtgtgcttttttattatgctgaaatggctcatcagcttttttttaatatattttcgcatgcgacgaataccattgcattattcgaacatattaatattataagtcactactaccttgtctatctgattgttataacacctgtgtttgtttttttaaatggaaaaatgaattcactatataagtgtttgttttattttgtttttccttattttttatctctatttgcatggtatacacatatctacttcgatttacccaaaaattctaacttaggaagtgggacattacttggtgaatttggctacataacagtgactatctatatcatatacggttcattcttaatcccactaattgcatgtttgtgtgagatttttattcgattactctatcgatatctatacaggttttattaa

SEQ ID NO: 297184 - DNA, 291 bp, Proteus mirabilis
atgtctgaacctgattgggctggagggcaaccttacacagaggattttcgtcaaaaagttcgtgagcgtttcagtggagtgattattggcgcgggagcttacaccacagaaaaagcagcatcattgataggaaaaggcttaattgatgcagttgcatttggccgcgattttattgcgaatccagatttagttgctaggcttcagcagaacgctgagcttaatccacaacgccctgcaagtttctacggtggaggcgcagaaggttatactgactatccatttcttttataa

SEQ ID NO: 297185 - DNA, 210 bp, Proteus mirabilis
atgcaatttaatttgattcatgtttcaggcatagaccgagctaatgataagaacacattagatattgccttacaaggttcggatggttcaatccaccatttcacaatagatgtcacaggtaaagttgtagagaatttaacattaagagatattgaaaaattagctatacaacacgcaaagaatagctttgctaactgtactaacggctaa

SEQ ID NO: 297186 - DNA, 171 bp, Proteus mirabilis
atgagtaatcaaaatttagaagcgttagttagtacgttatcagcacaagtggtacagcaagggcaacaaattgcagagttacaaaaacagctcgcggatatgcaattaacgagctgtgatttagatatactaagcacgcgaattactgcagtcgaaagctttagccgttag

SEQ ID NO: 297187 - DNA, 669 bp, Proteus mirabilis
gtgagtaacttccttactattgacccttacaacgtgttgggaacagtgtccaagttcaaagaagacctaaaagtaattcctgaccaatatgttgttgactcgttaatatcagcggtaaaaaagtctatttttttgaagataattcacgaaaaatctttgagaggtaatagacacttattaagcgtcatctatgattttttaggttgtatttcagcaataaaaaaaaatgaagatagatacttttattttaatataaggtcatgcattgaaaattcaattagattcttgttgaacaaagataatgatgatgagatcggtgttacaaggatgttcagtgagtttaaagaaagatataaaggtgtagacggtgttagcgcacttactagggtatattctgatgcatgtaattacgttcataacaatgtcaaggctgatattgatgtatcaaaaagctataaatacattgattcatccaagatttttgaaaagaaaaaaagcagaaatctatgtaatgacctcgtttcagtgcagtcgtcactagataattttttgctaattaataataaagaagacataaagtattcatttttatatctaaatgaaaatatagaatatttaataaataaaaagtttttagaaagattgttctcatcagaattggtatcataa

SEQ ID NO: 297188 - DNA, 420 bp, Proteus mirabilis
atgaatcagaataaattaataactaaaaagaaattaatggaactaaaagattctgaatcgcttgagtttatgatcgggtttctatctttagtaatattttccaaagaaatttttaagtcgaattttgaattgagtgaatttattaaagatgcatttaagatagaatataaaagatacgttgtatcctcaagaacccttatgttctctaggcttgcgaaagatatagttagaaaatattctgatggaaatcatttcacagctaaaaatactgttgtcaatatcatttatgaaaagctagatcagctgccaatcaacgatatcgctttagaagcgaaaaagaaagaaaataaaaagagaaaaggtaaaaatactacaacagaaagtatctcaaagtggataaaggggtttaggggtgagtaa

SEQ ID NO: 297189 - DNA, 846 bp, Proteus mirabilis
atgaatgcgcctgtaattagctttattaatatgaagggtggggtgggaaagaccactctatgtattagtattggtgagtatttagcaaactataaggataaaaaagtattaataatagatattgatcctcagtttaatgcaacacaatcttttatgggtaagcatgataaaataagtgagtacttatctttagtaaaacaaagaaagacaatcaagagaatatttgaagtaaatgcttctatatatgatgaagatgcagtattaaaaaaagaagatgttatttacagtgtatatccaaatctagatataatccctggtgatataaacataatgtttgagcataacacggtagatacaattagattgattaggataagaaatttcattgaagacaataagttaagagaaatctacgactatatttttattgattgtccgcctaccatttcgatgtataccgaagcgtccataatggcatctacacattatataatgccaatgagaatagatcagtattcagtattagggagtaacaatttgctatcaattgtttctaagctggctagagatcaaagacttacaataaagccgttgggtgttatttataccgatactgcaccaaaaagattgaccaagaagaccagagcaattaagacggctatagaaaccgaaaaaggaatcagggatctatatttcttcaagaatcatttttcaaaggttagggatttacaggttggtcagcaattaaattttgcgtcagcgtattctcagtctaaagaaatcattgatagaatatgtacggaactcgaggctaagcttaaagaggttgatgatgaatcagaataa

SEQ ID NO: 297190 - DNA, 258 bp, Proteus mirabilis
atgtcacaaaaaaatacgagaataagagatataacgccttatagccttagaatgcctgatactctgaaggaaaagttaatgcaaagggcaagtaagaatgggcgatctcttaatgctgaaatggttatgattcttcagtctgccgtggatgaggataacacccctaaaaacttaaacgagttgtcacagcttgatcctgaaaagttcaaagaactgttcatggaaactatcaagaagatgaatgagggtaaaaagtga

SEQ ID NO: 297191 - DNA, 162 bp, Proteus mirabilis
atgaataccaataaaaaaacaggaaaatttcaactcagattaacagaggtgttaaaaagtaaagtggtagaactctcagcgaaagatggtatttcgcaaaactcaatagttaatcaagcgatagcttggtatgtgaaagaaagagaaaaacgtgtcaactaa

SEQ ID NO: 297192 - DNA, 834 bp, Proteus mirabilis
atgactagtgtatcaacaattaacgtacctttccacggtaacaacctgtatgtagtaaatttcaacggcgaaccatatgtaccaatgaagccaatagttgaaggcatggggttaacttggcaatctcaatttgaaaagctaaaacaaaggtttagtaaagggatcacggaaatcgtgataccttcaaaaggcggtgagcaatcaatgctttgcctagctctccgtaaacttgcaggctggcttcacactatcagccctaacaaagtcaaaccagagatccgcgataaagtaatcaagtatcaagaagagtgtgacgacgtactttatgaatattggactactggtgaagttaagaaaaaacacaaatcaactgttcaagaacgcaacccattaaagaatgctgttaatctactggttagtaagaaaggcattatgtacccagaagcctattctcttgttcaccagaaatttaatgttagtagcattgaagagctaacagcagatcagatacccgatgcggttgagtatattcacaagttcgttcttgagggtgaatacattcctaaacaggaagaaaatatactttttgagccaaatcaaaactcaatcactgtaaccatacccaaagagggaagatggttggtttcttataaaaatgaaaagcaacaagtagttagcgttgatggtcataacgttgtcagtgttgaatacattcaaaaattacaacgtgactctaatgcgcttattgagttactgcaaaacttccgtctacgcacccaagttatgcaaggtgagaaaagcggagatattttaaacactccgttaattgcataa

SEQ ID NO: 297193 - DNA, 810 bp, Proteus mirabilis
gtgtgggctgctgtaattgttctcgtcttggtttgtggctataactatgtagataatcatttgccgtcaagatataaactgaataattctgttggttggaacgcgtacttttttgtagcgctcaaaggcggtgagtttttaatacaagggctgatggcatctgttgtggttgccattggcctttatattattatgtatatattgaatgcgccatcttatctttttggttggtatgagcctttcacatttgtagactctattttcaatatcagagtttctggtatgagtttttggactatcttgtggttatcttttactgttttgatatctatcggaaagactgctgatgttaaaaaaagaaatcaatccctacaaaagagaatggaagactttagggaagtagcaaaagtttacgccattgaaagtttgctactggagtcatttgaaagaatggatgatggcttactggtttttgtgactctcaagtctagaaaggtttatgttggaatggttgatggcatcaggtttgaaggaatggatatcaatacgctagtgttaataccgttcatgtcaggatatagagagaaagatacattaacattccatgttgagcacaactacacagatcactacgcgcaacaaggaataaacttcagctcagagccgttatcagtattccagtttagacatgtcttaccttatgagcaaatagagtcattttcgttatttaacgtcaacacatacaatgtatttcaagaagtagcaaaagaaaaagagataaaaaagaaatcagaaacagattcaaactaa

SEQ ID NO: 297194 - DNA, 234 bp, Proteus mirabilis
atgaaaaagttaattcgagaatttcttcgtgtaattctctcagttgaaaaaataaccaatccaattattggtggtaacgatcagaaatctaaagacgaaaaagaggctttagacaataaagataatttctttgttggtcgtgatggttcgatatcactaaatcctaacagtatagttgtccagaaggcttttaaagacaacatagaaaaattacagtcaacaaaagggcggtaa

SEQ ID NO: 297195 - DNA, 693 bp, Proteus mirabilis
atgacgcctattttagaaatcggtgagatggttatctctactgataaaaaggattacttatttagaccatcgttcatcaatatgacaagaatcggtgagcctaaacagattgtgagtgcatacggtcaattaaatggtgctgaggtgcaagagttaattgcacgcgccgtaatgagctacagggttattcctgagtggttaataaaagcgattagcaagccgacatatggacgcaatatcctacaaactgcaatgatagtgatgcaggcgtgttgtgatgatgattgttctgaaatcattggcgagtggaagtcaggtaaacgtggcattgtctataaaaacggcaagatgccaatcgctgacattatcgtcattgctcgagaattattcactcacggaattatcggtaaagcgaagatccgtaaacttcaacgcaatgaaggtaaaaacgaattctcagatgagtttatggcaattgattatatcagttcagctcgtgcgcactttggtatgaatcgagaggaagccgagcagctaaccatgactgaatttcagatgatgctcaaagctaaataccctgacgagaaaggatttactaaagaagaatacgacaacatcatgaagcaagatgataagcgtaatgatgagctgatcagtggtaaacgccggttggtgagtaggaagagaggataa

SEQ ID NO: 297196 - DNA, 756 bp, Proteus mirabilis; identical to SEQ ID NO: 294419

SEQ ID NO: 297197 - DNA, 246 bp, Proteus mirabilis
atgtacgcacttaaattaattactgaacgagaaggccgtaaagtagaagaagtacactgcttgggagaaatgtaccgcttggaattttatcctgaacctgaaaataaggatatcgtggcgcgggttgaacacacaaagaaagacgctatcccatcatttgatattaaacgaacagattatgcttacattacaacgatagtcggcgatacggttcgggttatcagtcgcggattaaaatcaaactaa

SEQ ID NO: 297198 - DNA, 432 bp, Proteus mirabilis
atgaataatgaatcgcgttgtgttttttctgaaggcagtgtgctattacctgatggctacaaagaacaaactatcaatattctgatttcacctactggtcatgcggtcaatatctcacgagatgataaagcaaaagacctatcctttgaagagtatattcttaatcaaaaagcactgttacaacgttcattaaaagagtggcaactcttagaagaaaaaccctccatgctggggcaagatctgatccaaggatatttaatcagctctcgctatcgccccaacaaaaaacaacaagtttatcaaatacaggccgtttatccccttactgatactcaagttcttatatttaccatgtcctccccacacgcttttaatgatacacaatggacatggatgaacaccttgctatcgagttttcaaccaaggggataa

SEQ ID NO: 297199 - DNA, 3834 bp, Proteus mirabilis
atgttagaggcggcaagggttggagatattatcggtcactcaaaatcgatgtgggggatgcttgtcggtaccctattaggagctgctatcgccatcggtggcgccatgatttctggtgtattaatgggtgcgggtattgctgcaagctgcattggtattggcgtgcttgccattggtgcttccatcgccgtcggttacggaactaccctattagccgactgggttcgggataaatgtgttgaaacaggttcaaaatctttaagcccctgtggggaaatccttgacggctccaaaaatgttcgtattaacggcaaacctgccgcgatgtctacccgtagcaacgtcaaatgtgataaagaaaacagtgaacgccaaatcgctcaaggctccggtagtgtctatatcaacggttttccagcctctcgggtcggcgataaaaccacctgtgatgcgactatcatggaaggctcccccaatgtccggattggcggcggaacccaagcaaccgaagatattgaacctgaaattccctcttgggttaccaccgcatccgatctcacgatgttatttgccggtttcctaagttttggttcagcggcagccaaaggccccggcgcagtagcgaagttgtggagcaaattaccgggtagtgccaaaataagtcgctttgcttgtcgttatggaaaaatttttactgggcttagtctcgctattccggccattggcatcttaacccgccctgttgaagtgattggcggacaaaaaatcctcaatgacgaagatgaattggattttagctatgaggcggaattaccactttattggcaacgcaattacttaagtagctattgctatgagggtgcactcggtcgaggttggagtttcttttgggaaagccagctaattaaaagcgaagatggctttgtttggcaaaatctatccggtgatatccttccatttcctgacattccactcggacaccgtaactttaacgaagctgctcaaggctggatcatccaccatgaggatgacagttggacgtttcaagatgctggtgagctacgctatcattatcccccttttgatgacaaaggttatagtcgtttaagtcatatcgttgataatgtgggaaacgagcagcggtttcattacaacgagcatcaccaactgatccatattacgggatgtggtgatctcaatatcgagtgtgaatatcaatcttttcaacttgctgaaaagaccgtatcacgtcttactgcagtctatcaagtaagcccccatcagatacgccgtcgtctatttgcttatttttacaacgaaagtgcccaattaatacgtgttgagcaacagacaaatcacccttatcgccaatttggatggactgatgccggtgttatggcgtggcatagcgataaatatggcttgcgcagtgaataccgctgggcactttcagaagataatctttggcgagtgattgaaaacaaaaccagcgaaggcgaaagctatcgtcttgaatatgatgatatcaacctcacacgaaccgcttattggcacgatggttcaacctcattttggcaacttaatcatgatcaccaaattattcattataccgaccgtacaggcattaaaacggcgctaatttgggatgagtttggattaccttgcggttgtcgcaatgcgttgggtcatacacatcttagtgaatgggacgcattgggccgactactcagcataacggatggtaatggtaaccaaacgcgttggcaatatcagaatgaacgcgagcgccttatcactgtattttggccggataacacagagtcgcgtttagcgtatgacagtttggggcgactgattaaggaaatttctccccttcatcagatcaccaaataccgctatgactttaaaaccacattgcgccccactatacgcattgatgccaagcaaggacgcagtgagcttctctggaacaaacgtgggcaattactgcgccatactgattgctcaggcaaacaacatatttggtgttatgatgatgaaggccgtgttgtttctcaaaccaacgctttacaggaagccaccgagtaccagtacaatgaggcgggacacctcactcgcatcatattgcccgataattctaccgtgcaactggcatggaatgcagcaggattacttactcatcatcaacgcaatgacaataccccgcgtcaatggcaatacaacgcctttggtcgtgtcaccacagaaattgataaactcgctcggcatatccactaccattacaatgcacaaggtgcattaatttcaattgaaaatgccaatggcgggcgttatctcctcaatcgtgatgccgaagatcggttagtcgaagaaatacgtcctgatgagacgctactccaatacacctataacgtcgctgggcgactggttgaagaagctcacttaggcgaccgagtcttcacatccgcaccacgcacaatattactcgactatgatgcggcggggaaccttgccaaacgagagactttaactgatcgctatcaatatcaatgggatagtatgaaccgcctattggtcgccagcaaacaacctaatcaacttggtcttgaaatgggtttgcaagcgaatcaagtccattttacctacgatgcacttggccgcattactcgtgaacaaacgggcgacgatatcgtcgaatttaattatgatgaactcaataacctaagccgtctgacgttacctcaaggtgacagcctcaactggctctattacggctccggacatgccactgccatcaaccaccttattgacggtcgctcacagttaattactgaatttgaccgtgacgacctacaccgtgaaatcagtcgaactcaaggagagctcacccaatatcggcaatacgataaactggggcgaaccattagcactttcagctctcgtgataaacagcacccgttaaatggcattaccttatggcgtaagtggttttatgatccccaagataatcttggcgccatggaagacacctatcgaggttgggtagaatacctgtatgactcagagcaacgtttaaaaaaagtcaccagtagtgaaaaccttgataccatgctgttttacgatcgcgcggataatctactcgaacgcccacaatccgaaatggatgctgaacactcccctactttagaactaagtccccaaggggataagctacgtcaatttcaagggtggcactatcagtatgatgcctatggtaatgttattgctcgccgttaccgtaaccaatcaccacaaacctatgcttatgatggtgataatcgtctggttatcgctcataatcaaggcataaaagcccaataccactacgatgctctgggccgtcgtattcacaaaaccgttgaaaaccgagaaagtggccaagttaaacgacaagagacgcattttatttggcaagggctacggttactgcaagagcaggatctcaataccggtaaacaccaaacttattgctacgaagagcacggcagttatacccctcttgccgttatcgtgaaacaatccagtggttttcattattactggcaccactgcgatattaacagcgccccacttgaagtcaccaatgcacaaggcaatacgctatggtcagggaaatatgaacgctttggttttgttcgcaatagcccattaagtttctactctgaccctgaacgcgtgatggcctcctttgagcaaaacttacgctatgccggacaatattttgacaatgacaaatttgtcgggaacaaatttgaacagcgcttgcgctggcccgtagggcgagtatcaggatga

SEQ ID NO: 297200 - DNA, 309 bp, Proteus mirabilis
atggaaacttcaaaaaaaaatgttaagatttattggacaccagtgcaacaaggtggaaaaaaatcactccccctgaatttaaaatattatgtaatcactgaaccaatgagaggtaaaagtggtgatatatcatcttggtcagtagtgctaaatattaaaagtaacgaacaagtcgattcctaccaaagaataggttcaggtgaagcgtattttttaatggaagatgccccaagttttttactcaccccgggatttatcatgaacgtttatgaaggacctaaactagttggtgaagttgaagttctataa

SEQ ID NO: 297201 - DNA, 549 bp, Proteus mirabilis
atggccattaagaaaaacgaactatactcctcactatgggccagttgcgacgaattacgcggtgggatggatgccagccagtacaaagactatgtactgaccatgctgtttatgaagtatgtatctgataagtataaaggcgacccatacggtatgattgtcgtaccccaaggtgccagctttgatgatgtggttgcgcttaaaggcgataaagaaatcggcgataaaataaacaaaatcatcagtgcgttagccgaagaaaacgatctcaaaagtgtcatcgatgtcgccgattttaacgacgaagataaactaggaaaaggcaaagagatgattgaccacctttccaagctgataggcatatttgaagggctagatctctcttccaaccgcgcggatggtgacgatttattgggtgatgcttacgaatacctaatgcgtcactttgcgactgagtcaggtaagtccaaagaccagttttacaccccatccgaagtttcacgcattctttcgaaagtgattggtattgatagtaataccccgcaatag

SEQ ID NO: 297202 - DNA, 405 bp, Proteus mirabilis
atgctggaattgataaaaaagaaataccctacagcgatttgttggtctttcggggataatccgcagcttgctgatgaacttgcacaacttgtcgttgaaagaaaaaaaacagcaacatgtagctcattaagtggtttttttagtgatccagtcacgccaacaattggtggttacaatattattttaaatagtcatggggttcctatttgtgttatcagaacacgctctttaacattggtacgtttttctgaagtcacagaacagttagcgcgtaaagaaggtgagggtgatctaagcttgtcatattggcaacaaggacataaagaattctttatgcgagaaggcacctactctccagatatggaattaatatttgaagaatttgagttaatagaggttttttag

SEQ ID NO: 297203 - DNA, 303 bp, Proteus mirabilis
  misc_feature (255)..(264): n is a, c, g, or t
gtgtgttcgggtcaacattcttgtcatgaagaacaacatgagcaaatattgtgccctcagtgcgatctggtagtgagtgttcctgaattagcccaaggaaccaaggcgacctgtccacgttgtcacactttgctaacagcacgttggcgacaacctttttatcagcctgtagccctggcgattagtgcattatttatgttgttaatggcttgccaatttacttttgtcagtatggaagtggcagggatttccaannnnnnnnnngtatggaagtggcaggaattaccaataacattactttaa

SEQ ID NO: 297204 - DNA, 2115 bp, Proteus mirabilis
atgcgctctctgtttgccagcacaggccgaggtctggaagaattattaaaaactgaacttgaacaccttggtgcccagtcttgccagattacgcaaggtggtgtctatttccgtgctgatgataaaaccatgtatcagtctttgctctggagccgtttagcttctcgcatcatgcttccgctaaatgaatttaatgtctacagtgatctagatttataccttggtgtgcaagcaattgattggagcgaagtatttacagttaatcatacttttgctattcactttaatggcactaatgatgtgatccgtaatagccaatatggtgcattaaaagcgaaagatgctatcgtcgattcattccaacgtaaaatagggcaacgaccggatgttgctaagcaatcaccggatattcgtttaactatacatctacataaagaaaaagcatcattatctttagatctcagtggcgatggattacatcaacgtggttatcgtgacttaacagggcaagcaccgctaaaagagaatctagccgcagcgattattatgcgttcaggttggaaaaccgatacaccattaattgatcctatgtgtggctcaggtactttacttattgaagcagcaatgatggcgacggattgtgctcccgctttaaatcgagtccattgggggttccgtcattggttaggacataatgaagcgctatggaaagaagtcactcatgaagcatttgcccgcttccgtgaaggtaaaaagaatactcaagcgcgtttttatggtttcgatgtggataaacgtgtattagatatggcaagagccaacgcacgtcgtgcggatgtggccgatttaattacttttacccaaggtgatgcagcaaaactgactaatccagtatccacgggtgttaaagggacgattattagtaacccgccttatggtgaacgtttagaaagtgaacccgcactcattgccttacatagccagttaggacgagcggtaaaagcccatttcccaggatggcgattatcactttttagtgcttctcctgaattgttaagctgtattcagttacgtgctgagcgtgaatttaaagctaaaaatggtccgttagattgtgtacaaaaaaactatttattatcagaaacaccttcgacgattaatacacgactggcggaagattttgctaaccgtttacgtaaaaatgagaaaaaactcgcaaaatgggcaaaacaacagcaaattgagtgttatcgcttatatgatgctgatttaccagaatataatgttgcggtagatcgctatggcgaaaaagtggtgatccaagagtatgcacctccaaaaaccattaatgaacataaagcacgccagcgtttatttgatgtgattagtgccaccatggaggttttggcattacgctctgatcaactaattttaaaaactcgtcaacgccaaaaaggtaaacaacaatatgaaaaaatggcagagaagggggatttctttttagttgatgagtttggtgccaaattctgggtgaatttaaccgactacctcgatactggactgtttttagatcaccgcattgcacgcaaaatgttaggtgaaatgagcaaaggaaaagactttttaaatctctttgcttataccggtagcgcgtcagtccatgctgggttggggggagctaaaagtaccacaacagtagatatgtcacggacttatcttgaatgggctgagaaaaactttcaagcaaatggattatcaggtagacaacatcgtttaatgcaggcggattgcttacagtggctaagccaaagtaatgaacagtttgatgtgatttttatcgatcctccgacgttctctaattcaaaacgcatggaaaatacctttgatgtacaacgtgatcatattgaattaatgaaacatctaaagcgtttattaagaaaaggcggaacaattatgttctcaaataataaacgtggtttcaaaatggatcatgaagcattagcgaatattgggttaacagcaaaagagataacacaaaaaacgttatcgcaagattttgcacgtaaccgccaaatccacaattgctggctattaaatcatgctggtgaggaataa

SEQ ID NO: 297205 - DNA, 552 bp, Proteus mirabilis
gtgataataaaacccgatgatcgctggcgttggtattttgatgacgagcaacaaaagttgatgctcgatttagctaatggaatgatttttcgtagtcgttttccaagtaaaatgctaagtgcaactgctcatcaatcatcaccttttactgttgatgatgctgctctttattatggatatgatgagcaaatccgccagattgatatgccttctgagtcgcgagcagaattagcgttaaacgcattaatagcccatcgttttttaaagccattaatgcctaagagctggtattttgaagtgagtcattcatcaacccgcccttatttagctcaagtggtggaagccgcattgaaagatagcaatgaaaaagtgctttttttagtggcggaagtgggagagcaagcctgtttatgcttattagcccagcctcagttagcattatttgatagaacactaacgttttgtgatccactaaaaatcatgaatgatcggttaagtgaatatcataaacagtctgagccaagatcgtttttgtacgaaaaagtcatctaa

SEQ ID NO: 297206 - DNA, 963 bp, Proteus mirabilis
atggagtatataactaataaacattgggccaaatatatcaagggatatatttttactggttgtgcaatccgaaataaaaatattgtgtacttttgtttgcgcaaagatattccatacgaaaaggctcgaaacttatggaacagtgaaatacctagtatgttattagctatctatttagatacaccagtcacacctacagggtatgcgagtattactggatttgataatcctaaagtaggtgtttgtttaaaaccgaaagaacaagggatgcttgcatctagaggtgatgatggtgttgtggtgtgtgtaggcagtggtgctaatttgccaccagaaaaagttatggatggtgactatgcaaaccctaaaaatattaaatgtgttggtggatatgcttattatgttggctctgcacgcaaaatttataaacgtgtggatattgggaaatggcagagaattcaacatgggataccaggaggagaaaccaatacagatatggggttcactgatctcgatggtttctctgaacaggatatgtatgccgttggcggtgcaggtgatgtttggcattataatggcgaaatctggatcccctgtggttttccctctaatgagcaattaagtgcagttttatgtgcccctgatggttatgtgtatattggcggtgaagggggcagtttatggcgagggcgtgaataccaatgggaaaaactttatcacggtagttcggctattttactgaaccagttgcgttggtttgaagataaagtatgggcatgtgatgactatcgcttacagtgttggaatggtaaagaaatggtccgtcccaaggatggtgataaaaatgttatcgcctcaggtcatatggatgtccgcgatgggattttagttgtagctgatgattataatgttgatctgtatgatggaaccgcttggcataagatagtgagaccttataaataa

SEQ ID NO: 297207 - DNA, 405 bp, Proteus mirabilis
atgagcgaatctttaaaaatattaaataacatccgtactcttcgtgcacaggcaagagaaacttctttagaaactttagaagaaatgcttgagaaacttgaagtcgttgttaatgaacgccgcgaagaagaacaagcaatgcaagctgaaattgaagaacgtcagcaaaaattacaaaaataccgtgagctattaattgccgatggtattgatccaactgacctgcttgaagctgctggcgcaagcaaaactggtcgtgctaaacgtgcagcacgtcctgctaaatattcatacgttgatgataatggtgaaactaaaacttggacaggccaaggccgtacaccagctgtaatcaaacgtgcaattgaagaagaaggcaaatctttagaagatttccttatctaa

SEQ ID NO: 297208 - DNA, 1020 bp, Proteus mirabilis
atgaataaagccttagtcggtaaaaaaattctcattattgatgatgaggttgtatttcgcaccatgctcactgagtatttttcacacgaaaaggcttgcgtttatgcgactgacaatggtagccaagcattgttgttacttgaagagggactaagacctgatcttattttatgtgatatcagaatgcctgttatgaatgggccgacttttttatgtcatctagagcagcgtcattggtctttccctgttattgctatttcatgtactgacaacatggctgaaattgatgatatgttgcgctttggcgctcaggacgtttttcttaagcccgtaactaatttagctaagttaaaacagaaggtcattgaagtattatgtccaggtttttttgagtctgaattaattgcaaggggacaacttggacctctttggaataacttacgagaacagcctcattatattcaatcctttgttaaacagatgcaaccgcaagttaaacaaattgtcgcaggatataatgttaattatcgtcaattaaatgatgcatcccaaatggggttgttatttgatatagcgactttatcaaaagatcaaatcattttttactgtgttgacgtctctaatgatgaagaaaatgggttactcgttgcgctgcttttaagggtggtttttaatcgtttcctaaaagctactgagaaaagacgcttcttacctagtatgtataacatattgaataaaatcaataaaatgcttgaggatatgggggtgagaggatcattcccgctgattttaggttattaccacaccaaggaaaaaaatatattattagcgtcagcaggactacgagctgaaataaaaacagagaataaaaaatatgttttaaatagtggtatacctttaggaacactacactctttatatattaaccaaataaagtgtgtgggaatagattggcaatgtaaaatttggaatcagcaccataaaattaatttaatgttctcacctatacataaacgttaa

SEQ ID NO: 297209 - DNA, 306 bp, Proteus mirabilis
atgagaaaatttcacttaattatcattatgatttgttttcatttagttagcattcaagctgctaatgcagagtcaatcttaattagtacagctaagttagtttgtgaagataaagaaactccagaattagtgaaaaagtgcaagttgatggtatacaaaattggtgagtcttcatttaatttaggcaaggcaacagcggcttgtgagttagccaaaaaaaataataaagattatgatggtgatcaaaaacgggcatgtgaagaaattttcaatatggctaaggattttttaaccataacatattga

SEQ ID NO: 297210 - DNA, 597 bp, Proteus mirabilis
atgtctattcttgaatggccaaaagcggtgatccccatacaggaaaactggcaattattgagtaacagcaaaacctttacctcgccatttaatggaagtagccagacggtacgctttccaggaagtcgttggcgttgtgagctgacatttaataatttaaatgaagagaaatcgcgccagttagaagcgctagtggcttcattggatggcatgtcgggacgggtcaaaatatcaagctggataagaaaagggcgttatgggtatggttcgcctcgtattgcaataccgagtcaattgggtaatcggctagaaacaaaggactggaagcgcaatatgcgcgtattacagcaaggggatcgcttaactgtgggtaatgaactcaaaatggtggtggcggatgtggtcagtgataatcaaggacatgccattattcttatttcgccgatgttaagaacatcacctaccgtcaatgaaatgctcgaggttgagcgtccttttggggtttttcggctcgttgataatgaacagggtaaatttcagcatcgtcgcttggggtatacctatatcacgttatcttttgaggaggtgttgtactaa

SEQ ID NO: 297211 - DNA, 3276 bp, Proteus mirabilis
atggcgggagcattaggtagattaaatattgatttgacgctgaatacggcaaatttcacaaatgcgatcaaccgtagccagcgccaaacagaacaattcgggcaaagtatttgcgtcagtcttcaagctatcaccgtacaacaagagcgaatggtatcgcaaaccgcaaaatcctcggcgctctttactcgttttgcgagcgtcgcagcaagtgcattatctgtacggcaagtgattaattatgctgatagttggacggaattacagaatcgactgaaattagtcacagatagcactcaatcgctaaacagagcgaccaatgatgtttataccattgcccaaaaaacctatcaatcattgaatgccacagcacaagtttatcaacgttttgcggataatgccgaccgtttaggcttaagtcagcaaaaagtggccgaactcacggaaactgtctcaaaagccgtggcgatttcaggcgcgagtgccaccgcagcccaagcggcattaactcaatttggtcaagcattagcctcgggtcagttacgtggcgaagagctaaattcagtgatggagcaaacccctgcgttagcgaaagccatcgctgacggaatgggtgtcagtgtgggtgaactaaggaagaaagcccaagacggtgaaatgacgatagagaaagtcattcaagccttagaacgtgcagctgacagtgtggataaaaaatttgctaccagcgtgacaacggttagccaaggtttcactaatcttcaatcggcgataacaaaatttatcggtgaagcgaatcaaggtacaggtgcgactcagctttttaccaaagggatgaccactcttaccgataatctatcgttagtcgctaaagtggttgaagggatcgccgtcacggcattggtagcaaaactttctcaatggacgaaagccacttatctgaaaaatcagacaacgttgaatgaagccaaagccacattacagagtgcagaggcaaacagtgtggcagcaaccagtgccgtgaggaaggcatgggcagataaagaagccgccacatcggcgctcaatagagccaaaatggaatatcaagttgctagaggcactaacgcggaaaaaatcgcactcgataaccttatcgccacaaagtcactcgcaagaacagcctctttaaactatacacaggcattaaccgcagaaaacgttgctcaacgtgcattaacgaccgctcggcgtcaatcaacggtggcggggcgagcgctcaacagtgttatgggattagcgggtggccctattggattagtgttgaccggtgtggcggcattgggcatgggactgtatgaatacagcgaaaatgtcaaacaagccaaactcgaatcgattgaatttgccaattctcttgatacatcaacagaagcgttaaacaaaatgagcaatgccacgttagtggcgaatttaagcaaagtttcatcgggcattaacgcgcaattggagaaaatcgaggaacttaaacaacaggttatttccttacaaggtctatcaaaatacagcgttgagagtgaaaaggcgtttactgaacaaggtgtgggggatttataccttaaacgagtagctgaaaagcaaaaagagcttgatgctgcgatggggacatatgcagagcaagttaataacttagagcgtcagcgagccaatatgcaaaatatgttggcgacactcaaagaaaaagtgggcgatcaagcccctgaatatagacgctatgccaccgaattacaaaatgttgatgccgttatcaattcacttaaggcgagtttaaagagtttaggcattgaatatgaatcactcattgatatcacgcttcaggcgacaaatagccaagtgaatgccgccacggcgattgctaaacagattgatgaatcgattgaaaaatcgcaacgttcagtggcaaaagcgcaagccacagggaaggcattagcgaaattaaatgcagaagatgtattggcttcacgcaaaattacgccagatatgcaaggctacgataaagccttacaagcggaaattgaggcacaactggcacagcaagccaaacggacgtataagcccagccataaatcaaccattgattatgccaaacagtacaccaaaatcttgacggaattagaggaaaaacaagcctcactgattgcggatgggcaaagtattcagcggtatggcactacctcttcctttaatgaatacacatccgccttagccgatatcaaacagaataaagataagtttgatgccatcttaaaaatcgatcccaacgccattgagacgatcaaagaaaaagcgaaagccattgatgacttagcgcgtgccaattcggtcgcgcaatttgcttatgatcgcggtaaagaaattgagcagatgcaatttgaaaccaccctgataggaaaatcacgcgcagagcaagaaaagcttaatgcccttcgtcagattgatgtgctgtatcagcaagccagtgtggatttaggtgagaaagagctggcgaacttacaacgtaatgttgaactcactaaacagcagattgaggaagaactgaggaagcgagaggccatgaaaggtgatccgatggtgggattaaaacaaggcttatcggatttcagtgagtcagccatggatgtgatggagaacgtcagaaacgtcactaccaatgcgcttaataatatgtctgatgcgttagccgattttgctttaacggggaaaggaagctttaaagattttgccaatgcggtgatctccgatatcactcgaatggtgatgaaaatgctggttttcaaagccattgaagcaggcgggcaggcaatgggctttgatatgggatggatgagcaaagggcatgcttatggtggctatacggggcatggcgggaaattcgaacctaaagggattgtacatggtggcgagtttgtttttaccaaagaagcgacggctaaattgggtgtcggcaatctctatcgcttaatgcatgcggcgcaaggttatgcttcggggggctttgtgggggcggtcgcagggcgaataccgattacaccgcaaccgacgttagcccgtgcaggcggggtgcaaatgacggtcgttaatcatattacggtgacaggaaatggtgacgctgtacttgctcaagcaatgaaagaagccgcacaacaagggacagaagcaggcgcacagaaagctcacgcgatgatgttacaagactttcaaagtaatggcgcagcacgcagaacattaggagtttaa

SEQ ID NO: 297212 - DNA, 192 bp, Proteus mirabilis
atgagacttattctggcgttattactaccttggttacaatttttcacgattggtcgcccatttgctggcatcttctgccttatcctacaaatcaccttaattggctggatcccagcggctatctggtcggtttatgccctttctcaatacaatacggataaaaaaattgagaaaatgtctcgcggtggttaa

SEQ ID NO: 297213 - DNA, 666 bp, Proteus mirabilis
atgacaaagccaaagaaccataaagcgacgcctttcctcggcacgaagatctttgtgcaaacaggcttaggagaggcgatgaccgtgaccgaagcgacgttatcacccgcaaccattactatcgccaataataagctgaaagccgatgacatgattatgttatcgggactcggggagttagatggacgttttcctgttgcacaggttgatggcaacaaagtgaccctgtgcgacgaagtggattggagtgataaaacgctacccactgatttttcaagtgctaaggcacaacgtattcaatggtctaataacttttgtgcggtaaaaagtttcagcaaagacggttcgacaaccgaacaaatcgatgtcaccaccatttgcagtgatggcaaggaatatgaatccggcgatacggaatacggctcaattaaattgacctttttcttacgttatagctccagtgaggtgcagcgactcttgcgtaaatatgaaaacagcaaagaaaaatttgcggtgaaaatggtcttaacacgagatgagggctccatgttttattacggctccgtcgaaacgggcatgaatattgatggcagtgtaggacaaatgatggattcggggatctcgattaaattgtctggccgtgattatttgaatgcgaagaaataa

SEQ ID NO: 297214 - DNA, 342 bp, Proteus mirabilis
atgatacagcaattaaaagagaccctttcaccgctggttgatggaagggttttttttcaggtattacctgaaggcaaagggcattatcccgccattgtgatccagtttgccagcatcacgcctaacagtgcgctggaggatacggatttagacaactatcgtgtgcaacttgatgtgtatgcgccacagccacaaccccttatggtcttgcgtaaaaaaattgaggctcagattgttgaagcgatcccattcgcacaacgggtgaatgcggtctttgggtatgaagcggatgtcaaattgcatcggcttgttcttgaattaatgatttcatcagataaataa

SEQ ID NO: 297215 - DNA, 471 bp, Proteus mirabilis
atgggtgagattaaaatcagtggattgtctgaactcgctcaacgaatgcaagacattgcccgtaaaaccagaaatcaaagcgcgcgtaaggcgatgaatgcaggtgcttcggcgttaaaagaagaaatcaaacatcgagtgcctatccttaaggaaacggtgcctcatcgacgcaaaggcactatcaagcgcaatattcgttctaaaacgaaagtacaacgcaatgggcaagtcaaaacgcgcatttgggtgaaatcattatcgggtaaaaaggtgtctgcctttaaacaagcaacggggaaaagtgcagcattgaacccaaatgatccgttttattggtggtttgttgagtttggtactgccaagatgcccgcacaaccgtttatgcgccccagctttgaagcgaaaaaggaagcgacggctaaagtgattgttcaaacacttaaagaggatattgaaaaagcaaggtag

SEQ ID NO: 297216 - DNA, 330 bp, Proteus mirabilis
atggatccgggacgattacgccattctattaatattcaaaaaccagtattagcgcctgatgccatcagtggcaatgatgtgatttggacggatcatgcgacaaaagtacgtgcagcgatcatgccttatcaagggcgggaatattttcaagcccagcaagtacaaagtgaggccacaacacgaattcttattcgctatatcgctgatattgatacttcgatgcgtattgtatggggtaagcgaatatttaatattatttcgattattgacccttatgagcgtcatcgtgagcttcaattaatgtgcaaagagggcgtgaatgatgggtga

SEQ ID NO: 297217 - DNA, 300 bp, Proteus mirabilis
atgaatatcttagatgtcattcctctttctttattaaaacagcatctcgaatacagcggtgatgatcgtgatgagcagattatattttatgcacaaagcgcattaaattattgtttgagatggtgtgatgaaccggcttggaaatcacctgatgatatcccttatgaagtgaaatctgccatgcttttggtgctgggggatatgtttgaacatcgaaccagccaaagtgaaattctgttatatgaaaataaagcagtagaacgattgttactgctttgtcgaaattggcgaggtagttaa

SEQ ID NO: 297218 - DNA, 1167 bp, Proteus mirabilis
atgtctgacttagctattatccaagaagccatcgaaggatcacaaaaaaaggtgcaagagctcttcgatgcacagaagaaagaaattgaagctactggcgtagtttcaaagcaattacaaacagatttagccttagtccaagaggaattaaaaaaagccggtgaacgtctgtttgatttagagcagaaaggggcaacgagtgctgatgatcctaatgcgaaaaaagatttttctgagcgagcagcagaagtgctgacaaaatcatggaatgggagtcaggcttcttatgaagtgaaaacttttaataaatcattaggcagtgatgcgagttcagccggtgttctcattcagccgatgcaagtaccgggtattattatgccggggatgcgtcgtttagttatccgcgatttattagcacaaggccgaatttccagtaactcactggaatatgtacgcgaaaaattgtttaccaatagcgcggcacccgtgaaagaaaaggcacaaaaaccagaatctaatctgacatttgaaaaacaaacggcaaatgtgatcactattgctcattggatccaagcgtctcgccaagtgatggatgatgctgtgcagttacagtcttacgttaataaccgcttattgtatggcttagcattagtggaagaggagcaattactcaatggtgacggtactgcggataatttgacgggaattaaccatgttgccactgcctatgataccacattgagtgctacgggcgacacgcatgctgacctgattgctcatgccatttatcaggtgacagaatctgaatttagcgcctctggtattattttaaatcctcgtgattggcatgccattgcgttaatgaaagacaaagaagggcgttatatttttggtggcccacaagcgtttacttcaaatgtaatgtggggattacctgttgttccaacaaaagcacaaaaacaaggtgagtttactgttggtgcatttgatttggcgtctcaagtatgggatcgaatgaatgcagttatcgaagtgagtcgagaagatcgtgataactttgtgaaaaatatgctgaccattttgtgtgaagaacgtttagcattagcccattatcgccctcaagccttaattaaaggaactttcccaacgtctggaagaagtgcttaa

SEQ ID NO: 297219 - DNA, 669 bp, Proteus mirabilis
atgcctgatattagaaaaacactgaattttgatgaagcggaaatcaaatttacgggagatggcacacaaggcgttttcgaaggttatgcctccgtatttagtcatcaagatctcgatggtgacattattttacccggtgcatttaagcatgttttagataagcaaaaacaaaaagtcgctatgttttataaccatcgagtctgggagcttcctgtggggaagtgggagtacatggaggaagatcaaaaagggttacgtgtaagaggacaactgacgcccggtcatagtgcggctcaagatctaaaagcggcaatgaagcatggcacggttgacgggctttctatcggattcggttgtctgcgtaatgattttgagcgaacaccttcaggtcgtatttttaaaaacatctccctgttacgtgaaatcagtatttgtacatttcccgctaatgaccaagcacaggtttcatcactcaagagcatcgatgggttattaacgatccgagatattgaggattggctgagagagtcagccggtttatcaaaatcagaagcagtcggttttatttcccgcttcaaatccgctattcggagtgagtccgatgacgctcaacaatccctagtcgcatccattgttaaccaaattaatgcatttaatctgaaaggatag

SEQ ID NO: 297220 - DNA, 1269 bp, Proteus mirabilis
atgacagataaacaatattcaatcgatttgcgcactaatcatggttggtttgcgcgtctggcttccttcttcgttgggggaagactcgtgacacctgaacaaggttcacaatcaggcgttatctcagcgcaaggctcacttggtgattcttctgtaaatgatgagcgaatactccaaatatcaacggtttggcgttgtgttagcttaatttcgacgttaacggcttgtttgccactggatgtgttcgaaacggataaacagggaaatagaaccaaagtcgatttaagtcacccattggctcgattactgcgatattcgcccaatcaatatatgacggctcaagaattccgagaggcaatgactatgcagctttgcttttatggtaatgctttcgcgttgattgagcgaaataaagtcggtgatgtgatcagcttgcttcctctgttgtctgccaatatggatgtgcgcatggaggggaagaatattatctataaatatcagcgtgatcatgaatttgcgaaatttaaacaacatgaaatttttcatttaaaagggtttggttttaatgggttagttggattgtcgcctattgcttatgcatgtaagacagcaagcacggccgttgcgatggaagatcaacaacgtgagttttatgccaatggggctaagtctcctaaaattctaacaacgggtgataaggtattaaataaagagcaacgtagccaacttgaagagaatttcaaagaaattgcgggtggccccgttaaaaaacgattgtggatcttagaagggggatttcaagcacaagatattggcgttagtcctcaagatgcagaaacaatgtcttcccgaaaatttcaagtcagtgaattagcgcgtttctttggtgttccaccgcacttagtcggtgatgttgaaaaatcaacaagctggggaacaggtattgaacaacaaaacttaggctttcttcaatataccttacaaccctatatctcccgatgggaaaattgcattgcgcgttggcttctaaaaccacccgaagtgggaaaataccatgctgaacataaccttgatggattattgcgtggcgattccacttcacgcgccgcgtttatgaaagcgatgggagaatcggggctaagaaccattaatgaaatgcggcggctcgataattatcctcctcttgaaggtggagatgtcgcttaccggcaagcacaatatttaccgattaaccaactcaataaggagcctcacgaaagtggggcttaa

SEQ ID NO: 297221 - DNA, 1734 bp, Proteus mirabilis
atggtggagaagaagaggaagatccgctcaaccaatatttcggttgatcccgcaacacaatacgcgcaagacgtgcatcaaggcaaaatcttagcggggcctgatattcgtcatgcatgtgcacgtcatctcaaagatttaaacgaagccgagcaacgaggattagtctgggatgtcgaggctgtcaaaagggtgatcgattttttctcgaaagtcttaaagctcaatggcggggaacatgaaggcaaaccgtttattttattgccttggcaatgctttgtgattggctccatttttggctggaaaatgactgatggtacacggcgatttcgcattgtgtacgttgaatcaggtaaaggttcaggaaaatcaccgatggcgggtggcgttgggttgtattgtttagtcgccgacagtgaaccgcgtgctgaagtgtatgcggcagccacgaaaaaagaccaagccatggttttgtttcgtgatgcggtggcaatggttgatcaatctcccgcattaagtcagcggatcaccaaatcaggcggaacaggcaaagagtggaacttggcttatttgaaaacgagttcattctttcgcccgattagttcggatgatgggcaatcagggcctcgtccccattgtgcgttgattgatgaaattcatgagcacaaaaataataccgccgtcgagatgatgcgagcgggtacaaaaggtcggcggcaagccttgatatttatgatcaccaacagtggccatgataaaaccagtgtgtgttatgactatcatgaatacggacgaaaagtcgccgaaggaactatcgaagacgacagtttcttttcctatatttgctcactggatgaaggcgatgatccctttaaggatgagtcttgctgggggaaagccaatccatcactgggctacaccttttctgatcgctatttgcgcgagcaagtgacacaagctcgaggtatgcccgcgaaagaaagcattgtgcgtcggcttaatttttgtcagtgggtggatgccgataatccgtggattaacagtgaaacatggatgcagtgtgaaaacacgttcacattcgatgaccttcaaggtgaagagtgttatggcggactggacttatcgggaaccaaagatttaaccgcattagccttgtattttcctagtctcaaacgtctttatgtcgaattttggacacccaaagacactttattggatagagcgaaaaccgaccgagtgccttacgacttatgggtaaggcaaggttttatgcataccacgccagggaatgcggtgagatatgaatttgtggcagaacgcattgctgaaatggcgatgcacgtcagcatgagagccattgcctttgacccttatcgcattaaataccttgaacccaaactcgatgacgcgggtgtgacggttcctttaactccgcatggacaaggatattacaaagccaaagattcagggctgtggatgccacactctatcgaactgtttgaacagctcattgatgacaagaagattgagatccacaccaatccttgtttgagatggaatgctgcatccgctgtgcttgaggctgaccaaaaagataaccgcgtctttgccaagaaaaaaagcaccggtcgaatcgatggtgtggtggcctctgcaatggcgattggtgctgcggaaggtgaggttgataatggcaaccttgatgattttttctctaacccattgagtatgtga

SEQ ID NO: 297222 - DNA, 468 bp, Proteus mirabilis
atggcaggaagacgcccgaaaccgacccacttgaaggtggtcaccggtaatccgggaaaacgaaaactcaacgataaagaaccccaacctaaacgtgaaattccaagcccgcccgaacatttaacggattgggggaaaatggcgtgggcaaaattaaccttattactcgatggaatgggtgttttaaccgtggctgacacgctggcattagaacggctgtgtgatatctacgccgatattcttcaattgcgagacaccattgccattgaggggcggacatacaccacaaaaacgcaatcaggggattttttaattaaagcgaatcctgctgttgccatgttggccgatgcagatcgccgttttaaaagttatttagtcgagtttggtttaacccctgccgctcgctcgaaggtgaatatggatggtggagaagaagaggaagatccgctcaaccaatatttcggttga

SEQ ID NO: 297223 - DNA, 339 bp, Proteus mirabilis
atgaaaaaacgcaatgtctatggtggtcgctgggctaaagtgcgattagcatttctcaatgaacatccgctttgcgtcatgtgccaagagcaaggacgtattactgctgccacagtagttgaccacattactccacatcgtcttaaagaagcacttgaatcaggtgataaagaacgtatcgcaaaagctcaagccttattctgggacacaaagaactttcaaagcttatgcgaactgcatcataactcaaccaaacaacgtatcgaaaagagtggcaaagtcattggctgtaatgcggatggcattccgctcgatccgaactctcattggaataaataa

SEQ ID NO: 297224 - DNA, 462 bp, Proteus mirabilis
atgaaatacggaaaactctatgccgtcattgcgatggtaggcattattgtgggaggctattgggtgattaattggcaagctaacagaattaatctattagtagaaacaaacaaagaactaacgattgctctcgaagaacagaagtctattaatactgactatcaagcacgcataatgcgattaaatcagttggatattcaatatacgcaggagctagcgaatgctaagaatgaaattagtcacttgcgtgatattagtgagcgtcatccagagcgggtgtacatcaaagccgagtgtcccaaagtcaaaaccactccctccaccagcttggcttatgcaaccaccgcccgacctactgacaccgctatccgaaattattggttactcagagaacgaattgcagagtcagagcaaatgattaaagggttgcaggattatatcaaacaagaatgcatggaataa

SEQ ID NO: 297225 - DNA, 159 bp, Proteus mirabilis
atgtcatggaaacctttaatcatcattatcagctttattcttgcattactcattacagtcgctggtggcatttatctcttgattgataactcatgtactaaagaccaagtgagtttagaaaagcgctgtcagattgcactctcatatcatcggtactaa

SEQ ID NO: 297226 - DNA, 471 bp, Proteus mirabilis
atgtctctcaaacagaaaatagcggcggtaacaacagcaggagccacagccatcgcgttagtagtaatagcccattttgaaggtgtacgttatgagccttatcgtgatgtggcgggtgttctaacagtttgttatggacacacaggtaaagacattattcaaagtaagacatactcacaacaagaatgtgatgcgttattacaaaacgattttattaagacacaacagcaagtcgatgcattaatcaaagtaccactcgatgactacaccaaagccgctttatattcctttgcttttaatgtgggaacgaccacatttgctcgctcaacattacttaagaaactaaatgcgggtgatagagcgggtgcctgtgaagaaataaaacgttgggtatatgcgggtggaaaggtttggcgaggtcttgttagtcgtcgagaggcggagtcagtactatgtcatggaaacctttaa

SEQ ID NO: 297227 - DNA, 270 bp, Proteus mirabilis
atgcgtatggaaaaattaaccaatgttacttacggaaccgcaggcttaacggcattttttgccagtctttcattatatgaatggggatttgttatcgggatggcgttcagcatgcttcttggtttagccacttattttatgacacgccgagagcaacgaaaacgcactcaattatttgaagagcttgttcgacatgttgacccacaaaacccaactgaaaccctaaaaaggcttgctgaattaatggtgaaagcgccaaaggatatttaa

SEQ ID NO: 297228 - DNA, 252 bp, Proteus mirabilis
atgaaaattaaagaaccagatgagcttatagcggatgcggataaatatgagtcaaaagtaatgtttaaatcaatgagaatagcttggttgatatttaccattgtactacttaatttaataccaatgcttattcatggtggagtattgtcattatctaactttttgattttcaatgtgtttgttatttgtattatgttatggatatatatcagaaaaatattttatacatattccaagagaaattcacattaa

SEQ ID NO: 297229 - DNA, 429 bp, Proteus mirabilis
atgtcaaaagagataagcgaattacagtttagtcttcactatgcctcagaaacagacagtgaaaagaatacctccgccattttaacggcgaatatccatacgactgatggtgaaactcaacaactgacacaattaatttgcacgacatcttccgcaggtaaaaagcaatatcgaatcggcttgcaaaaaattagtgatgctggtgctccattgctggtggcgattgaatcctattggcgtaaaaacacacaagagagttgtgtttatttgttagagaaagcgaagcgatttattcaaggacacttacaacaaacgaatacatggatatctatgtatggtcttgtgattgtttctaatgcgtcacttgaagagcagttgcctgaggctttattaacattaattcattcaaaatatgctagtctttcttga

SEQ ID NO: 297230 - DNA, 522 bp, Proteus mirabilis
atgattgatttgtttaagttaacgaaaaaaagttctaggcatattggtatagcaatatatgttggtattatagcgggtatcttttcagctttagttaaatctggttttgaagacctaattcccccgagaacacttgaaacgacacccccgccagtcgtcttactcgaaaagcttggattaaatatagatactatgacttatcattggatgggatatagtattaattggggcggtaatggtgttcatatattattctcaatagttatcgctgtgacatattgtgttattgctgaattcttgccaaaggttaaattattacacggtatttgttttggtattggcgtttctgtttttgctcatggtttagtcgtacctctactaggattgtctggctggctttggacagcaggttatcaagcattaatttctgagtttgttggaaccgctttttggatctggtcaattgaagcgattagacaaaatttgcgttattgtttaactaaagaaaatgatgctgagtag

SEQ ID NO: 297231 - DNA, 1098 bp, Proteus mirabilis
atggcacaagtcattaataccaactatctatccctggtaactcaaaacaacctgaacaaatctcagggaactttaggaagtgcaatcgagcgtctgtcttctggtctacgtatcaacagtgcaaaagacgatgcagcgggtcaagcaattgctaaccgtttcacttcaaacgtaaatggtttaactcaagcttcacgtaatgcgaacgatggtatctctatcgctcaaacaactgaaggtgcattaaacgaaatcaacaataacttacaacgtatccgtgagttaactgttcaagcgaaaaacggtactaactctaattcagatatcacttctatccaaaacgaagtgaaagaacgtttagacgaaatcaaccgtatttctgaacaaactcagtttaacggcgtgaaagtactgagcggtgagaaatcagaaatggttatccaagttggtactaacgataatgaaactatcaaatttaacttagataaagttgataacgatacattaggtgttgctagcgataaactgtttgataccaaaacagagaaaaaaggtgttacagaagcaggtgctgcaatcgatgcgaaagatatcggtgttactggtgctacaaaatatgagggtggtacagtaaaagagtataaagtagatggtaaggtttctgctgataaggttatcttcaatgatggtactaaggattacctagtaagcaaatcagactttaaattaaaagcaggtaccgctgatacagctgagttcactggtagtaaaacaactgaattcaaagcagatgcaggtaaagacgttaaaactttaaacgttaaagatgacgctttagcaactttagacaaagctatcaataccattgatgaaagccgttctaaattaggtgcgattcaaaaccgttttgaatctactatcaacaacctgaacaacactgttaacaacttatctgcttcacgtagccgtatcttagatgctgactatgcaacagaagtttctaacatgagccgtggtcaaatcttgcaacaagcgggtacttcagtacttgctcaagcaaaccaagtaccacaaactgttctgtctctgttacgttaa

SEQ ID NO: 297232 - DNA, 723 bp, Proteus mirabilis
gtgagtgatttgtataccgccgaaggcgtgatggacaaaaatagcctctgggagcgatatgtccctttggttcgccatgaagcattacgattacaggtcaagttacctgcgagtgttgaattggatgatcttttgcaagcaggggggattggcctactgaatgccgttgagcgttatgactcaatgcaaggtgccgcctttactacttatgctgtgcaacgtattcgaggctctatgttagatgagctacgaagtcgtgattgggcgccccgcagtgtgcgccgtaatgcaagagaagtgacacaatccattcatcagttagagcaggatctaggacgaccaccatcagaacaggaagttgctgatcatttgcagattgagttagcagaataccggcagatcctattggatacaaataacagccagttgttctcttatgacgaatggcatgaaatttacggtgaaagctgtgaaccatctcaagacgaagatcacgatgacaatcctttacaaatgttattggaaagtgatattcgccaaagagtcatagacgcgatagaattgcttcccgaaagggaaaaaatggttcttaccctgtattatcaggaagaacttaatttgaaagaaataggcgcagtgcttaatgtcggggaatcccgcgtaagtcagctacacagccaagcaatcaaaaggctgcgagcacgcttaaacccagagaaatag

SEQ ID NO: 297233 - DNA, 531 bp, Proteus mirabilis; identical to SEQ ID NO: 295939

SEQ ID NO: 297234 - DNA, 3969 bp, Proteus mirabilis
atgagtagcacaacaatgggtgttagacttgatgaagaaacccgtaatagattaaaagatgctgcacaaaaattagatagaacatctcattggctaattaaacaagccatcttcaattatcttgaacaaattgaaaatgatcagctcaccctaacccctattacacaggctgagcaagatattgaagaaagcacagatcccctaacggcacattatcaaccgtttttagaatttgcagagcagatccacccacaatcggtgttacgctcggcaattacttctgcttatcgtatacctgaaacacaagcagtgcctatgctactacagcaggcaacactacctgagcatgaggctcaagccacgcataaactggcttactccattgcagaaaaattacgcaaacaaaaacagggtgttggacgctcaggtctggtacaaggcttactgcaagagttttctctctcttcccaagagggggttgccttaatgtgtttagccgaagctttattgcgtattcctgataaagcaacccgtgatgccctgatccgagataaaattagccatggcaattggcgctcgcatttagggcaaagccaatctatgtttgtcaatgccgccacttggggtctactgtttacaggcaaactcgtctctacccataacgaagagaaattatctaattctctaaatcgcattttaactaaaagtggtgaacctttagtgcgtaaaggcgttgatatggcgatgcgtttaatgggggaacaatttgtcaccggtgaaactatctcccaagcgttagccaatgcacgcaaacttgaagaaaaaggctttagatattcctatgatatgctaggagaagcggccctaacggaaaaagatgcgcaagactatttagtctcttatcaacaagccatccatgccattggtaaagcctctaatggacgaggtatttatgaaggaccggggatctccattaaactttcagcattacatccccgttatagtcgagctcaatatgatagagtgatgtcggagctttaccctcgcctactctctttaacgctacaagccaagcaatatgatattggtattaatattgatgcagaagaagcggatagactggaaatatccctcgatttattagaaaaactctgcttcgagcctgaattagcgggttggaatggtataggatttgttattcaagcctatcagaaacgctgccctttagtgattgattatattattgatttagctcgccgcagtcgccgccgtttaatgatccgtttagtaaaaggggcttactgggatagtgagattaaacgcgcgcaaatggatggactggaagattaccctgtgtatacccgtaaagtgtataccgatgtctcttaccttgcgtgtgcgaaaaaactgcttgcttcaccgaattatatttatccgcaatttgccacgcataatgcccatactttatcagccatttatcatctagcgggtcaaaattactatcctggtcaatatgaattccaatgcttacacggtatgggtgaacccctctatgcacaagttgtgggtaaaattgctgatggtaaacttggtcgcccttgtcgtatctatgcgccagtaggtactcatgaaaccctactggcttaccttgtgcgtcgattattagaaaatggtgcaaatacctcgtttgtaaatcgtatcgctgacaccaccatctccttagatgaattagttgccgatccggttaaagagatcaataaaattgcgcaagctgaaggacaaatcggactttcacatcctaaaatcccgctcccaatgcagctttatggtgatgagcgtaaaaattcaccggggattgatatgtccaatgagcatcgtttagcctcactatccagtgcattactgacctctgcgatggaaaaaattcacagccatccgctcattggtggtgagtgtaatagtgcagaagaagtgattgcaccacaatctatactcaatccggcaaatcacaccgatgtcgtcggtacagtacgtgaaacaacggccgccgaagctaattttgctttagatattgcccaagaaaatggtgaaatttggtttgcaaccccacctgcggaaagagcggcgtttttagtccgcacagcagaactgatggaacagcaaatgggtccattaatgggtgtcttagtcagagaagcgggtaaaacctatagtaatgctattgcagaagtgcgtgaggcgattgattttctttattattactcagcacaagtggcaaatgattttgataataatacccatcgtcctttaggccctgttgtctgtattagtccttggaacttcccattagccatctttagtggacaaattgcagcagcgttagcggcaggtaataccgtactggccaaacctgcggagcaaacccctctgattgcttttaaagccgtagaactattttatcaagcaggagtacctcgcagtgcattacaactcttaccgggtcaaggggagaccattggtgcacaattagtggctgatgaacgcgtgcgtggtgtgatgtttacaggctctaccgaagttgcccacattctgcaaaaaaccttagcgggtagactcgatagcgaaggtcgccctgttcctttaattgctgaaacaggtggcttaaacgccatgattgtcgactcttctgccttaacggaacaagtggtcactgacgttatggcctctgcttatgatagtgcgggtcaacgttgctctgctttgcgtattctctgtattcaagaagaggtggctgatagcacgattgaaatgttaaaaggtgcaatggcacaagccataataggtgatccaagtctcttatcaacagatatcggccctgtaattgataaagaggcaaaagcgggtattgaaaaacatattcagactatgcgcacagcgggttttgacgtttatcaagcaacctataatcaacttactaaacaggctgaaaataacagtacttttgttcctcctaccttaattgagttagataaaattagttcacttaaaaaagagatttttggccctgtactgcacgtcgtacgttattcaagccaagatctgcctgctttattagctgaaattaatgcgactggatatggattaacgatgggggttcatacccgtattgatgaaactatcgcttatgtagcgactcatgcaaaagtaggaaatttatatgtaaaccgcaatatggtaggtgctgttgtcggggtacaaccttttggtggtgaaggtttatcgggtacggggccaaaagctggaggccctgcttatctgtatcgtttattatcaaaacgtcctgaaaatgccataacacaaaccttagcacgtcaagatgaaacattaccccttgatgcctctatgcgacaaaagttattacaaacctatcatcactatatgacgtggttagcaaataaaacggaacctgcacattatcaggcgctagaagaatacgccaatgcatcacaagccggaacattgcgcgtattgccggggcctactggcgagcgtaatacctatcaattagtcccttgtggcaaggtgctttgtctctcagataatgagcaagatatatttactcagttagcgggagtctttgcatcaggatgccatgctattgtccataatgctgttttctcccaaaaaacctatcgtgaattgcctgatatgatcagaaaagcaatcacactcacggacaactggcaagatgagtcactaagcattaatgccgttatttatcatggcgatagtgatcagttaaaagaaacttgtcagcaaattgcacaacgtaaaggggctattatttcagtacaaggcttctcacgtggtgagacagcattgttattagagcgtttattgcatgaacgagcattaagcgtcaataccgccgctgccggaggcaatgccagcttaatgacgattagttaa

SEQ ID NO: 297235 - DNA, 237 bp, Proteus mirabilis
gtgactatctctccagcaatgagtgagttgctattagtgcactgtgcatggccacatttttcagcaaatgaagaggaagctaattggcgtgcagcgagtgccagtgtattagaagggctatatgaaggctggcttactcatcaagggggaaatgataaaatgcatgtgcaccgtcaagctacagatgcaaaagatgcctttatttttcgttatgcgaatagttcatcaaataaataa

SEQ ID NO: 297236 - DNA, 729 bp, Proteus mirabilis
ttgttttatttagttgatgaaaatcaagatgtgttttctaacattagtgataataaagaggtaataagattagaggcaaaacacccaaataaaaataaacaagaagtatgggaagatattaatatcgttccaatttttgataaaaataatctaatttctcattatgcatttttaagtttagatatcacggataaagtaaagttaagaaatgatttattaaataaaagctatattgactctttaactggaatggctaaccgtctaagtattattgagaaaattgaacaggagcgattaaatattgcgacaccttcatctttttgtcttgggattattgattgtgataaattcaaaacgattaatgatcaatatggccatgctattggtgatcatgttttatgtgagatagcgcagcgtttattagccttagaacgccagcaggtttactgtggacgacttggtggcgatgaatttgcggtacttttccctgctggattacgttcttgctctttattgttattggagatcatcgaatcgctatggcgaggaatggaaaaaccgataaaaatcaataaagaaaaaacaattgttccttctattagcttaggtattgctgaataccctaaggatggcaagacattatctgaactattaaagtcagcagataaacagctttatgcaataaaagagaaaggaggaaataaatacggtttttattcagagtattaa

SEQ ID NO: 297237 - DNA, 762 bp, Proteus mirabilis
atgaatatatttatcaccgatttttaccatcgcaacgatttgttagataaagcagaagccatgatagccaaccattggcctgcttttatgatgggaacttctgttgatgatagctattgggaacgcttatatgatgtgcctttttcccattaccaatttatggcggtattaaaaacgcaaacagaagaaaaggttatcggtgtaattaactccattgcgttaccttggcaaaccaactctctcaacgatttaccggatgaaggttgggatcgtgtttttcagctaggcatggaggctgaagaacaacaattaccttgccatcttatttctgctttgtcggttactatcgatcatcattatcgggggaaaggtattgctcaacgcttaattaataccttaaaggagcatgcaaaaaaacaaggttacctcggtgttgctgtacctgtacgccctacattaaaacattgttatccattgcactcttttgctgaatattgccaatggaaaaacgataataatgagccttttgatccttggatacgtacacattggcgcttaggtgccaccacgatcaaaattgccccacagtctatgaaaattgaagcaccgacagaaaaatggcaacaatggacttcattacgatttcctgtcagtggtgactacaccattcctatggggctggcaccgttaaatatcgatattcaacgtcaatatggtgtctatctggaacccaacctttggatgtttcaccgcatacgttaa

SEQ ID NO: 297238 - DNA, 876 bp, Proteus mirabilis
atgaaaattttagaatattatttcaaacaattacgcacgctcgcacagccagatcgtgtttatctaaaaaataaatttattcgtaacttaggttatcaacctaattttcgccaccccatgtcattgaatgaaaaaatcaatgcacgtatgttatttgatagagatcctatctatacacgcttagcagataaaatcagtgtcagggagtatgtaaaagaaaagataggcgaaaaatatctggtcaaaatccttaatacttatcgccatccaaatgaaatcgaacttaatacactacctaaccgtttcgtattaaaatgtaatcatgacagtggcagtactattatttgccttgataaatctcaatttgatttggagatggcaaaaaagaaacttaattttcatttaaagagaaatctctaccacgttactcgtgaatggcattataaaaatattagtgcgcaaattatctgtgaagagtatatcgacctttttgatactcaatgtccgatgatcccaaccacatgccgtatccactgttttcatggtcagcctcattatgcggaaattgatatttcggatacaaagggatgcgagtatatcaatgtttatgatacacaatggcaattacagccttttactttagaagatcccaataccccagaatatattgaaaaaccgctacaatttgacaatatgctcacattagccaacaaattagctaacggttttgcctattgtcgggtcgattttttaatgtcagaaaccacactactgtttagtgaaatgacctttacccccaatgcggggcgcattcccattaaaccaaaagagtgggactataaattaggtgaactatggacacctattgcttcttaa

SEQ ID NO: 297239 - DNA, 888 bp, Proteus mirabilis; identical to SEQ ID NO: 295558

SEQ ID NO: 297240 - DNA, 756 bp, Proteus mirabilis
atgtatttttttcttggttttttgttatttctaattgttttgatggttatttgcaggattagagttttatggttggcaagaaaaaatacaataactgaaaagaattttaaaaccttcaaagagtataacaatattgaagattatgaaaaagaagcaaagcaagctgtttatgctgcaacaataagcaaaactctttttgaagaatgccaatgtctcataaccttaagaacaatgcttgaatccctacacactgattatgaaaaatatgaaaaagtaaatccgttattaatggagctattacgcaaaaaatttacttttacatactccgctttcattactatctatccagaacccatcgaagaaagcgggctagaacgatttagtttaattaatacaaaaaaatactgtccagaacatgtatggaaacatattctcaaatccgctatttataccaatgaagaattggatgactattttgggtcgcaggaattacccccactggagcggatgtgtacagatatggatttatataacgagtttaaaggcacggttttatttgatgaagtgatcgggtgctatgttgatgaagaaaacgaaggatctcaaatttttgataatgaggtttattctgttaccgaagaacagttacgccagtggctagatgaagagcttgcatttctgagttatgtcactgaaggtcttttgaatatttgtattgaatacataagaaaagagaatggaattataagggtttga

SEQ ID NO: 297241 - DNA, 918 bp, Proteus mirabilis
atggtcatacgtcctaatcaacactggttttttcggttatttgattggcacggttcagtgctatcaaaaataatctttcgcttatgtcttaatattgcaatgtctattatcgctattttggtttatcaatggtatgaattattaggtattcatttaactgttgccccatttagtttattaggtattgctatcgcaatatttcttggttttagaaataatgcaagttatagccgacttgtggaagcaaggacattatggggaaatatgttaattacccatcgcaacatattaagaaatataaaagccttattaccggaagataaacaatttaatcgtgacttttccaatctacttattgcttttagttggagtctaaaacatgagctaagaaaaacaaacccaatggtcgatctctatcgcctcttaccccgacctttatttgatgagataatgaatagcccttaccccactaatcggattttattgcatattggcctaaaaattggcgaattgcgagataacaaagtaataagtgatgttatctttcaatcaattaataaagatattaataacttatctgatgtattgggtggctgtgaacgtatttcaaatactcctgtaccttttgcctatacgctcatattgcaacgtacggtatatctattctgtgctctgctaccttttgcattggttgccgatctccactatatgacgccatttgtttccgtatttatctcttatacttttttatcttgggactcattagctgaagagttagaagatccattcggtgtttctgccaatgacttaccattaaatgcaatatgtaacaccatagaaaggaatttattagagatgcaagatatcactccactccccatcagagttaaacctgaccaatattataatttattgtaa

SEQ ID NO: 297242 - DNA, 1008 bp, Proteus mirabilis; identical to SEQ ID NO: 296297

SEQ ID NO: 297243 - DNA, 1353 bp, Proteus mirabilis
atgtttggattagatgcttttcacctagcaagaatacaattcgcgtttaccgtttcatttcatattatattccctgctatcaccataggattagctagctttctagccctattagaaggcttatggttaaaaacaaaagaaccaagttacctttctttatatcagttttggataaaaatttttgccgtaaactttggcatgggggtggtatcagggttagtgatggcatatcaattcgggactaactggagtggtttttcacaatttgccggtagtatcacagggccgatgctaacttatgaagtcttgaccgcctttttcttagaagcgggatttcttggcattatgttgtttggttggaataaagtggggcgaaaacttcacttctttgcaacttgtatggtagcgcttggcacattgatttctactttttggatcttgtcatccaatagttggatgcaaacaccacaaggctatgctattgaaaatggtgttgtcgtgcctgttgattggctacaggtcgtgtttaatccttccttcccttaccgtttattgcatatgtctattggggcttttttagccagtgctttatttatcgcctcttgtgccgcatggttattattaaaaggacaaaatacagcacctgtacgaaaaatgttttctatggccttatggttagtactaattattgcccccatacaagcgtttgtaggagatgctcatggattaaatacactagaacatcaaccggctaaaatcgcagctatagaagggcattgggataatgcaacgaaagaagcgactccgctgattttatttggcatcccagatatggcggaagaaaaaacaaaatatgcgattgaaattccttatttaggtagcctgatccttacccatagtttagataagcaaattccggcattaaaaagttttgcaccggaagatagacctaattctagcattatattttggtcatttagagtcatggcaggtttaggtatgctgatgatttgcttaggtttgttgagcgttattttacgtaagaagaaaagactctatcactcaccccttttcttacgctttgcattattaatggggcctacaggactgattgcgatccttgcggggtggtttaccacagaaattggccgtcagccttgggttgtttatggtctacaacgtaccaaagatgccgtttctgctcatggtgatattcaaatgagtttgagcttattggcctttattttggtttatttttcagtatttggcattgggtatttttatatggtgcatctgatgaagaaaggccctgtagtgcttaaatccgaccaattaacacagggtgaaaaataa

SEQ ID NO: 297244 - DNA, 1146 bp, Proteus mirabilis
atgaatagtttgattggctcttctgtttatcgtcgccaactcacttgtggcacattaagcgtaacgccaaattgctcattagaacatcttgatgaactttttgatattgcggaaagacgcaaccctaagcgcgcttttttgtttgtcagtaaagtattagggcgccatattcctgtttcacctaagaaaatgcgtgaaacttatcaacaaatggccaaacaatttcctcaatcactagaaggccctattctttttattggtatggcagaaactgcggtcggtttaggtgcggggatttttgatgaagtaagagatcgctatcctcaagcgctctatcttacttcaacacgccatcctattgctgatagtgaattattctgtaaatttaaagaaaatcacagtcatgcaactgatcacctactttatttgcctcataacctagaacaacgccaatggatccagcaagcgaaaaccattgtgttaattgatgatgaagcaaccacaggaaatacctttcttaacttgctgtctgcattacgtgaagaaggtaagttaacacaaattaagcagattattgctgtcacattaaccgattggagtggtgatgctctgcaaaagcgttcaccattacccataacaaccttctctttagtgcagggaaaatggcaatggcaagccaatcccgatgcaccattacctgttatgccaaatgtcaatattactgcctcaggacaggttgctatcacaggaaaacaaagctggggacgcttaggcatgacaacccctgctaatgatcttggcctatttattcatgtttctgagggtgaaaaaatattggttttaggctctggtgaatttgtctgggaaccctttttattagcagaacgcttagaaaaacaaggggctattgtaaaatatagctcgacgactcgctcacctattgccactaattttgctatccaatcagcgataacttttactgacaattacggattaggcattcctaactttgtctataacgtggctcatcagcaatttgatcgcattctgctttgttgtgaaacccctgccgaaagtattgatagtcaacttattaaggctctctataaagttgcccctattgttgaagtaattagctatgactaa

SEQ ID NO: 297245 - DNA, 771 bp, Proteus mirabilis
atgactaaccctgttattttagccgatcttgacgataccttatttcaaactcgtcgcaaaatggtggatgagttagcgcttgcaccctataaaactggtgcgttggatagaagtttagcgccacgtagctttatgactcaagagcaagctatgctggttgattggatgctagaacatgctgatttaattccagtcacagcacgtggaacggaagaaatgagccgtgtcactattccttttcattcatgggctattaccacacacggtgctgttgtcttaaccccagaaaaagtcgcagatgaacaatggcaacaccatatcacacaaagcttaacaccttataagcaacctttacttaggttacagcaatctattacccaattaatggctgaacgtaatattgatggttgggcgagaattaactatgaatatgatgatttacccatttatttagtgatgaagcataacgatagcgctcgattagatgagctatatgctatcggtgatgagatagaaaaaatattctcaaccaaaggtttttatattcatcgtaacagtaacaatattgcttggttacctgagccaattgaaaaaggtaaagccgtcacttatttgcttaataaattaaaagcagaacgtggcgtttttcctgtaattggtttcggcgatagcctaagtgatcatcgctttatgaaattatgcaattggtatgctatcccccgccaaagccaattcgcgaatgcgatcaacacaaaaatttttggagaataa

SEQ ID NO: 297246 - DNA, 945 bp, Proteus mirabilis
atgattgaacgattatccccttggaatttaggggcaacgctgtatatgcccgcaacacgaaccgatatcgccgcaacaattattgatcaaaaaattgatggattacgttcattaattatttgtttagaagatgccgtcagtgatactgatattccacaagcattacaaaatctagcaacattattaaccacattatcagactataaaaagcatcatgattgtactgaatggccgttgctatttatacgcccccgccatacagaaatggcgcaatggctggttgagcatgtagatttaaccgtgattgacggcttagtattacctaaatttacccaagcttcattacccctttggtggcgtatcatcaaacccacccatttatgtatgatgccaacattggaaacagaagaagtgttcgacgttcttcaaatgacctcactggcagacttgctactagcccacccttgccataagagaattattgccttacgtatcggtggaaatgatttaatgaatgttatttctcttagacgtaatcgccatttaacactctatgatggacctatgggatacgtgataaaaatgttggttgctgtatttggtgctcgtcagtttgcgcttaccgctcctgtttgtgagcatattgatgatcaacaaattatggatagagaattagccctcgatattgccaatggtttagtgggcaaaaccgctattcatcccaagcagatagacaaaatagaacaggcattaatggtatctcagtctgatcattccgatgcgttgcgcatcttaaattcaacacaagccgtatttaaatctcatggtgccatgtgtgaaccggcaacacatcgccgttgggcattaagtattttaactagagcaaaactgtatggcattattcccaattcaaaaaatagtgttcaacgatttaatacaccataa

SEQ ID NO: 297247 - DNA, 1515 bp, Proteus mirabilis
atgtcgcaacagcaacaaggtgcggagcaggcacctgatttaaataacgaactgcaaactcgccgcgaaaaattatcagctttacgtgataatggtaacgcattcccaaatgatttccgcagagatgccatgtctgacgaattacatcaaaaatatgatgcaatgagtgcagaagagttagacgctgctaatgtggaagttgctattgcaggtcgtatgatgactcgccgtattatggggaaagcatctttcgctacattgcaagacatgggcggccgtatccagctttatgtctctcgtgatgatctgcctgaaggcgtttataacgagcagtttaaaaaatgggatctcggtgatattttaggtggccgtggccgtgtatttaaaaccaaaacaggcgaactgagtattcattgtactgagttacgtttactgactaaagcactacgtccgttacctgataaattccacggtctagctgaccaagagacacgttatcgtcagcgttatttagacctgatctctaatgagaattcacgtaatacttttaagatccgctcgaaaatcatgtctgctattcgccaatttatggtgaataaaggctttatggaagtagaaacaccgatgatgcaaactatcccaggtggagcaagtgcacgtccgtttatcactcaccataacgcgctagatattgatatgtatctacgtattgcacctgaattatatttaaaacgtttagttgttggtgggtttgatcgcgtttttgaaatcaaccgtaacttccgtaatgaaggtgtatcaccacgtcataaccctgagttcacaatgatggaactctatatggcttatgctgattatcgtgatcttatcgaattgactgaagagttattccgtacattaactcaagatgtattaggttcgactatcgtcaaatatggtgatgaagagtttgatttcggtaaaccgtttgaaaaactgaccatgaaagaagctatttgcaaatatcgtcctgaaaccaatatggctgatctagatgatatggataaagccgttgctattgctcaatctattggtattaagattgaaaagagttggggtttaggtcgtgttcaatgtgaaatttttgaagaagtagctgaaagtcatttgatccagccaacttttatcattgaatatccagcagaagtttcaccactggctcgccgtaatgatgataatccatttattaccgatcgctttgagttctttattggtggtcgtgaaatcggtaatggtttctctgagcttaatgatgcgcaagatcaagcggagcgttttgaagagcaagttcgtcaaaaagaagcgggtgacgatgaagccatgttctttgatcatgactatatcactgcattagagcatgggttaccacctacagcaggtttaggtattggtattgaccgtatggtaatgctatttaccaatagtcatactattcgtgatgttattttattcccagcgatgcgtccgggaaaataa

SEQ ID NO: 297248 - DNA, 585 bp, Proteus mirabilis
atgtcaatacaaaacacattaccagattactcagcaattgattcattattacaacaacatgccgtgcctttaactgccgcagagatgcatggcctaattactgggtttatttgtggagcagtacatgacaatagttggaaaactttgttacatgaactgactaatgagggcttagcgttccctaaatcgttatcagaaccccttgaatcactttatcacgtcactcatgagcaacttgatgacagcgtatttaatttttctatgctgttacctgacgatacagaatctgtttttcctcgagctgatgcccttgcagggtgggttaatcattttctattaggattaggtgttgcacaacctaagttatctgagcataaagagttgacggaagttatcactgatttgcgtaatattggtgcattaggctatgaagaagatgaaaatcaacaagagcttgaagatgcactcgaagaagttacagaatatgtcaaagtctctgttcagctgtgctatatcacttttgtcgcctcaaaagagacaacaacagaaaatgataaacaagatgaacaacggacattacattaa

SEQ ID NO: 297249 - DNA, 330 bp, Proteus mirabilis
atgtccgcacaacccgttgatcttcaaatttttgggcgctcattacgtgtcaattgcccaccagaacaaaaagatgctttactggcttctgctgctgaacttgaacaacgattacaagatctcaaagaacgcagtggtgtttccaatactgagcacttaatttttatcgtggcattaaatatgagtcatgagttggcagaagaaaagttaaaaacgagagactatgcctacaatatggaagagaaaataaaaatgctacaacaatctattgaacaagctttacacgatcaaggcaagcaccatgatcgcactttttcaacatcaaagtag

SEQ ID NO: 297250 - DNA, 618 bp, Proteus mirabilis
atgacacaaccccctgttttccagcaaagagatcagatacgtaaagctatccgccaaaaacgccgtcaacttactgtggcacagcagcaagatgctgcacataaactctctgaacgggtactccatcatcccaaagtcaagcaagctaaaacaattgccttatttctctcttttgacggcgagattgataccgcacctctaatcactcatttatgggatttaaataaacaggtttgtctgcctgtattacacccttttcatcgccatcatttactttttttacgttacgctcccaccacgcagttagtgaaaaatcgttttaatatttttgaacctccactcaatgtgaataacattattccaatatctgatatcgatattatctttacgccactggttgccttcgatgaaagtggtcaacgactcggtatgggcggaggtttttatgatagaacattagaaaattggcaacggcagtcattttatcctatgggacttgctcatacatgccaacaagttcattcgttaccgagcgcagattgggatataccgttacctgaaattattacacctgataaagtatggcgttttaatgaacaactgatacagagaaattaa

SEQ ID NO: 297251 - DNA, 435 bp, Proteus mirabilis
atgaaaattcgttcacaagtcggtatggtactgaacctcgacaaatgtatcggttgccatacctgttcagtaacctgtaaaaatgtttggaccagtcgtgaaggtgtggaatacgcttggtttaataatgttgaaactaaaccgggtacagggtatccccaaaattgggaagatcaagagaagtggaaaggcggctggatcaaaaatattaaaggtaagttagtaccaagaatgggtaaccgtgttgggctattatcaaagatttttgccaacccagatgtcccagcattagatgattattatgagccatttgattatgactatgagcatttaaaaaatgccccagaaggctcattacccaccgcacgtcctcgttcgttgataaccggtcagcgtatgaccaagataacgaatacgtccaacacaggtttctga

SEQ ID NO: 297252 - DNA, 3762 bp, Proteus mirabilis
atgagtaaatttctcgatagattccgctattttaaacagcttggtgatacgttttcacaagatcacgggcaagagttaaatgttaatcgcgactgggaaaatagttatcgtagccgttggcagcatgacaaaatcgtgcgttctacacatggtgttaactgcaccggatcatgtagctggaaaatttatgttaaaaacggcttagtaacatgggaaacccagcaaacagactatccacgaactcgtcctgatctgcctgatcatgaaccccgtggttgtccgcgtggtgcgagctattcatggtatttatatagcgctaaccgcgttaaatacccaatggtacgtaaacgtctgatcaaattatggcgtgaagccaaagcgcaacacgctgatccagttgatgcatgggcatcgattgttaatgctcccgaaaaaacgaaaagttataaacaagctcgtggtcgtggtggtttcgttcgctcttcatggtctgaagtgaatgaaattattgctgcttctaacgtctataccgctaaaacttttggcccagatcgtattattggtttctcacctattccggcaatgtcaatggtgtcttacgccgccggtgcccgctatttatctcttattggtggtgcttgcttaagtttttacgattggtattgtgatttaccacctgcctcaccaatgacttggggggagcaaacagatgtgccagagtcagctgactggtataactcttcttatctgattgcatggggttcaaacgtacctcaaacccgtacgccagatgctcacttttttaccgaagttcgttataaaggcaccaaaacggtagcagtaacacctgattatgctgaaattgctaaactgtgtgaccagtggttaaacccaaaacaaggtacagatagcgccatggcaatggcgatgggacacgttattcttaacgaattccacgttaaacgccaaactgaatactttagtaactatgtgcgcacttacactgacatgccaatgttagtgatgttagataagcatgattctggcaagttagttgcgggtcgcatgctacgtgccgctgatttagtgaacaatctcgatcaggagaaaaatccagaatggaaaaccattgctattgatgagaaaacacagcaattggtcgctcctcaaggttcaatgggttttcgttgggaaggcgctgccaaatggaatctagagcctaaagacggtaagagtagcgaagaagtcactttacaattgggtcttttagaaaaccatgatgatgtggttgacgttgcatttccttactttggtggcatcaagagtgaatactttgaaggtgttgcccttgatgatgttctcgttcataaactgccagcaaaacgcattactcttgccaatggcgaagaaaaatatgtcactaccgtttatgacttattactggctaactatggtgtcgatcgtggtttaaatgatgaaaactgtgcgacaaactatgatgagatcaaagcctattcacccgcatgggctgaacaagtaacaggggttagccgtcaagatattatccgcattgcacgtgaatttgctgataatgcagaaaaaacacatggtcgttcaatggtgattgtcggtgcgggcattaaccattggtatcacatggacatgacctaccgtggcattatcaatatgctgatcttctgtggttgtattggccaaagtggtggtggatgggctcactatgtgggacaagaaaaactgcgtccacaaacaggttggttgccattagcttttggtctggattggcagcgtccacctcgtcatatgaatagcacatcatttttctataatcattcaagtcaatggcgctatgaaacggtatcaccgacagaattactatcacctttagcagataaatcacgctttagcggtagcttaattgatatgaatgtgcgttcggagcgtatggggtggttaccgtcagcaccgcaattaaacgttaacccattatctattaccaaaaaagctcaacaagctggcgtcagtgcaacggattataccgttaatgctctgaaatcaggtgagatccgttttgcatcagagcaaccggataatccgcaaaacttccctcgtaacttatttatttggcgttctaatttattgggatctgcaggtaaaggacatgaatatttactgaaatatctattagggacggaaaatggattacaaggtaaagatttaggtgaacaaggccaagttaagccacaagaagtggaatggcaagataaaggcggtgagggtaaggtcgatttagtggtgactttagactttcgtatgtcaagtacctgtctgttctccgatatcgtgttaccaaccgccacatggtatgaaaaagatgatatgaatacctcggatatgcatccatttattcatccattaaccgccgcggtagatcccgcttgggagtctaaaaccgattgggaaatttataaaggtattgctaaaaccttctctaaattgtgtgtcggtcatttaggggttgaaaccgatttagtgacacagccaatacaacatgactccgcggctgaaatggcacaaccatttgatgtcaaagattggaaaaaaggtgaatgtgaccttattccggggaaaactgcaccgcatcttattcctgtggagcgtgattatccaaatacctatgctcgttttacctcacttgggccgttaatggataaattaggtaatggcggtaaagggatcggttggaatacacagacagaagttgatttcctgaaaaaacttaatcgcgttcgtcatgagggtgtggcaaaagggcgcccggcgattgaaaccgcaattgatgcagccgaagttatcctctctttagcacctgaaacgaatggtcaagtggcggtaaaagcgtgggatgcactaagtaaagtgacaggacgcgatcacactcatttagctaaagtaaaagaagatgagaaaattcgtttccgcgatatcgttgctcaacctcgtaagatcatttcaagtcctacatggtctggtctggaagatgagcatgtctcttataacgcttgttataccaatgttcacgagatgatcccttggcgtactttaagtggccgtcagcagttatatcaagatcatgagtggatgcgtgcttatggcgaaagtttagtggtttatcgtccacctattgatactaaggcaatcgaagccgtgaaaggtaaaaaaccgaacggcttcccagaaaaagcgctgaacttcctgacgcctcaccaaaaatggggtattcactcaacgtatagcgataacttactgatgttaaccctcggtcgtggtggccctgtggtttggctgagtgaagatgatgctaaagagatgggtattagtgataacgattgggttgaagcatacaacagtaatggtgcgttaaccgcaagagcgattgtgagccaacgtattcctgatggcatgatttatatgtatcacgcacaagagcgtcaaataaacctaccaggctctgaaataaccggaatgcgtggcggtattcataactccgtgacgcgtgtttgccctaaaccgacccatatgattggtggatacgctcagttggcttatagctttaactactatggaactgtgggctctaaccgcgatgaatttgttgtggtacgtaagatgaaacagattgattggcttgatggtgaaggcgatgcttatcaacaaaccctgaatggacaggagaaggcataa

SEQ ID NO: 297253 - DNA, 1392 bp, Proteus mirabilis
atggcactttctcaacacccagaaaaaatgagaaaaggggtgatcgaaaattggcatcctgaagataaagctttttgggaaaaaactggtcaaaaaatcgcatcgcgtaatttatggatttctgttccttgtctactgctatccttctgcgtctggatgctatttagtgcagtcgctgtcaatttaaataaggttggctttaattttaccactgatcagctctttatgctgactgctctaccttctgtttcaggtgcgctactacgtgtcccttactcttttgttattcctatttttggtggtcgtcgttggacggctattagtacggtatttctgattattccttgtctctggctagggtttgccgtgcaagatctcacgacatcttattccacttttatcgttatctctctgctgtgtggttttgctggtgcaaacttcgcatcgagtatggcaaatatcagcttcttttttcctaaagcacaccaaggcggtgcattaggattaaatggcggattgggtaacttaggtgtcagcgtgatgcaattaatcgcgcctttggttgtcagtgtgggcgtttttgctatgtttagtggccccggtgtcgttcaacctgatggctcacgtttatggctagagaatgcggcgtggatttgggtacctttcttgcttatctttacctttgcggcttggtttggcatgaatgatctggctgctaataaagcttctttaagtcaacagctacctgttttaaaacgtggtcatctttggttactcagtatcctctatctgtgctcttttggttcttttatcggcttttctgccgggtttgcaatgttatcgaaaacccagttccccgatattgtcattttacattatgccttctttggtcctttacttggagcattagctcgccctgtgggaggtgcgctatctgataaatttggtggcattaaagtgacgcttatcaactttatcattatggctattttctcagtgctcctgttcttaaccctaccggaaaatggtgctggtggatcgtttattgctttctatggcgtgtttatggtgctgtttttaactgcagggctaggcagtggttcaacattccaaatgattgccgtggtatttagaaaaatcactattgatcgcatgaaggcacaaggggcttcagatgaagctgcgcaaaaagaagccgtaacagaaagtgcagctgcattgggttttatctctgcaatcggtgcgattggtggcttctttattcctaaagcctttggtacatcccttgcgatgacgggttcacctgctggggcaatgaaaatcttcgttctgttctatatcgcctgcgttctgatcacttggttggtctatggacgtaaacacaataaataa

SEQ ID NO: 297254 - DNA, 1830 bp, Proteus mirabilis
atgaaaatgcacaacattcaatggcattatcgcttttcaattattaatcaaatcgctattttaatgttgcttttcacactatttggtgtggtaggtatggctatttctaaccacattattttaagcgtacaaggcaacgcccacgccattaataaatccggctcactgcgcatgcaaagctatcgtttactctcagccttaccccttgatgataagcaccgtgattatctacaagaattagaaaatgatttagatagtaaagagttacgtcaagtattaagcacctcatcactgcaatcacaatatgtacaactgactcattactggaaagagacattaaaaccaactttgtcagcagccaaacagcctaatgatgcgaaacaagaagttatcttttttgtttctcaactcgatacattagtatcaagtattgaccaacttactgaacaaaaaatccgcctagtcgcttatactcaacttatctttaccgctcttaccttattactgctgtttggttctgtttggcattttcgtcgtcgcttattactgccttggcaacaattgatgtctatggctaattctattggacatggtgatttttcaactcgttttcggcctcgtcctcaccatgatgaaattgccaccctaggaattgcacttaacaccatgtcagaagagctatcgacgctctacagtgaattagaacaacgagtcattgaaaagacccatgatttacaacagaaaaataaggttctctcttatctttatcactcaagtcaacaactgcattcccaagcgccactttgcgctcgcttaaggcagatccttgcagagctacagcatattattcctgatagctatttgcagatccgtctatatgaagataatcaacatacattatttaatgagataagcttagccccttcctcacgccctgaatattgtccaacgccagactgtgagcgttgcaatgaagatgccaacatcactacaccgttaaataatcgcttattacattgggaattgaccgatcagatccatcgctacggtttattcgtaatgcagttaccggaaaatagtgtacttactgacgaacagaataatttaatgctcttattgactaagcaaatttcggcaatgcttgccatggagcaacaaaatgaacagcaacaacagctattattaatggatgagcgttcagcgattgcacgtgaattacatgattcgattgctcaatcgctatcatgtttaaaaatgcaggtcagttatctacaaatgcaatcggaaaccttgccagataactgtcaaaaactactaaaagagatgcgagaagagctaaatgtggcttatcgtcagttaagagaattactgaccacatttcgcttgaaattgacagagcctggcttattagccgcattagaaaatacactaaatgaatttaatcaacgtttagggtttgctatccattttggttatcagttacctgcaaaatgtgttaattcacatcaaagtattcatgtggtgcaaattgttcgtgaagcattaaataatattctgcaacatgcgaatgcaaactgggctgaagtcgcattaacacttaataatggcatcgttgaactgcaaattaatgataatggtgaaggtattacgcctaatcccgaaaagataaatcactacggactgattattatgcgtgaacgcgcgaatagtctgaatggctcttatagtataagggttcgcaaagaaggtggaacgcaagtatttgtcacatttccgttaatcactacccataaagatcctatcgaaaagggagcaaatcataatgaataa

SEQ ID NO: 297255 - DNA, 1389 bp, Proteus mirabilis
atgaaactattgccatttaattttgaattaattgatgaaaataagtattttatcagtaatttggcagggtttagccatgtcttaaatcagatggatttatctaatattatagattttggtaaaagtaataatgataacttaaataatatacttaggaataagttatttattactaatgatgatattcaactttctgaaatgatgatagcatcgggtttgggaaaaaaattaatgtcagagatgacattttctccgatatttatgattgttccaacattacgctgtgatcatacttgcaagtattgtcaagttagtagagcctctataagtgcacaacattatgatttagatgagaagaatatccctaaaataatttcattaataaaaagaatatcaaaaaaaaactataaactagagattcaaggtggtgagcctttaataagatttgatttaatcaaaaaaatatataatgaggcagtattccaacttggtcaagagaatattgagtttgtaattacttcaagcctttcattactcacagatgaaatgattgaatggtcagaagaaaaacctgtaatctactcagtatctttagatgggaatgaatatgtgcataataaaaacaggatattacctacaaagaactcatttcaaataatcacagaaaatataaaaaaactacaacatagattaggtcgcgatagagtttcaacagttactacagtaacaaaggaattgcttcataatcctcaatcactgattgatgctcattttgaattagatgtatttgatctttttattaggcctataagcccttatggatttgctgagaaaaaagaaagctacacaatatctgagtatattaatttttatgaaaaattattagatattattttcgaggaaaataaaaaagggcttccttttgttgagcattctggtgctatacatataaaaagattatataatcctggtttttgtgggtatgctgatttaaaatcccctagtggtatagtatttaatagcttattattcaattatgatgggaaagtatatggaagtgacgaattaagaatgcttcagcaggtatactctgatattgacttttctttaggtgactttgattcgttatcatttaataaaaacactatctataataatttactttctaattcatttaacatgctacatgttggttgtgaaacttgtgcttttcagccatattgtggcgttgacccttgtcaaaatatcagtttatttggtgagccggttggaaataaaagtctttcacgattttgtctttatcataaagggatgtttaaactactagtaaaaaaaattgatgaagataatgcaggggctacattactaaaaagttggatttatgcttga

SEQ ID NO: 297256 - DNA, 201 bp, Proteus mirabilis
atgagagatattatattagataaagccatttattctcagtgggttataagaaattctttatattggatgtctatttatagtaactggcaattgctgaatgattatattttaagagaaataatagaattaaagacaggaaaatttagagaatctgttattaataaagtacttgcaagtatgaatgaaaggttaattacatga

SEQ ID NO: 297257 - DNA, 798 bp, Proteus mirabilis
atgctgctggtcactcaactccttattggttctgctataggtttagttatcaccacaacgggagtggggggtggtgttatcttattacctgtgcttatctatttatttggaatgaatgcattagcagcagtggcgaccgctaatttattatcgatgttaatgaaaatttcctcttcttatattcattttcgtttaggaaatattccattaaaaccagcattattgattttagggatcatgtttccggccacatttttagccagctatggggtaacctggttgggatcacaacctcaatattatgagcaggttgaattaggcattaatatcctgatgattgtggcgattatcttttcaatgttcctttttttacaacgaatattcaaaaaatccacatcatcacatccgttatcatcattggcacctagctcatcaattcctctgaattctctttttgttcccggtatgagtgccggatttgtcttaggggcaacgggggttggtggaggattggttgtcttacccgtgcttatgcgttttgcacaaatgaatattaaggaagcgatcggtagttctatatttattactacaattttgtcaggtggctctgctattgcttatagtgctggtggctataccgatgtgcatacggccatcattctttgtttaggatcacttatttcgattcctttagcgcgctatttactggtgtatttatctgagcgcttttttcaatatttaactctgttatttattctgatcagcatcattatgatgagttggaaactaatatattga

SEQ ID NO: 297258 - DNA, 1830 bp, Proteus mirabilis
gtgtccacagcagaagttcttaattcaatgccatcagctcaggttattttgcgcgaaacctttggttatcagcaatttcgaccaggccagcaagagattattgataccattatcaccgggcgcgactgtttagtcgtcatgccgacgggagggggaaaatcgctttgctatcaaatacctgcgcttttgcttgatggcttaaccgtagttgtttctccgttgatttccctaatgaaagatcaagttgatcaactctgcttacatggtattgacgcggcatttcttaactcaactcaaagccgagatgaacaactgcaagtacaaatgcgttgtcaacggggtgaaataaaactgttatatattgcacctgaacgcctaatgatggagagttttcttcaccatttagtgcaatggcagcctgctttattagcggtggatgaagcacactgtatttctcaatggggtcatgattttcgccctgaataccgaggaattggcttattaagacagtatcttcctgatgtccctattattgcgttaacggcgacagctgataatacaacacgtcatgacattattaatcagctcgcgttacgcactcctttagttcatattagcagttttgaccgcccaaatattcgttatactttagttgaaaaatataaaccgctcgatcaactttggctgtttattcgtgggcagaaaggaaaatcaggcattatctattgtaatagtcgcagcaaagtagaagagaccgctgaacgactaggtaagcgaggattaagtatcgcggcttatcatgcgggtatggatattgccacacgagcaaaagtgcaagatgcttttcaacgcgatgatttgcagattgtggtcgcaacggtcgctttcggcatgggaattaataaacccaatgtacgttttgtggttcattttgatattccgcgtaatattgaatcttactatcaagaaacgggacgcgcaggacgcgatggtttacctgcacaagcggtgctgttttatgatcccgcggatatggcttggctacgtcgttgtttagatgagaagccagaaagtgaacaaaaagcgattgaatcccataaattaaatgccatgggggcttttgccgaagcacaaacttgtcgacgtttagtgttacttaattactttggtgaacaccgccaacaagcttgtggtaactgcgatatttgccttgatccacctaaacaatatgatgggttagtggatgcacaaaaagcgttatcttgcatctatcgtaccggacaacgttttggtattggttatattgttgaaattttacgcggtgccaataatcaacgcattcgcgataatggtcatgataaattgccagtttatggtattggtaaagcccatagccatgaatattggatgagtgtgatccgccaattgatccatttaggtatggttgcgcaaaatatcgttcatcgttctgcattacaattgactgagatagctcgaccgatattgcgtggtgaggtgtcattacccttggcagtaccacgactattaagcccaacaaaaagccgttatcagcaaacaaaaaatagtcatcgacagtacgataggaaattatttgcgaaactacgcaaattacgtaaatctattgctgatgaagaaaatattccaccctttgtggtatttaatgatgtcacactgattgaaatggcggaacaatgccctgtctgccctgatgaattgttgttgatcaatggggtaggacaacgaaaactagaacgatttgggccagcatttatgacacttatccgtgatcatattgaggggttcgaatag

SEQ ID NO: 297259 - DNA, 321 bp, Proteus mirabilis
atgactgataaaatgaaagaaatgctaaaatttgcacaagaaatggaagatgcaggagtcactgatggcagtacaactaaacgtattgccgccagaataaaagcgaaagaattacaagctaagtataaacatcctacccctatgacaggtgaagatataaaaaggatccgtgagcaaaataatatctctcaatcttcccttgctttgatattgaatatgactaaagaaagcgtttctaagtgggaaagaaacgaaattaagcccaatggtgcagcactacgacttcttcatttaatagataaaaaaatattattcatctag

SEQ ID NO: 297260 - DNA, 387 bp, Proteus mirabilis; identical to SEQ ID NO: 295557

SEQ ID NO: 297261 - DNA, 1278 bp, Proteus mirabilis
atgctgggtaaaaatatagaacaaattaatcatgctcgtttagctggaaaagaaggtttatggcgcattacagttaaaaataaccagattgcagccattgagccacaaccgcaaagcgattttcatccccaagggttagatgcacaaggtggattggttcacgctccttttgttgaacctcatatacatttagacaccacgcagacagcagggcagccaaactggaatcaatctggaaccttatttgaaggtattgagcgttgggcagaaagaaaagcattactcacccatgatgatgttaaacaacgggcgtggcaaacattacaatggcaaatcgccaatggtattcagcatgtaagaacccatgttgatgtttctgatgcatcgttaacggctttaaaagccatgttagaagtcaaacaagaagtcaaaccttgggttgatttacaaattgtggcatttccccaagaagggatattatcttaccctaatggcgaagcattattagaagaggccttgaaattaggtgcggatgttgtgggggcaatcccgcactttgaatttacccgtgagtatggcgtggagtcactacataaaaccttcgcattagcgctgaaatacgatcgacttattgatgtgcattgtgatgaaattgatgatgaacaatcgcgttttgttgaaaccgttgctgcattagcacataaagaaaatatcggctcacgggtgacagcaagtcatacaaccgctatgcactcttataatggcgcttatacttcgcgtttatttcgtttattaaaaatgtcaggcattaattttgtagccaatccattagtgaatatccatttgcaagggcgttttgatagttatccaaaacgtcgggggatcacccgtgtcaaagagatgttagcgagtggtattaatgtttgctttggtcatgacgatgtctttgatccatggtatccattaggtacagcaaatatgctacaagtgctgcatatggggttacatgtttgtcagttaatgggctatgggcaaattgataatggattacaacttatcagtcataatagtgcaaaaacattggcattaacggattatggtgtggaagtcggtaatagtgctaactttattattcttcctgctgaaaatggttttgatgcgttacgtcgccaagtccctgtacgttactctattcgtcacggtaaggtgattgcacaaaccgagccggctaagacagaaattatgttagctaagccaacgcgaattacgtataaataa

SEQ ID NO: 297262 - DNA, 1476 bp, Proteus mirabilis
atgcaaaacccaccgttacacaagctttatattcatggtggatatgttgattgcgcacaacctgaatgtgaacaatttgccgcaattaatcctgctacaggtgaggtgattgcacatttacaatcagcctgtgaagaagatattaattgggcggtagaaagtgcaaagcaaggacaaaaaatatgggctgccatgcctgcgatggcgcgctcccgtattcttcgacgtgccgtggatattttacgtgaacgtaatgatgagttagcgcatttagaaacgttagacaccggtaaacccctgtctgaaacacgttatgtcgatattgtcaccggtgctgatgtattggaatactatgcgggtcttattccagccctagaaggggagcagatcccactacgtgacagcgcttttgtttacacccgtcgtgagccattaggtgttgttgccggcattggtgcatggaattatccaattcaaattgcgttatggaaatcagcacctgcattagcagcaggtaatgcgatgatttttaaaccgagtgaaatgacatcattaacggcattaaaattggctgaaatatataccgaagcgggcttgcctcaaggggtatttaatgtggtaacgggtgatgccactgtagggcaatggctaacgcagcaccctgatatcgctaaagtctcatttacgggggggatcgatactgggaaaaaagtgatggcgagcgcttcttcatcaagcttaaaagatgtcactatggagctaggtggtaagtcaccgttaattatttttgatgatgccgatcttgataccgcagctgatatcgccatgatggctaatttctatagttcaggacaagtatgtaccaatggaacacgcgtatttgtgccagaaaagttaaaacaagcttttgaagctaaaatcattgagcgtgtctctcgtattcgcgttggttcaccactggaaatggataccaactttggaccattagtcagcttccctcatcttgaaaaagttttaagctatatcgagttaggtaaagctcaaggtgcaaaactactttgtggtggtgaacgtttattcgctggtgcattggcgaaaggggcttatgtggcgccaacggtatttaccgattgtactgatgatatgaaaatcacgcaggacgaaatcttcggccctgtaatgagcattttaagttatcaaacagaagatgaagttattttacgcgccaataatagtgtctatggattagccgcaggcttggtgactcgagatctgacaacggcacatcgcgttatacatcaattagaagccggaatttgctggatcaatacttggggtgaatctgcagcagaaatgcctgttggtggttataaacattccggtgttggccgtgaaaatgggcttgtcacactacaaaattacactcaaatcaaatctattcaagttgaacttggggagttttcatccgttttttaa

SEQ ID NO: 297263 - DNA, 1158 bp, Proteus mirabilis
atgaatcgtcgttcatttttaacatcatcaagcttagtgatcgggggactttcattaagttcgtttgttagcgctgcctatgccgcagaaacttcaaaccctaaacagctatttaatgcagaaaatcctttactgttaaactttaatgaaaactcgctaggcatgtcatccaatgccaaacaggcgattattgatgcacttccccatgcttttcgctatccagatgatgcgcgaagcgcacttatcagtgcattaggtgaagaatttaagctatcagacaaacacatcactctaggtaatggctcctctgaaaccatacaagcagccgtacaatatgtggcgaataaagcgcaaaaagcaggtaaaacagtacaactgattgtgcctgatccaacatttaattatgccgaactttatgctgaacctttaggtgttaatatcgtaaaagtgccggttgataacacattggcttttgatttaaccgccatgcagaaaaaagcacaagcatttgatggtattagcatggtatatctgtgcaatcctaataacccaaccgcaatgctgacaccaacagcggcattaacaaattggatcacctcagcaaaagaaaatgtcttttttattattgatgaagcttacgctgaatttgtgacaacacctgaatttaccagtgcgatagcattagttgctcaaggttataaaaacttgattgttacccgtacattttcaaaaatttatgcattagctggattaagggtaggctatggtgtggcagtccctgaggtaattagtgaagtagatagtttcgtttctattgataataccaatactgccggtgctgttagcgcattagcctcgttaaaagatcacgcttttgtggcatatagtcgcaagtcaattgatgtatcacgacaaatggtggttgatactttaaacgccttaaatatcgagtatgcaccttctcacgccaactttatttttcataaagtcaaaggtgatgtgaaaacttatcaagagagaatgaaagcggcaaatattatggtaggacgtgagtttcctcccgcattaggttggagccgtttgaccttaggaacccctgaggagatgagttattttgtcgcgacgttaaaagagtttagaactaaaggatggatataa

SEQ ID NO: 297264 - DNA, 996 bp, Proteus mirabilis
atgattagaatagtattgtttacaataatagccattatttcaaataatgcagtcgctgtgagctgtgtcagtggttgtaatgcgaatgaatattccacgcttagtggacaactatcaaagacggaaaataaagtcggtgttactaaagatgcttctgatattactttgtccaatcgaattacattaagatggaatgcgggacaagcgcaaacatgggcgacatattccaatggtaatattcctagtgcaaataccagcaataatgactggatttattctaagatagatgactatatttctgttgcgttaagaatgactaataattgtagaacaatttatgtcccttataatgtacctacgctaagctctacttgtggttcccgtacttatactgaaaacgaagaaagcgtcgtttctgtaagaaagtatcaaaccagaataaaaattgacaaagctattatttctggtacctatgtaaaaaatatttttgtaggcgaatttggtttttgccaaccacagaattgtgcgactaaacaaactatcattacaaagctatttttaaatctttcaatgacagttccacaatcttgcgttattaattcagggcaagtgttgaatattgattttgacaatattcctgcatcaagttttaaagtagcagggaaaaaagccgaaggagttaatacggtttctagaaacttaagtattcaatgtgacaatatagatgccagtgctgatttaacaatgcgattacaagcagattcagttcaaggtaatgctattgtttctaataataaaagtgttggctttgtggttgctaattcaagtggatctgagttaacacctaatgatttatcaagttttattcctttcagactcaaccaaaatgctgatgctaatgtcacgattaatgtttatcccgtaagtattgatggaaaaacaccaactgaaggcgctgtcacatcaagtggctttctaagagttgatttcccttaa

SEQ ID NO: 297265 - DNA, 567 bp, Proteus mirabilis
atgaatgtcaatgaaaaaaaacgaggaagacccgcaagagcacattcacagctaagcgctgatgctattttaaacaaagccaagattttgatgcaaaacgacggaaaagtgcctagtatccgatcgttagcaacacaattaaatgtagatcccatggcaatctaccactacttcaaaaataaaaattcactgctagagacactagctacgtcacttacagaagagatctatattcctcaagcatattctgactggaaagaagaattaaaatatttatgtgtcagttacgttgaaatattatgtaaatataaaggattactgaatattatactgactatgtcattacaaggtcctgctcaaatatttgccaaacgatataaaattatcatctcgcctttagctcttcctaaaaaagtcgaagaagatagcctaaatttaatcgctgattatttgcacggttttactatttcaatcagttgtaatccagacaaaggtattattaaaaatgaaatgatgtatggtccattagagctaatctgtcattcattaggaatgaccaaaatgtaa

SEQ ID NO: 297266 - DNA, 534 bp, Proteus mirabilis
atggcaaatattgtatttattgcaactagcttagatggttatattgcagataggcaaggcaagctcgattggttatattcaataccaaatccaaataatattgatacaggttttatcactttaatggagaaaattgatgcgttagttatgggacgtaatacgctagacacgatactgagttttaattgtgattggccttacacaaagcccgtgtttgtactgagtaattctatgacaactgttccaaatggttataacggaaaagtatttttagttaaaggtgaattgcaagatattattaccgaattgaatgctaagggatttaatgaactttatattgatggcggtgtgacagttcaaagttttctaaatgaagatttaatagatcaaatgattatcacccgctttccgatcttacttggcggtggaacacctttatttggcgagctaaaacagccattaaatttcaaggtgattaaaaatgaagtattactagaaaatctagtccaaaccacttatttacgtgataaataa

SEQ ID NO: 297267 - DNA, 969 bp, Proteus mirabilis
atgaatgatgctaaatacggcgttcttttggtcaatcttggcacccctgatgcacctcaaccagatgcagtgaagcgctatttagctcagtttcttagcgatcctcgcgttgttgatgtttccccgtggatttggaaacccattcttcatggggttattttgccatttcgctcacctaaagtggccaaattataccaacaaatttggttgccagacggctctcctcttttagtctatagccgtgcacagcaaaaagcgttagcacaacgttttgcgcatatacctgttgaactaggtatgtgttacggtaatccttccctcaacgaaggactgacgcgattattggcgcagggcgttgaaaagttaattgtattacctctctatcctcaatactcttgttcgacatcgggggcggtatttgatggtattagccaactgtttaaaacgatgcgaactattccttcactgcattttgttcgtagttatgctcaacatccactttatattaaagcgctggtaaatagcattgacgagagtttcaagcaacatggtaagccggatcgtttagtactttcatttcatggcattcctgaacgatttattaaaactggggatatctattttgatgaatgctgccttacagtagaaaaattaaaacagcaacttgattatccagcagaaaaagtgatgatgactttccagtcacgttttggtcgtgagccttggttatcaccttatactgataaaacgatggaaaaactgggtggtgaaggggttgaacatgtacaggttatttgtcccggattttcatcagactgtttagaaacattagaagaaattaatgaacagaatcgtgagttctttatacatggtggtggaaaacagtatgaatacattcctgctttgaatgataaagttgagcatattgacttacttgaagctataatccgcgacatatgtgaaaaataa

SEQ ID NO: 297268 - DNA, 1467 bp, Proteus mirabilis
atgaagcaacgtttagaacaatcgacaactgccctaaatgccttacaaaaaaaacgtggagagcaattttatcctcaattccatttagccgctcctgcgggatggcttaatgatcctaatggccttgtttatcataacggcttatatcatgcattttatcaacatcatcctttttctgaactttgggggccgatgcattggggacatgctaccagcaaagatatgatccactggcaacatcagccaatcgcccttgctccgggcaatgagtatgataaaagtggttgcttttccggatcagcggtaagtcatgaaggtaaattatacctcttttataccggccataactggttagcagaagaagacgatgacagccaaatttaccaagcacaatgtgtggcagtcagtgaagatgggatccattttgaaaagaaaggcattatcttaccgccaccacaaggatatatgcactttcgtgatccaaaagtttggtttcaagaaggaaaatggtggatggtagtcggtgcccgcgatgaaaaagaccaaggccaagtgttacttttctccaatgacaccctatttgaagaagggaaacaatggcgttcggagtacaaggtattaggcaaaaccgatgataaaaacgtctacatgtgggaatgccctgacttttttcctatcagtgatgataacgaatttgctcttgttttttcaccacaaggaaaacgcgctgaaggttatcaataccgtaatctgtttcaaaccggtgcactgatcggtcagtggtcaccaaaacaaccttttatcatacatggtcattttactgagcttgataatggtcatgactattatgctccacaatcttttgttactgctgatggtcgccgtgtttctatgggatggatggatatgtggaactcccctatgccttcgcaacaggagttttgggctggttgtttcacgcttcctcgtgaaattaactttgataaaagggcaaaccgtttacgtatgaccccgataaaagaagttgaaagtctcagacaaacaagaaatacgatagagatgaccacactcaataaccaagcgcttaaattactcgataagacaccggctattgagttaaatttaacctggtcattagatagccaagcggaaaaatttggattatggctaggaaaaggtttagaggtatttgtcgataatcaatcaaatcgctttgtgatccgtcgccattatccacaatataatatcagtggatcacgtagcacaccgttgccagtaggaagcgaaattaacttacgtatatttattgatcgctcatcaatagaggtttttatcaatcacggagagctgacctttagtagccgttattatgcagatgaaaatgatcgcgatttatcgctatttgccacagatggcagtgccacattaatcgctggcgaatattggacactatcaacgataagttga

SEQ ID NO: 297269 - DNA, 996 bp, Proteus mirabilis
atggcgtcactgaaagatgttgctcgacttgcatctgtttctttgatgacagtctcaagagcgattaataaccctgagttattaaaaccagatacgttgaaacaagtccaacgtgcaatcgaagaactgaattatgtgcccgatttttcagcgcgaaaaattcgaggtcaagggactaaggtctcatcgatcggtgtgcttggtattgataccgcaacgacccctttttccgtggaaatgattttatccatcgagcgtaccgctcgtcagtttggctggagttcatttgttgtaaacctcactgaacaagaggggtatgatcaagccatttggcaactgttagctcaacgtccagatggtatcatctataccacaatgggattgcgagaaatcacggtacatgaaaagctacgtgataaaaatgtggtacttgccaactgcctagctaaagatcaaacttttccaacctatattcctgatgattatcacggacaatattttgcgataaaacacgtgattgaaaaaggttatcggcatccgttatgtttttatctacccgaagataccgttgcaggccctattcgccgtaaagcggtcgaagatgcttggcaagatgccggcttacctttgtcatcattgcgccaatacacgatgttatttggcgatgaacattaccgtgatgtgattggattgttacaacaacactgtcgtcagcaaaaagcagattttgatattttaatctgtggtaatgatcgtatcgcatttttagcttatcaagttttactgtcgatgggattacgtatccctgagcaagtggctgtattaggctatgacaatatgataggaacgggggagttattctatccgccactcaccacagtacagttgccacattatgacttaggtaaagaagcaacattacatattattcaagagcgtaatcataataaaacagtacaagtcccctgtcagttaattgaacgagagtctctgtaa

SEQ ID NO: 297270 - DNA, 636 bp, Proteus mirabilis
atggaatcgataatccatctgatcactttcgaagatgacagcacaaaagttcaacttaaagcagtgctttcttctttagcggcaaatgtgaaaacctattcaaatgaacaggcatttttaaagtactatttttcatcaactaaaggggctcataaagagtgcatcataattaacactaaaagtagtgcatcgccatcaattgcgttggtaaaagagttaaacaaattaaagaatatcattcctgttataattatttcgggagatgcatcgatagaaagttgccgtaacgcatttaaagcgggggctttcgaatatttaactcgccctttaaacgtcaatgagcttcttaatattgtgtcagaatcttttttacactatgaaagtgaggttgagcaattcagaacctatatttctttaaaagataagtttagtaaactatcaaatagagaaaaagaggtaatggagatgatccttgacggtaacaccagtaaagaagcagccgaaaagctctctttatcaccaagaacagtggaagttcatcgttcgaatatgtatacaaaactaaaaataagatcactaccacaactagtacaagaatatgatttctttaaaaaatatgacttaagagccaattaa

SEQ ID NO: 297271 - DNA, 750 bp, Proteus mirabilis
atggactttactgttattgctgataattggcagtatctactttttggcgcgtatcctgatgggccattagaaggtgcggctttaactatatttattagtgtgatcgccggtattgtatctattatattagggacgcttggggggatcgctctcgccatgcttaaaggggtatgggttaacttatttgccgcttttttaggttttttccgtgctattccggtcattatgttgattttttggctctattttctattacccgtggtattaggaatggaaattcctgagataaccaccgtgatctgtgctctagcacttattacctcctcttatatcgctcatggtgttaaagccggtattctcgctattggcaaagggcaatggcaagcaggtttatcgttaggatttaatcgctggcagacgctttggtatatcgtgttaccacaagcattacgtatgatggtgccctcttttatcaatcaatggataaccttaattaaagatacttccctcgcttatgttgtaggtgtcggtgaactctcattcttagcaacacaagttaataatcgcagcatggtgtacccgatggaagtttttttatttgttgcctttatttactttgtgctctgtttttcattagagttaattgccaaccgagtggggaaattatttaccacccaaaaagaaaaacgctctttttggcaatatgttatccctaataaaaaaccttcactgagtgaaaaaattatttaa

SEQ ID NO: 297272 - DNA, 585 bp, Proteus mirabilis
atgtattttttgatcaagttttatgtcagttgttcaattcattatttgaataacttttctttatatagccgtgagaagaaaaaatttaacatatcctatattattgttaatgaggtttttttaagtttacttgttaattttcctattgtttttccgctccagaacagtgctactttctcgttagagcaaggttatcttaatattgagtttattgttgcattaatcattcttttatatagtgttctgtttgttatgctttttttatcgaaggcgagtaaaattaattacctaatggggatgattatctgttatagctttgaagaagattttgctgaggtaaaaaaaagaggcctgttttgccgtgtattatggtttctgattttgatccctttaggtacattgttactctgtttattattctatttgctgaatataaaagagaatttctttttaatttattcggtgagtttatctttagttatttatctctattttattgagcggagaaataaactctatcaggaatttatattagcatttgatatgatcttacgtttaaaagcactaaaaaattttaaggagtaa

SEQ ID NO: 297273 - DNA, 654 bp, Proteus mirabilis
atgataaagtcattaaataaagatgattttaattatcatcgattgatacaacatggaaataattctttgaaaatattcatatttagctttatctctctgattatcttacccatttctgtttcccaagcgataacaccgacacaaaataaacagctggtggcttatgcaacggatttacctagagccgttatttatgatccagcctaccgtaaaattaattatcctaatggtgatgtgcctgctcattatggggtgtgtagtgatgtgattattcgtagttaccgaggaattggcattgatttacaaaaattgttacatgaagatatcaaagccaattttgcactttacccaagtaaacgtatctggggacttagtcgacctgatactaatattgatcaccgcagagtacccaatttggaagtttttttctcgcgcaagggaaaggtgaaacctattagcaaagaggcgtcagactacttgcctggtgatattgttagctggcgtttagataatgggcgtcctcatattggtctcgtcatagacaagaaaagcagtgataatcagcgctatttagtgatgcataatattggttttggacaagtcgctgaagatgttttattttcgtggaaaataaccggtcattacagttattaa

SEQ ID NO: 297274 - DNA, 1167 bp, Proteus mirabilis
gtgaaacagaacactactttggtacgcaaaggtgacagtacattagtacctgtcgcgggtttaacggtatttgctatcgcatcaggctatttaatgagtttaattccactatctatggatagttttggtattgatactttttatgctagctggttagcaagcatttactttattggattacttataggttcagtgatgatcgaacctattattgcaaaaatagggcataggctctcttttgtgctgtttttattgttgttagcattcaccgtgagtattttgccactgttaccttatttatcggtatggctagtatctcgctttttcggtggtatggcggttgcgggtatctttgttgtagtcgaatcatggttattaattggtgataatcctaaagagcgagctaaacgcttgggcttttatatgacatcactttatggtggcacaacattaggtcagcttgctattggtgccattggtacgcaaggggcaattccttttatcgcggtattggcattgctattaattgcagtgttacctcctttgttttttaaacaaggacaaccccaatgccacgagcataaaagtttgtcacttaaacagattagccggctgaataaagcttctttagtaggctgtatggtttctggcgttgtgatgggtagtatttatggcatgatgccattggctttaaatcaagggcaatttaacaccgaccaaattggggtgttgatggcagcaattattttaggtggtatggttgttcagcctattattagcaaattgtcggtgatgatgagtaaaaccctattattagccatgatgtgcttagttggggtatttgcgatgggcatgacttatctgtctaatgactatgtggtgttaattattgcattagctttattaggaatgtcatcttttgcactttatcctattgctatcacattagcttgtgatcatgttaatgcgagctatattgtggcaattactcaggtgatgttattaagttacagcgtgggttcagcaatggggccattaggcgcaggtatgtttatgtcacaagcaagtaacggcattatgaactttttctttgtcgtgttattagcgacagctgtatatatgttatttgccagtttacgacgcaaaagccatattgtgcttaactaa

SEQ ID NO: 297275 - DNA, 960 bp, Proteus mirabilis
atgaaacccgttgtaatactttatcaaccgcttccagaaaaactgcaacaaaaattatctgccgttgctgaggtaaaacagtttaacgcgctctctctcgattgtgccgattttaaagccaccctcgctcatgctgaaggattgttaggtgcaggcggtaatatcgataaacactttattgaaaaagcgccaaaactaaaagccgtatcaacgatttctgtcggttatgataatgtggatgttgccgcgctcactgaacgtcatatcaaattgatgcatacacctacggtattaactgatactgtcgctgatacaatgatggcgcttgttcttgccgtctctcgtcgtattcctgaactagccgataatataaaacaaggtttatgggtaaaaagtattacgccggattggtatggtactgatgttcaccataaaaccatgggaattattggtatggggcgtatcggtaaagcattagcacaacgcgcccacttcggttttgatatggatattatttaccattctcgtactgaatataacgatgttaaccagcattttaatgctaaattttgttccctagagatgcttttacaacaagccgattttgtctgcattactttaccgctaacgccagaaactcatcatctgttaagcgcaaaacagtttgcattaatgaaagctgactcctatctaattaatgccggacgcggtgccgtggttgatgaaaaagcattaattaacgcattagagcagcgacaaatagctggagccggattagatgtgtttgagcaagagccactgccaacctcttcaccacttttaaccatgaaaaatgttgtcgccttaccccatattggctctgcgactaaagagactcgctatgcaatggctgaatgtgccgttgacaatctgattgctgcattaaccgataatgtaaaagaaaactgtgttaatttttaa

SEQ ID NO: 297276 - DNA, 882 bp, Proteus mirabilis
atggctgagaaaacacaatctgacaaattcaaagcggccaagaaaagcacattggtcagtgtttttgttaatatctttttatccatatttcaaatcacaattggtttcttctcacattcccaaggcttaattgctgatggtattcattcactgtctgatttaattgctgacttcgtggtgttaattgcgaataaaggcagtcaaaagcaacccgatgccgatcatccttatggacattttcgctatgagaatgccgcttcattagtgttagggacgattttattgattgttggtttgggaatgatattttctgctatccataaaatgttagatccttcaatcattcctgatgttcatagcatcgcgctttatgtggctttattggcattagcggctaaagaagggttatttcgttatatgttagctgtagccaaaaaagtcgattctagtatgttagtggcaaatgcttggcatgcgcgctcagatgccgcctcttctttagtggttgcaatagggatcattggtagccttgctggatttaaattctttgacccactagcagcacttattgtcgggctatttgttggccgtatgggatggcgttttacctatcaagctttgcaagatctcatggatagaggtgctgatgaagaaacacttgaacagatcaccaatacattaatcaccacaccaggagtacaaggggtacatgatttaaaaacccgtcgtgcaggtgattatttattagttgatgtccatttagaaattaaaggcgaattaacggtcaatcaaagtcatgatattgtggtcaatgcccatgatagagtacttaaacagcatgcacagattttaagtgtgatgatacacgtcgatcctgcttaa

SEQ ID NO: 297277 - DNA, 3726 bp, Proteus mirabilis
atgaaaatcttaagtctgcgctttaaaaacattaactcactcaaaggcgaatggaaaattaactttgatcaagagccttttgttagcaatggactatttgccattacaggcccgacaggtgcgggtaaaaccacgctcttagatgcaattagtttagccttatatcacagaacgccacgcttagataaagtaacccaatctcaaaatgaattaatgactcgtcacactgcagaatgtttagctgaagtggaatttgaagttaaaggggttgcctatcgggcattttgggaacaacgtcgtgctaattataaagaagagggaaacttacaagccccacaggctgaattagcaaaaattaatcgtttaggcggtgaagataaagttttagccaataaaattagccaagtaaaagaaaaaataatctcgatcaccggattagatttcgatcgtttcactaaatccatgttgttatcacaagggcaatttgctgcatttctcaacgctgatgacaaatctcgtgcagagctacttgaagagcttactggtacagatatctatcgccatatttcacaaacaatttttaaacattggcgcgaagaagagcaggctttaaatacgctaaaacaacaagctcaaatgatggcattattggatgcaacaacacgccaagagctattaacacaacaagccaatattcaaacacaaataacaaggttacaaaaagagcaacaggaataccaagttgctaagcaatggcaagaaaaagcgctagaaattcagcagcaacaacaatcagcccaagcgggactcaatgaggctcaacaggcattaattattgctcaacccgatattcaacgcttagaaaaaaatgagccagcagaaaaaattcgccctctttatgatgaaaaaaatcgtcgtcttacagagcaaaactatttagcaacacaattaacaagcttaaaaacagaaaaacaggctattgaacaacaaagcctacctatcaataaaaaattggcagactttcatgaacaattaaaaacgcatcatgagaaaaaacagcacactttacagttaattcgtgagaaggtactgcctttagataatcaattggggctgttacaacaagaaattagtactaataaccaacacaagcataaattagaaaaaatatgcgctgaatatctgcaacattctcagttagccgagaaaaaattaatcaccacacaacaacaagttaatcaattaaataacgacttaacacaacacgcctatcacgcacaacttgcagaaaatctacccttatggcaacactattttcagcaatataatgaaatatcaagccaatatcttgccaaccaaaaacgagaaacagtagagcaggaaaaagtcataagtttggaaaaagcattacaacaagccacccaaacattagccacccagcaagagcaacttaatttacagcaacagcaactacaatcttatcaaacacaattggacgcacgtcaaaaggcagacaaacccgatgaaataaaaccgcgattacaacaaattaatctgcaaaaaaatgcattggcaaaaattataaatttacacactcaattacaacgtaatggcaaagagcagcaacattatcaaactacattgagtgaaaatcagcaaaaaatagcaactctaacccaaacgattgcagaaaatgatctggcactaaaagagaaagcacaacatcttaaagatttaaatgacaactatcttttactacaaaaagtcgccgaatatgagcaagagcgtgcacgtttactgaaagataaaccttgccctctatgtggctcaacacagcatccttatgtagaaacctatcatgacatcaaaccagatgagacaaagctacgtttagaagcattacaacagcaggtgcattcactcaccatcaccttagccgaacagcgaacccaacgggtaaactatggctcgcaaaatagcaccttgagtgacaatatcgctcagttaacccaagagaatagcgtactgacccaacagtggcagacgttagcacaagcacaccatttaccgttagttgatgatgcagataacttactgacattagaacaatcattaaatcagcaagagcttattctcacagaaaaacttgacaattatcagcaattagaagcccaaacacatcaaaagaatacgtattttctcaatgcaaaagagcaatttaatcaacaacaacaatcggttaagcaacagcaaaatgatttagattatttgcaaaaaacaatcaaaacctatcagcaacaaagcgagcacttgcaccaacagcaacaacaattagcacaacatattcagtcagcgattgaaaaacaaggctatacactccctgaatttgagcagttcacgccatggttggcggctcgtcaacaagagcaccagcaatatcaaagtcagttaaaagagcttcagctattacaacaaagcctacgtgaacagcaagtgacgcaaaatgaaaaaaaacgttatttagcagaaaaacaggctgaacttgaggcactattagcaaaattaagccaacaacaacaccaacaaacacaatggcaggatcaacgacaagccttatttggttcacaatctgtagagcaggtacgcagtgaacttgataaacatagccaatttttacaaacccagattgagcaatatactcaagaaaaaaaccaactagaaaaccgacttaatcaattaattggccaatatcaagagaatgaaaaagccctacaacgagcaataacacaagcacaacaagccactgaacactatcaacacgcgttaaaagagagtctttttgccgatgaaaatgactttttagcctctctattatcggtagaggaaagaacacgtctacaagagcagcaaaaacagcgacttgataaacttttacaagaaaaaacgcgccttgagactcaagaaaaagcctatcaacaacatttattacaacaaccattactctcaacccaatgtactgctgagcaatgtaatatccatttagacgacttagcaaagcaacacaaagcgttgcaagaaacactatttagtctgcaaatacaattacgccaagatgatgaaaaacggatagagcaacaaacactattagcgcaaatagccaaacagcaagcgcattatgatgattggagttatttaaatgagttagttggctctgcatctggtgataaatttagtcgctttgcccaagggttaaccctcgaccatcttatctatctggctaatcgtcgcttagaaaaactacatggtcgttactttttacaacgcaaaacgacaggtagccttgaattacagattgccgatacatggcaagcagatgctctacgcgatacacgtacactttctggtggagaaagttttttagtcagcttatcccttgccttagcgttatctgatttagtcagtaataagacgcaaattgagtcactctttttagatgaaggctttggcactctcgatcctgatacactagatattgctttagatgccttagatagccttaatgcttctggcaaaattattggtgtgatcagtcatgttgaagcgatgaaagagcgtattcctgtacaaataaaagtgaaaaaagcggggggtttaggaataagtcagctagcacctgagtttagatatggtaataagagcaatgaaaatcaatcagttaaagactag

SEQ ID NO: 297278 - DNA, 1293 bp, Proteus mirabilis
atgaaattatataatttaaaagataaccaagaacaagtcagttttgctcaagcggttaaacaaggtttaggaaaacagcaaggactcttctttcccaaagacttgccttcattttctcaagcagaaattgatgcgctattaaaattagactttgcaacacgcagtagccgtattttaagtgcttttatcggtgatgaaattcctgctgatgtgttagcaaaacgtgtgaatacggcatttgcttttcctgcgccagtgacacaagtagaagaggatattagttgccttgaactcttccacggaccgacgctggcttttaaagactttggtggccgttttatggctcaaatgttatcagaagtcgcgggtgaccagcctgttacaattttaacggcgacatccggtgatacaggagcagcggtcgctcatgctttctacaagttagataatgtccaagtcgtgatcctctatccacaaggaaaaatcagcccattacaagaaaagctattttgcacattaggggagaatattcatactgttgctattcaagatgactttgatgcttgccaagcattagtcaaacaggcatttgatgatgaatatttaaagaacaccatgcatttaaactcggctaactcgattaatattagccgcctactggcacaaatctgctattactttgaagcggttgcacaaattccagctgaaaaacgtcaacaattagtcatttctgtaccaagtggtaattttggtgatctcactgcaggattactggctaaatctatgggattgcctgttaaacgttttattgcggcgaccaatgtgaatgataccgttcctcgctatttagatagtggtaaatgggaaccacatcggacaatagcaacactttcaaatgcgatggatgttagccagcctaataattggcctcgtattgaagagttatatcgtcgcaaaggttggctgttatcggatctttcgcatggggctgtgagcgatgaaacgacggaagaaactgtacgtgaactggcacaaaaaggctatatttcagagcctcatgcggcggttgcttatcgtctattacgtgatgagctacaagaaggagaatatggggtatttttaggtactgctcatccggcgaaatttaaagaaaatgtcgaacgtattttaggtgatacattacctttaccaaaagaattagctgagcgtgctgataaaaaattactatcgcatcttttaccggcagatttttctcaattaagagcatttttgttagaacgagcacctaaataa

SEQ ID NO: 297279 - DNA, 1242 bp, Proteus mirabilis
atggtataccaacttggtataccagaaaagaatatttctatgactcaattatataacagcttttggcgtcgaaatctgctcgtttgctttattggttctttttcaactgtttttgcaatgaccttgatgttaccgttcctccccctatatgttgaagagcttggtgttcaaggtcacgccgccattgtccaatggtctggcgtggcattcagtgcaacctttatcactgcaggcttaattgctccagtatggggaaagctcggtgacaaatatggacgtaaatcgatgctcgtaagagccagtcttggtatggcggtgaccgtctcacttatgggaatggtaacaaatatttggcaacttgtcggtctaaggctattagttggtttggcggggggatactcatctggagcaactattcttattgcagtacaagctccaagagagcgtgttgcttgggcgttgggcattgtttcatgtggtgtaatggcgggtaatcttattggccctctagctggaggttggttacctgacttgttcggtattcgaaacacgtttttctgtgccggtgcactgatctttttgtcctttatcatgacccttacgcttatccgtgaagatacgccgaaatacataaatactacgacaaaaatgcaagtgagttggtcgcagttaccagcacgatttgtgatagttagcatgctttgtacggggttgttgctgatgctggccaatatgtcgatagaacctattattacagtttatgtgcgtacactcgttaatgatcctgctcagataactagggttgcaggttatgtcatggccgctgctgccttaggtagtattatttcagcctcttggcttgggaaattagcagataggatagggcatttgcgtattatcacgctggcactagctatagccggtttattgctgatccctcaggcctttgttacctctggttggcaacttattattttacgttttcttatgggattagcattggggggattgttgccttgtattgcggcagtaatacgtcatcacgttccagaaggaatgataggcagtatccttggctattcggtcgcagcccagtttgcaggtcagttcatcggcccgttaataggtggcgttattggtggtcatataggtatgcgcgcagtttttctggcaactagtgttgtcttattgttgggagccgcttggaattttaaattacatcgtaattcagttatacgctga

SEQ ID NO: 297280 - DNA, 1059 bp, Proteus mirabilis
atgaaggtaacacaaatccttttttataataatgaaaatagtattacagataatgaaataaaaaacctatttaatatctttgatactcaggtcattaataatagtagagtggatgttaatcttgagactgccaaaaatcaaataaataaactcgctgatgcagttaggaatggaagctcaatagatttagattatttagtaaacatcatgtttcatgatgatataaaaataagcttatatgcaactaatcagctctacttgatttatccaaaattaaataactcgataagagaagatattaaagagttagtcaaattactctatgaaataaaaataaaagaggatcaagagtattttaaagaacgacctttattaagtgcaatggcttgtgaggaagcgattgctagacaaaagggaaaaggggagaatgtttttatctcagcggttgataattatttaaatataaaatgtaatgatagcgtattggccaatagtaatgaaagcgtaagtaataataatcgatatatatcttcatctgaattagagtcttgggcgtcatttcaaccctatcagtgtgatattggttcctatgaatcaatacttaaaaaaatagaaaatagcaaaggatccgcggagttaaaaaattatgtggttttagtcaataataaccattgggttgcgttattgacttataaagatagctgttttttatgtgattcattgccctcaagcaaaaaagatgaacgtcataacttattaattgaactagaaaaaaaaggatttaatactatcaatatagaatataatctacaagaaaatgtacctaatggatgtggtcttttggcgcttaattatattgatagtttacataatgaatggaataaatttaatcatgaaaaagaagatgatttaatatccacaatagaaacagtattacaaaaaacaggaaaagactttctaaacctaagttgtggtgagcaaaccacatttaatcatgatgttaggaaaaaattgattatggatacacttttttgtattgttaaatctagttatgaatag

SEQ ID NO: 297281 - DNA, 669 bp, Proteus mirabilis
atgaataatgaagaaaaaaatcgtcgtcctataaaagcaagacaaaccaactgggcaactcgctgtagtcgctggctgcaaagcaaaggcgctacccccaatgggatctctttatttagtatcctattcgctgctatctccggtttgtttctctactttgctctcgctcactcccaaggcctacttcaatcaatccttcttattttaggtgcattagctatccagggtagacttatctgtaacctactcgatggcatggtcgcagttgaaggcggattaaaaagtcctgctggtgccgtttataacgaactaccagaccgaatagctgatacattgattattattggtgtaggttatggtttatccatcacttttcctatcgctattaccttaggctgggtaaccgctttctttgcggtaatgacagcttatatccgtgtattaggtggtagttgtgggttagaacagcgttttacgggaccaatggccaagcaacatagaatggcattattaaccggtattgccattatctctgcatttattcccgctgaatggggagcatggctctgtttagtctccctgtggatcattatcttcggctctgtacttactaccattttgagaactcgccaaattttacgcgatttaacacaaggagttgatgaatga

SEQ ID NO: 297282 - DNA, 681 bp, Proteus mirabilis
atgaaaaatggcaaactctctttcgatgcaaaaatcatatcatcagtcttagtctctatctgccgttttttaaccgggatcagagccaaacaaatatctccgattgagaaagataaaccttgtatttattacgcaaatcactcaagtcatctagatggtttagttatttggtcttcacttgccccccatattcgcccatttgtgcaccctgttgctgcagaagattattggaataaaaaccgtttacgtcgttatctttctcgtcgtatctttcgtgcagttttgatcccacgccacgcgaataaaacaaatgttactgaaggaaatggtgaaacaacaactgcacctcagaaagtaaatgctcttacactgatgcaggctgttttagataaaggtgaatcgctaattatttttcctgaagggactagaggtaacggtgagtctattcaggattttaaagccggtctttggcatttgtcccgtaacaatccacaggctcaattagtccctatctatcttgaaaacttaaaccgcgtacttcctaaaggctctcggcttgttgttcctatcatttgtagtgccacatttggccctcctattgagccgacacatgaaaatgaagataagactgaatttctattaagagccaaaagtgcgttagaggagttacatcatggatag

SEQ ID NO: 297283 - DNA, 906 bp, Proteus mirabilis; identical to SEQ ID NO: 296025

SEQ ID NO: 297284 - DNA, 228 bp, Proteus mirabilis
atggagcatgtttatatcaagccagctacccccagattgaatggaaaggtagagcgttctcatttaacagataaacaagagttttatcaatatatcgattataagaatgatgtcgatttacatgaaaaattagctgaatgggaggctttttataattgtcatcgccctcactcagcgcatgctggtaaaacaccgtatgaagtgttaaaaaataagcttagtctttaa

SEQ ID NO: 297285 - DNA, 546 bp, Proteus mirabilis
gtggccattatccgttctaatcgttttgattctaaagggaaatttatttacaacataattaataaaatcaatggcattagcctgattgtgcttttcataaattttaagtgctctgatccgtgtcgcatcatcaatcgtcgtatattgaaaacgtttaattcattgaccatctgcgtattaaatcaacctgagcatggtgcccaggcacttgtttctgaattacattttaatacctttagattctacgacccacagataagccgttttatcatgcctgacccaattgggctattgggtgggataaatctgtatcaatatgcgccgaatccgttgggctggattgatccgtggggggtgtcacaggctttaatttatgagaatcccggacatcatagattccaaagtagtgctgctgatggctcaggaccattccactggaatggctcaacagatggtattgatattaaaagcaaacctagagctatagatccaagaaatgtgcataagtatgcaaaaaatatggaaggtataaaaccgtgcaaatga

SEQ ID NO: 297286 - DNA, 504 bp, Proteus mirabilis
atgaaaacaaaatttataggaacaaaaaatactcttgcagtcgaatatttttttgaaaataaagagaaatttattgggcgagcaaagttttgggttaatggcttattttttggaagcttaaacgatacaattttttttgatggctacttaatcggtggactcaatgaaattttaaacaaaaaacacttaaatcaaagatatttacttgataattattgttctacttatgaactattagaagcagatatcttagactttaatggtgaagagtatgagttagccgaaagttttaatgttaatttaggaacttggtcagattattttaatatatattcatacaaattaaccgatgaaattggtgccattttatggaaatttgttgatactagtgactcattggaggatttaatagattatcctaaaaatatcttctatgaagagtttagatatgatgaattacatcatatagtaaataatttaaagctactaaagcttgatcaataa

SEQ ID NO: 297287 - DNA, 711 bp, Proteus mirabilis
gtgggattagatgccttatctgatcctgaaatcgctacggcggtagggaacgccatgtttgccgatttagtaagtgttgccggacatatttataagtttggcattaatgatggtttaccgaatgcagatgaaaaaaagtcatcaattagtctgcattgtgatgaattcaatgaattgatgggggatgagtttattccgctaattaataaaggtggtggtgcaggaattgaagtaacagcctatacgcagactttacctgatattgaagcgcgagttgggagtgtggcaaaggcagcacaggttgtgggtaattttaatagtgtggtgatgttgcgagtgcgacatactgaaacggcagagctattaacgaaacaattacctgaagttgaggtgtataccaaaatgttgatttcaggagtaaccgatatttctaatgctgatatgggcggtgattttacctcgaatacacaagatagagtaagcaccgttagaacacctttaatcacgccagcaaatattatcaatctacctaaaggtcaggcttttgcattatttaatggagggcaactttggaaattaagaatgccgttaccttcagataaagcggatctgttaatgcctgagagtatgaatcaaattgtggattacatgcgacaacattatagaacgagtgatacctggtggtctgatagtattctcaccaatcagtga

SEQ ID NO: 297288 - DNA, 759 bp, Proteus mirabilis
gtgaatttgaaaaatgatatgtcgcagataaatacatcatcaacgccattacctgtatcaccgaaaaagcgtggttttttcatcgtattattgtgggaactgccttggcagattattggcgttttgttggcttcacttttgtttagtttgatattggaatatatcggtattttcttcttttgggcggaagagggagcacaacatagttaccaaattatgctgattgaacgaacttattttgctgaaagttttacgcaaagtgtatttttatcttcaccactgataacagtaatttattggatcactgacttttcgcaatggatgcaggatagtttgctgaaaataccattatcagccataagaacgggtaatggtgttactgatgggattaatgtaggagcaataaaagcgattcaagcaggggagcaatatctactcgcgacattctttgttttacaaatagtgatgatgcgagtcacgatcctcgtgctatcaattccattgtttattttggtgataatagtcagcgttgttgatggtttggtcagacgtgatttacgtcgatatggtgcagcttatgaatcgagttttctttatcatcatgcaaaacgaataatcaagcctgcaatttatattccttgtgtattgtatttatcactgccatttgcagtttatccgaatattttgttgttgccttctatcttgttgatagggatggctatttctgtgacagtggggagctttaagaagtatttgtag

SEQ ID NO: 297289 - DNA, 207 bp, Proteus mirabilis
atggtaatgaaaaaaagaatatcagtgataccagaaccttcttttttccaaactccacaagttattcagactcgagaagatggaagtacagttagcactgcttatagtcgtagtggaaaagaagtgacctttattactccaaaaggaaaaaagatcagggcattgcagaatgaagtttttgatactttattgaaatcaataaaataa

SEQ ID NO: 297290 - DNA, 771 bp, Proteus mirabilis; identical to SEQ ID NO: 293458

SEQ ID NO: 297291 - DNA, 552 bp, Proteus mirabilis
ttgcgcctatttggttatgcaagggtatctactagccagcaatctctcgatactcaaaagaaagcattgattgatgccggagtggcaaagcatcgcttatttagcgataaaggatcaggaagtcacattaatcgtgatggattgcagttactcaaaattaaagttgaatgcggtgatattattcttgtgaaaaaactcgaccgtctcggacgagatactgcggatatgattcagttgataaaagaattcgattcaatgggtgtagctgttcgatttttggatgatggtataagtacagaaggaacaatgggaaaaatggtggtcaccattttatccgcggtggcagaagcagaaagacaaagaattttggaacgaacaaatgagggcaggcaagaagctttgctcaaaggggtaaaatttggacgcaagcgttcagtggatcgcgaaagaattattgagctaaaacgaagtgggtggggaggaaccgcaatagccaaagaaatgaaagtagctcgttctacggtttataagatcttgaatgaagaaatataa

SEQ ID NO: 297292 - DNA, 966 bp, Proteus mirabilis
atgagtaagtggctattagacaggctatttgaagccggtgatcaggcagagccccggtttgcgtttcaggggactgtaaattggatgagggcccttgccgaagtcgttaacggtggcgcttgtgccgatgataaactaaatgatttatatgctcgggtacaacgtagacctgtcaatcgtgaagctgatacgcttgtgtttgagaacacaatgatggccttacataatctgtcatctttgaaaagtatgaataaagatgtcgaagataaatatgacatatgtcgttcagctattatttcttggtattacagtatctatttttccgctagcgcgatggttgcagcatcttctggttctattcaagagacacatacagccacagcaaaagtttggcagtcagatatcgcggaaaaagaacttatcccatatccatttaatcttcttctaactagtttagtttcaaacactgctgatgccgagattgctgcatatagaggtgctaaccgtttcgacctgaatgttagagcttatgataatgaaactgctcatggtgcactggtttcctatctaaaggggactcatggctacaaaaagtgggaaacagaagagagggtgagaacttctcgtgatttcaaggctcttggtgttgacaactttcgcacgaaagctgctcgcgaagttcgcgatcacgcactagaaaaaggacaagttaatttccttattcaggcatttagataccgtggtaaagcgaactatcgtgactctatatttttatcctacggtgacaacaacgaagctactatagaaaaatttatccaagatttgtatgacgtcgctattggcttcattagggctacttcgcattattgcagtcgaagagtcgagagaggtacgtgggctgagtttgtcgaggatatttctgataactcaaggttgtctattgactctgtcgtgcttgaaatataa

SEQ ID NO: 297293 - DNA, 2079 bp, Proteus mirabilis
atgaaagttgaactaccaaagattacggatgatgatattgcttgggtagtgagagtattaggtttacccgatgatgctttttccccagaaaaagatggtggtgcaagagagcgaatactaaaatcccttggcgaaacattggatgtatcggcttgtcccggtagtggaaaaacaactttacttgttgcaaaactggcgatacttgcacgtaactggccttatagacgtcaaggcatgtgtattctatcgcatacgaatgtagcgaaagaagaaattgaaaagcgcctaggaggaacggaagtaggccaggcacttttgtcatatccacattacattggaactatacatggatttgttaatgaatttatggctcttccttggttgagatctaaagggtatccaattaaggctattgacgatgatatagttaaaagacatagaattagttgtcttaattggaaagatcacccagatctgaaaaaatggctaaatcgtaaggtacgaagttcaaagtgggatgttaatatctcagatatcattgacccatggattatctcgtcaccagcgttcaatgttgtagataaaagcggaatgccaatatttaaaaaccctgtagcatcctatgatcaactaaaaaatcttgttgagcgtgtagttgctagaggttatcaccgatacgacgaaatgtttatgtgggcaaatgatcttatcgactctttacctaccgtaaaacagtatatccggggtcgctttcctcttgtatttttcgatgaagttcaagataacagcgaaatccaatcatctacacttcatcgaatatttatggaaggagatggagcaagctgcagaatgcgattcggtgatagtgatcaagaaatatttaattctactgttgaaattaacggagcaaaaactgataaatttccatcagataacgttaaatatgatctcccaaatagccatcgcttcagtcaatcaatagcaaatttagcttctcccttatcggtagggaaaatgagattgtcaggccaaggacctaagatcggttcatcaaaagacacagctcacgctatatttctaattgacaaagatagcacagaggctgttttaaaagcctacggacagtatttgctctcagtatttgatgaagagcaggaattattggatcgattgacttttaccgctgttggagctgtacaccgaaataaaaagggggcggaaaaaaataaaccccacaatctgtctcattattacactaaatacgatccagatatcgctagtaacgatccaaaacctaaaacttttttgcaatatgtcaacgctggtcataggttgggagagaagtttgccgccgaaggaactggaggtgaatcactcactacagttgaacgtatttctatggggataattaactttgctaaagaggtatcaagccaattcgatccaaagccaagacaaagaaatcatcgattcattttggagttactaaaagatgaccatgcgaattacgataactacctcaaacttattagttattttgctgttgaccgaaatttcccttcggaagctgattggagtagttcatggcagggtattataatcgacatagttacctcgttatctggcgtagctccacagagcgaccacccttttctaggctatcaactatctgaagattcttcttcaaatcatattggcactcggaacaatacatatactgtagagagtaacggacggaaagtgaatattaagttaggttcaattcattccgtaaaaggcgaaacacataccgcaactttggtgttagatacattcaataaatcacatcatttaaaaatgatttttccatggataaaatgcaaacccaaaaataaaatttctgattctgatgcaaagagattaaagctccattacgtggctatgacacgcccttcacatctattatgcttggcaatgaaaaaaagccatgtcgaaagtaagaatggagaaataaatcaaaaggaagtcgatgcattgaaaaaacaaggatggagcaaagtggctatcgtcgatagtacaggtaagtgtgattggttgtga

SEQ ID NO: 297294 - DNA, 2025 bp, Proteus mirabilis
gtgtacctaaccgagttaaccattaccaattttagatcatttggttctgacggtattacagttaaatttcgtgaagggctaacagcccttgtgggtgaaaatgactctggcaagacagcagtaattgatgctctgagatttcttctcggaacaaccgatcaagaatggcttcgatttagtgatgatgacttccacaagacacgtgaagatagctcagaatcaagtgaaattaaaatatctggtacatttaaaaacttaacatccagcgataagttagggttcgttgaatacttaacctacggaattaataaggatgatgaacctacacttcaccttacacttacagcaaagcgtatgggaactagggcaggaaggccatatatctccacagagattcgatctggtaagaatggagagggaccaaatatggataacaactgccgttcattgcttgctgcaacatatctaaggcctcttcgtgatgctgagcgagagctttcctctggtcgtaattctaggctttcgatggtgctaaattcgctcgatggagcagaaatgggccagttgtttgatgcggaaacatttagttatgatgacattaaaaaactggggctattaggactaggtgacttattcaataagctgattgaacatcaccctcatattgagaatgggaagtcaaaagttaataatcatttagaaaaactacaacttcatggagactcactaaaaagctcgatatcagttagtcaaaatggctctgattcccagaggcttaggcaacttttagagaagctaactctcaatgtggataatactcctgggcgaatggggctaggatcaaataatattctttttattgcatgcgaattaatccttttagccgatgaccaagagcattttccgttattattaatagaggaacctgaggctcatgtgcatgcacagcgacaacttaggctaatacaatatcttcaaaagatagttaactcaaaaaaagatgaagaaaacaaaccacaaataataatcactactcatagccccaatcttgcatctgaggttaatctcaataatttagttattattcaagcaggcagagctttttctaccgctgatggtgaaactgaacttgattcgaatgattataaattcctctcacgttttctagatgtaactaaagcgaatctatttttcgcccgtggtgtcatgattgtagagggtgatgcagaaaatattttgatccctactttggccaagtgcattgggaaagattttacggaacatggagtttctatgatcaacgtcggaggcgttgggctacgacgatacgctaaaatattcatgagaaaaaatcctgatcaagatggaatacaatctgtacctgttgcttgtgtcaccgatctggacgttatgccaaactgtgctccctatattactaaggtcatccaagacgatagtgattggacaatattaggggacggagagaacagaaagtggcgtgctaagcgggattttacattgacgaaattaaatgaacataaggaaaagattaaatccaaggcccatgggcaaaatgttaagtcatttgtagcagatgagtggacactagaatatgacttagcatttgcaaacaacaacgctttggctgaagagctctatattgctgctcaattggctatatgggatgagggtaataattactctgaaaaaacagctaaggaaaaatttgagaaggcccaatccaaatatacaaccttaaaggaagaagctgacaaacttgcagcagataagggttggaacaagaatgaagttttagccagtaaagtctatgcaatgtatgtcacaggctctaaagcttcaaaatccatcgcggcacagtatttgtgtggaattatcatggacaagataacccttgaaaaaacatatgatttaagaaccaagctcccgggctatattgttgatgcaatagactatgttacatcgaatcttcgtattgtttcagggagtaagattaatgaaagttga

SEQ ID NO: 297295 - DNA, 555 bp, Proteus mirabilis
atgaacaaacctatttcctttataatctgtttcactaccttatttataacggcttgtactcccaaagaaaaacttcaacaacctgaaactgaacttagccccattattctcaataaaaacactcaaacagcacagcctgatttctatgcaatgacaccaaaagttattcgttatgatcgttatttattaataaatacatctccaacgttggctcaacgtgacccgatcgaacaaataattgatgttcatatcccaacttctcaacaatcctctattagtgatgcaatgcgttatattttacagccatcgggatattctttatgtaagacgacatcttctaatcaggtgctctataaccaaaaactccccgttgtacatcatcaattagggcctatgcgtttaaaacaggctttgcaaatattggctggtgttgcatggcaacttgaaattgatgtagtacaacgaattgtttgtcattcattgcgcgaaggctaccaattaccaccagaaatacccataaattcaacatcattagggaatagggtgttgaaatga

SEQ ID NO: 297296 - DNA, 705 bp, Proteus mirabilis
atgaaaaagcagcctatattgaactctcaatttctggttttattggggattagcgtgttgacagtgtcaacaggaggaatggcgactaaaaatcagcatcaagttttaaaaatcgaacaacaagcattagaacgatcactactcgctgaaaatgctcaagaatggaagttaacagagaaagaatggcaacgttatgaaatgctaaaaaaggggaaacgaggattgttttcaccgaacttagatcctttaactttattaggcattgaagcgcgtacttatgaagagcgacgttattttgctgaattagtggtgaaacaagaatttcagcgcgttgaagcggaattggctttccagcgagaggttaatcaagcatggcttcgtctttatcctgaaattttacccattcaaaatgaaataagagaaagccgtcaggctttatttttgaaagaaaattgccctgtttgtgagggaaagctcgctcaacttattaagcaaaatcaacctattgatatctatttagtgggaagcgaggggaaagatgatgtgatacgaaattgggctaaaaaacatcatatacctatcgaaaaggtaaaaaagcgccatatcacattaaaccatgataacgggatatggctaaagcatggcaatggaatgatgccagtcgttttacaacaaggagcgcaaggatggcaaagagtcgattag

SEQ ID NO: 297297 - DNA, 546 bp, Proteus mirabilis
atggcaaagagtcgattagtttttttatttatcttcgttggaatatctccctgttttgctgaagtaataccgtcactcaatacgaaacaaaccgaattaatcgttgttgctgatttgggtgggcaatcgaccgaaaactatttccaagctatatcaccacctgataacgaatataaggcttcatctccttccgatgtgttgacactgtcaacacctagcctagttagtttattgccagtaagcacaccagaattaacacctggttatcaaacaaataaaacattgagtttaaatggaatgtcaccgctatttttacttggtgatgatgatttttctcgactttggttaacagagaaaaaggaacaactgattgagcttaatgcagtgggctatgtggtcaatgttgataccgaaacggcgtggaatgagctaaatgaattagcgcaaggactgacgttattgccggtatcaggaagtgatttagccctaagattagggcttacacactatcctgtgttaatcagtgataagggattagaacaatga

SEQ ID NO: 297298 - DNA, 711 bp, Proteus mirabilis; identical to SEQ ID NO: 296484

SEQ ID NO: 297299 - DNA, 1512 bp, Proteus mirabilis
atgcagggtgcaatgacacgaattttattgggaagcgttatgttcagcgctgctatttgtcaggttcaagctgaagcactgcagcctgatcctgcttggcaagaagggcgactcgcaaatggtttccaatggcaaattttacaaacaccacaacgcccaaatgataggatccaaattcgcttattagtgaatacgggctctttatcagaaaagcgcagtgaaacagggttttcatctctggtgtcaaaactgaatgtgttagaaaacaccggattaacaccagaaaaacgcgataatctttggaaaaatgcattcgatcctgattatccattgccaccgatgatcgtctcttatgactttacggtttataacttaagcttgcctaataaccagcctgaattattaaaagatgcctttgcattattggcgggcatagcaaaaccggcacaatatacagaagatgcggttcgaaatgcgattcaatcaccgcttccggtggtgacttttcccgctaatattgatgatcctatctggcgttcacgtctagaaggctcaaatctaaaaggccataatccaggtaaaccggttaatcattcggtaaatacaaaagagttatcagattatcaacagcgttggtataccccagatatgatgacgttatatattgccggtaatgttgataatcgtatcttaaccgaaagtattaatcaggcattttcttctctggaaggaaaacgcgtgacacctgtgcctgtgcctgttcttgccgatatgaaaccagaaacattgtatgtgcaagaacccatgcgaaaaaatgaccaaatctctcttatttgggatctagattggtcaccagtgaaagattctgacacactgagccgttattggttaagtgatttagcgcgtgaagtgatttttgtgcacttaggtcgtagtctcgaacagcgtaaagaaaaagaaagtacgcaagtgaatatcgattgtcgagtgcaatatcaacgagccagttgctcgttaaatgttgatacagcaacggcaaatattcctgcacttgccacttgggtgggggaagagcttggcgaattacgtaatcaaggtgtcagtgatgaattgtatcaagacttactacaagaaaagcaaattcaactcactcaattgtttgcgcgttatgccaaaacaagtacttctatcttaattaatcagcgtttattgtctcagcaaagcaatattattgatattccaccagagcaatatcagcgtttacgccaagcatttttagcgggtttaacgaaagagatgttaaatcaagagttatcgagaattctatctgaggatatcacttttgtattaacgcaaagtagtgagacgccaacggtaaacttgggtgaattgcgtgtgcaatttgaaaagcaagttcacccagaaacagcgaatagctcaaacacggctaaaacatcgttaactactggtgaaaaagcttcggtgcaggcagatgcacaacagacaaaatag

SEQ ID NO: 297300 - DNA, 207 bp, Proteus mirabilis
atgccatacgttaatattaaaattacccgcgaaggtgcaacagcagaacaaaaagaacaattaattgctggggcaacacagcttttagtggatgtgttaggcaaaaatcctgcgacaactgtcgtcgttatcgatgaagttgatacagataactgggggataggtggtaaaacagtaaccgatttacgtgccagtgcaaaaaaataa

SEQ ID NO: 297301 - DNA, 843 bp, Proteus mirabilis
atgctgagctatcgtcatagtttccacgctggcaaccacgccgatgtattaaaacatattgttcaaaccctgattattgagtccttaaaagagaaagaaaaaccgtttctttatttggatactcatgctggcgctggacgttatcagctcaccaatgcacatgcgactcgcacgggagaatacttagaaggcattgcacgcttatggcaacaagaagaggtgcctgagcttatcttgccttatttggaggcggtcggttcgttaaatacatctgatgagttacgttattatcccggctctcctttattggctgctaaattattgcgtgagcaagatctgttaatgctaaccgaattacatcctaccgatttccctttattacgtacggaattttcccgcgataaacgtgtgagagtgtgtcgggaagatggctttggacaattaaaatcaaaactccctcccgccagtcgtcgtgggtttgctttaattgatccaccttatgaacttaaacaagattatagtgcggttgttaaaggcattgtggaaggctataaacgtttcgccaccgggacctatgcaatttggtatcctgttgtgcatcgccaacaaattaaacggatgctaaaagagctagaggccaccggtattcgtaaaattctgcaaattgagttggcagtgaaaccagatagtgatcaactaggtatgacagcatcaggtatgattgttattaacccaccttggaaattggcatcacaaatggcgtctatcttgccttggctacataaaaccttggttcctgaaggtactggacacacattagttgaatgggttgtaccagaataa

SEQ ID NO: 297302 - DNA, 1353 bp, Proteus mirabilis
atgagcaaacattacgattatatcgccatcggtggcggtagtggtggcatcgcatcaatcaatagagcggctatgtatggccaaaaatgtgcattaattgaagcgaaagcgctaggtggtacttgcgttaatgtcggttgtgtcccgaaaaaagtgatgtggcatgctgcgcaaattgccgaagcaattcatcaatacggtcctgattatggttttgatactacagtaaaccgttttgattgggatacattaatcagtagccgtactgcttatattgatcgtatccaccaatcttatgaacgtgtattaggtaataataaagttgatgttatccaaggctttgcccgttttgttgatgcgcatactattgaagtaaacggtgaaaaaattaccgcagataatatacttatcgccacgggaggccgtcctattcagccaaacattccaggggctgaatatggtattaactctgatggtttcttcgaacttagcgcattaccaaaacgtgttgctgttgtgggtgccggctatattgctgttgaattagcgggtgtattaaatgcgttagggagtgaaacacacttatttgtgcgtaaacatgcaccattacgtagttttgatccactaatcgtcgatacgctggtggaagtaatggaagcggaagggcctaaattacacacccatgcagttcctaaagctgtggttaaaaatgccgacggtagcttaacgttacaacttgaaaatggcttagagcagacggtagatactttaatttgggcgattggtcgtgaacctgctacagataatatcaatttagcggctacgggtgttaagctaaatgaaaaagggtatattcaggttgataaattccaaaataccaatgtgcccggtatttatgccgtaggtgataacacaggtgcggtagaattaacccctgttgcggtagccgctggacgtcgtttatcagagcgattatttaataataaacctaatgaacatttagattataccaatattccaacagtggtatttagtcacccagctattggtactgtgggtttaacggaacctcaagctattgagcaatatggcgctgagcaagtgaaagtctataaatcttcttttactgccatgtatagtgcagtgacacgccatcgtcagccttgtcggatgaaattagtctgtgtgggtgctgaagaaaaaattgtcggaatccacggtattggttttggcatggatgaaatgttgcaaggttttgcagtggcattaaaaatgggtgccacgaagaaagattttgatgatactgttgctatccacccaacggcggcggaagaatttgtgacaatgcgttaa

SEQ ID NO: 297303 - DNA, 141 bp, Proteus mirabilis
atgttttattataatgttaatgaatataataatttgttaataatactaataagacataataccattagaaacattatggttacttataaaaaaaaacctattgataataaagtggaacaaaagagtcgaaataagtattaa

SEQ ID NO: 297304 - DNA, 429 bp, Proteus mirabilis
gtgcaagagcaacgtccgtcgtactttagcctcattttaatattggggcttatttccatgcttatgccactggctatcgatatgtacctgccaagtttacctactatagcacaggattttggcgtgcctggtggccaagttcagatgacattaagtagctatatctttggttttgctattgggcaaatggtctatgggccgatggcagatagcctagggcgtaaaccggttattctaggtggtgtgattgtttttgcattagcgtcgagcgcttgtgcactatctgactcgatcgatatgctaattggtatgcgttttctacatggatttgctgctgccgctgcaagtgttgtcattaatgctttaatgcgggatatgttttcaagagatgagttctcaagaagcatgtcatttgttgcattgtcatga

SEQ ID NO: 297305 - DNA, 1734 bp, Proteus mirabilis
atggtaacgagaaatcagtcctatcgtgaaaaagtatcccaaatgatcagttggggtcactggtttgcgctgtttaatattattctaagtcttttgctaggaagccgttacctgtttattgctgattggccaagtacctttgcaggtcgtctttacgctattgtcagttggatgggccattttagttttattgtgtttgctatttatatccttattctttttccgttgacctttgtggtagtttcgcaacgattacttagggtgatatcctgcgccttagctagcgcaggattgacattacttatttttgatatagctgtttaccagcaatttcaacttcatttgacccagttggtttgggatttggttatcaatccagatgaaggtgaaatggcgcgagaatggcaacttatctttattggcatccccattatctttcttatcgaaatgctatttgctacatggagttggcaaaagctgcgcagcttaaaccgccagcgatggggaaaaccattagcctgtgtatttattagttgctttattttatcccactctatgtctatttgggcagatgctaatttttatcgccctattactatgcaacgtgcaaacttaccactgtcttatccaatgactgcacgtaaattccttgaacggcatggttttattaatcaatctgagtatgagcagcgcttaatgagcgagggtaatcctgcggcacagagtatcacctacccgcttgcacctcttgattattctaaagatgaaagctcatataacttacttatgattgtggttgatggattaggtaatgaagacgttgccaaactaccgagcttgcaacaatttgctgataataacctctctttctctcaacactattcagcaggcataaataacgaaacggcgctgtttggattattttatggcatttcaccgtcttacttggatagtgtgttaagtagccgcaaaaactcagcgctctttgacgctttaaattatcgtcactatcaattagcactattttcaactaacggatttaaatcgccattatttacacaagcggtgctggctgattactcactacctacttcacgtagtgaggataacgacacaacgattaatagttggcgttcatggttgttaaaaaataaacaaagcacaccttggttctctttcttacaaatcaacggtgataagcatacatcagcttctcaagcacagttaaatagtcaattagagaccatttttactactttaaaagaaagcaacatacttgataataccgttgtggtcgtaacgtcaaattatcatcagaacaatgataaacaagatagccaatggcttgttaacaaagactcttttaacttaagccaatcgcaggttccactggtaatacattggcctaatgttacaccacaaaaactagataaactaaccagccaccaagatataatgacaacgctaatgcaacatgtattaggtgttattagccctgcagataactattctcaaggcgaagatctatttgctaatacgcgtaatcacccttggatttttactggtgataatgaaactctagtggtctttttacaagataatacgttaatgatagataaacatggcagatatgctttgtttgataaatcaggcaaagagatccaatccgccaaacctgatttacgcctattattgcaagtacttgctgagcaaaaacgatttattgagcgttag

SEQ ID NO: 297306 - DNA, 570 bp, Proteus mirabilis
atgaatcattcacaaatagaatttttaaaactttgtttacaaaaagaagttataaaatctgacacgaaaaaattttcatgggtaagagctgttcgtagagcatggagatatccagatcgtagattctatttttggtggcgtatcgctagttatctttatcaatcaaataaacacctagagatagctaattttatacatagaaggttacaagccaaatatgggtgtgacattggtttaggtgcaaaaattggtgctggtttatcaattagccattatgtcggattagtaattgcttatgaagcaattattggcaataattttcatgccagacaaaatacaactatagggatcgtatcatcatcccaaaaagggcatatttatattggtaataatgtaaccataggtgctaattcttgtatcattggagataatataaaaattggaaataatgtaatgatcggtgctatgagctttataaacaaaaatattcctgataactgtattgttcatacgccaaaatctgaaaatcacataaaacactcgacaataaataatagacgtatatggtaa

SEQ ID NO: 297307 - DNA, 213 bp, Proteus mirabilis
atgtctaatacaatgactggtacagtaaaatggtttaacgatgataaaggttttggtttcatcactcctaaagatggaagtaaagatgtatttgtacattactctgcaattcagagtgatgacttcaaatctctgatggaaggccaagaagtttcatttaccatggaaaatggtatgaaaggcccagcagcaggcaacgtggtggctctctaa

SEQ ID NO: 297308 - DNA, 183 bp, Proteus mirabilis
atgtactatgtgaagaattatcctttgcgttcaatggcttcaaaactcggtatttcgcataatgaagtggctaagcgattacaggcagcggaaggatttattgaagggtgtttatcggttgataatgtaaaattagatatggataaaataattaaaaaataccctatttatagtcttgcgtaa

SEQ ID NO: 297309 - DNA, 297 bp, Proteus mirabilis
  misc_feature (210)..(219): n is a, c, g, or t
atgagagatatgcaggaagttttatcgcgttggggagcgtggtcagctaatgagggaaatagtatcgattactcatcaattgccgcaggttttaaagggttgattccaagttcaagacgaagccaagagcaatgttcagatgatgatggcttaaaaatcaataaagcggtattacatttaaagataaataatagttacttgtttcaattnnnnnnnnnngtttcaattagttattatgtactatgtgaagaattatcctttgcgttcaatggcttcaaaactcggtatttcgcataa

SEQ ID NO: 297310 - DNA, 1026 bp, Proteus mirabilis
atgaaactactcttaacgccctatattcagtctgaccttggcgttgttttattgaagcctggagcggagttgcttaagcaatttaaaccacattcgcgcgtgattattagcgatgtaccaaaaagtttagataaatggccttctggggcattaacaggaaatgaacagccattattggataacaagggcattgttgattttttgaataataaaaaagttctccaagctatgggaggattgtcatcgatgaatatgtggataggcagaaatatccattgttgtcagattaacgataagcatgacagttatcatcatcatgaattaacaaccacatggcataaagacggtgtgatacggacttgttggtaccatgataatcatattcgccattcatcagctgagtgggttgctgaattggctcataaaaatcgtattgcttggatggtagacactattcgcagtcgtttaagattggataatggccaccagctgacagtacccgattttttctcatttgctgtgatgcataaactggttgatgaattacctgatgcgatattacgtcaaattttggattggtctgaaaaacctaaagagcgcagggtacatggtggttttcctgaagcagatattattccaagcaatgtaacagcactatcaacaatgaatgaacgattagacatgataagaccagtcataaaagttgctatcgatcctgagccactagcgtcattccttttgaaacctaaaatgcaacgttgggagaattcccaatggcttcaatgggtgaaaacacagccttgttgtgtttgcggacaacaagctgacgatccacatcacattatcggccatggtatgggaggtatgggaacgaaagttcatgacttattcactattccattatgtcggcaacatcatgatgagttacatcgtgatcccaagttgtgggaagccacttatggcaatcaaatcgaattgttattttcttttctaaatcgttcattaggaataggggcattggtttaa

SEQ ID NO: 297311 - DNA, 708 bp, Proteus mirabilis
atgatgcaaaaaataatggaagtttcagtattacccataatgaatcgtgaattaactatgtcgagtcgagagattgccagtttaacgggaagtaatcattccgatgttaagcgttctgccgataggctttttgttgctcaaattttaacccagccattggctgagttcccttttgaacataacggcaatcaatatactgaatatcgttttaataaaagagactctctggtgttggtagctcgattgtcacctcagttcacagcaaaaatagttgatcgctggcaggaattagaatcaaaaatgcagccagtcattcctcaaacattaccagaagcattgcgattagcagcagacttagcagaagaaaaacaaaaattggaaagtgaactggcgattgcgacacctaaggctcagtttgttgataattatgttttatcccatggttctatgacatttcgacaagtgtgtaaattactgcaggcgaaagaaaccgattttcgttgttttttaattgataagaaaattatgtatcgcttgaataatacgtttacgccttatcaaactcatgtcgatcttggtcgctttgagataaaaacgggaacgaaccaaaaaaataaccacgcttttgcacaatcaaggtttactactaaagatgtgaagtggattgcagggttatgggctgaatataaagttgaggatgagatttaa

SEQ ID NO: 297312 - DNA, 1092 bp, Proteus mirabilis
atgagtttattattactaaaaagtcgccctttagtcgttattcctgaattagcggtacgccttggtttaaatgaggcgatgctgttacagcaaattcaatattggctaactgaaaccacttcaggtgttgaatatgacggctcacgctggatttataacacagttgaggagtggaagaatcaatttccttttttctctgaatcaacgattaaacgtgcttttactaatttgaaaaagcagggtgttttacgcatcgagcaaatcaataaatcgaaccatgaccgcactaattattatgcgattaactacgatcaccacttgctgaccgatgaggtcaatatgacccaatcgaatggtgataattcatctgatcgaacagttcaaaatgaccttatcgataagcgcaaattgaaaccatcaaacagtgcaaaatgcgctgttctgaacgggtcaaaatggcctgttcttacagagaatacaacagagattacttcagagagtacaacagaaacagatcattcgtcgcagaattctgacgaatccagcgaccagtcgaaaaatgattttttaactcgttatcctgaagcagtgatttacagcgctaatgggcagaaatggggggatgaagatgatttaaaaacggcgaaatggatgtttggtcgtgttaaaaaactgaatccgtccgcgttagagcctacttggtatgactgggcgaacgatatccgcctgatgcgccaaatcgatgggcgtacccatgagaaaatttgtgccttgttcgattgggctaacaaagattcattctggcacaaaaatattttaagtcctcgaaaattacgtaaacactttgatgaactcactatccgtagccaagagccaaggaatgaaccaaaagttcaagttgacaccattgaacgcgatagtgccttttcccgcttgattggctctcgctctaaacctaaaaaccgcattgaagaaattgcacttgagctagcaggtaaaacaggcattcgtcgtatgagtgagttttcaggtcgccaagcatggaacagcatttggaagcaagcgatagaaatgttacaggagactcagtaa

SEQ ID NO: 297313 - DNA, 180 bp, Proteus mirabilis
atgagcaatgagaacccaaaccaacttgatcgctactataaaaatcaccgaggtatcgttgttcatgttgttcgttatgacagagaaaaacagcgcgttatttttatgcttgatggttgtgacgacccacagtgtgaacctgtacagcgttttaaagagaagtacacacgtattaagtaa

SEQ ID NO: 297314 - DNA, 210 bp, Proteus mirabilis
atgagtagattagcgcatttagtacctaaaaagcaattccgatgtttacctgtctcaggtcgtcagtcattccgctatgtagaaatcatagtctctgacgaacaaccagacaactacaagaaatctgcatgtttggtagatagacagtctcttaaaaaggcatgggctgatttttatttttcaagtggagagcgggacaatgagcaatga

SEQ ID NO: 297315 - DNA, 423 bp, Proteus mirabilis
atgtgtgaggcgacagctggtggacgtgaagcaatggctggtgcgctcggtctgtctttaacatcattcaataacaagctttatgagaaaaacggttgtcgttcatttgatttaaatgagttgttagcgatgcaagatatttctaaaaccgttttgtttgctgagtttgttgctcgtgaatccaatcgcttgttagtggatagagtcaatccagctgaactagacacaaccgagttattcacattacgcagcaatgttgatgaaatgcaagggcatttagcgttactgatgaaaaatagtttggctgatggtgttattgataacgaagaagagcagaaaataaaaatgatgttggatggattaatttcgcagatccacacatttatgaatgcgtttgttttgttacatcaaaagagaaattaa

SEQ ID NO: 297316 - DNA, 240 bp, Proteus mirabilis
atggatcaaataagtgccacaaccgcaataaaaaaagcatgtaattatgtcggtgggcagtctgaaatggctaaacgcttgggtatttcaccgcctacagtaaatcaatggatcaatggaactcgaaaaattccagcacgacgttgccctgaaatagaaaaagtaacttcaggagtggttcgatgtgaagaactaaggcctgatgttgattggtcttatttacggggaactcaacaatga

SEQ ID NO: 297317 - DNA, 483 bp, Proteus mirabilis
atgcttaatggtaaagatttaggccgagcgatagagcaggcaattaataaaaaactatcatcaggatcagttaaatcaaaaactgagattgctcgacatttcaatgtaaagctaccatctatttatgattggataaaaaaaggctccatttcaaaagataagctacctgaattatggagttatttttctgatgttgttggacctgaacattggggcttaaaggagtttcacctcccagtaaataaagctgaatcaagatgtacacatgatgaacatcaacttaatagccttattcatgcttatatgtcagcttcggcagaaagaaaagaaataataaaatatcttttgctgcaaaataatacaaaagaaccttcttgggttaatagtgatactagggcatacattataactttagaacgacaagcctctgaatggttaaataacaataaaagcaataaaaaatcctcaaagcgtccagcttaa

SEQ ID NO: 297318 - DNA, 375 bp, Proteus mirabilis
atgagccaagaagatcgtaagacaaatgtccctgactttctttctgaattagatgctggcgtttttgaaaataaagtctctgctgttttaaatgatgtggctttaggcgttttaaataatggtggaaaaggcaaagtcactattgaattagattttgctcgccttagtaattcaatggaagaaaaacgagttgaaataactcataagcttaaattctctgcaccaacacctagaggaaaacggactgaggaagataccaccaaaacacctatgtacgtgggtaaaggcggcaagttgaccattatgcaagaagatcaaggtcaattattttctttacaaggtcagcccgatggtaaattaaaagccattaattag

SEQ ID NO: 297319 - DNA, 828 bp, Proteus mirabilis
atgtctcaattagacggtaatgctatttcgcaaattcaagatatgaccgtggcttcattaagcctcgaagcaatagaaaaatctctttgtccagcgattgtgcttccgaatgactttaaagtaagtagtttagaaaatttacaagaaggtcgtttccgttttcgcggggaaatgaaaacaaccagtatcagcgactttgttaaatactcaatcaagaatgcaattgatgaaggtgttagctgctttattgatgccgatgaaatgagtgccgaaactatttttaatctcggcacaataggtaaagcaggtcatgctgataacactgctattgtgaaattaaaacaaaccgccccattcacagcattattaaaaatggatggtgttaaatatcgtcaaaaacaattagccgagtggttagaagattggcacgattatttaatggcatttgatgctgacggtaatgttttagatatcaaacaagctatttctgctgttcgtcgtattacgattgaatcaacacgctctgctgaacatgaaaatgctgattttagtgctaaacgctcagtgttagaaaatgttgaagcaagaagcaaagacattatgcctgctacattccagtttacttgtactccttatgacgaattaaaagaacgtagcattaaattacgttatagcgtactcactggtgatgatattcccgttttagttcttcgaatcattcaacttgaaaaacttgaagaacaaatcgctcaagagtttcgagatatgctttgcaatgaattcaatgaaagcaaaatcgaaacattcattggtaaattttcagcgtaa

SEQ ID NO: 297320 - DNA, 531 bp, Proteus mirabilis
atgtcttatattgcaacagcaacaaataaacatttctattacctagatgtacggatcgaagatatagacattcaagatattgcgacaggtttagctaatgagtgtcgctttaatggacagattgataatttctattctgttgctcagcattctgtatatgcaagttatttagttgcacctgaatttgctttagaggccctacttcatgatgccagtgaagcttatgtcaaagacctaccgtcaccacttaaaaagttattgcctgaatataaattaattgaattgcgtgtggaaaaaatgatccgcaaaaagtttgggttacctgaaaatatatctgatgaagtccattttgcagacctagtgatgttagccacagaaaagcgtgatttagacattgatgcaggtagtaactggttaatgcttgaaggtattccagctagcgattttgctgtcaccccgctaacccctcgacaagcaaaatccctattcttacgccgttttaatgaactttataaagagaaaaagggctaa

SEQ ID NO: 297321 - DNA, 243 bp, Proteus mirabilis
atgcaaatgttgactttagaggagtgggcgcaagaaagatataaaagtcgtccaccaaagttaggaacgctacaacgatatgctcgtggtggcctgttctacccaccagcaaggaaagaaggtggcatttggcgcgtgagagaagatgccgaccttgtcggtaatttgacatcaccggttatcaataacaacgataaccttattttacagaggatcctcaaagatggctgccagacctcgtaa

SEQ ID NO: 297322 - DNA, 1128 bp, Proteus mirabilis
atggctgccagacctcgtaaaaataacgtcaatattcctaatctttacccattacttagtcgtaaatccagcaaggtttattggcgttatcgccatcctgtaacaggtaaatatcatgccctcggtgacaatgaagccgaggcgaaagcaatagccattgaagctaatacaagattagcagaacaacgaagccgacaagttatggctattagtgatcgagtggcaaaaattaaaggtaaagaaatcacggttaatacttggttagataaatactgggctattcaagaagagcgtttaaaagaaggtgatataaagccaaatacctataaacaaaaaaggaagccagtcgatttaatgaggcaagccttatccatgaaaccattacccgcagttgatgccagagatattgctgggatccttgatgaatataaatctaatggccagcacagaatggcacaagttattcgttctgttttaattgatgtatttaaagaagcacaacatgcaggtgaagttcctcctggttataaccctgccctcgccactaaacaaccgaaacgaaaagtaactcgccaacgccttaattttgatgaatggaaaaagatatttgagattgctgacaaacaacatcgttatatgggcaatgccatgttgcttgcacttattacaggccaacgattaggtgatatctcggcaatgaagtttagtgatatttgggatgatcatttacatattatccaagaaaaaactggcaccaaattagctattccattatcactacgttctgaacaattaaatatgtcattacgtgaagttgttgctcgttgtcgtgatcgcgttattagcccttatcttattcattattttcataccacttcacaatctaaacgtggtgatcaagttactgcaaatacgctaacgactaactttaaaaaggcgagaaataaaacggatatcgattggggagaaggaacgcctgcaacatttcatgaacagcgctctttatctgaaaggttatatcgagcacaaggtataaacactaaagatttactaggtcataaaaaccaaattcaaacggataaataccatgatgatcgagggaaagattggataaaaatcgtgatttaa

SEQ ID NO: 297323 - DNA, 816 bp, Proteus mirabilis
atgttatcttttttaagaggtagaaaaaaaaatattatccagatagtcatattctgcctattttttctatcttattcagtcacatcgaaagcagttgaaaaaatagaaaacgatactgtggatctaacagatttcgggaaaaatggtttttcttttgtagtaaaaagatatatctatctggaaagtgatataaaaggtatctctatctctttaaaaaataataacaatagtgcttatttaattaatagctctattttatttaatgatgatgataaaaatgtacctatagtgaataaagatcgtgaaagaacaccttttatgattttaccacctttgtatcgtttagaaccctctagtgaatatagctggaatattcgtcgtattagtgaaggttctaatgatatggcgttaccaaaagacagagaaagcttattttggattgcatttagagcagttcctcttaaggatagtaaaattgaggaaaagaaatctgtgtcactaacgataacacctactttcttcttcaaattaatttatagacctgagtcaataatggcattggaaaataaagatgttattgatgatgttattgttgaaaaggtaaatgagaacatagttataaataataaatcaccactttatatgacttttgaatatttaaaagtgggcgaggttgaaataaaaaatgatggtagagcaataacggtaaaaccattctctacagtatcagttgaagcacctaaaaatgttcaaggaaagctgagttggagattcaatgatgaaaatttctttataataaaagataaagaatattaa

SEQ ID NO: 297324 - DNA, 717 bp, Proteus mirabilis
atgaatatattaaaaacgatttcattactttttagctgttttattttttctgcatcatatagttatgcagggctatctttgtcacaaagtcgcattatattttctgagggagataaaagtcaaagtgtacaaataaataatgatacagataatctttatttatctcaaaatatgataacggctgatttagatggcaaaaaagatgaacattttattgtattgccaccgttaaaacgattagagcctcagtcatcggtttctataaaaattttaccacgctctttagatacattgccaagtgatcgggaatcactcttttttttcactgcatatttgatacctgaaacaaaaagagggcaacaaaataatagtggtgatttatcactaaaaattaatatggtaacaaaaattatcataaaaggattttatcgaccaaatgaattagccataacatcactagatagtcatgctaagaagataacctttaaaaaagtaggtaataatgtgcaagtcaataacccaacaccttattattttacagtatcaaatttaaaattcgatggcaaaagttatcaatcagcaaatgcacctatggttgcgccattttcgtcactcaatttagctatagataaatcaattaaacaggttagttggcaatatattgatgattttggtggattatcaaatacatttgaaaataaaataattgtggagtga

SEQ ID NO: 297325 - DNA, 1305 bp, Proteus mirabilis
atgaaagtgatcatcttaggtggcggcgttattggtgtaacaagtgcgtggtacttagtacaacaagggcatgaagtcattgttgtcgataggcaaagtagtgcggcagaagagacgagtgcaggtaatgcagggcaaatatctccgggttatgcaacaccttggggtgctccgggtattccattaaaagcagtaaaatggatgtttcaaaaacatgcacctttagcgatccgacctgatggctcactgttccaattacgctggatgtggcaaatgctacgtaattgtgatgcttctcattatgcgatgaataagagtcgtatggtgcgtattgctgagtatagtcgtgattgtatccgtcaattacgccaagataccggtattgaatacgaaggacgccaagggggaacgttacagctatttcgtgatcaaaaacaatttgataatgccgctaatgatatcgctgtattaaagcaagaaggtgtggcttatgaactgctaacagccgagcaactaaaatcagcagaacccgctttagagcatgtgagtcataaacttaccggaggattacgtcttcctaatgatgaaacgggtgattgccaaatctttactaagaaactggctaaaatggctgaagaggccggggttaccttcttatttaataaagaaataaaacacctactttttgatggtgataaagtcaccggtgtacaatgccatgatggtttattaaccgcagatcactatgttgtcgccatgggatcgtactcgactgaatttttgaaaaacaaaatcacaattccggtttatcctttaaaaggctattcattaaccatgcctattattgatgcaagcagagcaccaacatccactattttagatgaaacatataagattgcggtgactcgctttgataatcgcattcgtgtgggcggtatggcggaagtggtaggttttaatttgaatattttaaaatcacgttgtgaaacgctcaaaatggttgttcaagatctctatgagggtggtggtgatatcagtaaagcgacattctggacaggcttaaggccaatgacgccagatggtactccgatagttgggccaaccgcatatcgtaatttatccctaaatacggggcatggtacattaggatggacgatggcatgtggctcaggacaactgttagctgatttaatatcaggtaataaaacggcaattgctgcagatgatctctccgtgttccgttatatcgatggatttaatactaaattgctccgtccagggcaaaaacttgacgctgtttattaa

SEQ ID NO: 297326 - DNA, 753 bp, Proteus mirabilis
gtgagtaaaaagaaaattgttatttctttagccataatcgctggattgagtacaccgacagccttcgcgggagaatggtcaatagggggttctgtattatcacaagtaacaccttataagggtgctaaatctaaagactatttattacctgtacctttggttaattatcaatctgaaaatttctattttgcgacattagccgcaggatattatttatggaattcaccgaaagatcagctgtctgtcgatgttcactattacccacaagcatttaaaccaagtgactctgatgatgagcagatgaaaaaacttaatcgtcgccgtgataccgtcatgggtggatttacctataaacatcatgagtcatggggaagtttacgagggattatttctggtgatcttttaggtaaaagtaatggcattattgctgatgctgcttacctttatccttttgaactaggcaattggtcacttcaaccgggaattggtgctgtttgggaaaataaaaagcagaatcgttacgcatatgggattagtcagggagaatctcagcgtagtggtttagcagaatatcgaccaaatgatagctggagaccttatgttgaaatctcagctaactataagtttgctgaaaactgggatttcttcgcgatgggacgagtggatcgcttacccagcgaagttaaagatagcccgatggtaaataaatcggtaacggctattttatggacaggtgtcacttatactttctaa

SEQ ID NO: 297327 - DNA, 996 bp, Proteus mirabilis
atgactatcaaagtaggtattaatggttttggtcgtatcggccgcatcgttttccgtgctgcacaagaacgttcagatatcgaaatcgtaggtattaacgatctgttagacgcagaatacatggcatacatgctgaaatacgattcaactcatggtcgtttcaacggtactgttgaagtaaaagatggccacctcgttgttaatggtaaaaccatccgcgtaacatcagaaagagatccagcaaacctgaaatggaacgaaattggtgttgatgttgttgctgaagcaactggtctgttcttaactgacgaaactgcacgtaaacacatccaagctggtgcgaaaaaagttgttctgactggtccttcaaaagacagcacacctatgttcgttatgggtgtaaaccacaaatcatatgcaggtcaagatatcgtttctaacgcatcttgtacaactaactgcttagcgcctttagcaaaagttatcaacgacaaattcggtatcgttgaaggtctgatgacaactgttcacgcaacaactgcaactcaacgtactgttgatggtccttcaatgaaagactggcgtggtggtcgtggtgcttctcaaaacatcatcccttcatcaactggtgctgctaaagcagtaggtaaagttattcctgaactgaacggcaaactgactggtatgtctttccgtgttcctactcctaacgtttctgttgttgacttaactgcacgtctagaaaaaccagcaacttatgctcaaatctgtgaagcaatcaaagaagctgccgaaggcgaactgaaaggcgttctgggttacactgaagatgcagttgtttcaactgacttcaacggtgaagtattaacttcagtattcgatgctaaagcaggtatcgcgctgaatgacaactttgttaaattagtttcttggtacgataacgaagttggttattcaaacaaagttctagatctgatttctcatatctctaaataa

SEQ ID NO: 297328 - DNA, 1440 bp, Proteus mirabilis
atgaaaattgataaagtaataataaaaaactttcgttgttttgaacaacttgaagtgacatttcaccctcaaatgactgtacttatcgcgcctaatggtgcaggaaaaacaactatccttgatgcagtgcgtattgctatgtggccttttgttaaaggttttgatttaggaagccaaacaggtaaagctgcaaccatacagattgatgatgtcaggttaaggcgttttgaccagaatatggagcctgcattacctgcggaaatagaagcattttctaattcagaaatgaatattctacctatctcttggttgcaatctagggataaaattgctcctcgtacaacaaccaaaggcgatacctttactactcaattgactaatattgctaaaaaatatcagagcataatttataagtcttcaaaatcaactaaaatagctagcgaatctttttctcaatcggtagaaaacatcaacttacctttaatcgtatatttagggacaggacgactgtggtatcaagggcgatatagctcagaagctcaagatcaaaagttggataacagtgtttattctcgattttggggatatcaaaattgtttaactgcaacatcaagttataagcaatttcaatcttggtatagttgggtatatcgtagtcatcgtgagttacaaattacccaattagaagggcaattaaaaccacaagatgaagaagcgcagagaaatttttctgcagcaattaaagtggtacaaacttctattaataagttaacgcaaaagttaacgggatggcatgacttacaatatagggccagtatggggcagcaacttgtaatggaacatcctgaacaaggctatattcctctttcattgttaagtgatggcttgcgtaatatggtggcaatgatctctgatattgcatttcgctgtattaaattaaatccgcatcttggagagaaagccgctattgaaacatctggaattgtattaattgatgaagttgatatgttccttcaccctacttggcaacaaagggttttgtcttctcttatggaagcatttcctaagctgcaatttattgttactactcatagtccacaagttatcagtaccgtacattctgatagtatccgggttattggtgagaattataaaggtaagcttattgcatcaaaaccgttagctcatacatatggaaatccaagcaatcaagttttagaaagtgttatgctcgtagatcctcaaccaccaattaaagaaaaagagatgcttgaacaattaactgaattagttgatcaaggaaaaggaaatactgaattagcccaatctttgctgacagagttaacggctcttttaggtgatactcacccacaattacagcgcttacataggagccttaatagacaacaatatttgtctcatttagagggccgcaaatga

SEQ ID NO: 297329 - DNA, 270 bp, Proteus mirabilis
gtggtgacaccgtttatcgtgaagaatggacaggtggttattcatgaagccttaatggataaagcgtggatacaaaaattagtggtactcgattattttaaatcatcaggatttgataaagggaatggctttttattggatgctaaaaacaatgtttttcgctttacgagtggtaatggagggacaacattaaccaatcaaaatttatatgtaaaagacgaaactgggtataatgttgttattattggtgatattacaaatgagcgataa

SEQ ID NO: 297330 - DNA, 360 bp, Proteus mirabilis
atgttgttattattggtgatattacaaatgagcgataattatggcatggtaatcaaatctaaaaaatatggaattaatttattaaatacatccgatagggttggacgaattgttggttggcatgatattactcctataccacttatgactaaaaaaacttttagttatgaccattctgatctaaataaatatggagaagtatttgcttggtttggaacttcttttatgagggggttagctggagatgttattttaaatattaataacggggtaattattcttgaactcgataatgtttatagaaatggcttaatcgatatatatgatgacatcattaggttatattatggagtatattga

SEQ ID NO: 297331 - DNA, 687 bp, Proteus mirabilis
atgggtaaatatggcattattataaaaggaaaggatcgtcatattcaaatagatagctttaatacggttatgaactgtattagaaagcagactgttgtaatgaaaggtgggatagtatctggaaatcaaggatattatactgaattaccgattaccccacatttatctacaaagttatttgctgtatcacctaataatgtttttgttaaagttattgggggagccataaaaggaagtgataaaaatatccagatatcccaaccttataatgactcttcgggtagtgttgatgtatttgaatttggtgattttccgaataatatttttaaagaaaaatatggagtcgttataaaaaatagtagtacaaaacagactgtttataactctaattggggggtgctaaaaatagtaggatattttattgcatcatggaaagaagatattgattatcaattaccaaatataaaagatttagctttcgtttttggtggcggaatgggaggaatatgggaagatggatttgaaggggcttggatggatacttttattaaaagagtgggaaatacgttacaagtaagatataaagaagctgttctttggagcacaggcagtgcaaatcgtgatttatctagatttccatctacttgcttaataatagatgtgagcgatattaagaaggtattatga

SEQ ID NO: 297332 - DNA, 267 bp, Proteus mirabilis
atgaaaaaaataattttattatctattgcggtatttatttcaggctgtgttgatagaaaacctataaattatcagacagtggagtgtgttggtttaattaaaattcagactattgaaaaatatcagagttttaaattaagtcgctataataatgataataatatgtattttggatacggtaaagcaggtttatggcaaggcggttgggttagccctgatatgtttgacaaaatatattgcaaagataattcacctataaaaaaataa

SEQ ID NO: 297333 - DNA, 261 bp, Proteus mirabilis; identical to SEQ ID NO: 296448

SEQ ID NO: 297334 - DNA, 306 bp, Proteus mirabilis
atgagtacaattaattccattattgcttatagaataatgcaaaaaagaaaagaattagggatgacagggagggaaatagcccattcattggaaataagtcaacagcactattcacgtatagagaatggacataccaaaataacagtagaacatttattctctatcgcgtttattttaggtgtcaaacctaaagaactattgcctaattataaattttcaaatgaaaaagaaatgattaaagcaaaacaatcattatcagcagaaagcattatgccaataaagaaaagcgacatgtatcccacataa

SEQ ID NO: 297335 - DNA, 2535 bp, Proteus mirabilis
atgaattttaataatcggttacacctcatttcttatcgttattctcttccgttttgtgttgctttggggattggggtgataacaatttcttcattcgctgctgaagaagctgaatttgatcctagctttttgcattcagtgcaaggaaagaatgcgattgatatacgtcgctttaattatggcaaccctattcctgagggcaagtattacgctgatatctatctcaataatgaatggaaaggaaaagctaatgtacagtatttatatactgacaatgcgaatacgtcgacgttatgtctaacgccggaattactttcattaattgatgtcgtcaaaggcactgttcctgaaaacagttataaagccacttgttatcccgcctcagaaggactcccctcagcaaaatttcattttgatttatccactttaaagctgaatatagaaattcctcaggcacaagtgaatactcgacctcgaggatatattgcccctgcacagtggcaaagtggagtccctgccgcatttgtcaactatgatgttaactattatcaatacaatactccggatataaataatgagcagacttaccttgggttaaaagcgggactcaatttatggggatgggcttttcgtcaccgtggtggtgaaagctggaataatggtcattctactgggtatcagaatatcgaaacaaatgtgacgcatgatattgctcggttacgggcacaattcacattaggtgatttttatacgaatggcgagttaatggatagccttagcttacggggaattcgattagcatcggatgaacgaatgttacccaactctttacgtggctacgctccgatcgtgcgaggcattgctaatagtaatgctaaagttacgatttatcaaaatgctcacatcctttatgaaacaactgtgcctgctggcccctttgtcattaatgatttgtatcccagtggatatgctggcgaccttcttgtgcaaataaccgaatctaatggacaaacaagaacatttacggttccttttgcttctgttgcccaacttattcgtcccggatttagccgttggcaaatgtcagtgggacgctatcgttatgcaaatgagacatatcatgatttaattgcacaaggcacatatcaatatggtttgacaaatgatatcactttaaatagtggactgaccacaagctcaaaatataccgcaggattggctggtgttgcttttaacacgccgattggggcaattgcatctgacattacattgtccagaacaacatttaatcactctaacgtaacgcgtaaaggctacagtttacatactagctatagcgtcaatattccgaccacgagtacaaatatcacgttagcagcctatcgttattcatctaaagatttttaccatttgaaagatgcgctattggctaatcacagtgaatttattgatgatgtttccataaaaagtgccgcattttatcgccctaaaaatcaattccaagtttcaattaatcaagaattaggtgaaaaatggggaaatatatttttaactggtaccacttataattactgggagcataaaggaagtcgtaatgagtatcagatgggatatagccatttttggaaaaaacttggttatcagattggcttttctcaatcacgagataatgagcaacaacgccgagatgacagattttatgtgaactttacgcttcctttgggagagcgtgttcaaagccccattttttctactgtcttaaattataataaaggcgagaaaaacagcattcaaacatccatcagcggtatcgctggggaagataatcaattctcttatggtatttcaggtaatagtcaggaaagtggaccttccggctatgcgatgaatggaggctatcgttcaccttatgtaaatgtaaccgcaaccgtcgggcaagatactcaacataatcgtcaaatgtcattgggtgcgtcgggggccgttgtcgtacatccttatggagtgacgttaagtaatgatttaagtgatacttttaccattatccatgcaaaaggagcacaaggtgcggtcattaataatgcaccaggtagccgattagatttttggggaaatggtattgtgccttatgtcacgccttatgaaaaaaatcaaattagcatcgaccccactaatttggatttgaatgttgagttatcagcaacagaacaagaaatcattcctcgcgctaatagtgccacgttagtgacatttaatactcaaacagggagaagcctactatttgatattcgaatgccagatggtagtactcctccaatggcttccgaggttttggatgagcataagcagttagtcggatatgtggctcaagctggacgcttatttacccgcggtcttcctaaacaaggtcaacttgatgtgatatggggaccaaatcatgacgataaatgctcatttacatatcatgcgacacgcaatgaaactgacatgcgacctcaaaccattcctgttcagtgtataccgcactctaattag

SEQ ID NO: 297336 - DNA, 141 bp, Proteus mirabilis; identical to SEQ ID NO: 296516

SEQ ID NO: 297337 - DNA, 996 bp, Proteus mirabilis
atgggcagaagcagaagtgcaaagaacaagggtttaccgcctaacttgtatttgcgtaaagggatttactattacagggatgtaagaactaaaaaggaattttctgttggctcaaacaaatcattggcaataaccgaagccatacaagccaatttagctatttataaacctaaagagtcattagttgacagaattaataatgttcactgtgtaacattgcatgaatggttggataaatatcaagatgggttaaagaaaagaggattgaggaaaaaaacgttatatgattacaactctaaaataaaaataatcaagttaaatattgctgacgctccgctcaatgaaataaccacaaaggatattgctagctttatctcaaattattctaaacgctctatggcaaagttaatgagggtcactctgcttgatgcatttaatgaagctatagcagaaggtttactaaatgaaaaccctgtatcggtaactagagcaccgaaaacacaggttaatagagctagattaaccttggatgattttaattacgcaataaatcatacaaataaaaaatacaaaaatttatttttactagcattacttacagcacaacgaattagtgatatagaaaatatgaaatggagtgatataaaaaatgataggatatatataactcaaattaaaacgggagcaaaaatatcaataccgacgtccttaaaaatcgatgctgttaatgtctctataaaagaagtgcttggtaatatagaaaagaaaggtgattttatctgtggcgttaaagctcaatccataagaaaggctttcttgcaatccttacctcaaaaagacaatatgccaacattccatgagataaggagtttatcagcaaggttatatgaagatgaaaaaggagccgaatttgccaaaaagatacttggtcataagtccatgcaaatgactgacaggtatcttgataatagaggtagtgactatattgaattatga

SEQ ID NO: 297338 - DNA, 246 bp, Proteus mirabilis
atgaagcgaataacattatcagaatggaataataaatatttcgctaaccctagaagtcaacggcaattatctcgctatataaaggaaggtaggttataccctgctccagaaaaggttggtagagaatatgagttagagccgtggacaattctaacaaatgacaaaatggtaagggaaccgcagtatttaatggagaaaattaatgggcagaagcagaagtgcaaagaacaagggtttaccgcctaa

SEQ ID NO: 297339 - DNA, 339 bp, Proteus mirabilis
atgaataaatacaccgaactatctgatttcgagattaatttattagtagctcaatctgttttacctgaaacgcaatacgatgtaattaaacaaacaatggatattatccaattccttgttgatggctcgtttggttatcgctttttcgacccatgcaataacccatcagacgcaatgccgattattattgaaaataaaatagggttatcaccaatgtaccattctaataaatggacagctgactgccttgattatgacttcatgtcagtaaataaaaacccataccgtggcgctatggaagtttttttaatgatgaaggatacggagaataatcaatga

SEQ ID NO: 297340 - DNA, 177 bp, Proteus mirabilis
atgaaagataaatattatgctggcttagaaaattacaaagattgtattgagattgaacctacaacaaaagattgctttgttttaaatactccatcttggaatatagatgtgacaaaacaagacttaattgacatcagaaatactattaatgaaatactaggagatgataatgaataa

SEQ ID NO: 297341 - DNA, 450 bp, Proteus mirabilis; identical to SEQ ID NO: 296620

SEQ ID NO: 297342 - DNA, 1521 bp, Proteus mirabilis
gtgattaaattattatcagcagcacaaaatcatcgtcctatttttgttgttatggctgtttttaccggggctattttatcaacactttttgtacgtatgttttctatctcgttagcggattttagaggcgtgtttggtttagatgttgcccaaggatcttggttgaatgtggctcttaatatagctcaattgatcagtatgactcttgtaccttggtttatggtggtttatggcgctgaaaaaatattaatcagtgcgagttttatccttttttgttgtggattagcggttcccataataggacaacagattggttttggcggactttttattgctcattttatgattggattttgtatcggagtctatttgccgatgacgatttcattagccttaaaaagtttaaatcccagtgtttggctaatcgttatggcggcttatagcttacgtgtttctgtaggaatggatgcgggagtggggatctcaggagaatttgttgacatattgaattggcgttggatttattggttatccgctattttcaccttagtcatcctattttttacctggtggggaatgccactctcacctattaataaagcattgctcgctcaaagtgattggggaggaatggcgcttaaatgcttaggattaacgctattatatattggtgtcgttcaaggtgaattgttaggttggtgggattctgggctggtcgtgtcttgcttaatcggtagcgctatactgatggggacatttattattagagcttatatttataaacaaagctttggccacttaaattggatcaaagatagtaatttacggctctgctttattattgcctgtttatatggctttttgatgttacctaattcgttatttataccttcatttttgagtgttgttggtgggttgaaaccactacaaataggtcaagttaccaatcttgccttctttatctatctattatgtagtccaatagctatttttcttgcacggcgtttagagccacgattaatgatgttaataggtattatgattattggaggagcatgtttaatcggtcatcaaattgattatcagtggcgagctaatgatttctttattgtcatatctatgcaagcaatgggggaatgtttgctacttatcggattaattgcctcatttgttactaatatcaagccacaagaagcgttacatttaggggcatatatttcgatagcgagagtattaatgccagcccttgcaggagctattatcaatacttatttgaggatctcatatgatactcattatgatttgttaagaggatacatacaaactggtgagcaaaaattagcagggaatattgctgaacattatcaaacaacgatggcattagtaataagagaagcacatgttgcctcttttattgatggttttgatttgattatgctcttggttattttaggtgctctttgtatgtcatttttaaaatcgtcaccagaaaatccggtagtcccaaggctagtaaaataa

SEQ ID NO: 297343 - DNA, 1101 bp, Proteus mirabilis
atggaaaatattcaatcaaaaaaagaaagaatcatgcagttagtgatggtttatacaccttggatcactgtgatatgtgttgttgcgtttattggtatagcgactgcagattgggatcgctggtggagtgatgctcgttatcaaacaacagataacgcttatataaaagcggactcaacgatattgaaatcacgaatgaccgggtttatttctcagattaataaagaggattaccaagtagtaaaacgtggtgaggtcattgctgaaattaataagaaagaacaaatattaaatcggcaagcggcattagcagagtatcaaaaagcccaattagctttagataatctcactgaagaaattaaagaatatcaattaaatattgagaaattagctaatcgttatcaagcatcagttattgatgttacccaagccaagcgcagcccaatgttgcgtaaagatttaattaatagtggggctatcacacaacaaaattatttagatgctcaatctgatttgcaacgtttaatgaaattacaaagtgctgcgaaaaatgagtgggatcaggctaaacaagcattggtattactaaaatctcaagaaaaaatacgtctggcacaaaaagatatcgctcaaacacagtatcagcaggctgaaacggagctttcatacgcgactattaaggctcctttcgatgcgcaattaaataaaataaaagtcaatatcggtagccttgtgactgcgggtagcgaaattgtgactttaacaccgattaacgatgtatacattattgccaatttaaaagagacacaaataaaaaaagtacagccagaacaatctgttgctatcaaagttgatgcttttcctaccgatgttttttcaggaaaagtgagatatatcggcgcacaaagtagtggtgagtcagctcttattcctgctgataatgccagtggtaattttactaaagtagtacaacgtattccggtttatatcacgctcaatagtgataaccgacacttagctaaattaagagcgggtatgtctgtgcaagtgaaaattgacacagaaagccttcctgtagaggagggggatcgcagtgattaa

SEQ ID NO: 297344 - DNA, 288 bp, Proteus mirabilis
atgaaaataatactccgcacttttatatttctatattttatttttttattaatattgattaatattctttccatatctgactatgaatggatgattggtgaaggtgatattgataatctttgtcaactgccactcaatggtagatatgttattgagcctacattgatattaacaccttgtattttattactttttttaggaaaaaataaaaaactaagatggggttatgttacaatcactgttatgtatatcatatggtcattttatttacgttttaatttttgctga

SEQ ID NO: 297345 - DNA, 549 bp, Proteus mirabilis
atgaaaataaaaacattatcgatccggttcatattgggtctatctgtatccatagggttaacttcagcggcttttgcaataccggacaacctctattttcacggcatattagttgatgagccttgtaccataaaaccgggtgatgaaaccgtggtgctcgattttggcaatattcctgataaaaacctttatgcctataaaagaacgccaagcaagttatttcaattacgtctgtcagaatgtgatctctcaatcggtaaaagcgtcaaaataacctttaaaggagaggaaaaccaagcaatggcaggagaaggatttttggcaataagtccgggcagccaagcttctggtattgcggtgggattagagtctgaaaatggtaatgctctacctataaataaagaaacagacaagatgtcattaactgcgggtgacactattttgaatttttatgcctttattcaaggtgagccggatgcgattgcgaataagtcgattaaacgtggtccttttagtgcaatagccaccttctatttgaattatgactga

SEQ ID NO: 297346 - DNA, 561 bp, Proteus mirabilis
atgaatcgcaagatggcaccactattgctatgccttgttgccagtttagtgactgcgtcaacgatagccagtgatgtaaaacaagataaaaacatgcatcagcgatttgggtggctcaatctacaaggaaccatattagagccgtcatgtgcaatatcagcgggaagtagtgatcaagtgatcccgctaacgacggtatctatcccaacgttagtcactgaaggtcaaggaccgattgaatatttttctatcagattaacggactgtacgctaattagccagaaagggcaagaagcggataatccacgttttatcgcaacgttcgatggtccttctaatggaaatggcaactttgagttatccggtgaggccaaaggtgcttcattagcgatagcggatcgttatggtcgacaagctattccaggacaacccctaccgcccgttggcattgattcgcagtcaatggcattgctgtaccaagctcgaatagtcaaaaacaacgatacgccaaaagcggggaattaccgtacgacgctgcgctttaagctggaatactattaa

SEQ ID NO: 297347 - DNA, 1302 bp, Proteus mirabilis
atgtccaaaatcgttaaagtacttggtcgtgaaattatcgattctcgtggcaacccaacagttgaagctgaagttcacttagaaggtggttttgttggtatggcggcggctccatcaggcgcatcaacaggttctcgtgaagctttagaattacgtgatggtgataagtcacgtttcttaggtaaaggtgttctgaaagcggttgaagctgttaatggaccaatcgctaaagctcttttgggtcaagatgctaaagaccaagctaatatcgataaaatcatgatcgatttagatggtactgaaaacaaatcaaactttggtgcaaacgcaatcctagctgtttctttagcaaacgcaaaagcagctgctgcagcgaaaggtatgcctttgtatgagcatatttctgatctgaacggtactcacggtcaatactcaatgcctttaccaatgatgaatatcatcaatggtggtgagcatgctgataacaacgttgatatccaagagtttatgatccaacctgttggcgcgcctactctgaaagaagcggttcgtatgggttctgaaatcttccatcacttagcaaaagtgctgaaagcaaaaggcatgaacaccgcggtaggtgatgaaggtggttatgcgccaaacttagaatctaatgcggctgcattagcggctatcaaagaagcagtagaagctgcgggttatgttttaggtaaagatgtaactctggctatggactgtgctgcatctgaattctataacaatgagactggtaactacgaactgaaaggcgaaggtaaaactttcacttcacaagaattcactcattacttagaagagctgactaaacagtatccaatcgtttctatcgaagatggcttaaacgaatctgactgggatggtttcgcataccaaactaaagtacttggtgacaaaatccaactggttggtgacgacctgtttgtaactaatactaagatcctaaaagaaggtatcgataaaggtattgctaactctatcctgatcaaattcaaccaaatcggttcactgacagaaacgttagctgctatcaaaatggcgaaagacgcaggttatactgctatcatctctcaccgctctggtgaaacagaagatgcaactatcgctgatttagcagtaggtacagcagcaggtcaaatcaaaacaggttctatgagccgttctgaccgtgttgctaaatataaccagctgatccgtatcgaagaagcattaggtagcaaagcacctttcaatggtctgaaagaagttaaaggccaagcataa

SEQ ID NO: 297348 - DNA, 333 bp, Proteus mirabilis
atgaatggattaacttacctaatattagccattatatctgaagttattgcaacaacggtgttaaaagcatccgatggctttagtcgattatatccatctattgtcgtcgtggtggggtattgtttttctttttgggcgctatctcaagttgtgaaagtcatgccactgggtattgcatatgcaatttggagcggattaggtattgttttagtttctgttgcggctgtttttgtctatcaacaaaaactcgatttacccgccatcgtcggtatgacattaattattgccggcgtcttagtgattaacttactttccaatagcacctcacactaa

SEQ ID NO: 297349 - DNA, 789 bp, Proteus mirabilis
  misc_feature (726)..(735): n is a, c, g, or t
atgaaatttgtctcattcaatattaatggattacgtgctcgccctcatcagctcgaagccattgtagaaaaacaccaacccgatgttattggactgcaagaaacaaaagttcatgatgatatgtttccattagaaactgtcagtgccttgggctaccacgttttttatcatggacagaaaggccattatggtgtggctttgttaactaaggcgaaacctgtcgcggtacgtaaaggattccctggtgatggtgaagaagctcagcgtcgtatgatcatggcggacattgaaacccccgctggattattaacggtaatgaatggttattttcctcaaggtgaaagtcgtgatcatgagacaaaattccctgctaaagcaaaattctatgctgatctacagcagtatctgaccaccagcttaacgccttcctctcccgtactgattatgggggatttaaatattagtccaaccgataaagatatcggtatcggcgaaaataatatgaaacgttggctaaaaatgggtaaatgttcatttttaccggaagagcgagagtggttagcaacgcttatgggttggggattaaccgatacttatcgcgcccaacatcctgaagtcgaaaaccaattttcttggtttgattatcgctcaaaaggctttgatgataaccgaggcttacgtatcgatttactgctagcaagtcgttgcttagcagataattgtatnnnnnnnnnntattcgtgcgatggaaaaaccttccgatcacgcacctgtttgggccgagtttaa

SEQ ID NO: 297350 - DNA, 570 bp, Proteus mirabilis
gtggctaaaggtgatgagttactttgtgaaaaaggcgaaattgttgccaagcagacccaaccaccaagaccttttacagatgctacgctactttcggctatgaccggtattgcacgttttgtgcaagacaaagagctaaagaaaatcctaagagcgacggatggactaggtactgaagcgactagggctggtattattgaattactgtttaaacgcggctttctgcaaaagaaagggcgagctatcaactcgacaccagcaggaagagcattaattcatgttttgccagatatggcgacattacccgatatgaccgctcattgggaatcaatattaacgcaaattagtgagaagcaatttaagtatcaagattttatgatgccattaagtaacacactatttgaattaattactcaagctaaacgtcgtcctaatattcaagcgtttagaaacctgcctgcgcctgcgcagaataaaaaacgtaaaggtgcgacgaaaaaaagtgcacaagggaaaagtcgttcagcgcagtctcaatctacgaatcgcaatataaagagtgatgcttag

SEQ ID NO: 297351 - DNA, 744 bp, Proteus mirabilis
atggcatttaccgcttctgcactttcctttatgtttgaggggctggcaaaaccggttatcgtcaccggctctcaaattccattagaagctttacgctcagatggacaaactaacctattaaatgctctctatattgctgcacatcatccgattaatgaagttgcactgtttttcaacaatactctgtatcgtggtaatcgtgcgataaaagcacatgcagatggcttcaatgcttttgcttctcctaatagtgcacctttattagaagcaggcattaatattaaaacgtttaaaataaacccattacctaagccaaaaggtgagtttattgctcatcatattacccctcaaccaattggtgtggtaacaatatatccgggactttctgatgaggtggtgaaaaatatcttaatgcaacccgttaaggcacttattttgcgctcttatggtgtgggtaatgccccttctcatcccgccttgttatcaacgctacgcgaagcaactgagcgcggtattgtcgtggttaacctaacgcaatgtatttctggtcgtgtcaatatggggggctatgcaacaggacaagcactcgccgatgttggggtgatcagtggttatgatatgacttttgaagcagcgttaactaaactccactatctacttagtcagcaatatagctatactgagatctgccgtttaatgcaacaaaatctccgtggtgaaatgacattaaacgatgacgactag

SEQ ID NO: 297352 - DNA, 633 bp, Proteus mirabilis
gtgaaaaattcagcgttattattagttgatctacaaaatgatttctgcaccgatggcgcattggctgttaaggaaagtgataccgtcatagatacggcaaatcggcttattgattattttcaacgccatcagcgtcctattattgcgagtaaagattggcatcccgcagatcatctcagctttgcaaaaaattcaggtactgttgttggcgaaattggccaattaaatggccgcccacaagtttggtggccagtgcattgtgtacaaaatagccatggcgctgactttcatcccttattaacagatgatttaattagtcatattatttataaaggccaaaatcgacttatcgatagttatagtgctttttttgataatgaccatgaatatcaaacaggattacatactcttttacaaagcatgcagatcgagcatctcaccattttagggatagcaactgattattgcgttaaatttaccgtgttagatgcattacaattgggttatcaagtatcagtggttatggatggttgtcgaggtgtcaatattcaaccagatgatagccaactcgcatttaatcaaatgcaacaacatggggcagttttaacaaattgtaataacattattgggtaa

SEQ ID NO: 297353 - DNA, 252 bp, Proteus mirabilis
gtgcctaaagacgaattaaatgtaactcaaacagcaagagcaaactatacaattaatttattaaatttaaatagccattatttaattaatttacgtagacaacgttgggatgagttagaccaattagttcttgagcatataaataataattgggatttagaacagttgtgtgatctagagttaaattttttagatagcaatcatggcttatatcctttcttttcattagctcgtcaattttttggtaagtaa

SEQ ID NO: 297354 - DNA, 966 bp, Proteus mirabilis
atggatttcagaaatgtactgcgaaaaaatgccattcgcactcggtttgtgatagtcacctatttactattaatgctaatgatcggcttattagttgatagcgcgataggtgccaatcctcatttaagtttaattgataatatgctggcatttctgacattccaatcactgcctattgcttcattgattattgttgccatttcaattgtgttgctgattattgttcactttaaagggcataaaatcatgttgacgggcatgaaagcgcgactaattaatcctgaagagccattaaatgcccaagagcgacaattattaaatattgtggaagagcttagtttaagtgcgactttgggctatatccctaagctttatattttagatacaccagaagccaatgcctttgctgccggctggtctgaaaaaaatgcctttattggtgtcactcgtgggttgttaaatcaacttaatcgccaagaaatacaagccgtattagcccatgaaacaggtcatattattcatggtgatacccgtttaacgctgtatgtgggtattttagcaaatgttattttaacggtaacaaatatctttggtagccgcttatatatagcctctggtaaccgtggtggtaaaagtaatgatgccgccagtaaagcacgattgattttaattgtactcaacgttgtcttacccattattactcaagtgctctatttctatttatcgcggacacgtgaatatatggcagatgcggcagcggttgatctcacccaagataatcaatcaatgatcaatgcactaaagaaaattgcagcacaacacgaaactgaaaattttgaagatggctcgacaggacgagcatatcgcaaagcagcctttatttttaataagggagactctcttttttcaacccatccttcgattgaaaatagaatagcagtactcgaagggaaaaagactttttaa

SEQ ID NO: 297355 - DNA, 561 bp, Proteus mirabilis
atgactggattaattattaccatcgcgttattgggtcttattttttattattacaaccgtattatctctatgcgtgaagcggttatctcaagtgaaacagaaatatcggtacaactcgaccgtcgtggtaaagtgtttgatagcttattagctacagtaaaaaaatatcttagtcatgaagccgatgtttttactaaaatcaccgaattaagagctaaaacacaaagtagcaataaccaagaagcaaaagcggcagaagatgagctatcaaaaattgtttcaagtggtgcgattaatgtcgctgttgaaaactatcctgaactcaaatcagatactatcatggctaatttacaagaagagattgtctcaacagaaaataaactctcttttgctaaacgtggctataaccgtaccttagagcaatatcgtgcgtttatcgcctctatccctgcggtatttattgtgaagatttttccaagtctcgtgattaataaagaatactggcgtcttgatgaaacagcgattaaatcagaagaagcgcgccgtattaactttgattaa

SEQ ID NO: 297356 - DNA, 552 bp, Proteus mirabilis
atggctaaaaaacagtatggttttctgattaatagtaaagattgttatggctgtcgcacttgttcgatggcttgtaaatcagaaaatgttacccctccaggagtcttgtggcgtagagtacgcgaattcaatgaagatctgcccaatgcgcaagcttttatcactatgtcctgtaatcattgtgacgatccacaatgcttaaaagtctgccctgccgatacttatactaagcgagctgatgggattgtgatacaggatcatgacaaatgtattggttgccaaatgtgcattatggcatgcccttataatgcgccggtttacgatcctgtagaagggaagaccagtaaatgtaatatgtgtgccgatagaatagacgaaggcttaaaacctcgctgtgttgaatcttgtccaactggtgccattgagtttggcgaaattgaagatttgcgccaaaaacatatcacaaattgggcattattagaaaaacgttatggggttcctgatcataccatcagtcatcctaatattgtcattattggtatggaggattaa

SEQ ID NO: 297357 - DNA, 2337 bp, Proteus mirabilis
atgtataaaaataaacagtgggaattagatagaagaacgctattaaaaggaatgggagctattggtttggcagctctttcccctaatgcgtttagcctagctaatgaaaataaacccatatttaaccagaaaactcggataaaattatctgaatatcaaacttttcaatccacctgtgcaatggaatgtctccattgtaacctaaccgcttttactcatcagggaaaactaatcaaaattgaagctacagaaggctttaatgtcaaatgttgtttacgaggaattagccgaactaaatgggtatatcataaggatagactcactacacctttgctacgtgttggcgaaaaaggtaaggctgagtttaaacctattagctggaatgacgctttagatcttatcgaaaaaaatattcgagaaactatcgataaatatggcaacgaagggctttttatttctactcacgctggaaatatggattccatcaaaaacgatatgggtaaagcctttttcgactatttaggcggttctacaaaacaagccggctctttatgttgctctgcggttactgcagctatgatccctatggttggcctacgctatgcagatacgcgtgatacggtaaaagatagccgttatattctatgttggggcaataacccagcagtaactatgcacgcctactttaaaaattataatcaggctcgccgtaatggtgccagaatggtagtcattgatccgcgttttaatgaaaccgcagccaaagctgatgagtggatccccattattccgggtaccgataccgcccttgcattaggaatgatcaaattaatcattgaagaaaatcttacagataaaccttttttgcgtgcccataccggagcggtgtatttagtcgatgaacaacaaaaactactacgtgattcagctaatgataaagatagctatttagtctttgataccctaactcagcaaattgttcgccatgatacccccaatattgtaccggcgttaactcatgatgaactgccaaataaaataaattacaccaccgtttttgaacaaatctattggcaagctaaaccctggactatcgaaaaaaccagtaaagaaacagatattccacaagagactattattcgtttagctcgagactacgcgacaacaaagcctgcaatgattgtacaaaatatgtctggcgcacaacgcactgaatttggtgcctatgttgcagcaagccagttttatcttgctctattaaccggcaatattggtaagaaaggcgcgggtatttgtgatgccggtggcgtgcgtcagatggcaaaatttaatcctattattccccctgcaccaaatgttaaacccattaatcctattcctgttgcaaaagtgggtgaatggatagtcaacgaaagaccccacccaattaatttctggtggatcatgacaatgggggtgatgacacaattacccaataccaatatggtacgtaaggcgctaaaaaaagttccttttgttgtcgtagccgataatttaatgtcatcaacagcgctttatgccgacttagtacttccagtgacaaccatttttgaagatacaagtttaatggctggtgtgcgtagccaatatgttcaattaatggaaaaagccgttgaaccaccaggagaagcaaagcctgattattggatttttgcccgccttgctgaacgctttggtttcggtgacgtatttaatcaacctattgagcactatattgatacttgcctcgcgggatcggggattacgcgggaaatgctagaaaaagggcctgtacgaccagtagaaggcgattggatcccatttaaagacggaatatttcgtacatcaacccaaaaagcacatttctttattgaagaatggcaagataaaaactactcccctatagtcacttattatccagtaaaggaatcgacaacaggctcccctgaattagcaaaaaaatatccgttaatggctgtgcaacgtaagctagcacgtagtgttcattcaagccatgggatgaatgaatggattttagaagtacagcgtaatcaacccaatattttaatacatcctaatgatgcgttatctcgtggaataaacaatggtgattgggtgtttgcttttaatgatagaggtgaacatagagcaatagccgttgtcaccacacacataaaacaaggtgttgtttctcttgataatggttggtgggaacaacaaggggggagtagtagccatgtaacaaatgaccatgttgaacctttaggtaatggtcattgttgtaacagtaccctagttaatgtgagacgggaggcataa

SEQ ID NO: 297358 - DNA, 2697 bp, Proteus mirabilis
atgaaaaagagtggtaaattaacacaacaagccgtgaagtcactttaccctaatcatacctcatttattgattttctcccttgggttgaatatttacccaatagccaatgtttattgttggatgatggtgtctctgtgggagcggtttttgaagcgatccctgtgggtacagaaggcagaacagaaacaagattagaagaaatccgcgatattgtggaagatgcttttcaagacagttttgaagagcgagatagtcatccttgggtgatccagtttttttgccaagatgaagccgatccttcggaatatctcgacaaattacgacattacattaaaccatgggcgcaaggttctgtttttacgacagcatatttacaggtcattgaacggcatatgcgagggcttgcagtaccccaaggcttgtttgttgataaggcagtaacaggggcaccatggcgcggtcagcaacggcgcacccgtatggtgatttatcgttatgttaattcgaatgcaatagagcctttttcaccagaagaacaactcaatcaagtctgtgagcgtttatgttctgcgctgttaggcgctggtattactacggttaggcaaaatggtgaagatattcatgcatggttgttacgttggtttaatcctgaacctgattggatcgataaagagacgctctatcgcacggcaacccatgttgacactgtcaacagtgaactcccgatactcaatgattttagcgaaacattaatgtttacaccccctaaagcggatgtagaaaatggcgtttggtggtttgataatcgccctcataaagccattaatattgataggcttcgtcgagcgcctaccgtagggcatttaacaggagaaacgcgcaaaggggataatatcaatgcgttgatggatttattgccgcaaggcaccgtgatatcaatgacgttagtggttcaaccgcaagatgaactggaagagcgctttaaccatcttgcgaaaaatgcaataggtgaaaattgtgaatcagccagagtgcgtgctgatgctcaaacagcaaaaagttatcttggtgaacgacataaactttatcgtgcgagtatgacgttttatgtatcaggcgcaaccttaaaagagctcaacagtcatcaacgccatttaacctcagtattgctaaatgcagggctacaaccgataaaacctgacgacgatattgcgccattgaatgcttatcttcgtgctttgcctatgtgctttaatcccgaattggataaaaagcattggtatacccgactgacttttgtgcaacatatcgccaatatgttacctgtttttggtcgtgatacgggaaccggtcatgcaggatttaccttttttaatcgcagtggcgcaccgctgactttcgaccctttaaatagtgctgatcgttctaaaaatgcccatttggtactcttcggtcctacgggttcaggcaagtccgcaacactcaatagtctatttactcaactcatggcggttcatcgacctcgcttatttattgccgaggcaggaaattcatttgggttgtttgctgattattgtgctgagttaggcttgagtgtgaataaacttagcattaaaccaggttgtgggatttcattagcgccttttgcggacgcttataagcttattgaaaccacggtaaagcctatcaatgaggatgagcttagtgaggttattgatgcagatgaaaccgacgaaatagatgagcgagatattttaggggaactcgaaattgttgcacgattaatgataaccggtggtgaagcaaaagaggaagcaaagttagaacgtgcagatagaggcatgatgcgagaagctattttagtgagtgctaacaatgcatggaatgaaggtaggcagatgatcaccgctgatttgcaaaataccttttatgcctttgcgaaagataaacatcgtcctgatattcgacgagcaagagcccaaaatatgggggaatcactcagtgtatttatgcaaggctttttgggtgagttatttaaccgagaagggcaacactggtcggaagttgatgtcacattaattgaccttggtacattagccagagaaggctatgaagcccctttagccgttgcttatacctcattagtcaacaccattaataatattgcagaacgtgatcagtttttagaacgcgaaattgtctttgccacggatgaagcccatatgatcaccactaacccattacttgccccttatgtggttaaggtcgttaagatgtggcgtaaattgggtgcatggttatggctagcgactcaaaatttagaggattttccgtctacgtcgaagaagatgctaaatatgattgagtggtggttgtgtttagtgatgccacctgaagaaattgaagaaatcgcccgatttaaaaaacttacaccagaacaaaaagccatgctgctatcagcaaccaaaaccccccgttgttatacagagggcgttgtcctcgcaagtcgtattgaagcgctatttcgtgccgttcctccgagtttataccttgcattgggtatgactgagaaagaggaaaaagcagagcgaaaagcattgatggtagagcatggtattagtgagctagaggcagctaaacggatagctgtaaggttggatgaggtgagggggattgttgataatgggtatcattaa

SEQ ID NO: 297359 - DNA, 402 bp, Proteus mirabilis
atgaaaggaacgcatttatcgttaataatgatattactattaacgggttgcagtacttctaaagaggagattttacccacaggtaacaatactatgcgtgatatttggcaaagcaaagtgggtgaaataaagacagaaaaaaggcaagaaagagccattcagcgaggcttgctaggatcagataatccacctcgccatcttgtgaataagagtgatattcagcaggctaaaaagcatatccagcatcacttccctcgcttacctaatcccgatatggtgatctatatttatccccattttgtgggttctgagcctacgcctattcccagctatagcacggtttttcctttttatagcaaagtgcaatatgccttacccaatgaacgattggaggcttattga

SEQ ID NO: 297360 - DNA, 1416 bp, Proteus mirabilis
atgcaaataagttcaaatatcttgttgaagataattattcctgtcgtgttattggtcgtgattatgataagcgtaaagtcttgcgatcatactcaatcagtacaagaggcaactagccattcctccataacggatttaacacaagaagaattgcgtattctggggattgaaggtgatactgcgcaagataccttgcgtacactacttggacgaattaaggctatacagataaatcaggagaaactagaaaggcagagtaaggtattactgagtgaaaatgtgcagttaaaaaatagaaatgacaatgtagaaaatcgtattcatgaagcggtaaggaaagcacaagaggaaggtaatttagcccaacaaacactttatcatgaacaacaacgtttagctgacttgttggatattttaattaatgaacaacaaaatattaaggtaaaggagaccgcattatccgttgatttagcgtttgaacaaactgaacagcaaacaacggtttggattgatcctttagaggggattgcttatgaaaataatgcaaagccgataaatggcacgagtacatttcaataccctacggcatttcgccaattagaagataatgaaattagccgacaaaaagcaaagctcgatcttacggcaaaaaaacaacaacacattcaagctacagaacatcctgtctataccttacctgaaaatgccacgttgatgggaagccaagcgatgacggcattactcggtcgagtaccgatagacggtaaagtcaccgatccctatccttttaaaatccttattggtaaggaaaatctcaccgcaaatggtattgaattacctgatgttgaaggtgctgtggtttcaggtacagcaacaggcgattgggtattatcttgcgtccgtggtgatattcattccattacctttgtgtttaaagatggctcaattcggactgtacctaaatcggcaacatcgacagatggacgccatgataaatcgcaaggtgttagtatcggttggctctctgatgaacagggcgtgccctgtctctctggtactcgtaaaagtaatgcctccacttatctaccgactttatttgcactttctgccagtagtgctgcatcgtcgatgatggcggaaagccaaaccacaaaagcaactgatggtttatcagtgatgaattcattaacggggaatgcaggaaaggcggtattaggtaaagcgttatcgggaggaagcaacgaaatcgcagagtgggttaaagcacgatatggccaaatgtttgatgcgatttatgtgcctcctggtgcaccagttgcggtgcatattactcgtgctattcctatcgattatgaagcgcaaggacgtaaagttaaatacgatttcgatataagccagcagaatgaattggactaa

SEQ ID NO: 297361 - DNA, 795 bp, Proteus mirabilis
atgcgcttgaaacaacatgtattttttctgctctgttttattgtcttacccgttcaagccgtcgagttaatgaaatgggaacgcattcctttaaaagtcgctttgcatgtaaatgaagagcgtattgtgtttattgaacgcaatgtgcgtgtcggttttccacctgaattaaaaggaaaactgagaatacaaagcgctggcggtgtggtttatttactggcgaaagcgccattttcttatactcgtttagtgcttcaagatattgaaaatggagagatgattttattagatatcaatgccaaacaaggaaaagaagccttagagcctgtgaagttggcatacccacaagagaaaacgttagccaaacagcaaaatacggccatgaataaacgccaaaaaataccacctatccctattgcgttaacccgtttcgcttcacaaagtttgtatgcacctcttcgcacacttgagccgttgataggtgtgcactctcttgccataccatcacctgaaaaactgacctcattactgccaagtgaaagtattgagataaaaccattaggtgcatggggattgcaaggttacagcgtagtggcacttagtttacgtaatcaacgcaagcaagaggtattgcttaaccctaaagatttacaaggtaatttttatagtgcaacttttcagcatagttggttaggtgcaaaaggaacccctgaagatattacggttgtttacttagtagcaaaagggcatctagagaatgcttttcttcctgaattaaccataaaggaagattaa

SEQ ID NO: 297362 - DNA, 657 bp, Proteus mirabilis
atgagtcgatttaagaatgcacttaatgcgcgtgatcatcatgttttaacactaagagtaatatgtggcgttctttgttttattgtcgcactcgccttatttggctggctcacatcgcctcggcatttaactattcataatccacctgatttacgttcgggaagtactcgagcttggtgggaaattcctccaccaaccgtctatgcttttagcttttatatctttcaacaactcaatagttggacgaaaaatggggatgtggattacccctatcgtattaattcattatcggcatatttaacgccaaattgtgaactcctgttacagcaagatgcgaaacaacgtaaagagcttggggaatctcgtgatcgtgttcgtggcgtatctgaaattccagaacgtggctataaggaagagagtgtcacgattgttgatcgcgataattggcgtgttcgacttgatttagtcactgatgaatatgtgaatgcagaaccagttaaacgctcattagttcgttatcccttaaaggttgttcgttgggataagaatcctgaaatcaatccatttggtctcgcgctagattgctttttcgatattccccagcgtttagaagttgttcccatcaccaaggatgaaaagaaaggagggcttcattaa

SEQ ID NO: 297363 - DNA, 387 bp, Proteus mirabilis
atgccgacaattgagtttatgcctgatagattaaatgccgagcctgttgtttttcgcggttttacaacgccagagttaggaataactgcactgttgagtgtttttggtggattgattattgctattcccatcatgccttttttaggttggatagccttgccgaccgtatctttattactgccattaatcacaattattttaggaggaaggttactggcgcgttttaaaagaggaaaacctgaaaactacctttatcgccgtatagagtggtttttaagttcgtgtggtgtgggttcaaacaggttaatttgtcgtagccaagtgttatcactacggcgtttacgctcggtgacttttcattgtaaggagtcacatgagtcgatttaa

SEQ ID NO: 297364 - DNA, 369 bp, Proteus mirabilis
atgtatcaaaagggattgttttctttacgtcttttttatcaatatgttattcgtggtttttcgtttttattattaggcaactcgatggcctgggctgatttacctacggttgaggggcctcaaagcagtgcagataaaactttttatgggcaaatttcaggctaccttaatgatggtattgtactcggtggtttgatcctttccgcagtagcaatgttagctgttggtaatgccattattgccacttttgctgaagtacgtgacggcaaagcaacatgggcaaagtttggcatgctttgtgttgtcggtgtgattttaattgttgtcgtgatttggttggcttcaaaagcagcaaccgtgttgctctaa

SEQ ID NO: 297365 - DNA, 237 bp, Proteus mirabilis
atgagtgaagcacaatttaatgcattcaacattgcgagtggcaatgttgagccgacatcattgcatcccttatttgttgggattctgattgcattacttttgttatggtctgggtggggattactgcatgtttatcaaggatatgctactgaacgtattacagaacaaggattgatacgttttgtcattcgcactgtattgttgattgttattagcctctttttatttactcaatag

SEQ ID NO: 297366 - DNA, 312 bp, Proteus mirabilis
atgcgaattgttcaaatgcgaacgtggtgtttattgggaatattaataacaccattagcttattcctctgaatcagatgaacttgctttagctataaaacagctcgattaccttgatgcgagattagcctcagctgaaatagaagcccttaaacgtgagcaacccacgcgtttttacttggattaccaacaaattaaacaggatattgaggtaatacgccaaggacttaaacactatctttatccctctcgcgctcagcccagcgctttaactcctttctcagcgcaatatcagcgagagaattatccatga

SEQ ID NO: 297367 - DNA, 204 bp, Proteus mirabilis
atgaaaaatagctcaacatcgaagagcgtcacggtatatattcgtggtaaaaaggcgggttctcgaaccatgagtcgtaaagctatcgctcactctgcaatgaataatgcaaaagcatcctttgaaattgaaggtcatcgctatagtaattctgattggtccaagattatgaaaatagcagatcaactggaggcggttatttaa

SEQ ID NO: 297368 - DNA, 1014 bp, Proteus mirabilis
atggaaaagcataaaaaattagaagcaggtataaatcatataaaccacaaagaattaaagaaaataaaaattattcatttaaaaaccactccatctaaaaatggaataactcatttttattggaataataaactctctgagttaattattggtgcaaaagtacagtttcctgttccttctattgcacatattgagcattataaagaatctttttttgataataatagaaatgaaattcaacttggtgattcaattatttggttttttggaaagtctattcagccattagtatgtgcaactgtaataggggcatgtaaaatcaaaaggaaaaggtatcttagattacaacctaatcattctcaatctattgtgcctgaaacatgggctgagtttgatattaataaattcttttttgtttccaataataaggtagagcgttatcgagctcctcctaatttaatttatgctgcatttcaagatgaattagataaagttgaagaaatatatgcaccaattaggagtagacgtatcataataaattatctcacaaatagaaatttaatgatgggagaaaaagcatttcgagagtgccatttaactttatttaaaggaatttatgcttgggctggcgattatcgtaagattgaaatcgttgttacagatagacagtttccaacattacatcctgatgagatagagataaaaatgaaggagttttgtcaaaaatttagtaatcaatatttgcgttgggttggaaatgaacgagtaaaaatgcttcaagctttagtttttgcacataaggaattagcgtggatccatccttttcaggatggcaatggtagagctataaggctttatttagaattgatagcaaaaacaagggggtttgagttcgatttaaatgcatcattacaaagtaaaactaagaaacgctactaccattttgctgtgaggaaagcagttcagggctatagtaagatattaactaccttattaaataaaatattggtttaa

SEQ ID NO: 297369 - DNA, 2049 bp, Proteus mirabilis
atgccaatgagtgctaaacaacaatatatatttggtataattaatattctgctgttatttattattggctctaaaaagtcaaaaaaacgattattaacaatgatttttttatcattgttaatgtctacacgttatctgtattggcgagcaacccacacacttaattttaatacctctattgaagggatattgggtacaggattatttttggctgagatctactcttggattattttagttttaggttatttccaaacagcttggccattaaatagaaaaatagcgccattaccaaaagatatctcgttatggccaacagtggatatttatgtacccacatataacgaaagtttagatgtggtacgtgatacggttttagctgcacaaggtattgattatccaaaagataaaatgaaagtttatcttttggatgatggtagccgtgaagagtttaagcaattcgccaatgatgttggtgtgacttatattgagcgtgaagagcacgatcacgctaaggcaggtaatctaaatcacgcaatggcattaactgatggtgagcttatttgcgtctttgattgtgaccatatctctacccgtatatttttacaggcaacggtgggttatttccttgaagatccaaaattagctttggtgcaaacaccacactatttctattcacccgatccttttgaacgtaatttaagtgccgccaaaaacggccctcacgaaggtgcacttttttatggccctgttcaacgaggtaatgataattggaatgcaaccttcttctgtggttcatgtgcggtaatgcgtcgtagcgccctagaagaaattggtggtattgcggttgagacagtcacagaagatgcccatacggcattaaaattacaacgtttaggttggaattcggcatttattgatattcctttagctgcaggtctagcaacagagcgtttagcattacatgttaatcaacgtattcgttgggctagaggaatgacacaaatctttcgtgttgataaccctatgttaggccgtggcttaacatttcctcagcggttatgttatctcaatgcgatgatgcattttcagtatgggttgcctcggattatctttttaaccgcacctttactgtttatgttattcaacctcaatattatcgcctcttctgccagtatgatttttgcctttgcattaccacatttaattatgtcggtgtatgtaaactcacgaaatattggtaaatatcgctattctttctggggagaaatctatgaaacagtgatggcatttagtttagtactgcctacattgctcagtttagtctcgcctaaattaggtaaatttaatgtcactgataaaggcgatttgcttgataaaagctatatggattatctaacggtacgccctttgattattactgcgctacttctagttatgggtatttcatgggtcatcattcgttatttattaaatgattttcaaggcatcgaccctttagtcattgtattgaatttggtttgggcaacttatagtttatttattgtgttggcatcgatcgcagtaggtaaagaaacacgccaaattcgtaaaaatacccgcattaaggcatcacttcctatcactttacattttgatgatggcgctgaattacaaactaccaccgaagatatttctatggggggagtgcgtattgcgattaataaaatagctgaattacgccagcgtactgttaatagcattacgttaatggtgcaacgtgatgttgttacgcttcctgtggaaatggtcagtttagaaaatagccagttacgtctcgcttttttaccaatggatttaaatctacgccgtaagttagtacgggtgatctttggtcgagcagatgcttgggttcatcaaacacaatatcaagacaaaccattaaaagagttaggtgctatcactggctgtatttttgagttgttctttggtcgtcgtcaaaaagtaaaagcaccggtaaaaagagcaaaaacctctctctctgtgcaatctattaatggggatgactag

SEQ ID NO: 297370 - DNA, 402 bp, Proteus mirabilis
atgtatgatgatatagataatttaaaaaataagtttcaggaagaggggtttacttttcaagatttctcttctcaaacgacaggtaatatagcctgtaatattagtaatagcgttataaatcaacaggataataaagactccctatcaggggataatgaagagttcttgaatatatctaaagttaaaaagagacaaaaacaaacagctaatatagcgacttctctttcttattcacaagatttagcctcggaagtaaaagaaaaaaatagagttaataagcaaagtaagtgtttgctagataatcagttatttgaaaaaaaaaccacagataagtgcctaattaataacagtttttttattaataacaatgttttcgcttattgttatgccaatgagtgctaa

SEQ ID NO: 297371 - DNA, 861 bp, Proteus mirabilis
atgaacatgaaaattaaaaaaatattaaataacagtgttgtgatctctctggatgaagcagaaaaagaaattatcgtcatgggaaaagggattgcctacgccaaaaaagtaggtgatgagataacatctgaacaaataaccaaaaaatttatcttaagccctaaaaattgtccgcagagagtgctcgatcttttatcgaatattacgttggattacgtagaaattgcggacaatattattcagtatgcaaaagaaaaaatgaccttagatacacaagatagtatctatattgcattgatcgaccatattcaagccagcattgaacggtataaagaagggacctttataagaaataaaatattgtgggagataaaaaatttctatagtgaagagtttgatattggtctttatggcttaaaattaattaatgatagatttaacatttcaatgccagaagatgaagcaggatttattgcattacatatcgccagtattagaacaaacgataatattcagcaaacctacaaagtgacccactttatccaaagcattactaatatagtcaaatattatttaaatatagagtacgacatagtatcgttaaattatcgtcgttttgtgacacaccttcgctatttctccatccgattattttcacaacctgaaaatgatcacgaacctttagaaaatgagttactggatataataaaagacaagtaccatcaaccttatatgtgctgtttgaaaataagtaaatttattaaagataaatataattgcaccttagatgacaatgaaattttatatctaataatccatattgcaaaaattgcagaggataataaaaagatgaataaataa

SEQ ID NO: 297372 - DNA, 1890 bp, Proteus mirabilis
atgaattataaagaatttgcaaaacaaattctcgctattgttggtggcgaggataatataaagtcattagtacactgctcgactcgattacgttttacattacataatgaagataaaattgatccttcaaaagccaaagcaaatagtaaaatattatctgatgtgatgaagggaggacaatatcaactggttatcggtaatgatgttgataaagtatttaatgaactaacaaaaatgataaaaacaaataatactcctcatgataataataaagaccagaagaaacagtctatcgtaaataaagtattatcagcaattactggctctatcgctccggttatccctctgttagcgggtgccggtatggggaaagtgttacttattgtattaacgatgcttggttggttggataaaaatgaccaaacctattatatccttaactttatctttaatacggccttctattttatgccggtatttattggtttctcggcggcgaaaatatttaattgtaaccaatatttagctgctatggtctgtttagcgatggtcagccctgaatggacaagcttagttaaagccggtgagcctgtcgaatttatgcatattcctgtcgctttggttaaatattcatctcaactgatccctgccttaattactgtttggatgatgtcttatattgaacgctttattgttcgtattgtgccagaaatggttaaagtatttatggtgcctttattggtgattttagtttcgacacccattgcgttgattgcggtcggtcctgtcacttcatggttcgctcaattaattgctgatggggtgatcttaatccaagagcacactggttttattgctattccattattagtggctatttatccatggttagtatctattggtatgcataaagcacttagtcctgtcagtattatgttagtggagcaaaaaggttttgacccgattattcgtgtgatggcgctatgctccaacatgtctcaggctgctgcttctttagctgtttctgtacgtactaaaaataaaaccttaaaacaattagctttttctgccagtattaccgctttttttggtggtataactgaacccgctatgtatggggtgaacctcaaactgaaaaaaccaatgtacgcttgtatgattggtggtgctattgcaggattatttgctggtattgttaagttaaaagcgtttgtctatgtcactccggggttattaagtttaccaatgtggatatctgatacagataaccaagtagtaaatgcaataatcaccttattgattgccagtgtagccacttttattgcaacgcttattattggttttgatgatcctactgacgatccaatccgtgacgaagaagaaaataataaacaagctgcatcaaccaacaaaaaaccacaaatagcgaatagtaaattacctgttgggttaatttcacctctgcaaggtaaaacggttgcactttcagaggttaatgatgaaacatttgcctctggcattatgggacctggcatggcaattatccccacaacaggaaaagtgattgcacctgcagatggcgttgttgatattaccttttcttctggtcatgcgattggcttaacactggttaacaatattgaaatgctgatccatgtggggattgataccgttaacttagcgggacagcacttcacatgctgtgtcgttaaaggtcagaaggtgacaaaaggtgatacgctaattgaatttgatttagatgcgataatagccgcaggctatgatccaacaacgatgatcatcattactaatgatgatcataaactagacgttgttcagaccgataaaaaacatgtcgaccaaaatacagttttactaaccgtgggttaa

SEQ ID NO: 297373 - DNA, 300 bp, Proteus mirabilis
  misc_feature (248)..(257): n is a, c, g, or t
atgatctatgctgatttacatgttcacacaaaccatagtgatggtgtttgtgaaataaaagatgtccttgaaaatgcatttagaaacggcattaagactattgcgatcaccgatcacgatactaccaatcattatgacgaaatttaccgagaaggggagcgtcttggattaaatatcgtcaaaggtgttgaaatgagttgttatgactttgacgtttataaaaaagtccatgtagtgggactttggcnnnnnnnnnntaacacggctatattgattagatatccccatcaaagtgggtaa

SEQ ID NO: 297374 - DNA, 420 bp, Proteus mirabilis
atgaatatattccaagcattgagagaaaaatatccagaggaaatgaccaaagagcgttataaacaactttttggctctaaaacaaaaatagaaacagacttaaaaatggggtatatccctgttgatgaaggaattgctgctatcttacaagacggtggtattcctatacttgctcacccatgtgtctatgacaactatgatgaaatagaaaaatatgtccagtttggattgaaaggattagaaataagtcattctagaatgaaacctatcgactatgaactgacccaaaactatgctaataaatttggtttgctaaaaagtggcggtagtgacttccatgatcctgcgttacttaaatttggcgattttggcctaaatcaaacacaatttgagaccttaaaaaaggacgcaaataaataa

SEQ ID NO: 297375 - DNA, 2166 bp, Proteus mirabilis
atgaaattgatcatagaaggtctttctcttacaacccagttattaggcacacatttatctgtggctacactgactgcacatacaatccgtactacaaatatgggaattgatttttcatcactggttgaatatctgaaaagtgaaggatttgaaaatacattatcacaacgattattagatgatattccctctctagctatgccagtattattattattaaaaaatgaagagggtgctgttttaaccgaagtttcatttgatgaaactggacaacgtaaatataaaattcagcaagtagatggtttatctatatggttaacacaatctgaattaagtgaaaaatatttaggttattgctggttcattaagccacgtattacagaagatgttcgttcagaattgcctgaatatacgatgcctaaagcatggttttttaaagttatatggcgctttaaaaagtattactatcaaatcattctcgctacttttgttattaattttttggcacttgttagttcattatatgtcatgaatgtttatgacagagtaatacctaataagtcatatcaaacactctgggttttaagtatcggggtaattattgcaatattatttgaatttacagctaaaatgctccgaggccggttaactgatattgctggtaagaaagctgatttaattatcagttctgctttatttagaaaggtcacaaatcttaagttacaagaaaaacctatatcatctggctcctatgttaataatttacgagattttgaatctgtccgtgattttatgacgagcgcgagtttattaacattagttgatatgccttttttaattttatttgtatctgtaattgcgcttgttggaggctatttagcttttgtgccacttacgataattccattggttattattgtcggacttttagctcagatccctttatccaaatatattaatgaatcgatgaaggaatcatctcaaaggcaaggattagctgtagaagcgattgaaggcatagaaacattaaaaacgaataatgccatgaattgggcgcaaaagcgttgggattattacacagcaaaaacagcatcttcatcaatgaaagttaaaaacatcagtaattttgttatttattttgcagtaatgatgcaacagttaaatacgatatttttagttattattggtacttatttgattcatagcgatgatcctgcaagtaaaattacaatgggggcgttaatcgcaacggttattttatctggtagagcgttatcaccattaggacagattgcggggttagccgtgcgctttcaacaggcttgggtcgcattaaaaggtgttaatggcattgttgagcgaccatcagaacgtgaaccagctaggaaatatattacgttaaaacaaataaatggaaatataaaattccaaaatgtttcatttgcttataaccaagatagtagcagtgtagtgaaaaatttatcatttgaaataaagccaggtgaaaaagttggaatacttgggcgtattggcagtggtaaatcaacgactttaaaattagcagctgggttatatcccgcagagcaagggagtatcacactagatgatgtcgatattcgccaaatagatcctcattatttgcgtaatcagattttgttattagaacaagagccaaggttatttttaggtagtttaagagaaaatcttgatttagcccgtatggatggcttctctagtgatcaagatttgattgtggcactgaagcggtttggtttggataaagttattaaaaaacatcctaggggattagatatgtccttgggagaaaatgggttaggtctttctggtggacaaaaacaaattgttgctttggctagaatgacgttgagaaatcccaaaattgttttacttgatgaaccaacaacggggcttgatcaatattcagaaattcaggcattaaatgccatttcagcatggtgtcgctcaaagacattattggttgttactcatcgacctcaggtactgagtattgtcaatcgaataattgttgttgataacggtaaagttgtgatggatggtcccagagatgcggttttacagcagttagctaaaaatgaaacagaaaaacaaataactgctcactcaaaaaccaaaatagataagtaa

SEQ ID NO: 297376 - DNA, 921 bp, Proteus mirabilis
atgaaaataaccgtattaggatgtggttcaattggtaaactttggattgcaggattaacgcaacaagcccatgaagtacaaggatggttaagaatacctcaacctgattttgacgttaacgttgactccattaatggtatcccatttcaacaacgcattatagccaaccaaaaaacatggctacaacacagtgagttactgcttgtttgcttaaagtcttggcaagtttcagacgcggttaatgcacttatccctcacctctctgctgattgcccgattttactgatccataatggtatgggaacactagatgagctcaccctacctgaaacaccgactaaaagagcgatattacaaggtataatcactcatggtgcttatcaacaagatcaaaaagtgctccatacagcagaagggatcacccacattggcccactaaatacaacagcacgtcaatacggttatttagctgaaattttacatcaagctttaccggatgtagcttggcacaatgatattcatactattagctggctaaaattagccgtaaattgtgttatcaaccctttaacggtgttttatcaatgtcgcaatggtgatttattaaaataccctgagcatatccagaaagtctgtgatgaagtttatcaggtaatggagcgtgaaggtgttatacctacctctagatcacatttacatggttatattatcgataccatagagcaaactgctaataattactcatctatgtatcaagatgtgaaatatcaacgccataccgaaatcgattatatcacaggctatctattacgtagggcatcagagcaaggactcgtgttacccgaaaataagcgactttttcaatttataaaacagaaggaaggcaattatgaccatatccgcactcatctgtctagctaa

SEQ ID NO: 297377 - DNA, 1218 bp, Proteus mirabilis
atgaaaaatgttgcgataagtggatgggaacttaatttaccttcaatagtaaattttgaacaactttctgaacaactcttattaaaaagaacaattaaaacagagaaatacttctctgatgattattttgtagaatattttaaatttaatcataatccggcggtgatcccctatcaaaatattcccaataatcattttgaaatattaacgcgattaattcataacagtttaaaacgggctaatatcaccctagaaaagcttcgcgcttcacgtaccataatgtatcttgcaggtcacgggcctagagctgattttatggattaccaagggttttatgataaaaacgatgccgaagatgttcaatattctccgcagataaaatcactccatgcagcctcttttgcacaggatgaattagcgaataaattgtgggctgaatatcagttagattttccacctattcctatctattgtgccagtaattctgcgttaatggctgtgcatataggacataatgaaataagccaagatatggcggatattgtaatagtattgtcgtggaatagcttacttttacaagatatagcctttatggatagccaaggcatgttagttgaagcgcacgctcaacctttgagtaaatacagcgatggggtcaccttatcagacggttatgccgtgatgatcttagaaagccaacaacagataaactcgagacaatatcttgcacctgcttatatctatcattccgtttttatgcaaagtaatgctgaacggacaatgggaggcacattatttaacttttatacgatatcaaaagtgatttctcagcttctcgatcttagtcattatttaccaagtgatattggtgctatttttattcatggtaatggttcgattattagtgataaagctgagacggtagctattactaacatctttaaacaccccattcctattattagctataaagggcagataggttatatttctaattgctctggtattattgatttaatgattatagctgattcattaaaaaataatcgattgatcccctcgactacacattatccaatagatgatggaatggaggttaatttcctcactaatcaagagtgtgtgaactatagcgctaaacctattttaaaaatcggcttaggtatggatggatctattattgccatgttattaatcgcaaatggagagcaaggatga

SEQ ID NO: 297378 - DNA, 708 bp, Proteus mirabilis
atgtatggaataacaaaagcacgccaaatagcattattttcactaacaaatattaataaattttatcatgataaaagcaacgctgaaataatttttaaaaatcttacattcgacattaataatgagcattttacattaataaaatatcaacaagagaatgaaaagaatgcattgattgatattatttcaggagttgatattcaatatactggttatacttattttttaggtaacaatataaatattctagatgaaaagcagcgagctttattaaggaatagaatgatcggttttgttttcaaagaaaatcacttttttaatcattgtaatgtatttgataatatttattattcagtaatcaattataaagataaaaaaaagctaaagaataatattataaatacacttaaatctatgggtatagaaaaactctataataaaaccccaaaatcgctatcaacagatcaattgctaaaggttgcctttagcagagctttagtgaaaaaacctaagtgtatcattgctaattataataatgattgtttcagtcagaataactttgattattttatccaattattatcacaagtacataaagatttatctataccaatattattaatcactaattgtaatcatccaaacacggctgtagataaaattataacgattaaacatggagagttatatgatggggagaaaacttaa

SEQ ID NO: 297379 - DNA, 666 bp, Proteus mirabilis
atggggagaaaacttaattgtatcggtattattttaataataatttctctattgctctcacaagtagagagtaaaatagatattaaaaatagtgataaacgtttcttattatttatatcactgaatacatttactgccaatgataaattgacctcattaatttcagagttagaatacagtataaaacaaggtgatcatccatttgataaagtcatttatggttatgtcagtgtatttttatccgcttattatcataaaaataaagcttattctcaggctgcacagacaataaaaaaggcctttttttatcttgatgaagttgttgaacaaaacccaactaattggcggttgatctatctaagattaagaatggatgcttttacacctcgttatttagggcgctgtgtggtggctaaaaaagacagtcagcaattacttgagaatattaatatcaatagtgaacttatacccatgattaactatatgtatgcgcgtgcattatttagttgtgagcaagtgacacaagcaaaaaagatcatggctcaattacttcaagaaaatgaagcgagtaaaaaaattgctcgatatagtttcactagtgttcctccttggttatctattgaaaagaccgcggttattcaaccaataacattagagagtgattaa

SEQ ID NO: 297380 - DNA, 1395 bp, Proteus mirabilis
atggttatgcaacatgctaaaccaggcagggtggcacttgccgttatgggcgcattgcttgtaactgcactacctgcgaaaatgtcttatgctgaaggatttattgatgactcaaccctgacaggggggatctattactggcaacgtgaccgtgatagaaaagagttaacaccaaacagtcctgattacggcaaatataaagcaaatttacaccactctacctttaacgctaatcttgatttttcttctggttatctgggtgatttttttggtattgatttagctgcttttggtgctgttgaacttaacaacagtgggccagctgcacctaatgaaataggatttagtgatgcaaaaagtcgctgggatgaaaaatggacaggtgatcgcagtggcgtgagtatttataaagctgctgctaaatttaaattaggccatttctgggctcaaggtggatatattcaacctaaagggcaaacattattacgtcctcattggagtttcttacctggtacttatcgcggtgcagaagcgggcgctgtatttgatttcgataaaaatggtgaactctctttctcatatatgtggactgatgaatataaagcgccgtggtatcggaatatgtacaatttccgtaaggcagacttagagacaaatatcagttatttacactcttttggtgccaaatatgattttaaaaatagcttagtattagaagccgcatttggccaagctgatggttatattgatcaatattttggcaaagtttcttacgatttccctgtcgcaaataatacattaaaaacctcttatcaattctacggtgcaaaagataaagtcactggagggggaattaacgatgtttatgatggtttggcatggttacaagcattcactttaggctatacctacaatgtatttgattttaaagttgaaggtacttgggttaaagcagaaggtaaccaaggttactttttacaacgtatgacgccgggatgggcaacctcgaatggtcgtttagatatctggtgggatggtcgttctgattttaacgccaatggtgaaaaagcattatacgcgggagtgatgtatgatctaaaaaattgggatctaccgggctgggcgattggtacttcctatgtgtatgcttgggatgcaaaaccgagtagtaaccctatttatgaccaaagtaaacgcattagagaaagcgcatggaatgccgacatcatgtataccgttcaagaggggagagcgaaaggtacgttatttaaactccactacactcgttatgataaccattccgatataccaagctatgaaggtggttttggtaatatcttccaagatgaaaaagacgttaaattcaatgtgatcatgccatttacgattttctaa

SEQ ID NO: 297381 - DNA, 225 bp, Proteus mirabilis
atgattaaaagcacaaatatcatgataataaatggtcaccttgcatctgttgtttatggatcagaaataagtgcattccgaggacaatttttagatgtcaatgggtattgtgactttgttgctgatagtattgaagggttgcaaaaagaaggcgcaatttccttagctgaatttattgagacttgtactgaagaggagatcgcaccttttaaaagtagaagataa

SEQ ID NO: 297382 - DNA, 447 bp, Proteus mirabilis
atgaccgacaataataaagcgttaaaaaatgctgggttaaaagttacacttcctcgcttaaagatcttggaagtgctccaggatcctgagtgccatcatgtcagtgctgaagatctctataaaaaactgatcgatatcggcgaagagattggtctggcaacagtctatcgcgtcttaaaccaatttgatgatgctggtattgttacccgacataattttgaaggtggtaaatcagtatttgaattaactcaacaacatcaccatgatcacttaatttgccttgattgtggtaaagttatcgagtttactgacgatgctatcgaagttcgtcaaagaaatatcgctgaacgccatggcatcaaactttccaatcatagcctgtatttatatggtcactgcgccgcaggtaattgtaaagaagatagccacgcacatgatgagaagtaa

SEQ ID NO: 297383 - DNA, 528 bp, Proteus mirabilis
atggcaatcataggaatattcttcggcagtgataccggcaacactgaaaatattgccaaaatgcttcaagaaagattaggcgcggataatgccgaagttcatgatatcgcaaaatccagtcaagaagacatcgaagcatttgatattctattactaggtattcctacctggtattatggtgaagcacaatgcgattgggatgactttttcccaacattagaagatattgatttcaacggtaaacttgttgctctatttggttgtggtgaccaagaagactatgcagaatacttctgtgacgcaatgggaactattcgtgatatcattgaacctcgtggcgcagtcattgtgggtcattggcctactgaaggttatcattttgaagcatctaaaggtcttgctgatgataatcactttatcggccttgcgattgatgaagatcgccaaccagaattaactgaagagcgtgttgacgcttgggttgctcagatcaaagaagagatgagccttgacgaaattctgggataa

SEQ ID NO: 297384 - DNA, 786 bp, Proteus mirabilis
atgaaactcaatgcattattaaactatcaaatacatcaaccagaaacagcaacgataaacaatttacctattgtgttgatccatgggctttttggtgatctcaataatctaggcgtactaggtcgcgatctacgtcaagaccacaccgtgatacaaattgatgtgcgcaaccatgggcattctcctcatagtgaaagtatgcactatcacgatatggcacaagatgtattagccctgcttgatagcttaaatatcgcaaaagcaatcgttataggtcactcaatgggagggaaaattgcaatggcaatgaccgctctcgcacctcttcgccttgaacgtatcgtagttattgatatgtctcctgttgcttataatgttcgtcgtcatgataaaatttttgcagcccttgaagctgtcactaaagctcacgtcacacaacgtacagaagctattgctattatgcgcccttttattgaggaagacggcgttatccaattcctgcttaaatcatttaaaaaaggtgaatggttatttaatttacccgcaatcaaacaggcttaccccgatattattggttggcaagaagtgcctgcttggcatcatcccgttttatttatacgtggtggactatccccatatattttagatgagtatcgcgataatattgctcgccaatttccacaagcaaccgcctttgttgtcgccaatacaggacattgggtgcattctgaaaaaccagaaacagtaattaaggccattcgtcgcttcttagccaaaacagtataa

SEQ ID NO: 297385 - DNA, 1644 bp, Proteus mirabilis
gtggcaatccattcaagagctgggcaacatactcgtcaaagcgatctgattaatgtagcgcaattaaccgcacaatattattcactaaaaccgcaagcaaatcagaatgctcatcgtgtgaaatttggtacatcgggtcaccgaggcagtgccaaacgtcatagctttaatgaagcacatattctagcaattgctcaagctattgctgaagtccgagctaataatggtgtaacggggccttgctatgtaggtaaagatacccatgcattatctgagcctgcttttatttcggttttagaagtgcttgctgcaaataaagttaacgtgattattcaagagaataatggttataccccaacgcctagcgtttccttctctattttaacttacaatcaagggcaccaagacattgctgatggtatcgtcattacaccatcacataatcctcctgaagatggggggataaaatacaatccatcaaatggtgggcctgctgatactgatttaacctctgtgattgaaaaacgcgccaatgaattattggaaaataatttatcgggggttaaacgtctttcttatgatgatgcattagcgagtggttatattcacgagcaagatttaattatgccttatgttaaagcgttaggtgacgttgttgatatgaaggcaattaaaaaagcgggtttgaaattaggtgtcgatccactgggtggttcaggaattgaatactggaaacgcataggtgaatattacgaacttgatcttgagttggtaaacgatcaggtggatcaaactttccgctttatgacattagatcatgatggtgtgatccgtatggattgctcatcaccttgggcaatggaaggtttattgcaactgcgtgataaatttgacttagctttcgccaatgaccctgattacgatcgccatggtattgtcactccttcgggcttgatgaatcctaaccactatttagcggcagcgattaattatctttttcgccaccgtcctcagtggtcaaatgaggtaaaagtgggaaaaacactcgtctctagtgcgatgattgaccgagtcgtggctgatttaggtcgcgaacttgttgaagtacctgtcggctttaaatggtttgtgcaaggtctattcagtggcgagtttggttttggtggtgaagagagtgcgggggcatcattcttacgttttaatggtaaaccgtggtcaacagataaagatggtattatcttatgtttactggctgctgaaataaaagcggtaacaggtaaagatccacaacaacattataatgagttagcgcaacgttttggctctccaagctataatcgtatacaagcatctgcaactcatgagcaaaaagcgttattgtcacgattatcaccagaaatggtcactgcaaataccttagcaggtgatcctattactgcgcgtttaactcacgcatctggtaatggtgctgctattggtggtttaaaagtgatgaccgattatggttggtttgctgctcgtccttctgggacagaagaagcgtacaaaatttattgtgaaagcttccgtggccctgagcatcgcgaattaattgaaaaagaagccattgaaattgttaataatgtttttgccagtaaacaataa

SEQ ID NO: 297386 - DNA, 1638 bp, Proteus mirabilis
atgactatcgaaacaaaagaagaacgtttacaaaaaatcttaacagctgaaaactgcaaggataccgcaaaaacaccacctaagcctgttcatcctcaagctgatgagcctgatacagatcccgataaaaatacagttacagagattaaatataatcaaataaaatcttcgccagatgagcctggtaacgaagtaaaaatgaacgggataattagctatgaagtagaggtaaaagatagtgatttacgtttggctcaatggagtacaaatcctaaaggaattttaattttacccaacaacaaagatgtttataccactatcgttgatgaccataaaacgaagatctctttaactggcaatcgtagtggagtggcttcattacagttgattctaagagatgaagataatgaagataatgcctattatgccccgccgttgcaaattcgagtgacacccgcgatccctaataccgattgctcagcggctaattgtgagaggtttgatgatttactgacaatcaactctgaatctatgcaatggccgagcaaatgggaagaggtatctaaaagctttgtggtacaccttcaaaatcaagaaggtgaagatatgcaaaacaaggaggtcacattagtttacgataaagacaacagcacactacttactcagcctgaaatttataattccgaaggtgagttaagcaatatttcaaaaaccaataaatatggtattgcaaactttaaagttagatttaaaggtaccgagccaaagcagattgctgttttttatgctgaatcagaaaacagtgaagatatagataacccactcaaatcaagaaactattatgttgaaatgacgacagagaagttgccgtctcctaaggttcctgcaacgctaaatggtattctaagctatcatagtgaaaattactgtgtaaatgcgaacctaattttaggtcgtgatattagtgaaagtacacaagtagggttctattttaatgatcaacttaaaatgttgccctgtactgataaatcagcggtatcggtcaggttagagaatcaagccttaacgaatggcgttcattatatctctttcttcactgtggatatttttaacaatatttgtttttcacgccgtgaacgtattattgtggataattccttaactggggaatgcggtaaacaaattaaaaatattgcaccgaagccttgtattagcgtcactattccgcaaatttgcgatcgttattttaattctgtcaatattcggcttgtgccttctttatgcttacaaattaaaaaccgtgttgcaaaattggatatccaaaaaatggttataatctttaatggatatactaaagtcaatagcagtgagcggacattggtttatcgttctacattagaaatttatgccgatgatcctcgtttaggtgatttcctgcaagatactacaccaagcaatgagccgataagtatgattgaaatatcagagcctgcattagaaagtattttggcggatgcattgccaaatatcgaagtgggacaattaggtattcaggtgatggtatttgagaaaaatggcaactgttacttatgtggtgaaaatatgtataccgtttctctacgtttaccttgtgcttaa

SEQ ID NO: 297387 - DNA, 579 bp, Proteus mirabilis; identical to SEQ ID NO: 296290

SEQ ID NO: 297388 - DNA, 663 bp, Proteus mirabilis
atgcatattaacagtcgtctagataataacgtacttagagatattctgcttgtttcattagcggatgggatcgttggaatatcttatggtgctttagcacatactcaaggtttcgatttttgggtacctctttcgttatcgatttttgttttagcaggggcttctgaatttctatttatcggagtggttgcgatggggggaagcgccatctatgcggcactcgctggtttaatggtcaatgcaaggcacatcccttttagtatggcggtgaaagagttacccggaaaagggattaaatcactattaggctttcatgtattaaatgatgaaagtgtggtttttgggttatctcaatcgactgctgagcaaaatagattagcattttgggcttgtggattaggcattttactgatgtggccgttaggtactatgttaggtgtttatttaggctcttttattgttgatataaaaatgcttggtttagatgcgatgttcccagcgattattttggcactaagtttaccggcattgaaaaataaattaacacgaaaagccgctattattggtagtgtgattgccttagcaacgacactgtttctccctgcgggaataccggttttattatccttgttaggcgttttatttgtggtgagaaaaatatga

SEQ ID NO: 297389 - DNA, 330 bp, Proteus mirabilis
atgatctcaacaacttcacttatcgcaggtatcgctattttagccgtaggaacttatgccatgcgcatctccggtatcttattaaataataaaacggggatgtctgagcgggtcaaagaaatgttttcactttcagcaattgtgatcttattttcggttgcaatgacatctactttttttgatggtgaccaactcgctgatattgccaagattattggtgtgggtgttgcaggcgttttaacctggaaaaagaaaccttttattttggtggtattaagtgctgcaattattaccgcgatgctacgttggatagccactttgtggggataa

SEQ ID NO: 297390 - DNA, 1404 bp, Proteus mirabilis
atgaagatccgctctttctttatttatactatctttctacaaacgatatctatcgtgatgctatggggcgtttggttagcttggatagaatttgattatcttgctgactttgaaactatctacaataagcaacaagaaattattgctgaaggatttgccaatacactcgaaacggtttcctctcaacccgaaacagtaaaacagatagctcaccatttacaaaacatgtatatcgataccatgcttaatggtgaagatgatgatttacactatttaccttggtttattgtcttaaataaagataatgatctgatttataccaatagaccggaactttctctgcctaaacgggtactgtcgcttgcctctgaaaaaatctctgtggctggggagaaatggtatttatcttatagttggggaaaacaacataaaattaaagtttttattggtgaatccgtcgaagatagagggcatgtcattggtaaccctatttccggtacttttgtgcccttcctatttattttagcgacggtgatcttggctatcttaattactgcttattttagtttgcgccctttaagacaagccgcagagctgatttctaatcgaaaacctcgtaatttaacgccaattaatgtcggacaacaatttaaagagatccgccctatctttaaagagcttaaccaattaatggcaagaatagatgcggctaatattagagaaaaacaatttatggctgatgcggctcatgagctaagaaccccgattgcagcagtgattgcccaattgcacattctctctttagtcgatgaaaagcaggagcgagaagaaattattgaagatatgaaacaatctctggatagagccgccgcactttcccaccagcttattgatttagcaagattagagtgtgacgatttccctataaaaatagaatcctttgatgtttataatattattggtaatgctattgctcagcgcgtgccttatgccttaacaaaaaatattgagctatctttaaatgaaggtatgtcacttaaaatagaaacagataaacaagcactactgtctatttttaataacttattggataatgcaatcaaatattgccccaataatagtcaagtcgaagtgactattgaacataaagatacccatcatctcaatattattctgcgtgataatggaccaggaattgcacctgagtatattagctcactattttcccgtttttatcgtgttccgggatcacaagggacgggcagtggtttaggcttatctattgcacaaaatctcgctgaaaaaattcaagcaaccatttccattactgaagggctacacaataaaggtattggttttattattaccttaccgttaaaaattaaaccactagataatgagtaa

SEQ ID NO: 297391 - DNA, 666 bp, Proteus mirabilis; identical to SEQ ID NO: 296603

SEQ ID NO: 297392 - DNA, 528 bp, Proteus mirabilis
atgaaattaaaaaaactgcatttagttttagggttaggcttatctatcattgcgggctctgcattagcggcagatcaagggcatggtactgttgaattctatggttcaattattgatgctccttgttctatcgatcctgattcaggtgctcaacgtattccattaggtcaagtgtcatctagcgcactgaaagacggtggccgtagtgcatcaaaaatgtttaaaatcaaattattacagtgttctactgagacatataaaacagtcaaaacaacctttaccggtgctgaagctcctgatgttttagagggggctttaggtattgaagggatcgccaaaaatgcagctgttgttatcaccaatgcaggtggtgaacaaatcaaattaggtcaagcaagtgccgcccaaacattgaatgacggtaacaatgacttaaattttgccgcttatttacaaggatcttcctcaaaagctgctattcctggtgattttacagcaatagccacttttgctttatcttatcaataa

SEQ ID NO: 297393 - DNA, 2628 bp, Proteus mirabilis
atggctaaattattcaagacgattgatttaaatgttaaacataaaagtaagcagtgcagaggtcgttctgctaccacactgatctatttcgtgattatagggatggcaagtattgccagcgagtcatttgctgttagcaaagatattgaatttaactcagatattcttgacttaaaagatcgaggaaatattgatttatcaagcttttcccgagcgggatatattactcctggcaagtatgagttaattattaatattaataacaatgaattaagtggaacttatcgtgttgactatattgtgcccaaagatgatcccaaggcaagcgaaccttgtatctcacccatattagttaagcagtttgcactcagaccagaatggttaaaaaagttaacttggaaagataagggtaattgccttaatgaggcatcgttaccaggtatgagcctgaggacagatttaggtagtggggttttttttattactcttcctcaagcttatctagagtattcatcaccgaattgggaatcgccttctttttgggacgaaggtattgctggattattgtttgattataacgttaatgccaatgtcagagcgcctagtgatggcaagcagaaacagcagatcaccgcaaatggtacggcgggagcaaatttaggtgtttggcgttttcgggcagattggcaagcaagttatgagcacactacaggtgtattgcatagcacagaaaatcactggaattgggatcaattctatctttatcgagcgataacgaaatggggcgcccgtttagtcatgggggagacttacttacgttcaaacctattagataatttccgttttacgggaataagtttacttacggatgagcaaatgttgcctcctaatttacgaggttatgctccagagatcacgggagttgcaaaaacgaatgcaaaagtcactgtgagtcagcaaggacggattatctatgagacacaaatcgcgcctgggccatttcgtattcaagatctgcaagatgcggtaagtggacgcttggatgttcgtattgaagagcaggacggaacaatacaagaataccaaattgatacagccaatattccttatcttacaagaccgggacgccttcaatataaagtatctgcgggtaagccttctcgcttagatcataaaactgaagggcctatttttgcaatgggagagttttcttggggagtgaataatggttggtctctttttggtggcactttagtttctaaggattataactcggcctcgctaggttttggacgagatctaatgatgttaggtgctatctcttttgatacgactcattcatgggcaaccttcgctaatgagaataaacactatcatggcagttcatatcgaattagctattcaaagcgttttgaatctattgatgggcaaatcacttttgcaggctatcgattctctgatcgtcattttatgagtatggatcaatatttagataggcgttatcgctatggcgcacaagaaaataataaagagctttatacccttacactgagtaaacaatttcctcaatggggacttagtacctatataaattataaccatcaaaggtattgggatagaccgaataacgactattacaacttctctttatcaaagtatctcgctatcgggaagtttaaaaacattaacattagcttatccgcttatcgtaatcgttttaatggcaatcatgacaacggcgtgtatttcaacattaatttgccttggcgtgatagagcaacgataagttataactcggtcataaataaagaaggtaactcacataatgtcagctatttcgatcgcattgatgataacaataattatcgtctaagtgcaggagttagtagtcgaggtaaaccatcggcggatggtttctttacacattatggtgatgttgctttagtaacggcttcagccagtcatattaacggcgactatacttcggcatctttatctttccaaggtggggcaacattaaccactaaaggcggggattttcaccgtagcaatatgccgggggcaacccgtttgttaattgatactcaaggtgtttctgatgtcccggtaaaaagtcttagtgccatatctcataccaatatttttggcaaggcggtgatccccgatattaatcactattatcgaggcagtgcttctatcgatcttaagcagctaccagacaatgttgaagcactacgttctattcatcaattaactttgactgaaggcgctattggctatcgtcaatttgatgtgattgccggacacaaagcgatggcaacagtacagttggctgaaggaggcgttccgccatttgcagcgacagtaacaacgcttaatggtcgagaattaggtgtttttaacgacggtggaaaggtttatttaagcggtattaattcaggcgatgtcttgtatgtacattgggatggtaaaaaccaatgccaattatccattcctaaattggcggatacacaactgatcacatcactgcttttaacttgctttcaaagacagccgactatttcaacatcattcctggaaacagataaaacgcaagcattacctcaacattcattccttagtaaataa

SEQ ID NO: 297394 - DNA, 555 bp, Proteus mirabilis
atgaaacagcagattaataaaaatagtcttgtatcaatattggtactattgagcttttttatcacaacaaatgtaactgctgtgacaccagttttgtcaagtacgggactatcacaaaattcgcctattacacctatttatccgatccctatcaatataaaagggtacgttatcgctcaccctccttgcatgatcaatgagggcaaaacggtagaagtgaatttcggtgatgtgctaagtacacgagttgatggcttaaattacaaacgtctggttgattatcatccaagttgtgaacaaatgcccattaatacactaaaactttctgtcgaggggaatggtactttttttgatgccaatgcattaatgaccaatattaccggattaggtatacgtattttgtatcaaaataaaccacttaagttagggcaggcaattaattttacttatcccgattttcctgtattggaagcggtgcctgtgcgtgatttttctactcttcttgtgggaggagacttttctaccacagcgacattgcgcatggaatatcagtga

SEQ ID NO: 297395 - DNA, 849 bp, Proteus mirabilis
atgcttatacctaagcgccaattaatcttttacttatttactagcatgttgatatatccagcttcctctatagccgctattttttcttatattacagaatcaaaaccagtaggtaatgaggggacaggggctgattacacttttattatccagcgttgggatcccgagccaccaacggctttaaatccttgttataaaaaaaaaccttgttatataaccataaatcatcgtcatcagcctaaccagtctggaggctcagcgaccagaactattttaagtgatgggcataaatatcgaagaatggaagatctacgtattgctgttatgaaagaattaggaggattcccttatggcccaggagttgccattcatcgatatgttgatacatcaaccatacaagagtgcgttggtatattttatcagccaaatgcttatggttttgctgaagatggctatttattaccgggttctatttgtgcaattgctcccccacctgttggacattgtgatgtgttagcccattctgttgagttggattacggcaatgtgggggaaaatgaattagacaatgcggttcgttctcaaactgtgaatgtgacgtgtaatcgtgatgtctctttacaggttgttgcaacaggaatgaataatcgtcaagtcccactacgtaatgacaatagcttatatgctgatttatatattaatgataaatctggcgaagagggagaggctatctttgtcgctaaaggcaaaatggtttctatacaagtgagttctaaattgagaaccaatggacatgttgctccagggtatttttctggctctggcgcgttgattctaacgttaccataa

SEQ ID NO: 297396 - DNA, 321 bp, Proteus mirabilis
atggtgaaatatcgtcgtgcaaatattgatgtcaatgcactggtaggtaagcgcatacaaaaaaggcgtaaagagttaggttacacaggtagccaattggcggcaaaactaggggttagccaacaacaattctcacgctatgagcgagggttaaacaaaatagatcttacttatctagtgctattagctaagttcttaaacacacccatttactggttttttgaggactgtattacttcaacgtcggtcaaaagtggcaaaccgctaagtcgacgaagcaatcttttagccaaaaaagcactagacgcatttctgtattaa

SEQ ID NO: 297397 - DNA, 1326 bp, Proteus mirabilis
atgttagccgtagaattgattatcgttctgctggccattttcctcggtgcgagactaggaggaattggtatcgggtttgccggtggtttaggggtgttagtattagccgctatcggtgttaaaccaggtactatcccttttgatgtgatctccatcattatggctgttattgccgcaatctctgcgatgcaggttgctggtggtttagattatttagttgatcaaacagaaaaactattaagacgtaatcctaaatacatcacaatacttgcgccaattgtgacttatttattaactctctttgcaggtacaggtaatatctctttagctacattacccgttattgctgaagttgctaaagagcaaggcatcaaaccttgtcgcccattatcaacaggtgtggttgctgctcaaattggtattacagcatcacctatttctgctgcggttgtttatatggcatctgtcatggaaaaccctgcaatggtcggtgaaggtaatacagtaagttatatcactctgttatctattttattaccagcgactttccttgctattattctgatgtcattcatcatctcttgggtatttaactcaaaactgtctgatgatgcgatttatcgtcaacgtttagagcaaggtctagttgaattacgtaatagtaaagagcgtagagaaacattaccgggtgctaaatcttctgtaatgctattcttacttggtgttatttgtgtggtcacttatgccattatcaatagcccaagtttaggcattgtaaaagagccgttaatgaacaccactaacgctatccttatcattatgctgagtgtggcaacacttattactgttttctgtaaagttaaaacagataacatcttaaactcaagtacatttaaagcaggtatgagtgcgtgtatttgtattctgggtgttgcttggttaggtgatactttcgtttcaagtaatatcgattggatcaaactgactgccggtgatttaatcacaggtcatccttggttattagcggttattttcttcttctgctctgccttattatattcacaagcggcaacagcaaaagcattaatgccaatggctttagctttaggtgtttctccattaacagcaattgcatcattctcagcagtttctggtctatttattctaccaacttacccaacactggttgctgccgttcaaatggatgatacgggtacaactcgtattggtaaattagtctttaaccatccattctttatccctggtactatcggtgtgatattagcggtcggatttggtttcctcttcggcggtatgattttgtag

SEQ ID NO: 297398 - DNA, 1122 bp, Proteus mirabilis
atggactataaacttaatttagattggcaatcatttttagaaagccattggcaaaaacgtcctttattaatcaaaaacggcttctctggttttattgatcctttatctcctgatgaacttgcgggtcttgcaatggaagatgaagtggatagccgtcttgtgagttgtcaagatgggcaatggggagttaaacatgggccttttgagcactttgaaggtttgggcgataaagattggtcgttattagttcaagcggtcgatcactggcattttccaagtgcggcattgatgaaaccttttcgtgtgttgcccgattggcgtattgatgatttgatgatctcttactctgttcccggaggcggtgtgggccctcatcttgatcaatatgacgtatttattattcaagggcaaggtcgtcgtcgttggcgtgtgggtgagaaaatcccaatgaaacagcactgtcctcacccggatttacttcaagttgatccttttgacgccattatcgatgaagaattagagccgggtgatattctgtatattccacctggatttcctcatgaaggctacgccattgaagaatcactaaactattctgttggctttagagcacctaatgcacgagagctatttagcggttttgctgactatgttttagcaaatgacttaggaagctaccgttacagtgatcctgatcttactcctcgagataatccggcattagtccagcatcaagaattaaataagttgcatgatatgatggaagacttacttgcccaacccgaagtcttccgtcattggtttggggagtttatttctcaatctcgccatgaacttgacttggccattcctgaacctttatatgaaaatgctgagatccacgatttactgcaacaaggtgaacaacttcatcgtttaaacggtattcgcgcactgcgtgttggtgatagttgctttgttaatggtgaattaatggatactcatcatattgaagctgcagatgccctttgccaatatgattgtattgataaacaacatttaggtgatgctttagcagatccaaaatttatacgcttattgacgcatcttgttaaccaaggctattggtattttgaagattaa

SEQ ID NO: 297399 - DNA, 1464 bp, Proteus mirabilis
atgcataaaaaacaacgttcgcccttctctttacgaacaagatttttacttgccaccagcgccattattttagcactgacactctcttatggtttggttgccatagtcggttctattgtcagttttgataaaacgacttttatgctaatgcgtagccaaagtaatctctactatagcttagcgcaatggaaagatgggcaattgcagattgagtttccgactaacctcaataacaacaacacatcgctggtggttatcttcgacgagaaaggcaatgtgctatggacgccaacggatttacctcaggtgatcccaaacagtatcgcgccaaaatggcgcaataaagaaggcttatttgaaattagtgtgaatgttaaaacgacacgttttatgttacagcaactgcctcaatatcgagcctatctaaaaaaactcaacgaatattcaagtaatgataccttaacgcattccgtggttattaatcactatcctgcggcggataatatgccttatctatccattgcggttatcgatcctattcctcaaagtctgcaaaatgtaagtagagtctgggattggtttctctatatattactggctaattttcttttggtgatcccattaatttggttagcagcccattggagtttaaggccgattaaatccattattgagcagatcagcgcgttggaaaaaggcactcgcgataatttagatgaaaatcctcctaaagagctcaaaggattagtttataatctcaacattttattgcgtaatgaacgcaaccgttatagtaaataccgtaccagtttatctgatctgacccatagcttaaaaaccccccttgctgttttacaatcaacattacgtgctctacgtgctggcaaacaaatgtctatagaacaagctgagccaattatgcaaagtcaaattgaacgaatttcacagcaagttggttattatttacatcgagcttctcttcacggcgatcacgatataacaacacgcaagctccactctttatcaggcttacttgacaatctttgtagtgcacttaataaggtctatcaatccaaaggcgttgatataacattaaatgtttcccctgaaatgatgtggttaggtgaaaagaatgattttatggaaatcatggggaatgtacttgataatgcttgtaagtactgcttagagtttgtcgaaatcaatgtaagtcatgatgacaattgtgtgattatcaccgtagatgatgatggcccaggagtcagcccagaaaaaagggagcttatttttcagcgtggtacacgtgcagatacattgcgcccaggacaaggcttaggattatcaattgctgttgatattattgagcaatataacggtgatatcaccattactgatagtccattagggggggcgagactcatcgtcacctttgctgagcaacaactcactactgaaatagagtaa

SEQ ID NO: 297400 - DNA, 630 bp, Proteus mirabilis
gtggctaaagattttcgtgatattacccttgcactggcaggtatctgccaggcaagtcgtcttgttcagcaaattgcttatcaagggaatgcagacgagaaagatgttgaagtcatggttaacagcatttttaatatcaacccaacttcaaccttggatgtttatggtaatcaaataagtcatttgaaattaggttttcaaactataaaagctatccatcaagcggtaagaagagaaaaactcacgtttgagttgatgacttatcaacaaggcctgattaaccttgaacgtatcatcaacaaaaataacgattacagttcgcatttatcacaaaaaatatctcaacttgaacgacaaaaaaattattttgaaccgctttctgacggattatttaatgctctcgctggcgtttatagtgatgcggtcagccctgtagggccaaaaattcaagttaatggttcgattgagttacttaaaaaccctattattcaagccaaagttcgtggattacttctgacaggtcttcgtagtgccgtactttggcgtcaagtaggtggtcgccgttttgattttttactccatcaaaaaaccatcttacgacaaactgatgattttctcgctcaatgttaa

SEQ ID NO: 297401 - DNA, 1104 bp, Proteus mirabilis
atgtcagataacagccaaaaaaaagtcatcgttggaatgtccggtggcgtagattcatccgtctcagcctatcttcttaaggaacagggatatcaggtcgttggtctgtttatgaagaactgggaagaagatgacgatacagaatattgctcagcttctgccgaccttgccgacgcgcaagccgtgtgcgataagcttggcatagaacttcacactatcaattttgccgctgaatattgggataatgtatttgaacactttttatctgaatataaagctggccgcacccctaatcccgatattctatgtaataaagagataaaatttaaagcgtttttagaatatgcagctgaagatttaggggccgactatattgcaacgggccactatgttcgtcgccgtgatattgatggtaaaagccaattactgcgcggtgttgataacaacaaagatcaaagctacttcttatatacattaagtcatcagcaaatcgcccaaagccttttccctgtcggtgaaatggaaaaacctgaggtgagaaaaattgccgagaagcttgatttagcaaccgccaagaaaaaagactctacggggatctgctttatcggtgaacgcaagtttactgatttcttatcgcgctatttacctgccaaaccgggtcctatcgtcaccgtagatggcgaaaccattggtgaacatcaagggttgatgtaccacaccttaggtcaacgtaaaggtctgggtatcggtggcacaaaagaaggtagcgaagatccttggtatgtagtcgataaagatgttgcaaataacatattaattgtcgcacaaggtcatgaacaccctcgattaatgtccgtaggcttaattgctcaacaacttcattgggtcgcaagagagcctattaccgaagcttttcgttgcacggtgaaaacacgatatcgccaagctgatattccgtgtacagtaacaccattagatgaagataaaattgaagtccgttttgactatcctgttgctgctgttacaccggggcaatcggccgttttctatcaagacgaagtctgtttaggtggcggtattattgaaacacgtattcaggagtag

SEQ ID NO: 297402 - DNA, 483 bp, Proteus mirabilis
atggcttttaaatataaaataacaataatcatatttttgctatcttttattttttttgtagtgtatgagttttttattcccgttaaagtcatgggagtacataaagatacgtataccacctctattctggttgaggattttccgataactgattatggaaaaataatatggtggaaaaataatcaagatgttttagataaaaagtatgatttatttaaggataaaaatagtttatttttgatttctatatggaattacggtgatggatatttagaagaaggaaaatacgatcgattatgttttactgaaattaaaagtaacaaaaaatgtatagaaaaagataaagtgatgtcaataatgtattctttaaatgaagaggaaattaggatcggtaattctgcatatattaaagataaaaatggttcttttataaagaaagacaaggatgctaatacaactatcacagtagtccctaatgcataa

SEQ ID NO: 297403 - DNA, 282 bp, Proteus mirabilis
atgaaaagcaaaacaaaaagccagtgcgattacggaaaccatatcacaggggagtgcataggaggtcatctgcgtataggaaatcatagcgactattacgattattcagatgatgttatgttatgccatgccctgcatgtaatgcggaagaatggcttaaaaaatatcgagccgaatacattgatgatggtattaattacgggcagaaaggaaagaaaattaatacaaaagagtatacatcatctattactaatgaaattaaagctaatcagggtgctgtaa

SEQ ID NO: 297404 - DNA, 846 bp, Proteus mirabilis
atgattcatgttgtcagtttttctggcggcagaacctcggcttatctcgtgcacctgatggaacaaagacgaatcaaggaagatttggatgttagatatatttacatggacacaggagcggaacacccaaagacatatgagttcattaaaaatgtcgtatcacattggggtattaacttaacctgtttacgtgtcgtagttaacccagaactcgggcaaggaaatagctacgaagtaatacccgtcagtgaaatcaagcacgatcttgagccatggaaagccatagttaaaaaatacggactaccctatccagctggtgcgttctgcactagggaaatgaaattcaatccagtcactaaatactgcaaagataactttgatgaatatacgacatggattggaatacgagcagatgagcaaaacagattgaagccaaaggatggcattaattatctagctgatatcagtgactttgaaaaggatgatattaatcactggtggtcaaaacaacctttcgatttaaacattcctgagcacctcgggaactgcgttttctgcatcaagaaaagtgtaaataaaattgctttagccgcaagagatgatcccattctagcgaagcaatttattgatgtgattaatggggatgtcagaaaagttaatcgagagcaacaatcaagccagattatgtttagaggaaataactcattggaagggataattgctttattcaaggatcacacaagagatgaaatcgccaatgtagttaaaggttctggcggatataaatccggttcttgtagtgaatcttgtgaagcctttaattgccagttggatttacctatttaa

SEQ ID NO: 297405 - DNA, 258 bp, Proteus mirabilis
atgaatattaaattacctaccaaccctatccgtatgcctgctgttttaaagctaacaggactttctcgctcaactattcgcaccttagagaagaaaggtgattttccaaagcgtatgtatttgtcggtgcgttgcgtggcatgggaggctcatgaagtatatgaatggatagataagaaagctaaatcaagagagacacccaagtgttacaccgaacgtaagcgtaatgaagcaggtcagtttgtgagtaacgcctaa

SEQ ID NO: 297406 - DNA, 222 bp, Proteus mirabilis
atgaaaattgtgactagaaagcaagccattgaaaatggtctaagtcgtttctatacgggaaaattatgtagacatggtcatgattctgagcgttttaccagtaatggtgtttgtgttgaatgttccgcaattaattcatccaactacagaaaagaagtcagccgattattaaagatggctcgtaatagaaatattgcttatgaagacaatatcagggggtga

SEQ ID NO: 297407 - DNA, 804 bp, Proteus mirabilis
atgatactttggctgatctcttttggcttaatttcaggtattactacatggttatttggttttggcggtggttttgttactgtgcccttactctatactctgattcttacgctttgggctggtgatagtttagcgggtgaacatgctatgcaaattgctgtggctacctctgcgctcattatgctgttttccgctattattacgaccctaaaacaccataaggcgaaaaaaatagattggaaattaattatgatcttattttgggggattgcattcggtgggatcttcggtgccttacttgcctcaaccgtccaaggtgaatggatccgatggatttttattggttatctatttctgactatcttagattgctattttcgccccggatttatggcgccacgcaaagaaatacaaaaagtaaccaataaaaaagaagcgttaactggcactattattggcattattgcagcttttttaggtgtaggtggaagtgttatgaccgtacctttattacgccgtagaggtatgtcaatgactcaatcggctgccatggcaaacacattgacattccctttagcattaacggcaacactcacttatatcttattgtctttcactaccccgttaggggatagcgctggatttgttggctatatttggataaaagcagccgttattctaatctgtagtacatggataggattaaaaatagctgaacgttttttatcacgtataccggataaatggcatgctagagtttatccgctgttattgatattggtgttagtcgttatgctgaactaa

SEQ ID NO: 297408 - DNA, 405 bp, Proteus mirabilis
gtggatcttgattataatactagttttgatagtgcttggtttcgcttagttgataaagccaacccagataaagctgttggggcttcattttttaattggaaagatgcaactgttgacggaaaaacggcttttataagccgagcaacacctaaaacagctgaagtaggggtatctgtcttagttaaaaataatattcatgggtggacatcagagcaacaagaggatgtatccgccgcatctcttaaattagtctcaggtgaaatctttaccacaaaatttataccaggaatatcatctcatacatttattctttctcgtgataagctagctaaaaaagcgatagatattagtaatggactcgattttattggtgaggccgtattaacattctctttcggtgtttaa

SEQ ID NO: 297409 - DNA, 249 bp, Proteus mirabilis
atgggtagtgtgggttatattggttcaaaaaataccacacttggctattttgtgtcgtgggaagatgaacaaataggtgctattggtgaaggggtaccaatggggaaggcacttttttttaaaaaaacggatgcttcattgatgaaagttaaacttaaaataaaaccagttgtacttccattaggaggaaagtccgttcatttgggtaatggaaatacccatataactatcaaaataaaatatatctga

SEQ ID NO: 297410 - DNA, 1032 bp, Proteus mirabilis
atgaaaggttatattcaaacggtaacgggtccggttaaaaaagcggatatggggctgacactacctcacgaacatttatttaatgatttatctggcgttgttgatgaacctttttatgaattctcacacgttttagtagataaaaaagtcagtgcagatattcagtggggactaaaatacgatccatattgttgttgcgataatatggataaaaaacccattgaagacgttatttttgaattaaataattttaaagagcttgggggcaaaacgattgttgatgctacaggttcatcgtcaattggtcgtgatattagaaaattaaaacaggttgcagaattaacggggattaatgttgttgcttcttctggcctttatattgagaaatttgaaggaaaacgcctagctgatgatattgatgcgatggcaaaaatgatcgatgatgaattaaatatcggcattgacggtacagatattcgtgctggtatgattggcgaaattggtgtatctcctttctttacagatggtgaaaaaaatagtttacgtgccgctgcactggctcaaaataataacccttatgcctcaatgaatattcatatgccaggttggcaacgccgtggtgatgaagtattagatattcttttaacagaaatggggtgtgatccagccaaaatatcgttagcccattcagatccttctggtaaagatatcgattatcaatgcaaaatgcttgatcgaggtgtttggcttgaatttgacatgataggtcttgatatttctttccctaaagaaggcgcggcacccagtgtgatggatacggttgaagctgtcgcaaccttaatagaaagaggttatggtaaccaaattgtattaagtcatgatgtgtttttaaaacagatgtgggcaaaaaatggcggaaatggttggggttttgtgcctaacgtttttctttcattattagcacagcgtggcattgataaggcgataatagataagctgtgtattgataatccagctaatttattagcatga

SEQ ID NO: 297411 - DNA, 636 bp, Proteus mirabilis
atgagttttagtcgtaatgaaatagatacaatgtcaggtactcgaaaaagaacctaccaattattggtgacaacggcattgcaactttttgaacaagggatgttacctaccgtatcagagcttgcagcacatgctggtgtttcaagggcaacggcgtatcgctattttcccactcaaagtgatttaattagtgctactgttgatgcaagtttagcaccgatcattgcatggcagcccactccagaagataatacacaacagcgcattactgcgttgctcaatcttgcttatccacaaatgtttaaacatgaaggggcgttgcgtggcgcattgcaggtttcattacagcagtgggctaaagagcgacaatcaagcgaatatacagaaaaacgatttattcgtggtcatcgtaaagagatcttacttaaagtcatcgaaccattaaaagcgcattatccgcaagaaatgtgggataaagtgataaaagctttctcacttatttatggttctgaagtttttttagtaatgaaagatatctggaaaatggatgatcagcaggtcattgatatgacccaatggatggctaaagctattttaaatcaggcaaagtcagattttccgatagataacgattaa

SEQ ID NO: 297412 - DNA, 459 bp, Proteus mirabilis
ttgcaacgattagtacaagaaaaaattcctattagaaacataaagactattatagggggcttagttcaatgggggagcaaagaaaaagatcccgtgctacttactgaacacattagaacgcttcttgctcgttatattagttattttttttcaaacgatgggaagtttaatgcaattatcttatctaacgatatggaagagataattcgtagtggaataagacaaagttcttctggcacattattgaatttagaacctgctgaattagatatgataatagaaaaaatatctatggttattgatgatattaaatatattcatgattatatatttttaacatcaatagatataaggcgttttgtaaaaaaactaatagaaactcaatatcctcaaataccggtattatcttatgatgagataacatctgatattgaaattaatgtattacaatctatttag

SEQ ID NO: 297413 - DNA, 1281 bp, Proteus mirabilis
atgtttcataacgcagcgcatcctttacgaatacaaggaaatattttagaagtgatgttacgtgatgtttttattggggaggtctgccaactaaaagagaatattttcagtgaaaatattctcggtgaagctattgttattgggtttcataataacatagcaatattaagtatgatgggaagcgctcaaggttactctttacaaattatagttgagccaacaggaaaaacattttcagttgccctaggcccacatatattaggcagcatgattgatagtaaagggaattgcttattacgatttaatacagaaatagtagagaagacctttaataccttatgtcctatcgaaggtcggccacctttgtttagtgataggctgcctattacaacactatttaagtcaggtatacgtgctattgatggattattaagttgtggattggggcaacgaatggggatttttgctagtgcaggaacgggtaaaacgatgttaatgaatatgattatccgttttgcacaggccgatgtttttgttattggcttgattggtgaacgaggaagagaagttacagagtttattgaagaattaaagcaacataagcgatgtgaaaatacggttttaatttgctcaacttcagaacaatcagcggtagaaaggtgtaatgcggctttagtggcaacaacggttgccgaatattttcgtcaacaaggaaaaaatgtcgttttatttattgattctatgactcgttattgtcgagcgttaagggatatcgcattaacagcgggtgagttgcccgtacgtaaaggatatccagcatctgtatttgataaacttcccgctattttagagcgtccaggggtaacaaaaacaggctccattacggcattttatactgttttattagagagtgatgatgagcctgatgcgattggtgaagaaattcgttctattttagatggacatatttatttatctcgaaaaatagcagcatcagggcactatccagctattgatgtattaggtagtgtgagtcgggtttttcaacaagtcactgatagtaaacaacaaaaatctgctttaaaaataagacaaatattgatgcgattacaagatgttaagttattgcaagagttaggagaatatcatgaaggagataacgaattaaatgatatcgcggtaagaaaacaaaccaagatagaaagctttcttactcaatcctttaaagaaaaagccgattttcaacaaacattagaacaaatgtatgagattaccgcttaa

SEQ ID NO: 297414 - DNA, 462 bp, Proteus mirabilis
atgagattaccgcttaagcatcaagcattgattagtgccattgcccaacggcaaaaaaaaatagaaaaagaacaattaaaatataaaaaacttattacagaagctgaacagaagaaaaaagagcaagagcaattaattagtgctttaaagagtgaagtacccgcttatgaaaaagccggtatttattcaattcattcgtttcatcaacaaagaaggaagcaagctattgttttacattcaataaatttttatgtcgctcaagttgaagaaataaaggataaactgaatgatttagaaaaacagagtgaggcgctaaaaaaacaacgacaaaaggccgtcaaaaaacaaaataaaatgacactttattttgaaagaaaagcattagagaaagagctatatattgaaaggttagagcagaatgaaatacaggagatagcattatatggttcagggaatatctaa

SEQ ID NO: 297415 - DNA, 681 bp, Proteus mirabilis
atggttaatgaattcttatcggcaaaaaagagttcagtatttcctattttcgtagataaaaaaataaatcaacaacggtatattaagttagtagaaaaaataattaaaaaagaacccgttaataatgataatgttgatttagttagctgtgcaactaagcaggaaaaacaggctcaaattcatcagaaagagaataacagtgcatacaaaaatattgagtctagtatggcaatgccgctaaataacgtatcaaaagttgatacaaaagaagagccggaaatttatcaagaaaatatcaatgaaactaataaagttgttcctttttcttcgcaagttacaccaataaaaacggtaattgcattaccaaaagtagccaaaatggtttcacagctacctgcttggcaagtaatagataaaaaaatatctatgttgactctaccacccagcattacttatacatttacaaaatggaagagtcgttatcatcaggctaaaattcattttattgataaacaggttcagttaattgcttcctctggacgcgtttatcaaacagcattagagaatttgaagcaatataatgggggattatccatagatctaactaatagccataaaaataaatcgtggtatatcaactctattaatgctatttatgaaagagaggatgaaaatgaatga

SEQ ID NO: 297416 - DNA, 930 bp, Proteus mirabilis
atgagtattaacgtagaggtagataataaccataaagaaacaaataaaattaatgacatggtaatattatcttctatctttggtacaaaaaaaataacagaaaaacagctatattttgtattgagatgtgagaataaattaggaaccttaacggcgttaatttcagttagtcaagtcatggataacttatatcctgaaaaaaaaattgattgggaattagtacctgaaaactatttaattgctcttttttcacaatctttatcaacattattatttcctttttctaaagagccaatgtcatcatgtgttgaaaatatctgtttaggtgctgaaaaaggatcttgctatccttgtgtagataccacattaggtcatgtttttatttgcgatattaaatggaaatatgaattgacagtatttccaaaaaataaaataggttttataacaagttttattttaggttacagtaaaatatcactttcattattaaaaacaatattaccaggggatgttttattaatagatgatatccatttttcttttaatgttggtgataaaaaatatttttatttttcatgggatgagggtaattgtgtgacattagatgctatcgttgaaaatagtgaagaaaatgaagaggatgagcaaaacgatgccataatagaagatagcattgatttagctcaatcacttgatttaaattcaattggcgctattccgattacaatatcttttcttttagccaataaaacattatcaattgatcaacttgaagaattagcaccagggaagaaatttattttacctgataatgccattcgtcatattaatattttagcaaatggtaaagctattgcccaaggagaattaatcaaaattaaagatatgttagcggtagaaattaataaattatctataaaatgcgaataa

SEQ ID NO: 297417 - DNA, 660 bp, Proteus mirabilis
atggaaagctcaacacaattaatcttgatcctagctcttgccacattggctccttttattattgctgcaggaacttgttatttaaagttttctatcgttttagttatgactcgtaatgcattaggtgtgcagcaagttccttctaatatggtacttaatgctatcgctttaatgatggcgctttttgttatgacaccaattactaaaaatatttgttactatgttattgaaaataaagtggatatgtcatctccagatgcgatcgagtcattttcaaatgaggcgttaggcgattataaaaaatacctatatcattactcagatcctgatttattagctttttttgaacaagcgcaagagaatagaccaaatagtgatggtgataaagaaaacatagaaaattcactcttatcattattaccggcatatgcacttagtgagataaaatctgcttttattataggtttctatctttatttgccttttattgttattgacttagttgtctcatgcattttattagcattaggtatgatgatgatgagccctattacattatctgtacctttaaaacttattttatttatcgccatggatggttggggactgttatctaaaggactcattaatcaatatcttgatttgatggcggtgaactag

SEQ ID NO: 297418 - DNA, 249 bp, Proteus mirabilis
atggtttatgcggctaataaagctatttatttgattatattgctttcagctgcgcctattgctatcgcgacctttattggattgcttattgggctattgcaaacgatcacacagatacaagagcaaactttaccttttggtgtcaagcttgtgggggtttttgtttgtttacttatgatgatgggatggatgggagataagttactaatttatgctaaagagatgttgacgattgggttagccgggtaa

SEQ ID NO: 297419 - DNA, 468 bp, Proteus mirabilis
atgagtctctataatcaatcgttattgcctcctacactatttttaaaattaggggcatggcgacaaccgaccattatggttgataggattgtcgattttgtccctagtgaaaaacctattatcaaaacgattaaacatgtcacctttaatgatccctatttattaggacattttccaaccgatcctgttatgccaggggttatggtggcggaaatctttggtcaaacgagtgagtatttatcttttattgatgacttttgttcaatttataaaatagaacacaatattgaattaaatacatttaaagaaatagccaaagcccttaatgagccgagatcagaacgaattttaattcagcatcgaagaaaagtttccggtgtattggcttcacaaaatttaaggtataaaaatgctgcttacccaggagataccatagagataacaagcctgtctcttatacacatctga

SEQ ID NO: 297420 - DNA, 756 bp, Proteus mirabilis
atgtttatatattctgatctaaagaataagaatgtgattgttacaggagctaatggtgatataggtattgcaatttgccagaaataccttgaacagcagtgtcatgtttatgcattatatcaccaaaatagaaataacttagataagctaaaaaaagagagtgaatattgtcactgcttacatatattacaatgtgatatcaataatgataaatcaattcatgattttttagataaactaaaggcatatgctaatgctattcatatattaatcaacaatgcaggtgtgattaaagatgaattattttctgctataaatataagtgaatttgaatatgttattaaaaccaatttattaggaacttgtcaatttactaaacagttattgcttttattaagatcggcagaaaaagcgaccattattaatgttgcttctattgcagggattgttccaagtattgggcaaagtaactatagcgccgctaaggctggaattataggttttactcatacgttggctgcagagttggcaggtaaaggaattcgagtcaatgcggtggcaccgggtatgattgagtctgacatggtcaaaaaagtgtcacgccaagtcgtacgtcatattaaatcggttattccattacaacgattgggagcaagtgctgaagttgccaataccattgtatttttaagctccgaggcatcgagctatattgttgggcaaacattaatcgttgatggtgggatggtaatgcgatga

SEQ ID NO: 297421 - DNA, 1359 bp, Proteus mirabilis
atgagcatgtcatcatcaaattctgctccgcagagtttgctccaacgcctgtttaaacttcaggaacacggcaccacggttcgcacagaactgatcgccggtgtcaccacttttttaaccatggtttacattatctttgttaacccacaaattcttgctgcagcccatatggatattaaagcagtgtttgttactacctgcttaattgccgcgttcggtagtattttaatgggactggtggctaatctacctatcgccgtcgcacccgcgatgggtctaaatgccttttttgcctttgtcgtagtaggagcgatggggtattcatggcaagtggccatgggcgctattttttggggcgcagtaggtctctttttgcttactctctttcgtatacgctattggataatagcgcatattccgcttagtttacgtgttgggatcaccagcggtatcggtctgtttattgccatgatgggcctaaaaaactctgggatcattattcctaacaacgacaccattgtgactatcggtaattttgcctcccacaatgtgttattaggtgctctaggcttttttattatcgccatccttgcggctcgtaatattcatgcggcaatcttaatatcgattattatcactacggtgattggcctgttattaggggatgttcaatatcaaggtatctttgatatccccccttctattgctcccgttgtagggcaggttgatattgttggcgcattagatattggcttgtctggggttatctttgcttttatgttggttaacttatttgactcatccggtacattaattggtgtcaccgataaggcgggtttaacagacgataaaggtaaattcccacgaatgaaacaagcgctctatgtagatagtttaagttctgtcgcaggctccgccatggggacatcatctgttaccgcatttattgaaagtacctcgggtgtttctgttggtggtcgtaccggattaactgcagttgtggtcggtattcttttcttactcgccattttcttatcaccactggctggcatggtgccaagctacgctaccgcaggggcattaatttacgtcggggtgctgatgacctccagcttaacgcgcgtaaaatgggatgatttaactgaatccgtaccagcgtttattaccgccgtgatgatgccatttagcttttctatcaccgaaggtatcgcccttggctttatcgcctattgtgtgatgaaagtgggtactctacgctggaaagaaattaatctctgtgtggtgatcgtttcactgttatttattctaaaaatattattaattgatactcatgttattgatttaaataatttattttaa

SEQ ID NO: 297422 - DNA, 1200 bp, Proteus mirabilis
atggcaattaaactcgaagtaaaaaacctatataaaatatttggtgagcaccctaaacgggcctttgaattattaggatctggtatgaacaaagaccaaatctttgataaaacagggttaaccgttggtgtgcaaaatgccaatctggccattgaagaaggcgaaatatttgtcatcatgggattatcaggctctggtaaatctacattagtgcgccttctcaatcgtctgatagatcccactaaaggcgaagtccttattgatggtgaaaacatcaccaccatgtctgataaagatttacgacaagttcgacgtaaaaaaatcagtatggtgtttcaatcattcgctttaatgcctcatatgaatgtactcgataatacagcatttggtatggagcttgcaggcattagcaaagaagagcgctatgaaaaagccatggcagcattagagcaagttaacttaagctctcatgctcaatcttggccggatgagttatccggtgggatgcgacaacgtattgggcttgctcgtgcactggccaatgatcctgatatcttattaatggatgaggcattctccgcacttgacccattaatccgaacagaaatgcaagatgagttattaagcttacaaggtgataaacaacgcaccattgtgtttatttctcatgatctggatgaagccatgcgtattggtgatcgtatcgcgattatgcaaggcggtgtggtggtacaaatcggtacccctgatgaaattcttaataatccagccaatgattatgtacgtaccttcttccgtggcgttgatatcagtcatgtatttagcgctaaagatattgctaaacgtcgcccagaaacactactgcatattgcgccaggttttggtccccgttcagcattaaaagtactggaagatgaagatagaaactttggttatttaattgagcgaggacggaaatttgcaggtattgtttctgtcacttctcttgaagaagcattaaaagcgaagcaacctattggatccgctattttaactgaaccttgtgcgattaatggtgatacaccattaaatgaactgatttctactgttgcgcaatctccctgtgcgatccctgttattgatgaaaaaaaccgttatatcggtttaatttcgaaaggaatgttgttacaagcactggataaggagacaccaaatgagtaa

SEQ ID NO: 297423 - DNA, 1338 bp, Proteus mirabilis
atggcacatcgattaacttccagagacattctggcattaggttttatgacttttgctctatttgttggagcagggaatattatttttcccccgatggtggggttgcaatcaggggaatttgtttggactgcggccattggttttttgctaaccggagttggcttacctgtgctaacagtggtggcattagcgaaagtgggagggggaattgaagcattaagcaccccgattggtaaatctatgggacttttattagcaatagtcgcttatcttgctgtcggccctttatttgccacccctcgaaccgcaacggtctcttttaaagttggcattgctcctttagtgggtgatagtgatattgccttacttatttatagtgtcatttactttttaattgttatcggtatttcactgtatccgggaaaattacttgatagtgttggtcacattctggcaccgattaaaattttagccttagctgtattaggtttagctgcgctattttggccagcaggaacgccgatccccgctacacaagcatatcaagatatggcatttacccaaggttttattaatggctatcttaccatggatacgttaggcgcgatggtctttggtattgttattgtcaatgcggcccgctcaagagggattgataattcgtctttattaacacgttatactatgtgggcgggaattatcgcgggtgtgttattaacggcgatttatcttagtttatttaagcttggttctgctagcggcagcattattccagaagcaaaagatggcgcagatattttacatgcttatgtgcaacatactttcggtaattttggtagtttctttttagctctgcttattttcttagcttgtatggtgacagcggtaggtttaacttgtgcttgtgcggagttttttagccgctatttgcctatttcttatcgtacattagtattgattttggctgtattttccgcggtagtctctaatcttggtttaagtaaactgattgcgttctccattcctgttctggtgatgatttatcctccttgtattgtgattattctgatgagtttcactttacgtttttggcataatccaagccgtattattgcccctgcaatggcaataagcttattttttggcatttttgatgccattaaagcatccgatcatttaaaacatttattaccggattgggcggctaaattaccattaagtgagcaaggattagcgtggttaatccctgtattagtgactattgttatatgcgctatttacgataaagtagctggctcacaacataaaaaagtgatccactctgggataaacaaataa

SEQ ID NO: 297424 - DNA, 1287 bp, Proteus mirabilis
atgaattttaagccaataaaaaaattaaatgtaacccggacgttgtctacaggtgttcaagttttgatgggaacattagctcaaaatcataatggtgtattttttcaatacgatgctcactatttaacacaatttggcaatagttctccttttaatctgaaaaataatacagatttacaaattgcacctaaaaaacctcatggtaacttgcatgggcttttctctgatagtctacctgatggatggggtcgattattacaagatagaatttttcgccaacacggtatacaaccacatgaaattacaacaatggacagattagcttttgttggtaataaaggtatgagtggattgtcttacttacccctctctgactatcaaacaaatgaacattttgatgttgatttgattaatttaggcttagatgctcaagcggtatttgatgggcaaacagaaactgttttatctgaacttgctattgttggtagctccggaggcgcgagacctaaagcattgctctattttaaacagggcgattttaaccaatgcaaaacatatgaagaacaaggcgatgaatcatggttgatcaaatttacgtcccagaacttacctcttggtcatgatgaaggtttatgtgaagcaatctatctcactctagcaagcaaattagatcttaatcctccacaatggaaacttattgatgtacctaaaagcagtcacggcaaatcttggttagccctaaaacgttttgatcgtgtcacaaatagttcgggtaaatcaggctgtttaatcatgcacagtgcatgtggcttattagatgctgactttagattaccttcattagattacgaagatttgatcaaagtaaatcgtgtattatgtaaatcaatttcagccgggcagcttcagtttaggcgagctatttttaatttattcgcttctaatcaagatgatcatagtaaaaattggtcttttctacagtatgacgatggacattgggagcctgcacctttttatgatgtcacttataatcccaatccaaggaatgaacatatcacatcattcggtggatatggaaaacaaccaccattaaacataatcaaacatcttgcagaaatagctggttttgaaagttggcaacaagcacaaacgtatatccatcatactgttgatattattagtcaattctcatcgttagctaaagagtatgacgtttcaaattccgttcgtgctgatattgataaaacgcttactaatcgcctaaaagaaaatcaacacttactttaa

SEQ ID NO: 297425 - DNA, 294 bp, Proteus mirabilis; identical to SEQ ID NO: 295186

SEQ ID NO: 297426 - DNA, 951 bp, Proteus mirabilis
atgacccgtttacgcacagtatcaaaacacccggagcaattagaaaccacaccattaattgcggaaagtcatcactatgatgaccctttagcacctcaaaaactaatatttttagaggcagttaatcaacagcgttgtgtgattaactcaccacagcgcaatagccaactcactaatacaatacctttttttatcgtacttttagttatggccttttatacattatttggttttatttccgaacatataaattataaaagacattttcagagtatggtcgaaaaagttgaggctaaatatagtaatgaacttaatttagatgcgcctacattaaaatatgtaaacacgtacagaccatattttgggaaaaaaaatataaattattgggattatataaaggcttataattcaggtgaattttttactgatggccaatatgacaagtacctcgtcattggctggctaatttttttccccggttttttatggctatttggctatctctctttctttacacctcctgtgtaccttactgctgataggcaaagaggaatactgtatagctatggcatggggaaagtgcgtttaacccgctataaagaggcgcaatttggttatgcgggcaatatgttggcaattaaactatatagcattaatgaaaaaacaggccaattaaaaacgatcctctatcgccccaatgtgtcccactactccagtttcctaaccagtaccgacagtgaaaaccaccgttttatcactttccttaatgcctatatgcaacaaggtcgagatgccgtttcgcctgttgattaccaagcccgtaagccctttttatcttttggcaaaaatccacttcctgctgattttgagcaacaggtcgaacagattctggcaaagcttgatcaggagaaaaaacacatgcgtaaaattgataaggaaggtacagaatga

SEQ ID NO: 297427 - DNA, 927 bp, Proteus mirabilis
atgagtaatccatttacgatatctaactttcctgaacaactagagacctcccctttaatagatgaaagccatcactatgatgaccctttaccgccaaaagatctcgtatttttacaaagtatcaacaaccaagaatgtaagattaaatcatcacaagtcaatggtcgattcacgaatactgtcccgatgtttttggtattaatagtaatgatgttttataccctatttaattttattgaaggacatattattacaaaatatactttagaagataatattaaagaaattgaaaattatagtacctattatacagggaacgatcgcgttgtacttagggatataaataaatataaacctttctttggaaaggaaaagataagttggtgggaatatatcaaagcatataattcaggtaaattttttgtaggtagtgaagatgacaaatattttgtcctcgcatggttagttttatttcccagtggattatatatcttaagctcccttgctttctttgtgccaatgacctatttggtggctgatagaaaacgacagatcttatattcttatgtagatggcattgtgatggcaacccgttatgaagatgctcaattcggttatgccggtaaaatgttagcatttaaattattctatatacatcctgaaactggtgagctaggaatacatatatatcgtcccaatgtctctcattacacaggttttttattaagtagtgatactgaagatcaccgctttattacttttcttaatgcctatatgcaacaagggcgtgatgcagtctgcacaagtgactattatgcacgagcaccactattctgctttgcgaaaaaccctcttcctgctgattttgagcaacaggtcgaacagattctggcaaagcttgatcaggagaaaaaacaccatgcgtaa

SEQ ID NO: 297428 - DNA, 399 bp, Proteus mirabilis
atgacaaatgttaatgaaactaaaaaaaagagtttttggttctttgatggttatgatttctttgagtttttaagaagaaccatgtctttaatttcaccatctgtaatggttgttttaatgttttctcttggtgcttttttcactgaagataaatttggaaataattcatatcaatataaaacattgattggaagcatagttttttttatcgttcttgttgtcatcgctattctttatgatttacataaaggtaatagtgattttaatttaggttacatctgtaaattatttatcttcgcaatcacaataattttatgtggtgcaataatatatataggtgttgttaatggagcgaatatgtattctttaataaatagttggagacttaaaggtaattaa

SEQ ID NO: 297429 - DNA, 1512 bp, Proteus mirabilis
atgacgacagagagttatcttgaactggtattacttttaatggcatggctgattaataattcattgtggatgctcattaccacaacaggtctttttgcccttccattagcgattaaaattgcagagatctggttaaaagcacgagaagagggcgaggatgaaggtaataaaggtattttagccttatcgcgtatggaaaatacgctctatgttgcgtttgttgtgatgatattttgcgttgttcctctgtgggaaatcaatgtttctacattacattttgatcgtactcgctcagcacaatgtagtattaatgtgccgaaacctgtggattcgggatatagcacgctaatcgcagaattaaacggacaaacggcaaaagtacctttgtggtggtatctagttcattcattatctaaaggcgtgacgcatgcaactatcgcgacgatcccttgtagtaatgattttcgattgctacgttttgaagtgcagaatactcaattaatagatcccattcttcaccaagaaatacaagcgtttgcgactcaatgctatgccaaagcatattataaattaaaaaatcttcattctggattatcacctcaaataatggagggtgctaattggattggttctgattattttttgaatacaatcggctattacgattactacaccgcaacatccccccaacaagcatggtcttataatgaaaatcgagatagtggatatgccgatgtcggccgtggcggttatccaacgtgcaaagcatggtggagttctacaactcaaggcttaaaaaagcgtttattagcccatttcgaaccacgcaccattaatatgatgaaagccaaatcaccagataattgggaagagggattattacgttggttagtgagtccgcaaagtatccatttagccagtagtggtgacacttatatgatggggaaccagcaaggtcaaagcacaagtattgatacaggaattaaacgggccattggtagttttggggcatttttagcgcaaatgacgcaactacctgcttttgatgcattacgtcaggggctaccgatgatccatgccattttactcatggctctgattatcattattccattggttctgctgctgggtgcttatgatcccaaaataattattacacttacctttgtgatgttcgcatggctatttattccgttttggtgggaattggctggttggttggacgataaattaattgaattgttgtatgcgagttacaaagggtatagcggtgattttaatatttggctatcaagtactggctctgatggttggatcatgaatttagtgcttggcgctatgtatattgtattgccacttttttggtttggtgcagtaagttggagtggtgtaaatcttggatttgcggtgtcttcagttatttcaagtggttcaaaaggcatacaacaagctggtgctcaaggtggttcggtaatggtggatgtggttaaaaagggtattatgaaaacataa

SEQ ID NO: 297430 - DNA, 1416 bp, Proteus mirabilis
atgagagataaaagctggttttattgcagcgttgtggcgggatattttgctttgtgctttcctgttttcgctacttttgaagttgatagctatgttgtcagcactgactcaaataaaggcttaaaaggagcaattagtgattacttattttataccataggcggtggaacggtaatttcacaaccgccgagtcacagtaatatgcaaaaactcagtatagggctaggttggaatagtgatttaatgtgcggtaattttgatatcaataccactgttaaaaatcagctaaatggtgtcactcgtggttttaaagacatgatgagtaatgtcattaatagcgccactggtgccgttgcaagcttaccagccatgattattcagcgtgctaatcctggtctttatgagttgctcactaatggtgtattacaagccagtgtctcatttgataaagcccaactcaattgtcaaaaaatgtcacagaaaatggcggattatgcttattcaaatcagtggacgcagtctgctattggggaagagtttaaacgagttgttgcaaacacatcagatgcagtcagtgctgataatcaattgaaaacctcaacaggaaaagagggtattaggtggattggtggtaaaaagcgaggcggtatcggtcagtctgcgattaagcccacttatgatttagcaaaagccggttttaatatcctgaataaacagcccatcacaagcgatcatccggttattgagtctgcttgcaaaggggctctttgccgacgatataaaaccagtgaagaggctgcaaaagcggttgtgagtgtgttaggtgatagagctatccgtacttgttctgaaacaagagaatgtcacagtggaggagaagaaaataaatcaggtacatcaacaataggtgttggtttttcaccgatgcttgaagaaacgacacaagagaatatggctctattaattcagctagtgaatgggcatttaaaaccgaactcgataaatttagcacaattaaaaacaggtgatttagcagtatcaagaggtgttattcaagcgctaaaagaagatcctgataatgtagcattaatacaacgtttggctggtgaattagcgatgtcagataccattgctactgcattcggtatgcggagaatgctgattgcagggcaagcagaacccctcgtagctgaacataaaatagcattagaagaaacagatcgccgtcttgcttttctcgatagagaaattctagcattaaaaaatgaaatggaaattcgtaaagcgatcagcaataacacgctgttaatggtgttgagccgacaagaaagccgtgatgctgaaaatagtgttcatcagcccatcatacaaagtgataaggcaattcatcagttaaatcagaaggtagatcattaa

SEQ ID NO: 297431 - DNA, 942 bp, Proteus mirabilis
atggggcgattaaagcagtttagtgtgtttgcactttgcctctcttttcaatccatacccgcaaatgcaattaactcagctcaaattattgcaagtgcattatcaccacactgtttggaatacaaaatagtggggatctgttactggctattttgcacaccattgggttgtgttgtgagaacgtcgataaaagtcagtcattatattccaaatgccgttgtttctagttatgaccaaactgggagtaattcatggggcgaaatatcacctttaggagcaggaatatcgggctttgctgaaggtggtggtgctaataaacaaaaacgagtaagaaataaaaataacctacattttaaaaatgtggatgtgattgggcatcctgctttagcgtctcctatatttgggcaatttatggggcaaatgaattatgcttgctctagcccaattagggcttttatgccttattttctcagtacactcgatggattgatgtggcgttctggtttgcctgaatctctttatccagaagcgctgatcccaaatatgcgtgaaattggttcgacaatgaaaggcaatatatggggcaatatttatcctcgtagtggctttgtgacacaagcaaatgactacaaagcctcggcagttgtggctcaacgggctatcgatattgtgacacgaacaggacagcttcatgtttatcaaccgttaataagccattcttatcatggatattgggcgccagagtctgttactgaaaatacaggcactcacaatcataaatggcaaagactttcaccttcagtttcctcttcttgctctacttttcctgatgatactcaacctattgctagtgacggcggttatgcgtgggcactttggcaaccttacaaatgttgtaaacgacggggacaagtttttctttatagctttaattttcaataa

SEQ ID NO: 297432 - DNA, 399 bp, Proteus mirabilis
atgaaactactaaaactattaattccattattagtgctttcaactcaatcagttgcatcaaccacaatttacaccgatagcaacacgcctttacttaatacaaaagatagtcaaatcatctatttggatgcacctgatattattcaaaaacaattatttaatgatttatcgcgtgatcctaagcaagcagaacagcaagtgaaaagtattattcagtcagaagattggcaacaaaaacagcaccaaatcacacaagcttatcaaggtgttcttcacgcttatacattaaaactcgcgaaatatcctgcggttgtttttgatgatcgctatgtggtttatggcaccacagatgttgttctggctgaaaaacatctcactcaatttttggaacatcaataa

SEQ ID NO: 297433 - DNA, 549 bp, Proteus mirabilis
atgcctagtctcgtgggctcggagatgtgtataagagacagggctataacatatctaaaagagtgcgctgatgagcatgaacctttagataagtataagcaagaattgatgttattagattataaaatgtcaacaaactatttgttaaatgattatatcttaaagtattttatctctaataaattgaaaaatattaaattttgtaattccatgtttttattaaaagacttttatagttataatgatttcaatgtcaaaacgaaaactaagatgattataattcctatcattgtccttattttaggtattgtttttggatgtgggactacattttttgtggttagtgaaaatcagtttccaaaatctttattggactggtttttttggggaggattaactttagttagcattcaatatatatactattcttcttatactttatggtgttattttcatatggttagaaaagtaaatgattttaatatttttatctcattagtgcgtatgaaaatattattacaaaacaaaagtttaaataacattttataa

SEQ ID NO: 297434 - DNA, 1041 bp, Proteus mirabilis
atgtcatttttaaaaaaactaccgggaattctgttttgtgcactaattggtgggttattaacattatctggtctaccgatggcgttgatgtttgggccaatcgtcgtggttattattgcttatcgttttaaatggcagctctctgttcctaagcatacactgacttttatccaactgaccttaggcacctctgttggattgatgtttaaccaagtacatttagggagtgcggataatttagtgcttcttttgattatcctcgttatttgtttagccattcaatttgttgtcagtttcttatggtttcatcgtcatattggttggacaaaagaagaggctatgttaggtgctgtacctggcgcgatggcggctattcttgctttaacagatcataccaaaacaccaccacaaaaaattgttatttctcatactattcgtttaatcgtattgattattatggctggatttattgttggctcagataaagcaacccttacggagtttacattacctgaaatgacactgttgtcatcgatgtggttattattaattgtcgcgttagggctagtatctgggcttttattacagaaaattcattttccagcaccgtttatgttgacatcattaggcagtgcaatattggtacaatcttttgtcagtgagccgattgcttttccaatgctattaaatgaactcagtatggtgttaattgggatgaatattggcgcacattttgtggtttttccttttgcttcgttaattaaaaatgctttttcctctgtgcaggtggtcattatcaacgttattttaacggtgatcgttgcattgagcgcagcttatttaacaggggctccctggacaacgctggtattagcttgggcaccgggaagtatggaagcaatgacatttgccgcgatcactatgaatgtcgatgcggcttttgtgatgtcgaatcatatattgcgcatgttgatcattcaaagtattccttctattgccttgttttacagtgaacgaaagcagaaaagaaaacgtgagtaa

SEQ ID NO: 297435 - DNA, 486 bp, Proteus mirabilis
atgaaaataaaatcacttattgctatttcattattaagtgttagtgcttctctttttgccgctgaaagcaccagcacaacacaacaagttcaaggcgtaactcaagcacaaaaagatctcaatgattatgaaaaagtcatggtagaaaaagtttgggttaccacgcaagccattgacgagaaaggcaataaagttgacgctaataatccacaagtcagtaattattttggcctagcagaatattatcctaatggcacttttattatgtttacccctgaaggtaaacaaaaaatgcaaggggattggtcaatgtctaatgatggaaaaacgcgtacattagttgccaaagatgcacaaggaaaaacactatttactcgtgatgtagaaaatatcaccatcaataatgatgagtatacctatcgtatttacccaactgaaggggataatactgtttattttgatattattcatcacgttaagaaataa

SEQ ID NO: 297436 - DNA, 1134 bp, Proteus mirabilis
atgcttcataaaaaattacatagcgaaatgtcatgggaacaacttggtgagtactatgatgaaattagtgatatgtccggtgttcgacaagatccgatccaccatgctgaaggtgatgtagctattcatacacagcaggtgatccacgctataaaatcactccctgaataccaagagctgtcagaaagagagcaacaaattctatggattgcagcacttttacatgatgtagaaaaacgttcaactacccgtgaagagaatgggcgaattatttcgccaggccatgctcgtaaaggagaattaacgacaagacgttttttatatgaaaaagtgccggttagctttattgatagagaacagattgcggcattagtacgctatcacggattacctttatggttaatggataaacccgatcctaaaaaagccttattagcggcttcgttaagggtagattgttatttattggcattgctggctaaggcggatgttctgggacgaagctgtgaagataagccctctttattggataaaatagcgttatttacactttactgtgaagaattaaattgttggagaacacccgcacgatttatttctgatggcgctcgatttcactattttcatagtgaaaatagtgtcgatcctcactatgaaccttatcctgagcaaggaagtgaagttattgtgctttgtgggctaccgggaatgggcaaagatagttatattcgccaatattgtgcagatatgcctgtagtaagtttagatgcattacgtcagcagcataatataaaaccagatgatcgtgatgcgaatggatggattgcacaacttgccaaagagcaagcgagaatatatttaagagagcataagccttttgtttggaatgcaacaaatattactaaacaaatgcgtaatcaacttattgctctgttttatcgttatcaagctaaagtgacattggtatatattgaagtcccttatttgcaatggaaaaaacaaaacagcgcaagaaaggaagcggttcccgataaagtgatggaaagaatgttgagcaaactggaagtcccaacaccagaagaagcgcttaatgtgatttattgggttgatggggaagctcaaaatttgatttaa

SEQ ID NO: 297437 - DNA, 714 bp, Proteus mirabilis
atgaataatcaatcaaaaaaatatgacagaacatatcactatcctttttcaccaggcacaacaagcgatgatcgtattaatgccaattggtggcaagatatctgcaaaataaagcatcttattcatactgaaaaattagatggtgaaaataattgcttaaatcgaatgggagtttttgctcgctctcatgcgactccgacacaatctgcatggacagtacaactacgccagcgttggcaatccatcagaaatgatttaggtaatttagatatttttggtgaaaatctttatgccattcattctattgaataccaacatttggaagagtatttctatgtttttgccatacgttgtcaggataaatggctaagttgggaagaagtgcaattttatgccactttatttgatttacccaccgtaccggaaatctcgctaccaaaatcggaaaataaaatagagtttgaaaagaatattattttacacgcacaaaagcatagctcttttcaatcacgagatgtgttaaccaagaaaccaagtgcgatggaaggcattgtcacacgagatgctcaagcattttcattagatgaattttcacatcgggtgtttaaatatgtgagaaaagatcatgttaaaacagatgtgcattggaaacgtaattggaaaagagcgccactgatttgggaaaaaacacaggagtctcatgatgcttcataa

SEQ ID NO: 297438 - DNA, 789 bp, Proteus mirabilis
atgtatcacgatcttcaaggaaaagttgctgtagtaacaggttcgtcacgaggaattggtgcagcagtagtgacgagattagttcaagaaggaatgaacgttgttatcaactatcactctgatgaaaatgaagctcaagcattagccgatagcctaaatagacatggtaaaggtaaagcgattatttttggcggtgacattagtgatgaaaaaattgctcataactttatttataaggcgattgaccactttggtcagctcgatcttctgatcaataatgcgggaattgagacacaaaccccttcccatgcagtgaatttagaagattggcgtaaaattattgatataaatttaaccagttattttctaacggctcgctccgcattgaaatatttcgttgagaataagatcaaaggcaatattattaatatgtcttctgttcatgaagtgatcccatggccgacttttgctagttacgctgccagtaaaggtggcgtgagaatgttaacgcaatcactggctcttgaatatgcacactatggtattcgtattaacgccattggcccaggtgctattaataccccaataaataaagaaaaaatgcaagatgatgcgttacgcaaagaattagaagagatgatcccaatgaaatatgccgcagagcctgaagcagtggctaatgttgctgcttggttagcatcggagcaatctacttatattactggacaaactattttcattgatggcggtatgacactttatccctcatttcaaggtggaaaaggttaa

SEQ ID NO: 297439 - DNA, 501 bp, Proteus mirabilis
gtgctcgctttcccttatcagttaaaaagtggtgatctggtttttcgcgatggtgatgaagttattagcgacataataaagcaagttgataacagcgggttcagccacgtaggaatgttgtggataactgagcaaggtatacaggttgttcactcaacacccagtgaacatgctgatagtaaagatggtgttactatcgatagtttggatttctttatcagtcgtgctaagcctaattctgtacgcttttaccaagtgcgtggaagtgaacaagcacgacaacaagcgttaaaagctgttttaaatcgagtaggggaaaacttcagtattcagcaagataaaggtgtttattgtacagagctggtggctgatgcatggttaaaagcaggggtttctatttcaacgggcacacgtacattacatatgccgtttatttctgaaagagcacttatttttcctgataatattatccattccgaaaatgttattttgattgaataa

SEQ ID NO: 297440 - DNA, 408 bp, Proteus mirabilis
atgttaaagaaaatgatgggatttatgtttcttgcggtggcaatgatgacattatctgcatgtggtgataaacaagacgaagcaggaaaagccgcggttgaatttattgaagctgtcgcttccggtgatggtgataaggctgtgtcattaatgtattttggtgatttagaaaaagatccaatggcagagcaaattaccggcaaatttaaaatgatcgttgccgaagcgggcaaaaaaattaaagagcaaggtggcttgggtaaggttgaagtagcaaaagttgaatacagcgaagataaaaataaagccgttgtcacactcaaaacagtgttgaaaaatggtgaagaaaaaacagaaaatcaaaatatgatcaaagttgatggcaaatggaaagttgaagttaagtga

SEQ ID NO: 297441 - DNA, 876 bp, Proteus mirabilis
atgggtggtacacctgcactaggtatcgtactaggtataaccttagtttctccacaactaatgaatgcttacaatttaggttcacaacttcctgaggtttggaattttggtttatttactattgagaaagtaggttatcaagcccaagtgatcccttcgattttagcgggactatttctgggatggtttgagactaaattacgtcgttttatccctgattacctaaaattagttattgtgccgattgtaactcttattgtcgccgtttttgttgcccatgttattttaggccctatcggtagaagcataggtgatggtctcgcccaactgatcaaatttttaatgttaggtgattttgcccctattggttcaactatttttgcctttttctattcccccatggtgatcaccggcttacatcacacaacgttagcgatagatttacaaatgactcaaagttatggcggtacacctatttggccgattatcgctctgtctaatattgctcaagcatccgccgttgtaggcattattatcgttagccgcaaattaaatgaacaagaaattactattccggcagctatctctgcttatttaggtgtgacagagccagccatgtatggcgtcaacttaaaatatggctttcctatgctgtgcgccatgattggcgctgcgctagcgggtttgatttgtggattaaataatgtgctatctaatggtattggtgtcggcggattacccggtattttatctatccaacctacttattggttagtttatttattggcaatgatagtggctattgtcgtccctattggattaaccattctggtctatcgctataaagaaaaagcaggcaccttgcaagtcgattaa

SEQ ID NO: 297442 - DNA, 2565 bp, Proteus mirabilis
atgaattatatctctgttattctttctgatactgatatcaccattaaatatctttcagaaaaaagccattattcatttaataccacaaatagccattaccttgattggctaaatatggctaaagctattaatcataaatttaaatctgctcaaggtggtttgatatattcgacaagtaataaatctgatagcgctattattaaaaccattgataataaagtaataaatttatcaaatttctttactgaaatatttaataaaccttttatttatatcaataaagcgcagcttgaacatcatcatgatttagaagaaaaaatggttacagttgccaataactttgcttggtcaattgaatattcaggcttagaaacaggaaaagatgaatattgccaagagtctctcttaactacggccaatggttatattgggttaagaggaactttgcccgaaatgactataagtgatgagcactaccctgctacctatattgctggcctatataatcaagcaagttcacaaatagaaaaccatcaggtgattaatgaagattttgttaatgcacctaatggacaatttatttctcttaaaattggtaagggagaatatcttcatccaaagcaactgataacacaccatttaacacgtcatttagatttgaaaacgggtgtattcactagccaatggcgtgtagaaacccctgaaggacagcaacttgatattcattgtacaaaatttgccaatatggctgatatgtcacattacgccattttatatacctttaaaccattaaatttctcaggtgagataacggttataactcgcctagaaggaaatacttataattacggtgtacaacgctaccgtagccttaatccccatcattatcatgtgctacaaactggagcgaataagcaacacgcatttatattagctcaaacagatcagtcaaaaatagggatcggattatcgtcaacaatcaggggggatttctttgcaaatgaagatattgtttgtcatgtttcagatacgcttgttgaacaaaccatcaccttcaacgctcaacaaaataccacctatcaacttgaaaaatgtgttgctgtaacaacctctacggcttacccagactcatggcaagatgtgattaattgggaacaacaacctttacacagccaattgataaatagccaaaaagcatggaaaacgttatgggatagtgccgatatctcgatttctggcgatctgatgacccaaaaattactacgcttacataccttccatttactgtcatccgcatcaccatttagcaatcagcaacatcaattagatgtttcagtcaccgcccgagggttacacggggaagcctatcgaggccatattttctgggatgagatctttattctgccattttatattatgcacttccctgaaaccgcacgccaactattactatatcgttaccacaggctacctgctgcgcgtcttgcggcacgagcagaaggatttcaaggtgctatgttcccttggcaatcagggcatgatggtagtgagcaaacccagacattgcatttaaaccccttatcagggcaatgggatgccgaccatagttgtcgtcaacgtcatgtctcattagcgattgcctataatgtgtggctatattggctaaatactcatgatcaccaatttatggaacagtatggacttgaactactcaatgacattaccttgttctggttagaccaatgtcagtgggatgaaggcgatcaacgttttcatattaatggagttatggggccggatgaatttcatgagaaatacgcagactcacttgaaggtggcttaaaagataacgcatacactaatttaatggtggtttggttgtttaatcaaatagagatgttcataaacaatgatcgtttttctaaaaaattacaacagctaaacagccaatctagcgttttcaataaaatacaagaagttaaaaatcgtattgctatcaatattgatgctcatgaaattattgaacagttctcaggttattttcaattaaaagatctggattgggaaagctatcgaaaaaaatacggcaatatctatcgtatggatagaattttgcgtaaagaaaataaatctgccgatgattacaaagttgctaaacaagcagataccctgatgttatttaataacttagataagcaaaccgtacattccctaattacctctcttggttattcagtttctaagcactttgctgaaaaaaatctacattactatttagaaagaacctctcatggttccacactgtcacgcattgtccatgcttatctcgcagaacaaatacagttacatgatttgtcatggcaactttatcaagatgctctttattcagattataatgatattcaaggtggaacaactgccgaaggtattcatactggtgtcatggcggcaacattaaataccaccatcatggcttatgccggtgttgatattcgtcaggattttgttgtagattactccagcctaaagttaatccataaccgttgcgtttggattgatctctaa

SEQ ID NO: 297443 - DNA, 1050 bp, Proteus mirabilis
atgaacatcaaacaccttgcgatagcgacttgtatcggcattgccgtgccgacaattgctcacgccaatacaaatgaattatcgatagaacaacgtttagctcgactagaagagagaacgttagccgctgaaaaaagagctgagttagcagagcaacgtgccgctaagttagaaaatgcgttaaaacaaaatcaggcgcttaataacaatctatcacaaactagcgaaactataactgcgccaccatcatcgctgatagaaacaaataccggttatggaaaactcaagttatatggtgatgttgaatttaatacagatattgcaagtaaaaaaggtcagctaacctccattaacatgcgctcaggtaaagaaaaagactatggcgattatgataaatgggggatcaatgggcgtatattaattggcttagacggagagcgtctgttagataataaaaattatgcaggcttcactgttcaaccactggcaaatattgatggtaaggtatcacttgatgatgccgctttttattttggtaaaaaagagcgttggcaatttaagttaggtcgttatgaagcttatgacatgttcccgcttaatcaagatacttttgttgaatattcaggcaacactgcaaatgatacttatagtgatggttttggttatatctacatgatgaaagaaggtcgagggagaagcaatagcggtggtagcatgatgtttaatagccaatataataattggtattttgaaactaatttattaattgaagatggaacgtctatttttgctaacaaggaatatcacggaaataaactatataataataaaaatgttttttattttcgcccagttattgcatggaataacaataattttaaagttgctgtagccttagaaaaaaatattatcaataatgcttatggttatgatgataaaaaaacgggtgaatttagagatcaatccaaacgcaacggttatggattaactttaggctggagtaatctacaacaaaatcctgacgaatatcaacaccggcataagccatga

SEQ ID NO: 297444 - DNA, 672 bp, Proteus mirabilis
atgggtacattaaaagagataattcacgcgctactgcaacatgattatatggtgctagctgatccaaatattttgtggattatttatattgttctttttgttattattatgctggaaaatggggttctacctgccgcatttctacccggcgatacattattaattctctgtggtgcattaattgccaaagatgttttacatttcttgccaaccattattgtgttaggtactgccgcgagtattggtagctggcttggatttctgcaaggccgctggctaagtgatactaaagtggtcaaacgttggatggctcaattacccgaacaatatcaccataaagccaatgatcttttccatcgtcgaggcctgtacgcactattaattggccgttttatcggttttgtacgtacattactaccaactttggccggtttatctgaattacaacaacgtcgcttccaactatttaactggattagtggcttcttatgggtcggtcttattgtctcattaggttatatactgaacctgatcccttttattcaaaaacatgaaacattggtgatgaatattcttatgacattaccagtattactattaactgccggtttaattggctctattgtgatgtatattcgtcatcgtaaaagtagcaataacagcgccaaataa

SEQ ID NO: 297445 - DNA, 1194 bp, Proteus mirabilis
atgacgcaaaaaaaaccagaaacctcactgctattaagtggtcgatcaaaaaaatattcacaaggcgcagtaaaccctattatacagcgaacttcatcggttatttttgatacggttgcccaaaaacgtgaagccacccaaaaacgagctgaaggcgctctattttatgggcgaagaggtactaccacgcattttgcactacaagaggcactaaccgaactagaacaagggatcggttgcgcattatttccatcaggtgcggcggctattactcaatctattcttgcgtttattgaacaaggttgtcatatccttgtgactggttccgcttacgatcccacgcaaaatttttgtgatcagatattaagtaaattttctgtcaccacaacctattttgatcccttaatcggcactgaaattagtcaattattacgccctgaaacaaaaattgtttttctagaatcacccggctctattacgatggaagtgcaagatttacaaggtattatcactgcggtaagacactataacccaaatattattataatgattgataatacgtgggcagcaggtttattacttaaacctcttactttaggtgctgatatttctatccaatcagcgaccaaatatattattggtcactcagatggtatgttaggttttgctgttgctaatcaatgttgttggccacaattacgtgaaaacacgtatttattaggccagtgcgcagatccggatacagcttatatggcagctcgtggtttaagaaccttagcagttagaatgaaacaacatgagcaaagtggattagaaattgcgcgttggttaaaacagcacccgctagtggataatgtctaccatccagcactctcttcttgtccggggcacacctattttcaacgtgattttactggaagtaatgggttgttctcttttagtctaaaaaagatcctcaccactgaggaattttcacgttttcttgataacttatccctgtttaaaatggccttttcatggggtggatttgaatctcttattttaggctatcatcccaatgatattaaagcgatgcgacaatatgacactcagcccactctcgcaggaaccttatttagagtacatatcggcttagaaaatattgatgatttaattgaagatctagagcaagcatttttacgtatttctaactaa

SEQ ID NO: 297446 - DNA, 1011 bp, Proteus mirabilis
atgcgtaatttgacagcttctattatattggcaatcggtctgacaggctctgcttttgcggatacgacaccggctaagcaaactgagcaacctgcgactacggccacttcttcaaccgcttctacacagggaacggcgactacaacgattgcactaacagcagaaaatacggcaacgccaacgggggaagcagccaaaacggcaacttctgaaacaccagtggcagaagagaatacatcgacgagtacaggagatgctgcacagacagctctagagccagaaaatgccacgcaaggtgcgacacctgaaatcgtcactggagggggatttgctgaagatctctctgttatgggaatgtatcgcaatgcagatctcgtggtaaaaagtgtcatgatcggtttgctactcgcctctattgtcacttgggcgctgttctttgctaaaggtagctacttattagcattacgtcgtcgtttaagaaatgaaagtgcgcaattagtagaagcgaaatccctcaaagaggcattagcgattagccaaaaatttggcaataaaagtgcgacagccgacttttttaatgatgctgaattagagcgtacttactctcaagagagtcacgttgcatcaggtattaaagagcgtgttgagatgcgcatggagcgtcgtgtcgccgctattattcgtgaattaggacgtggtaatggttatttagcgaccattggggcaatttctccttttatcggtttgtttggtacggtttgggggatcatgaatagttttattggtattgcgcattctcaaactaccaacttagcggtggttgcccccggtatcgcagaagcattattagcaaccgccatcggcttgattgcagctatccctgcggtcattatttacaatatttttgcacgtatgatttccggttatcgtggtgaaattggcgatattgcaacaggtgtagtgaccttagtcagtcgtgacttagatattgaaaacagcaaatcaaggtaa

SEQ ID NO: 297447 - DNA, 429 bp, Proteus mirabilis
atggcaatgaatcttggtaatgattcaggtgaagataatgaattgcatgatattaacgtcacaccttttattgatgtgatgttagtactgctgattatcttcatggtagcagcccccttagcgacggttgatattaaagtcaatttacctgcttcgagtgccaagcctcaacctcggccagaaaaacctgtttatttgacgattaaatcagataaacagatttttatcggtgaagagatggtaactcatgagacgatggccagtgtcttggattctatgacgcagtcgaataaagaaacgactatctttttccaagccgataaaacggtcgattatgaaactttaatgggggcaatggactcattaaggaaagcgggatacctcaaagtagggctagtggggatggaaaccgtatcatcgggtaactaa

SEQ ID NO: 297448 - DNA, 1284 bp, Proteus mirabilis
atgtctagttctcaactgaaaaaacaatatattggcgaacatcaattatctccagaaacgttaatgatgagctatggatacgatccattgttatcggaaggctctgtcaaacctcctgtatttttaacatcgacatttatttttaaaagtgcagaagaagggaaaaatttttttgatacggtaagtggaagaaaaccccttccagaaggagaaaaagcgggtttagtctattctcgttttaaccaacctaatagtgagatcgttgaggatagattagcagtttatgaaaacacagcatcatgtgtcctcttttcatcgggaatgtcagctattacaacgacattaatggcttttacacaacctggcgatgttattttacattctcaaccactttatggtggaacagaaacattaatagccaaaacattcgctaagttcggtattcaagcaacaccatttacagatggtttaaatttagcacatatccaatcgcaagctgaaatggctagccaaaaagggagagttgcggtgatatttgccgaaactcccgccaatccaactaattcactggttgatattcaagcgttaaaaatcgttgcggataaattagaaacaagccaaggctatcgacctattattatttgcgataacaccttattaggacctgtttatcaacatcctatagagcaaggcgctgatatttcactctattcattaacaaaatatgtgggtggacattctgatttagtcgccggtgctgcaatgggatcacgcgagcttattaatcaagttcgcctattaagaggtgcaatagggacacaacttgatgcgcattcttgctggatgttaggccgctctttagaaacattgcaaattcgcatggaaaaagccaatcaaaatgcgctattagttgcacaatttctacgtgaccatgaaaaagtgaaagtgatccactatttaccttttgtagatgaaaatagtattgaaggtcaagtatttgctagacaatgcacaggcgcaggatcaacattctcctttgatattgttggtggtgaagcagaagcttttcgttttctcaatgcgatgaaaatatttaaattagcggtgagtttgggaggaaccgagtcattggcatgtcatcctggctctaccacacattcaggtgttcctatggaattacgccacaatataggtattcaagaaacaaccattcgtttatctattggtattgaaaatccttatgatcttattgctgatttatctcaagcattagatcatgtttaa

SEQ ID NO: 297449 - DNA, 447 bp, Proteus mirabilis
atgaaaaaattacaaacagaacgattattattacgtccatggcgaatatcagatgctgagagcctctattattatgcgagggataagcgagtaggccctatcgctggctggccagcacataaaagtgttgctgaaagtaccgaaattatccagactatatttatgcgtgatgaagtttatgctgtcacattgctcgatgatgataaagcgattggtttaattggcttatctttttgccatgagagcaatttccctataggggataatgatgccgaaatttcttattggattggtactcctttttgggggaaaggacttattcctgaagcagtgaaagcgcttatttgtcatagctttgagactctacaattagataatctatggtgtggttattttgcagacaatgtaaactcgaagcgagtacaagaaaagtgtatcatcacataa

SEQ ID NO: 297450 - DNA, 846 bp, Proteus mirabilis
atgtttagtcaatcattattaaagttaaatatcccttcggagtatgccgttattggtgaaagcgatatgcataatgaattaggctatccattagcattatcttatgttgtggttattatttgtttagatggcagggctgttattaatatagattttcaaacaaaaaccattaaagcgaatgatatagtgatactcggtgatgatagaatggtcacattgcaacgtaaatcagctaattttcgtattttttattgttttcttaagaaatcttttgcctctgagatcgcttatgcactttcaaatagtttgtttacatttttgcatgaaaaccccatttgtcgcccttcaacggttcacttaaacgccataaacaattgggtggaacaattaaaatatatagataaaagttatactgatcatagaaagttaatgttgagagggcagttacaaaatcttttttttgcgataacagaattaataccatctcattattccttatctaaaaaagaattcagccgtaaagagcacttatgttggcaattttgggaattagttataaaacatagccaccagcacagagacgttgcctattatgcaaatcgccttagcatcacaccgttttatctatcacagctcactaaacaatattttaatgatgttcctaagacgctgattaatagacaagtaattcttaaaataaaagcgttattgacgcacactacgctatcagtaaatgagatcgccataaaactccattttgacgatccctcatatctatgccgttattttaagcgcgagactgattgttccttatctggatatcgccaacaatatcaacggcaataa

SEQ ID NO: 297451 - DNA, 381 bp, Proteus mirabilis
gtggttgctgaaagactacgtaaattaatgaccttaggcacactcttttttatcttaggattagcgggctttatgctggcgggtgataatttaattttctgggcaatggcgatagcaatatttacctttggtgaactgatttatgcacctggtgagtatatgatgatcgataatattgcgccgttaggaatgaaagcaagttatttctctgcacaatctctaggttggttaggtgctgcattaaatccacttgctagtggttatatcctgacaaccttgccccctatttcgttattcgctattttaatggggatcgcagtactagcttggctttgtatgctgcaaggtatgaactacagtgaaaaaagaatagctgcttaa

SEQ ID NO: 297452 - DNA, 1476 bp, Proteus mirabilis
atgggatcttttttattaaaaaaagccgttgggttatctaatatttctgatttattagataaaagcgggatcttctataactattcaaccaaagtattaccttcttttgattatgataccgcaggaaaacatatagcccgtgaagattccacttggaatggcaaatatgttattgggcaacccgctgaggtgacttattcattcccaaaatgggaaggcaaatttaatcaatttggtaataagaatccttatgaatttaatgaattacaaaaagagcatgcaagaaaatctttagatgcatggtctgacattgcaaatattaaatttactgaagttgctgttgggaatgttgatggaatgaaggcttctgacgtaaaaacagatattacttttggtaatatctatgatcccaatggcacatttcaggcttatgcaacattgcctaatacctatgcttatggaaaagatctttctggccaagcatggtttagtgattatcattatgcaggtaatactacaccagaattgggtaattatggtcgtttaactattatccatgaaattggtcatacactgggtcttatgcatcctggtgattataacgcaggtcagaatgttccaggttatttaaaatctgattatgcggaagatagtcgccaatatacagtaatgagctattgggatgaatatgaaacaggcgcccacttccaaggtgcttatgccggagcccctctccttcatgatatttctgctatgcaatatctctatggcgcaaatacgactaccagaacaggtgatgatgtatatggtttcaattcaaatactgggattgattattatacggctactgatagcaatgataaattaattttctctgtatgggatagtggtggtaacgatacatttgatttctcaggcttctatcaagatcaactgattgatttacgtgctgggaacttttctgatgtggggggattacagaaaaatgtttccattgcacaaaatgttaccatagaaaacgcaattggtggttttggtaatgatattattcatggtaatgatgctgataatactcttattggaggcgaaggagacgatattatctatggccatagtggtaataacactatttatggtggtcgtggacaagatacattacatggtggcacaggaagcaatacctttatttataaagaaattgcagattctttagtatcagccgcagataaaataatggatttcaaaaccggtattgataaaattgatttatcaacattaattcaagatacatttagtagcaaaattcttaactttgttgataattttacaggaaatgctggcgaagcaactcttagctataatgaagtaaccaatgcttctgaattagccattaatgcttatggctataattataatcctgattttaaaattgatatcgtaggttttgttaattacgaaactgattttattgtttaa

SEQ ID NO: 297453 - DNA, 1698 bp, Proteus mirabilis
atgccacaaataaaatataataacgagataacaagtatcataaaagagagacgaaaagtttttctctctattgggctatttaccgctttaattaatatattaatgttagtcccttctatttatatgttacaagtttacgatcgagtattaccatcaggtaatgaaatgacactattgatgctaacaatcattatgttagctctttttatctttatgggaggattagaatatttaagaagcattatacgcatttatactgcagcttaccgagaaaaattaaacaaaatagcgaatattaatccaacgttagcattaacagatctaattactttacgacaattcattactagtcatgccatattcactttctttgatctaccttggttccctatttaccttttagttattactttatttaatccttggttaggattatttgcactttgtggtgcccttatcttatttgctttggctatccttaatgaatatctatctaaaaatcatttaaaaaaagcgaacaattttgccaatcaagcacaactaatacaaagtcatcatttagaacatccacagactatcgaagcgatgggaatgcttagtcaattacgtaaacaatggcaaacctctcatttcaaatatttacaagcacaaacacaagccagtgataatgcagctggtattaacgctatcacaaaagtaacacgtatggcattacaatctttaatgctaggtttagggggatggcttgctattgataatactatcagtcctggaatgatgattgccggttcaatacttttaggtcgagcattagcccctattgagcaagtgatcaatgtatggaaaagttgggatagtagtaaagcagcctacaatcgattgacaactttattaaaaacataccctcaagaaaataaaaaaatggccttacctaagcctcaaggccaattacttgttaatatcgatgaagccgtgtatccacacagtgacagaatattactaaataatatcaattttgctctattaccgggagatatactaggtattattggtccgagtgcttctggtaagtcttctttagcaaaatttattgtcggtatatggcaggtcaaaaaaggcattgtgcgattagataatgcggatatctttcagtggagtaaagaagaaattggtccacatattggttatttacctcaagaaatcgcccttttccccggcactatcgctgaaaatattgcacgctttactgaggttgatcctcaaaaagtgatccaagccgccaaaatggcacatgtacacgagatgattttacgttttcctcaaggatatgaaacccaaattggtgctcacggtgaaggattatccggcggacaaaaacaacgtattgcattagccagagcattatatggcgatcccacattagttgtcttagatgagccaaattctaatttagatgatttaggtattagagcattaacacaggcgatcgaaacattaaaacaacataaaaaaaccgttattttaattacccaccaaaaacagctactttccgtcaccaataaattattagtgatatttgatggaaacaccaaattattcggtccaacggcttctgttattgctgaattaaataatccaactatcacaaaaacggcaaacactatttcttcaacaccagcaacctcaaataacgcttaa

SEQ ID NO: 297454 - DNA, 222 bp, Proteus mirabilis
atggcgcttaaaaaagagactaccacatcaaataaaatgaattttggtgagcaccgtgatttagataaagtattaaagaaaaagggaaaaacaaaacgtatcaatgtagatttagacgaagatattcaaattcgctttaaggttgcttgcgcaaaacaaaacacaaccatcaaagatgtgatcagtcaatttgtcgatagttggctcaaagaaaatgagtga

SEQ ID NO: 297455 - DNA, 621 bp, Proteus mirabilis
atgaaaattatttctttcttaaatccaaaaggcggttcaggtaaaacaacagcagttattaatgtcgcaactgcgctaactaaacagggttatcatttagcggttgttgatactgaccctcaaatgagtctgactaattggagtcgggtgggaaatagcgctttcgatgtatatactgcgtcttctgaaaaagacgtgtacagcattcgtaaagatctttcgaattatcagttggttgttgttgacggggctggttctttgtctgtcattacctctgcggcagttatggtcagtgatttggttattatccctgtgacacctagcccgttagacttttcagcagcaggaagcgtaacggcagtattggaagcgcaagcttataatcgtaaagttgaagcacgatttctaatcacgcgcaaaatcgaacaagccttaatgttaaatgtgttaaaagaaaaccttaaagataaagatatcccaaccttgaaaacaagcatttcacaacgtcagatttacatcaaatctatcttacagggtaatacggtatttgaatcgaacgatggagcggcaaaaggtgaaattgaaatgctcaccaaagagatattaagagtttttgagtaa

SEQ ID NO: 297456 - DNA, 264 bp, Proteus mirabilis
atggaaattattcctgctcaactcgccaaaaatcaatttggtgatttgctaatgaaagctcaacgtgaacctgttcagatcagcaaacatggaaagcgtgtagctgtagtcatttcaccagacgaatatgaccaatttacacagttgaagttacaaaatttaaaatctattttggccgaatctattgaacaggcagaacggggagagttacatcatattgatgatgtttttgcacctttaactaacaatgaaattgaaggttaa

SEQ ID NO: 297457 - DNA, 303 bp, Proteus mirabilis
atgagtgttctatttactaagaaagcaaaagagcatattcgcaccataagacgatattctttgacccattggggaaaaaatgtagctgaaacttacataaattgcctaagaatcacaataaccaatattattgaaaaacaaccctctattggtatagatcgtagtaatgacctttttacaggaataaggagttttcctgtagaaagtcatattatttactatcgagaagttgagaatggaatagaaatattagcagtattacatcaatctcaagatcctcatattcatataaaaggggattag

SEQ ID NO: 297458 - DNA, 309 bp, Proteus mirabilis
gtgaataaacatatttatataaagtttatagaaaatgatgaaattatattttatgaaaaaataaatattgaaaataattttgataaagctaagtatgtatttgatacgatagggtttagttatcaattatgcgccattgataatcatcattatattgaatcaaaaataaatccagaaaatatattatttcaaacatttattgtttattttttatattctcttagtgaaaatattaaaaatatatggaaaaattgcgatgtggaaaatgtctttttatattttcccattgatatgacaggggaaaactaa

SEQ ID NO: 297459 - DNA, 219 bp, Proteus mirabilis
atgaaatttgataaaaaagatataacgaaagaaactctgaaaaatcttagaagtgagcttaattataataatgctcaaatggcagatttactaggtatatcagaaaaaacgtggaaaaacaaaattagtggagaaggaaaaataagcaagttagaatatgaattcatgttgcttttgattgataaacatcctgattataaaataattaataggggttaa

SEQ ID NO: 297460 - DNA, 279 bp, Proteus mirabilis
atgaaacaaatatatatggcaagaacgggcgggacggtacgaagtagccttatcgtttatagtgatggggaaaaattcaaacttcattatttagttttaggtcgtactaaccctagtaaaacagaacgattgaaagggattaaatgcaagcgatttgaaatactgaataatgaattcgaatttaacgatttcaatgaaataagtgttagtgatcttccattaaaagagttaacagaagaatttttatctaaatatactgatgaaaaaattaataagtag

SEQ ID NO: 297461 - DNA, 189 bp, Proteus mirabilis
atgtctaaacaattctcagtcaatgataaagtaatgattattaatgataagttaggttctaatcttgttggttatgaatgcgagataattagtatagataataattatgaactcaacattgaggtaaaatttaatgatggaagaaacacttttttctcagaaaatgagttaaaactaattaatttttga

SEQ ID NO: 297462 - DNA, 558 bp, Proteus mirabilis
atgaataaaaaaaattgtttttttcaagaatatcagtctgtttgtaatgatatttgctattatttaggtaatgaatggcgaataaataaaattaaatcatgggatttatgtattattttaacatcaccaaaatataaagattattcaatttattttagacctgaaaaaggtcgtataaatatatctggttcaatatatagtcgattgtttcgttattcctgtaattattgcacagtctcagagaatagaaaacctcaacatattgcaaatgatattaaaagaaaaatactagctaatattgatgaagagataaaaaaatatattgaagatttagaatcttataataataatttagaacaagataaaatcttaaaaggaatgatatcaagatttggaaaattaaatgattatcatagttcatttacagggtttaagttaaacaatggtattacaggcgaggttaatagacgttatagaggaaatcaacaattagttatcgatgatctgaatgtcgataaattaattaaaattatcggttttgtttcaacactagattaa

SEQ ID NO: 297463 - DNA, 516 bp, Proteus mirabilis
atgacaattcaagaagctttaaatatttttggtttagcgggagagctaacagaagatgatatcaaaaaagcgtataaaaagtctgctttaaaatatcatccagaccgaaatccgttaggtgctgaattaatgaaagctgttaattcagcatacgacactctaatgaaaaatattgataaaattaatctttttcagagtaatgataaaactaaacagtataattttggtgatgaactagagtctgtattaaatactctgtcaggattaagtgacattatttttgaggttatcggtaattgggtttggattagtggagatactaaaatacataaagaaacattaaaagaaatcgggtgtaagtgggcaccgaaaaaacaacaatggttttatcgtccagaagagcataaatgttttagaaataatcaggaaaaaagcattgatgagattagattaaaatatggctctagcggccaatataaatcgaaagggtggcaacaagtagaaaatagatattaa

SEQ ID NO: 297464 - DNA, 549 bp, Proteus mirabilis
atgagtcattttaacattggtgttgtagtcggaagcttaagaaaagattcctataataaacaaacagcaaaagcattaacctcgctatttcctcaagaatttacttttcagttccttgatatcggtactcttcctctctacaaccaagatgatgacgacaaaacacctgaagccgttgtcgagtttaagcaacaaattaagcaatgccaaggcattatcttcgtgacacctgaatacaaccgctcaatccctggtgtgctaaaaaatgcgttagatcaagcctctcgcccttatggtactaatgcatgggatagtattcctgctggtatcatcggtgtttcaatcggtaatattagtactgctattgcacaacagcacctgcgtaattcattagcatttttaaatatgccaaccttaaatcaaccagaatgttttttaaaatggtatgatggaatggtagaaaacggtcagttttctgaaaaaacagcaggttttatgcaaaactgggttaatagctatattaactttgtaaagcataatcaaaaatag

SEQ ID NO: 297465 - DNA, 210 bp, Proteus mirabilis
atggataacaacttaagagaaatcgaatgcgagctcgctgctttaaaaatagtcactaaatctctactttgtgcattaaatgataagcaacgacgcgatatgttaggcaatatatctttagttattgaagatacttcaagcagatatccacatcacaatgaagttataaatcttactgagcaatatgtgaaaaaacttatccaagcataa

SEQ ID NO: 297466 - DNA, 156 bp, Proteus mirabilis
atgaataaaacagaaacaccattacggaacagaagcaaaaataatgatattgaaaaagaagagctagaaaataatccagccgtcaaagagcaaatttgtcctaaaatgccagtatcctattttcgacgagcgttacgaaaaacaggtagactatga

SEQ ID NO: 297467 - DNA, 819 bp, Proteus mirabilis
atgatgatccaagcgttacattcgctttatcaacaacacaccgataatggtggtcatggcatcggacgttgtggtggtaaaggtaaacacagaggacaacaccacaatggcaataatgaacattgttgtcatggtgaaagaggccatcaccaagaaggtcatggcaaatgttgccaacagggtgagcaaagtcatgagcataatgatcatgccgaacatggctgctgtcacggtgaaaaacagcaagagcatggtaaacgacatggccgaggttgtggtgctggtaaaggaaaaggaagaggccaaggtcgtcaattaaaacgtatgtttgaccatggtgatttacgtgtccttttgttgagtatgatcgcggcaaaacctagccatgggtatgaaattattcgaggaatagatgaagcatcttcaggactatatgtaccaagtccaggggttatatatccaacactgacactattagaagagcaagatttagttgttgctaatatcgctgaaaaaggccgtaaaaattatagtattacgccagaaggttcagcatttttagcagaaaaccaagaaacagaaaaaaatattcaaaataaactggcttatgcacgtgatttatcacaaaacgcagggggagtttctgaggaaatcgaatttgcggtaggaaaattaaaagcggtattacgtcataagttagtattgaaacaactttctgtagaaaaagcgcaacgcattgcttttatacttaatgaagcagtcgaaaaaatagaagccattaatgaggcattgatctctgaggtaagggaagatgaataa

SEQ ID NO: 297468 - DNA, 1833 bp, Proteus mirabilis
atggcaaatcacaaagaaacctgtctgagtgctgcagagcgtgtgtttgatacccgaaccgtggataccctaacatgttatcatcgagagatggtaaagatgttgatggatagtgagtccttttattctagtccaaataactcacagataaatactaatgagagattagagaacaaaataaaaagcaataccattgaaaataaagctgtgaagggatcttatggtgatattttaaataatttaaaccagcagctaatgaataataaacctgagattgagccttatttctcacattacaactctcccgtcatgcgattggcgaaattaggctacctttctgcactggcctataatgctgataatgtttttaacaaacattcacccatacaaaaacagcaagagcaaaaaataactcatgatttgtgtaaactaatcggttttgaaccagataaagcatttgggcatattaccaccagtcatgtttttgcttgttatgaaattttgtgggctttgagaaatttaaaaacactgccgatggcgattgcacgtcatccaaaatcaagagatctggttgcagataaaaaagcatttgagttatttaatatgtctatcactgatattttatccatcagtgaacagctatatgagcgagatatttttgatgatgtcagccatttaacttgtcgtggcaccggcatgacaagaacgatgcatttaggtaaattactagtaccgatataccgcttcgaattttggaagaaggcgatggatatcttggggttaggttatgataatctcattgccttaccaatagatgaagagtttaaaacagatatagctaaaacgcgtcatattgtgcttcgcttaatagagcagggagagccgatactcggtattattggtgtgttaggctcatcgacatacggtagcattgacaaacttaagcctcttttcgaattacgtgaagagtgtgaaaaacaacataacaactcattctatattcacattgatgcatcccaattaggctatatgaaaagcctgtttcttgacgaaaataatagcatcatcccttataacatattgtgcgataaacttaagcaagaagcacctttacttgagttaacctcagatatttatgatagttttactcagctctcaagagctgattctgtttcttttgagccatttcaagcgggattttctccttatcctacggggattgtttgtataaaagatgctcgattaagtcgttttctcgctaacccgccaaaactgtgcccagaagaggggaatattcccgatgaaattgatgggatccaatcagcacctgcggttgcatcaatgtgggggatccatcagctatatgcttttaataattttgggtatgggcaatgcgctcaaaatcaatgggaagctagagtaaaactggaacaacaattaaaacaagagaacgaatttgaaaaatcgggtatctcttatgctattcatattttgccagtttcagattttaataaactcacttttgccattgctcttaaaggcaaccaatgtttaaaaatacaaaatcagctaaataatgctatttataaaaatttagaaataaagagccaatataagccagatctcaacctattagtgctgtgtgctcgtaatagcgatgatatacctgcacagttttgtcaacaatgtcatttaggtaaagatgaatggaagcaagttaaccacttaagtcttttacaattaacgataaaaaacactgataaatggagtgaagagcatattaaagcagggtacgactatattaaaaaagttgtcctatctgcattaaaatag

SEQ ID NO: 297469 - DNA, 432 bp, Proteus mirabilis
atgggaaaatatgtctatcgtattgataaacaaatcaactttaaagcaattaatgactatacctttagagccaaacggtggttccctgatatgttcccacataaaacattaattgaaaaaacaaagaataccctatcggatgaggggatttaccgtatttgtttttttgcaaatttttctcttgcgaatgaatacgttaattatctaagaacaaaatccttactctttcgttgccttaaatcttctattgtgcaagcaggctttcatgaaagttgggatgatgctttcgcaatcggtgacgcttatttattttggtgtaaagaatctctcaatgaaaaaaatgaacgtttctctatggctggtctggcatttaacgatatccaaatttttcatgaaaaaaagtgggtcgatttaaaccgatatattcaataa

SEQ ID NO: 297470 - DNA, 561 bp, Proteus mirabilis
atgatatttgggtatgttcgagtaagtacgaaagaacagaacgtagaacgccaaataaacgcgcttgtcggatgtgataagattttcatcgatagagtgtcaggtaaatccgttgctcgtccagaactcaacgctatgaaacaacaattgcgtgatggtgacacggttagagtaaaatcagttgatagattagccagaaacacacaagacctattaactcttttagctgaaatgacagggcagggcgtaaaggttgaatttattgataatcagatggtattcgataacacccctaccagtaaatttatgatcacattgttagccgctgtcgcagaacttgaacgttcattcatacgtcaacgccagaaagaaggaataaccatagctaaacaaaagggaaggtacaaaggtcgtccagtatcagataacgcgcttaaagctcaaaaattaattaccgaaaaattatcaggtaaattatcgttaacagatgctgaaattatgcaattatcaggcattcaacacgcacaattttatcgccttaaaaaggcgctaaaggtataa

SEQ ID NO: 297471 - DNA, 312 bp, Proteus mirabilis
atgaacagactaaatccaattagtgaagctattaaacgagatgaaattgatacacttgttgatgtgttgctggcagctatgaacattgatatcagtgcagaagacaaagccgtatttaaaaatattattaatgaactccctgaaaacgccacattaacaactctggcaaatataatcaactcgctcaatgcaaagcaattagggctgagtaacactacctacaatgctattcaaccattgttagtagcactatcagaaaaaggtaaacatattaaagatgattatggccactatttttcaactagtaattag

SEQ ID NO: 297472 - DNA, 201 bp, Proteus mirabilis
atgttttatttactgatcatcactcaagttatggtctattgcttaacgttgtatttttttgttaagaaggaaaaaacaggtaagcataaaacaaccttcaattttttgttggtttgccttgctgtattgaccgtaaccctattgtttatcactgagtctgattcaaactcaaactatagccaaaacccaaactttacttaa

SEQ ID NO: 297473 - DNA, 915 bp, Proteus mirabilis
gtgagtgaattaacattatcaagaactaaagttcatcggcactataagccactctttagcggtgctattcctaaattacctttgattaagcgtttcattggcgcaatcaatgtgcatgattggaatcgtaacacgatcattagaaaccaacgcataaacgataaacaacgtctctctatacgttctgaacgtcgtgaaacgtggactgaattagcaaaggtgatgattgcgtacgctaattacagtacagaatttgattctatttgtgaggtcatgtgttcagtagaagatctagcaagaaaatgcgggcaactgcatatctatgaaaatgggagaaaatgctatgatccaacactgagagctatacgagcatgggaaagagcaggactgatttatgtagatagagacacagactcagaatcagggcaatataaagcacaaagaatttggctcagagagggcttttttataggaatggggttctctagagacgaactgagaaaaattttcaacagttttaaccggtggcttataaaaacgggtaaaaaagaaactcacaaacaacgatatgctagacacttattggaactagcaaaaaaaaatgtagcttcattaaatggaaaatacaagcttaagtcattgttattaaaaacaaaacgaatattcgttggtgatgatattgaattagaaaacgaaaaaaaacacattgagaaagctctaaaagaaaaaatagaattagaaaaatcagttaataaaaaagatggccataaacgcagagcatggaaaaaatatctgagttggaaaaattcacagccgttcgctattgtctttaatttcgaaaaagaaatgaacagactttatccaaatatcaacgaagaagagaaatattcttactacctaaaacatttaccctaa

SEQ ID NO: 297474 - DNA, 498 bp, Proteus mirabilis; identical to SEQ ID NO: 296610

SEQ ID NO: 297475 - DNA, 294 bp, Proteus mirabilis
gtgaatcgctcttatccagcatcaaagatggtaggaaaaaaaatcgcttattaccgtagagtaaatggcctcacattaagtgaattggctaagaaaataggtataagtcaacagcagcaatcaagatatgaacggggaattaatcgagtgagtctagataggctttatcaatatgcttgctttttcggtattagtttaagtgatctttttcaattagatgatgaagagaaagtagaaatagaaaataaaatatcaaatatggtaggtaataaaaatgaaccatttgatgggtaa

SEQ ID NO: 297476 - DNA, 984 bp, Proteus mirabilis
atgaaccatttgatgggtaaaagactttttttattaggtacaatcttctttttttctgctgacgtctttgcagcttgtattcagaatcctaatttaaaaaatattcaggctcggatccccaataaaacctattcaattcaatatgatgatatagggacaagagtattagatgagtttcagattaattatgccaatgggcctataacaactttttcaggtaacgatgggcggtgtgggaacgcatcaatcactgccaattatactaatggctggttgcctaatgcgaataaaatagcacagaccaatattgcgggtattgggatacaggttaaatttgctggaataggtgcattaaatacaacgtatttgaccccaaaggacccaagtggcaattcttatcgacttcttaccccttattggacagtcaaaattataaaaacaggcagagtaacgcaatcaggaagccttcaatggggcaagattgctcaagcagtacaaaataatacacaacctaaaaacacaacttggaacttaacttcactttatttgcctcttaatgcaataaagataaattcattaaaatgtactacaaaatcatcaaattataatattaatatggggacttggtatgatactcaatttaaaaatattggtgatgtcagtaaaagtgtagatgttcctattacattaaactgtgcggctggcactaacattaaagcgacagtgacaagtagtgctggatatatagatgtaaatacagggaaattaaacttatcgggcactaatcgagccactggtgttgccattcagttattagataaaaacaataacccgataaaactaaatacaaaaaatagtctacaaaatggggtctcctccggtgattatatatttggttggaaagcaagatatataaaaacaggtaataaaataacgcctggtagtgctaactcaacagcaacagtaaatatcttatatgagtga

SEQ ID NO: 297477 - DNA, 1473 bp, Proteus mirabilis
atgaataaattaactccattacgacctatacctaccttaattgctgttgctattacccttatcatttggtttgttatccctgttccccaaggggtagatcccaatgcttggcacttgttagcgctgtttgttggtactattgcggctattatcggcaaagccttacctataggggcagtatctattattgctattgcgcttgttgccgcaacaggcgtcactaacccagactcaactaaaggcgcgattaatgatgcattaagtggcttttccaacaatcttatctggttaatcggtatttctattatggtttcaatgagtcttaataaaaccggattaggtgctagaattggttactattttatttcgttatttggtaaaaaaaccattggtatcgcttattctctagctattgcagaaacgatcctcgcccctgttacgccaagtaatacagctcgaggtggcgggattattcacccaataatgcgatctattgccgatagctttaattcaaaacccgaagagggtactagtggtaagattggtcgttatttatcgctagtcaattataatatcaatcctatcacctcagcgatgtttattactgcaaccgcgcctaatcctcttattgtaagcttaattatcggtgaaacagggcctgaaaatgagttaacttggtcaatgtgggcaatagcggcttttgttcccgccattgtttcattatttttaatgccgattgtgatctactttttatataaaccagagataacccatacgccgaatgctccccactttgccaaagagcgtttagctcaattaggccctatttcattgccagaaaaaatcactttgggagtatttgcactgttattaattatgtgggcaggaatacccgcactattatttggtgatgcttttagtattaatgcgactactgcggcttttattggtttatcaatcttattatgtactggcgtattaaattgggatgatattttaaaaaacaaaggtgcatgggataccgtggtttggttttccgcattagtaatgatggcctcttttttaggaaaattaggtctaattaaatggctctcattaagtgtgggtgccggtattgatagtatggggataagctgggtaagtggtatgatattactcgtgctgatttatgtctattctcactatttctttgctagcaccacggctcatattaccgccatgtttgctgcattctatgccgcaggtttagctcttggcgcgccaccaatgttattaggacttattttagctttctcttcttcattaatgatgtctttaactcattacggtacaggtactgcaccgattattttcggctcaggctacgcgaccttaggtgagtggtggaaagcaggttttgttatgagcattgttaacctgattatctggataacccttggtagtttatggtggaaggtgctggggtattggtaa

SEQ ID NO: 297478 - DNA, 1101 bp, Proteus mirabilis
atgagtaaattaagagtcgctattatttttggtggaaaatcaaccgagcaccaagtttcattacaatcagcaaaaaatattatcaatgaattagatcgaacgaaattcgacctttgtttaattgggattaatgaacaagggcaatggcatgaatatgctgaagacaattatttaattaatagcgataacccctcaactatctcattaagccaacctttgcgtccagtggctattattcctggtagtacccgtcagcaatttatctctttaactgatgggcaacctcttgcacaaatagatgttgtatttcctattgtgcatggtgcttatggtgaagatggcaccctacaaggactattacatatgattgatatgccatatgtaggccctaatatcatgagttctgcagcatgtatggataaagatatcactaagcgcttactggatgatgcaggattagcggttgcaccatttattacactgatggctcaccaattaaatgatatttcctataatgaagttgttgaacaattagggctccctttatttattaaaccagcaaatttaggttcttctgttggtatcagcaaagtcaataatgaagccgagtttaatgctgcattatccatggcatttgaatatgaccttaaagtgattatcgaaagtgctattgttggccgtgaaatagagtgtgccgttttaggtaatgaagagcctgaagttagcccttgtggtgaaattgtgttaaatgatgctttttatgcttataacacaaaatacattgatgacgatggtgcaaaagtagtagtacctgctgatttagataatgcgattagcttacatattcgccaaacggcattgaaagcttaccaagttttaaactgtttaggtatgtcgcgcgttgatgtgtttttaactgaagataatcaagtcattatcaacgaaattaatacattaccaggtttcactaatatcagtatgtatcctaaactgtggcaaagtacgggattagattatcaatcactcatcacgaaattaattgaattagcgctagaacatcataaaaaaacagccgtattaaaaactaagtgtgagctttaa

SEQ ID NO: 297479 - DNA, 1743 bp, Proteus mirabilis
atgagcacattattatctacacaaaacctctcttttcataataatcacggtatattgctgagtaatatttctttggccctcactaaaggtgagaaaattggtttaattggctacaacggttgtggaaaaagtacactattaaaacttttatcacaccaattaataccaacagatggctctattactatcgccaatcaagtcattatggcttatgtcgaacaacagttaccaagtgagctacagtcaatgcgtctcattgatgcggttcttcataaattacctgaagagctacggatatctgaaagttggcgtagtgaattgttattaagtgaaatgggatttaaaaccaatgaaatcaatctattagtctcacaattaagtggtggtcaacatactcgtttattacttgcgagagcattgattttgcaaccagacttactgctattagatgagccaagtaaccacttagatctaccgactatcttgtggttagaaacatttttaacacagtggcgaggaagttttattcttgtttcacatgacaataggttgttagataaagtgaccaattgtacgtggatcattcgtgataaaaccctatctgtttttcgcttgccctgctctcaggcaagacaagagcaagaagcacaagatatcagtgcgcaacatcgttgtgatgcacaacaaaaagagatagatcgtattgcacaaagtgcgaagcaattggccatctggggaaaagtgtatgataacgaaagtttgtcacgtaaagccaaacaaatggaaaaacaaattgttcgtttaaaagacgaacaagtcgatgtaacagaaggcaatcaatggacgttacagttatcaggaacaatattacgggcagatagattgcttgagctgcatcagctttcagtgatccctgcgccagatgcaccgattttatataccatcgataatcaacggatcaaaagtggtgatcgagtcgctattgttggtgctaatgggacaggtaagtcatcattattaaaaatgatttggtcatcatttcatggttcaaccacatcaacagaaaatgtgatcaggctgcatcccagagttgagttaggttattacgatcaaagtctcgcacaacttaatgataatgatacccttgccgatgcactaaagccctttgcaccgctattagatgagcaaaggaaaatggcattaataaatgcaggttttgtttattctcgccataatcagcaagtaaagtcattaagtggtggtgaacgagctcgtttactttttattggtctcagtttggcaaaatattcattattaatgctagatgaaccaacaaatcatcttgatatggaaggtaaacaggcattagctgagcaaattcaacaattttcagggggaattttactcgtcagccatgatagagaattgatagagaaaagctgtaatcgtttttggtatattcacaatggtattcttagcgaacatcatgatattgaaacaatttatcagcttatttctcaacaagatatgtcatcggtctctaatgagcaaaatggccatcatgctccatctgttgaaatagtaaaacatcataatgaagatgaattgctaatgaaattgatagcacttgaagataaattgaatgctgatttagcaagaaaatctgctcatcaaaagcctatgttacaggctcaatggcaagcagaaatagagatcttaaagcagcaacttgatttagcttaa

SEQ ID NO: 297480 - DNA, 657 bp, Proteus mirabilis
atggcaaatcagaatttaaattcgatccaaacagtggcaaatcaagagccgtacaactcgtggagcacaaaatcagagaaaaacatgggcaagagtatctcgactctttggctacaaatgacggagttctatggggagaaatggacaaacaagaacgggacggaaccctcattgatgtggaaacgagcactcagcggattgaatagcgatcaattcgatttgatatttaaattctgcattgagcgttgtagcaatggtaatccgtggccaccagagttatctgatgttatttcaatgctttctgacaagttggtagatgcgaatgcttttggaattccacttgatgaaatgctgagagatttcaataaatacctagccagacgatgcaattatcatagtgctgagatgtacccatttaggcatccggtgcagtattggatcttcactgaccttaggcaaaaggtatatgaccttaggctgacagaagcggaggttgagaagcgattaaataaaatgatccgtatgtggtctgagcgagtgcaacgaggagaggtcatacctaaacccacgttaagacttgaagataaaaccaggccgagacctgcatggatagatttattagaaaatgctgataaacgtaaacataaatcggcataa

SEQ ID NO: 297481 - DNA, 294 bp, Proteus mirabilis
atgaacaagcaaaaggaaatcccatttggaactattgttgtaattcatcacgctgttgatgacgaaaacgaggtctatttaaagggttgtcatggtgattttgacgcaactgacattcgagattttcaagatgaaatatcaaccgttttaacgggcgaagattactttcaaggtgagggcgtttatacactaaaaccaactactgattattacgattaccatcgtgaaattacatttgagttggtttcatttgagccactgaagggcgaggagacatctaatgcagggaactaa

SEQ ID NO: 297482 - DNA, 291 bp, Proteus mirabilis
atgcagggaactaatccaacagatggtattcagctagaagtactttatatgggaaaaggggatgtatatgtatatttcattcaagggtgtgcaacattagatgatttgcaggaaatagaaactcaactacagcaagatgctgatgagtatgaactgtttgctgatcacggggaatataaaatcagcgcgacttatgaccgtggagattatgatgagtacggtcgatgtgaagtagcgccgtattgggttttcgacatccaatcatttgagccaatgccagagggcaaatga

SEQ ID NO: 297483 - DNA, 1206 bp, Proteus mirabilis
gtgaataaaagagtgctttcgacaaaatatcgaaattcgatgtgtccatcaatgataaaaaaaatagggggatacggtttatcgttattcttgataccaatagtattccttcattccgctaatgcgttagagttatccgttcctattggctcaacaggttatttaggggaggtcactccgccagttggttcaacaacgaaaaattatgggatggtaaggtcagtgcttgaggcgaatacaccttatataaattttcggtgggagccttatcaattagtggtacaaccaatacctttttaccctgaaattggacgagcgggtgtggctatctacaataaaagcaatcccaaaggggcctttattgttttagcacccagtggatatggtacattgcgttataaaagagctaatggcacatatgagaatgcttcattttcatttagtcgttcccaaaccaccgctatgacaaatatgtataataatttttcctctaattctaatgaattaagttggggtcttttgcccagacaaggcaatagtgattttttctcagcacgatacgtagatggtagtgataaagttcattcgttaacattaacaatatccagttattccgcgtatgccatcgggccattagaggccggtgaatatgccatgcgtgatggttcaaaattttatgccaacattagcactagtccaggttcttctgtagattctaaaacattattaagttcaatggataatgtgaatattaaagcactcaaagcctgtgacgttatcccccaaacgtctaccaatattcagtttccgactcaaatcgcgaaaaattatgcaacacctactaaattagcagataatttagctagtatcagtgtcaattgtccttatgctaataaaaatatctatctcaccctgagcccttttaataatttagtctcaggcagtgaaacagggatggagctatccaccagtagcactgaaaatatcaccacactgccttatgtggtggcttctttaaaatctgcacaatcaaatatttgtcaagccaatgcacaagaggccttacgactcgtcggtagtaataaactagcacaacaaaatatgaagagttttacgcaaaatataatttttaacctttgtgctaatggcaatatcaaagccaataaatatacaggggcaattaatgtagcaattttaattgaatag

SEQ ID NO: 297484 - DNA, 1125 bp, Proteus mirabilis
atggaacactttactaaaaaatcattatttacctgcgataaaactaatgaaaatctccctaataaaccgggtgtaataacacactgccaagatctagcatctgacttagggttaagcgaagcttttgcgcaatacacaatatcttatacttcttgtgacagtgttcatggagaaattatccgtgaagatactggtgctgtttttattccgaaaagtcaggcacctaaagatggttggcctgtcattgtatggaatcatggtacggtagggatagcgccaacttgtgctccctcattaacgcctaaaaatagtcgtgtatcgcaatatttaaatacttggctatcccttgggtttgcgattgttgcaccagattatccaggtttaggctcatcagggttgcatcattatatggatgaaagagcaacagcatggagcgctttggatagtgcaaaagctgtcttgaaaggtgggttttcgctaagtaatcgctttatctttatggggcaatctcaaggggctcatgctgcatttgcctctgtcggctatcagcctgaatatgcaccagaattaaatatcttaggtgcgatagtgacagggacgccttattttagtgataatctacttgaaaactttattagtgatggtgttcaagatgaaggtgatagaaagctaccttacgcgatgtacttatatctttctgctgctgataaaaatccaaacttaaaagtggaagattatttccaagaattagcaataccttatgttgaaaaagcgaaaacgctttgtatcagtccattaagtcaattagtaatggataataaattaaacgcatcaaatagcttaaaacctaagttttacgagctattagagcaagaagcgtcaagtttaaattatagaaaacttcttgttgataagcccgtatttatagggattggtttagaagatattcatgtgttaactcgttggcaacaagagtttgcaagagatgtattggaagcaggcacaaatgcatatgtatatgaatatccgaatattggtcatttagatgtatacaatgtctctttgcgaaattcagtgccttttgtatttgaactgatgaaaaatgagcatagcaaaatagactaa

SEQ ID NO: 297485 - DNA, 513 bp, Proteus mirabilis
atgaaacgcaatcgcttaaaaaccctactatgtaatgatctcaatctatatggttatcacttacctttagatgcccatcctattttaggtaacaacgctcaattagcgttaaaaatgggcgtaaaagttgagggtgagatcgagcctttagtgccgaaagggatttttgatctacctgtcacagccaatgaattaaaaacacgactcgaaaaagccttacagcgtaatgtgcttcactgtggtgacaatgcaccagatgttattcgccatattgcttggtgtactggtggaggacaaggatttattcaacaggcggcagagcaaggtgttgatgcatttgtaacaggagaagtctcagagcagacgattcatatagcaagagaaatgggcgtgcattttttcgctgctgggcatcatgctaccgagcgttatggtattaaagcattaggtgaatggttagcacaaactcaccatttagatgttacttttgtcgatatcgataatcctgcctaa

SEQ ID NO: 297486 - DNA, 207 bp, Proteus mirabilis
atgccagcttataacgaatacactaaaaaacatgttttagcccgtcgtactggtgcggtagcgctaggtattgtggcatttcctgttatggtttttcatcctaaacgcgctcagttttatagctatttacatcgtgtatggtctaaaacaagcaataagccagtttggttggctaaatcagaaatggcattaactagccataaataa

SEQ ID NO: 297487 - DNA, 294 bp, Proteus mirabilis
atgtataaactttctaaattagcagaagaagatatttaccaaattgctcgttatactattcaacaatttggagtaactcaggcaaaaaaatatcataatgatttaaaacagacatttgagctactagctaaagcaccttggattggacgagaatgtaattgggtgtgtaatggtatgagacgatttgagtttaaaaaacattcaatttattatctaccaaaaaatgataccttatttattactcgtcttattcatcattcaatagatgttgattttgttgattttcctaaataa

SEQ ID NO: 297488 - DNA, 1302 bp, Proteus mirabilis
ttgccagcttcagcggttacactgtctgatctctattttttagcgattaaacatgatcccacatttaatgctgcggtaaaagagcaagtagcaggtaaagagtatgaaaatatcgggttatcacaattgctacccaatatttctgtcaattacaaaaataatcctcgcaactggcaacgtaaggcttatccaataaatatatttcaggataaaataacaacagttgagtatcaaaactatcaaagctattctgtcaacgcgattattagtcaaccactatttgactacaccgcatttagtgaatacaaagcttctatcattaaaacattattagcagacagtcattatcaaaataaattttcagaattaattattcgacttattgataattatattcaagttgcttatacacaagataaattattgctaaatcaagcacagcaagaaatctatcaaaaacaactagcttcaagtcaacgcctatttgagttaggagaaggaaccaaaacagatattgctgaaatagagactcgtttatatttaacccagtcacaatataccgatcttcaattagaaattgaaaaggctaaaaacaaactcagtgctatgatcggttcacaattgcctactcatgagcacatcgcaaagctaactgatacaaagtttgttcttcaatcactggctcccgatgactattccacatgggaaaaaaatgccatacaaaataacttaaagatacaatctgctcgtcatgaaatggcgatagctaaacaagagattgagaaaaatagaggagaatttttcccaacagtacaattttatgcggcttactctagtagtaattctgatagtaataataccattaaccagaaataccaatctgctaacgtgggtttttatgtcagtatgcctttatttaatgggggtaaaacaacggcatcaatgcgtcagtcgacagcaaaatatcagatgagtgcatttgaaagggatgctattattcaaaatattatgcaggaattaagatatcaatatcaaatttgctcaacgagccatattaaattgatggcttttgagcaagccgttagttccgctaagttacaattaaatgcaacacgaaaaagctatattggtggtcagcgaacgatggttgatgtgcttaatgcggaagagcttttatatagagcgcagcaagatttaatcaaagccaaatatgattatattcaagcttgggcattattacatcaatataccaatactctagatattgaaaaaataaaaattattgaaaactattttcagtag

SEQ ID NO: 297489 - DNA, 531 bp, Proteus mirabilis
gtgaaaggggggtataaagccgctcttggtgtttttacgggtgatgcattattaatctttttggcatttttgggggttgcttcattagtcaagacttcacccgttttctttattgtgatcaagtatgccggtgcactttatttaacctatttaggtttaaaaacactctatgcgacattccataagaaaaaagagcagccggaacaggttgcagtagaggttgtaaaagcgaaaaacggcttatatatcaaagcgcttttcttaagtttgttaaatccaaaaatgatcatcttttatgtgtcattttttattcaatttattgatcctaaatatgaaaatgcaggggttcccttttttgtattaggtgtaatattagaaatatgtagcatactttacttatctgtacttatttttggtggcgttgctattactaataaggttaagcataacaaacgattagcatcattatcgaatagttgcattggtgctgtgttcttattatttggtgccaaactcgctttaacggcttaa

SEQ ID NO: 297490 - DNA, 825 bp, Proteus mirabilis
atgcaccaaacccgtattgaggctaaccgagatgcgatcaacgggttaaatcaagataaagcggataaagcacagctagcggaaacggataaacgggtagacgcaaacgaccataaccttgctatgcaccaaacccatattgaggctaaccgagatgcgatcaacgggttaaatcaagataaagcggataaagcacagctagcagaaacggataaacgggtagacgcaaacacccataatattgctacttatcaaaatagtattgataacaatacgcaggcgatcgattggttagataaaaataaggttgataaggcacaattgatagaaacaaccaatttagtaagagagaatacagccgaaattaatagtaacagggaagctatagacgatataaaatcgagtaatattcttcaagaaaatttaattaatcatcgcactgataacctaataaatttagaaaagatctctcgagatgaaggggataaaagagtcctaactagttcaaaaagttatacggatagtcggtttagttcggctagaagctatgcggatgataaattcggtcaattagataataaaattaaccaaacggaaaagaaactcaatgcaggtattgcaggtgtaactgccatttcttcaattccatatgtgtcagaaaatactttttcatatggaatgggagtaggtaactatcaaaatggtaatgcgattgctgccggagttcagttaaaaactatttataattcgaatattagggtcaatatatcatgggattcatcaagtaatactgcattaggtgttggtatctctggggggtggtaa

SEQ ID NO: 297491 - DNA, 324 bp, Proteus mirabilis
  misc_feature (308)..(317): n is a, c, g, or t
atgcaaaagaatgtggttatttatttttcaggttatggtcatacacaaaaaatagctgaacatattgcaataggtgctgatgcgtatttaatcagaataaatgaaaatggtgacatttctcaaagtgaatggaatatcttggataatgctaaatctattattttaggatccccaacatatatgggcggtatttcatggcaatttaaaaagtttgcagataactcctcgaaaaaatgggctgaaggtaaatggaaagataaaatatttggcggatttacaataagtgcaagtttaaatggagataaacnnnnnnnnnntcactag

SEQ ID NO: 297492 - DNA, 696 bp, Proteus mirabilis
atgaagagcagattgtatcttggcgtaacactgctacttgtagctggcgtttgccaagctaagaattatgttatcgcctataccgacaatattcattcattacaggatgcagtacaggacagtgtatggactaaggccagcttgctaacggattttagctttccttggatagatatgccagcaccaaaaactgaatttcgtgctctttggacgcctacatccatctggtttcgttttgacgttgaggatcatgatattcaagtgggtaaacagttagataaggatgaggctgtgctggcttccgatcgagtggagcttttcttctccaccggtcaggcattgcaaccatattatactgcagagattgactcacaaggtcgggtgttcgatgcgaaagctgagttttatcgcaaagttgatcagacatggaactggcagtcattggaaaccatatctagcttaacgcctaatggttatagagttgtgggaaaattcgatcttaaagagttggacgtacttaagctctggcaggatcaagatcataaaaccttgatgtgtgcaattatgcgtggggaatttagtgctgatggacaaggtggacaaaaacgggagtggataagctggattaaaccagattctgtaaagcccgattttcatataccttccgcttttagtacctgttctttggtaaaatag

SEQ ID NO: 297493 - DNA, 921 bp, Proteus mirabilis
atgaaaaagacaaagaaattttgtgccaccgcattgctcttcagtactttcagtgttgtattttatgtgcttccagtgcaaagtcagccagtggagaatactctggttgttgcaacctataatattgatggtaaagtttatggtcgcgctgcagagcaaagtcgcctactagaaaatctgaatgttgatcttgttggacttcaagaagttaatcatcacaatcgtcgttttaaacaattaaaaagctatgacgcattggaatattttaacaaagaatattttaagcatcagttctttggtgagatgtcgatctttgctcatggtggctggggaatagccctactttctcggtataaaataagtaatacaaaaaatatccacttggtcagtgacgaaacctctgtttataaggatgaagttaaccaaatttttgccaactacgatcctaataatgcggagagtgtgagagcattcgatagcctttatgaaccagatggtcctatgcacaacggtgcggttgcacctaaatcttatattcatgcagtagtgaataaaaatggtatgaatattgatgtttatgtggcgcatcctagttttgaatctatggcattgcgccagcaacaatttaaaacgatcctagaggatatggacaattgtaatggaaaatataagatcttgttggcggataccaatgcggatcaagatactcatgaattggatatattcagagctaattatcgattagctaatggaggtgaatatggctggattgagacctttcatgataaagatccgatgatgaaagtactcagcatcgataatataatcgtttcaaaaaatattgaaatatctgatgtgaaagctattcaatcgacgctttcggatcactatcctttggttgccacgctaatccttaagtag

SEQ ID NO: 297494 - DNA, 1377 bp, Proteus mirabilis
  misc_feature (539)..(573): n is a, c, g, or t
atgatgaaatcaaaaataaaacaaatgattgctcactactttaaaactaaaaaagagcctaaaaactatgatttttaccctaatcatatcgccgtacttgagaaaccgccgacaccttatagtcgtattattgcaataataatttcattaagtgtgattatatttttactctgggcatatataggtaaattagatgtgctttcttcagctataggaaaattagtggtttcaggttattcgcaacaaattcaaatttatgaacatagtcgcttaagcgccattcatgtaaaaaatggccaacaagttaccaaaggagaagcgttattaacacttgatattttaggtgttgatgaggagattaataatctaaaaaataagatagaaaatctattattactaaaaattcgttatcaagcattaggtcaaaacacccgacctgatgcaattgatgattttaatttactaaataaagaaaaaaaagaagctattctactaagttatcaaaaagaaaaggatgaatttgatgctagtattaatcnnnnnnnnnnnnnnnnnnnnnnnnnnnnnnnnnnnaacaataaaaacaagcttcttactcaccaagaaatcaattcattaaatgaattaaaaaacaatattgaaaaacgttttaatataaagaaaaaactctatgataaaaaaatcattagtaccatggagtttttagaaaataaaaaggagttattagaaattaatcaaatcattaaaagaaaatcatcagaactgattattttatccagtcaagagcaacaatatataaaaaatcgcgatagattagaaaaacaaaaacacctagagtggcatgacaaatttaaacaatatgaaagcgaagtttttatttatcaacaaaatctttatcatgttcagaaacgtcaacaattaaaaattgttcgttctcctgttacaggtacagtacaacaactcgctgttcataccctaggagccgtattgcaaccttcacaagcggtgatggtgatagtgcccgatactcagcataatgttgctgaggtgaatattctcaataaagatattggttttatctatccgggtcaaaaagcggtgattaaaattgatgcttttccttatacccgttatggcaccattgaaggtaccattgtcaatatagcaaaagattccatacaacatgaacaattaggcttagtttatcctgtcctgattgaacttgataagcaagtgatgggtgaagatgaagcacaatataaactggctacaggtatgtctttagttgccgatataaaaattgaaaaacgtcgagtgattgattatttactcagtccaatagaagtttatcaacatgaagcattaagagaaaaataa

SEQ ID NO: 297495 - DNA, 1173 bp, Proteus mirabilis
atgaaagcattttttcctttatttgccctcgctacaggagcatttgccataggagccaccgaatttacacctatgggattgctacctaatattgctaatggactgagtatttccatagcaaccgcaggtggattaattactggttatgctgttggggtgatgattggtgcacctattatgacattaagtcttggcaaattaaccaaacgtcatgcattgggattattgttattattatttattgcaggaaatctattagccgcacaagcagatagttattggagcttaatgatagctcggttgatcactagcctaaatcatggtgctttttttggtatcggctctgtcgttgctgccagtttagttgaaaaacataaacaagcctctgccgtcgctgctatgtttatgggattgactatcgctaatttagtcggtgtacccttagtcacttggattggacaacaatatggctggagattagcctttatattaatttcaggtctgggttttattaccctaatcggattattaatgtttttacctgttatgcctaaaggaaataagcctaatattaaatatgaactgggtgttcttactcgcttacccgttgtattagcactattaacaaccgtatttggtgcctctgcactttttgccttgtatacctacattgctccttttttaaccaataccgttcatatatctgaaagccatgtcgctgtggtattagttattattggtctaggatttactatcgggaattacttaggaggaaaactatcttcttacggtatcgaaaaaacattaatccttttcttcatcctacttatcggctctatgtcagttttgccgttagtttcccataatgtgtatctggcagtggcgactatttttatttggagtatcgcaagctttgcacttgttcccgcgttacaaattaaaacaatgcaaatcgcccatgatgcacccgccttagtttcatcggtaaatataggtgcgtttaatttaggtaatgctatcggagccatcatcggcggtatcgcattaaaatacagttataacattgtgcctttaaccgcggcactggtaggcgttattggcctgcttctcgtctattcacaaatcaaaataaaaaaatcgttctcctcagaatattgcgttaattctttataa

SEQ ID NO: 297496 - DNA, 579 bp, Proteus mirabilis
atgaatattctacttattaacggtggacaaaaatttgggcattctgcaggacaattaaaccgtacattacatgatatcgctctggcacatttggcgacattagggcatcaggtaaaagaaacacaaattgaagaaggctatgatatcaatgaagagatagagaaatttatctgggctgatactattatttatcagatgccgggctggtggatgatgatgccatggaaagtgaaaaagtatatggatgaagtctatacttatggtcacggcaaactatatgaaaacgatggacgtactcgtcatgatccaagcaaacaatatggtagcgggggattgttgcaaggtaagcaatatatgatctccgtgacttggaatgcccctattgaagctttcaatgaatttggtaatttctttgatgggcgaggggttgatggtgtctattttgcttttcataaatcacaacaatttcttggtttatctcagttgcctacttttatgactaacaacgtcattaaagagcctaatattgagaaagatattgtagaatataaagcacatctaaccaaagtctttggctaa

SEQ ID NO: 297497 - DNA, 579 bp, Proteus mirabilis
atgcgctatatcattatctttttgagcctcattttatatggatttaatcttatggcttattcagaacaaacgctggtatttatccgtcatggtgaaaagcctaataatgatagcgggcaattaagctgtcagggattaaatcgtgcgttagcgttacctaatcgattgataacacaatttggtcagcctgatgcgttatttgctgcagcaccaaaacaaaataaacttggaaattcattacgctctcttcaaactttaacacctcttgcggtgaaaacatcactgccaatccatttaaattaccatgccaaagagatagacccattacgtaataaactgctgagcgaagaatatcagaattcagtcatttttattgcttgggagcatgataatttagttaaagtagtaagagatattgtggcgcaatttggtggtgacccaaaagctattcctaaatgggaaagtggtgattttgatagtatctatatattaaaaataatccaagaagcagataagaaaaaagtgctctttgagcaactgcatcaacagctaaatgatgtgcctaaacagtgtccttag

SEQ ID NO: 297498 - DNA, 3255 bp, Proteus mirabilis
atgaacaaagaaatagctttaagtcaccatcccattaatcagaaaaaaaataccacaaactctctatttcaactctcccttattacttcggcacttcttttttctggctatgctgttgcatattcagaagttggacaattaggtaataaacaaagttgggaaagccctgaatatcaaaaagactgggggcttgcagccatgaatgcctctagtgcttatgctctgggttttcatggtcaaggtgctaaagtcggggtgatggactctggtgcactgctctcacatcaagagttgagtggatcacgctttcatgcagtaaaagccaaaggtgaatatggctctacgggaatgcgctatccacaagaaatgggcggacattatgaaaaaggccaagtctttgatgttgatggtaattggatcaaaggggtgaatgatacccatggcacacatgtcactggtactgtgggggctaaccgtgatggtaatggtatgcatggtgtggcgtggggggctgatatttatttagggaatactggggcaacagacagcaataactatggcccttatcaagactacacctatttctatactggctggaaagcgatggtcgatgcgggtgcgcaagtgattaataatagctgggggactaacccgcgtattattaatacagataaaacagaggggcctgatggtggtaataccacgatacatatgcctgttaacaccacggcacagacagaatacgaatatttctactttaaaaaagtctatggtgataaaccttcctttgttgatgctgcttatgatgcagttaaaggaacgaatgttgttcaggtctttacaacgggtaatcgcgactttgctcaaccttattatcgtcctctttatccttattttaatcccgaagccgaacagcattggattgcggtggcaggattgaagcaaaatgcggataacaccggttatgtattagaaaaagtcttcaatgaagcgggtaatgcaaaatggtggacagtggttgcaccaggtcgaaatatctattctacagtggttgataaagagggaaatccaggttgggatacctttagtggtacttcaatggcagctcctcatgtgacgggggcgatgggagtattaatgtctcgttatccttccatgaacgccattcaagttcgtgatgtcatgttcactaccgctaaccatcgtgatcctgatggctctttatatgagagctggacggctgcagaaggtactcccgatgtacgttatgggtggggaacaccagatttagataaagggatgtatggtccgggtcaattgctaggtaaatttgaatataacctaaatgcgacaccgcttgatgtgtggactaatgatatttcccaaacagctttagatctacgtaagcaagaagatctcgcatggttgaaagaatataccgaaaaaggtattgcggcaggaggtgattatcatctcggtactgattttgtgattaatgatggcaatcctgatcctacatcacatattgttagccaagaagatgctgaaaaatggcgtcatgaatattaccaaaaacgcgctgatgctattcaagctaaaattgatgctggcttatatgatggtgctttggtgaagcgaggcgaaggtacgttagttatgacgggaaataatagttaccgtggtggtacaactgtcgaacaaggtactttatatggctttagcggatcttttgggacgcaagccgtcaatgttaatggtgggaaattaggtattattgagcgttataacgatacttttactcaaaaaggccaattaacctcaaaccaaaaccataaagtaaacattaatattaatgataaaggtcgttatttagtgaccgcaggacacaatgttaatattggtaacttagtgcttaatcaaggagccgatattgatgtgggggcggataatgttgggcaactaaaagatatttatcttaataatagtgttgttgtcggtgaggtgaatacagatagtttagttgataatcgcactaaaacgaaaatgttagccagtaaccgtgtggttgcagagtcagccacaaccacgactgtcaccaataatgattatgctttatttgataaacatatcacgataacagataaaaccatcagtggtagtttaactaagaaagaaaatacgactttagccacctttgctgataatgaaaatggtcgtgctattgctaatgcattagataatacaggagatggtgagctatttaatgctgtattaccgatgaatgaaaatgatctgaaaaccacttatcaatcattgggtagtgatatgtatttaaatgccaataatgccagtattgttaatgtattgggtttaactcgtacagtgaaagatcaggctattggtatcggtgatggtcgtcatgcacaactaggtaatagtaatgcgcgtatttggatcagcggcatgggtcagtggggtaagacggattatggccacagtgatatggatgttgatttctatgttgggttattaggtgctgaaattgatgttactgaaaatactaaagcgggtctatttttcggtgcaggctccaccaaatataaaggtaatcaatatggaaagatagatagtaatgatattcatattggtgcttatgggatctctaatctttatgatgttgcctcattaaattatggatttacacatacaaaccaagatagagatgccaaaagaacactctggataggacaaactgcaggttataactcaaccagttacgatgcgaaaattagtcaattctttttagaaggtgcttatactcaattgaatactagccagtactcaattgaaccttatgctggatttagttggttaagagtatccactgataatatcaatgaaaatgtgggtaatatgaagtttaccactaaaacagatgcacaagatattcaagttgctacggttggtttacgtggtggatatccatttatggcaggcaatattaatatggcattaaaaggtgatatatcagcaagccatctgtttggtgataatcgccctgaatcacgtctatggttatccaattcaggtgaggcatcactacgaggtggtaaactagataatttatttggtgttggtctaggtgttgatgcgcagttatgtaaatcaaccactttcggtatctcttatcaaggtcaatataatagtgatatcaattcgagtggtattaatgcaatattgaaaattaatttctaa

SEQ ID NO: 297499 - DNA, 579 bp, Proteus mirabilis
atgtttaagaaggcgttattgagtttaactgcaggtgcattattatttaatgctagttcagcattagcggctgattatcaaattgataaacaagggcagcatgcttttgtgcaatttcgtatccaacacttaggttatagctggttatacggcacatttaaagattttgatggaagcttcacttacgataaagaagatccttcaaaagataaagtcgatgttgtgattaaaacgggtagtttagatactaatcacgctgaacgtgacaaacacttacgtagtgctgatttttttaacgtcagtaaatatcctgaagctaagtttgtctcaaccaaagtgactcgtgatggtgaaaattatacggtgacgggtgatttaacacttaatggcgttacaaaaccaatttcactaaatgcaaaattaattggtgaaggtactgatccgtggaaagggtatcgcgctggttttgaagcaacaggtaaagttaatctgaaagagtttaactttaaatcagatttaggaccaaaatcgcaagaagcagaattaatcatctctgttgaaggtgtgaaaaaaaattaa

SEQ ID NO: 297500 - DNA, 198 bp, Proteus mirabilis
atggatagtgaggatgtttggttttatttcttgatgtgttattttcatgaacactattctgaacttatttcagttatttttattattagctttattggaattatttggggtattattcatgaaatgcgctggctatctgttttttttacactaccgctgttaatttttgtggttggactcattttttctaattcttga

SEQ ID NO: 297501 - DNA, 825 bp, Proteus mirabilis
atgtctactgcaacaaatctgaatgaactacaggaacaagttcgctcccgctataatggattaagtaaaaggctacagcaggttgcacattatcttttggataataaaaacagtgtagcatttgatacaatcgcgatccttgcagataaagcaaatgttcctccatcaacattaatccgttttgccaatgcatttcatttcaaaggatttaatgaaatgaaacttttatttcaacgtcatttaatgggtgaaatggacaatgaaaaattaacctataagcagcaatacaaaaaggaaccaccaaacttaaatgagccagattatattctgcaagagtttgcacaagccaatagccacgctttgcaacagttagctcatcaaacccataaggatatgttaaataaaactatacaactacttgagtatgcagaaactatctatataggtggttttcaccattcttttagtgctgcgagctatttttttcacgcgctttctcatatcccttgtgaaaccgtctttgttaattgcctagggggaatgtataaagaacaacttaggaatattacacatagagatgtgctgtttggcatccatttccacccttattcagaagaaatgcaaaaaatgtgtgagattgcagcttataaagaggctaaacaaattattgtaacagatagccccataagcccattagcaagtctaagtgatgtttgtttaactgtaaaagaagcacaaataaaaatgtttcgttctcaaacctcaacattatgtttactacaagcactttcagttgcattcgcttttagaaaaaagagccattaa

SEQ ID NO: 297502 - DNA, 930 bp, Proteus mirabilis
atgaaatatcaagatgtaacaaaaaccccctgtgagaacgcttattttctagtctttaatcttattaactcatcggaaacccgccctactcttatcgacttttgtaataatctatcaggtcttcttcgtagtatgagaacccgtttccctgaattagacgtaagttgtgtgatgggatttggtgctgatgcatggtctaaactattccctaatcaagctaaaccgcgagaattaaatacctttaagcaaatcaacggcgatgtgtataccgcagtatcgacacctggcgatctgttttttcacatacgggcactaaaggtatccgcttgttatgaattagccgcaattattagccaaaaattaaactctattgccacctcagaagatgaagtacatggtttccgctattttgatggtcgctcaattattggctttgtggatggaacagaaaatcctgagtttgaagatgagcgtgtcgcttatgcggttattggtgatgaagatccactgtttaccggtggaagttatgcatttgtacaaaaatacattcatgatatggcggcttgggaaaaccaatctctcatcgagcaagaaaaagtgatcggtaggcataaattcaatgatgttgaactaactgatgaagaaaaagatccaggctcacacaatgtcgtcaccaatattcaagatgaaaacggtgatgatttaaaaatcgtacgagcaaatatgccgttttcaaatccctccaaaaatgaatatggtacctattttattggttatgctcgctatttctcaacaactaaccgtatgttagaaaatatgtttgcaggaacacccgaaggacataccgataaactactgaaattcagtactcccgtcacgggcacattattctttgtcccatctccggcgtttttagatgatatagaataa

SEQ ID NO: 297503 - DNA, 1020 bp, Proteus mirabilis
atgaataagacattaataggaatagctttattttctttagccacaccatatgcggtaggctggcaacaaaattttttgcatgtaccgtcaaatggtagtactgcatcagcaacagcccctgcgcttaatgtgacagatgctaacgccagtggtgtaattaaggtgaccatacctcaggttaaagggtggcgggttatcgcttcttactgtagtggttcaggctcaatggcagaagaaggaaattaccgctattggattagattgccacaaacaaatacttggcaaaaacattcatcaggattgagctattatttgtccaatctctcttggacactagcaggtaccaataataacaataatcaggtttatgtagggccaaattattatgctaagcagtcaccgagtggttgccatagtgttggaaccgtttggggattaggttctgcagtgcttccgttagatcgttctatgtcattaactgtggcagtgtccagagcgacggcttatccgggatcatataatttaaatattccttttgcatgggcttatgaagaaaataaagggtctggtggtaacagtacgggttatcttcaatttggtaatgcaatgaagccttatatgaatagttatattaatattcctgtgagtatcacaagtaaatgtaatattaaaaaccaagttattaacttatctcatggaaatatgaccccagaagaatctattaacaatgtgacgccaccttataactatcaactaacgtgtgattatgatgcatcagtatccgtttcattaataggaagtgcacctgtttctggaaaaacggaaaactatacaaaatgtggtaatggtggctcttgtgagttgaaatataacgataccgaatataaaggtaaatttaaacttaacgcaggtgctgcaaaaacattttctatcacatcaacctttcatcctaatgatataagaaaccctgttgaaggtagttttcaaggaagtgctattttgcgggtattggttgactga

SEQ ID NO: 297504 - DNA, 546 bp, Proteus mirabilis
atgaataaaagtaaatattttatactgcctatttttttatatttactatcaggaactgcacgggcagttgatataaatatagctattacaggcgctatttatgttccaccttgtgttgttaataataatatccctatacagttttcttttaatcaaataatgacttataaagtcgatggtcaaacaagcgctatcacaaaaaatattcctattacatgtacttattttaagggctcaccttacgtcaaagtatctggcattcagttagctggagcgcctgataatgtgcttaaagtttccgcagatagcgtgaattcaaatcgatttggccttgccttatatcaaggagagagtgttgatgagaataatcctttgcgtttgaatggttcagcccctcgaggttatgccattacaaaaggtttttctaatacagggcaagacaggagccaatttactattactgctgttccttttaaaacaggtactgctgatttatctcctggaaattttacggcctccgcatcattaagcattgtttataactaa

SEQ ID NO: 297505 - DNA, 1209 bp, Proteus mirabilis
atgctaaacctgaagttattctttcagcgaatagggttattaaaaaagattaaagaagaaataaaaccggacatttcatcaaactatattttgccaatatcattaaacgatcttctcttatcatcccatcgtcaaaaattattaaagtcgctttgggattcatcttctctatctaaagatgtttacatcaatttttatcaaacaccattagaacaatgtacttttttgatgcaacagttcccgttaaatgaaaaaggagtttatagctatttggggggaatggttgattatacgcttgaagttgtaacatcagcttctaatttatctaaaaattatatacttcctataggtgcttctcctgaagaacaagctgaacaaggtattgtgtggcatgctgttattgtttatgcctcgttgttttcttgtgctgaatatttatgtcatttagaagttgaattcaaaagtggaaaacgatggtttccattgcaggaaactttaactgagccttatcgatttcgatttatttctgaaatatcacaaattcgaatgagatgctttggtgctatgctcgcatgggaaatcattccgttagatgcaataaattggttaagtcaatatcctaaagcgctcgagacgctgtcaatgtatttaactggatttagagaacaaacaggtatcgtggacgagattgtttctaaagcaattgctttaacactgtcgccatctcatagtgagatttcatttcctgaacgtgatgaattatccaaatgcgtatctttagaaaaaacagcgccaagcgttatatctggaatgcaattaaaccaagctgataatcaaattaccgatatgggagatgatttttggcaatggttaatagaggggtgtgtgaatggatatctttctattaatcaacctaatgcacaaattcacattattgcagggtatgtttttatcgttactcccaatattttttatgtatttttagatgaaatgaaattgcctaaacaagataaagataagcttcaaaaatcctttgagcgattaaaaaatcatcgtcatgatcgggggaatatgttttcttgccggttatatcaacatgaattattagaaggaaaatttaaaaaattaagtggctacttaattccatcaaataaaatatatacaattaataataagcctgctgaaaatccattactgattgctgtataa

SEQ ID NO: 297506 - DNA, 462 bp, Proteus mirabilis
atgactacaacccttaacccaattcattcattactttctattcagttcgattcaacaacagatttcataactctcgttgattattgcgataattttgtaggtgcattagttaagtttgatgattcaacgcttcaaatggcattatgttatcggcttaatgcctgtttaacgcttttgcagtctacgttagataagcctatccctcctcatttagtagaatgctttattacaaataaagtcccagtatatcttcctcactttgattttgaatgcactgaactttgtcagcattgcattacgctgactcaatttttagcagagttaggattttctaccgagaaaggaaagagtcttatttggttattgcatgacttgattaattattttgttgatgaaatgcgagcacctagatggctacgtactcttaatggagtgaggcctcttgatgaggtaatggtatga

SEQ ID NO: 297507 - DNA, 597 bp, Proteus mirabilis
atgtcaaacaatataaaaatgccaacaattcaaatttttatgacactacaagatgaaaacgatttttcaagttcacttttagcgaattttgatgacataaagtttattgatagttatgtttgggatacagataatcctccattttatgattcaattgagaaatgccattcaagattaaactcacaagctgtgattataaatcaagatattaccagcgctaaggaatacaaagataggtacactggaagacacattagtggtcaaggttacatcggaagcccagttggtaaagggttgattcagtttttgcattcatcgaaagccgaatatgcagaaaactgcctacgaaatggaagaatttctgcgacatacgacccgacaaaagatcctgaaacagaggcttttgtaaaggccgtttggaaaattttcaaaaaaggtgctaaaaaggtttaccttattgaccgagaaacgggtgaagttaatattaaaccggaaacaaactttttcgcttggcctgatgctgcaaagacttatgacggaacagatggtcgatatttaacaaatcatgcctttgcttattttgtcgctaaaccttag

SEQ ID NO: 297508 - DNA, 483 bp, Proteus mirabilis
atgagtgattttaaattttggggatgggataaaagaccacgaacgatgctgaggtttgttaaacccggagatattttttgttttcaattaaataatgaaacatatgggtttggacgcatcatttcaaaaatcatgacaggccatgtagtagagattttcgatttcgtttcttctagtccatccataaccgaagacgacataaaaaaatctaacagaaaaatcacaccagttgtaatcgatacttacgggttatttgatagaaaaggatatcccaatagtgactggaggatcattggacatcagaataactatacgcctatgaatatggacgacatatacttttcttacggagttgaaaactcatgctataaagttgacatattcaacaatgattttcctataacagaaaaagaggcgactaaatatccccgcctaatccctcattctgattatcatattaaagaattattaggagctatctaa

SEQ ID NO: 297509 - DNA, 870 bp, Proteus mirabilis
atgccaaatagcgccctattgaaaggtgatcatattgtcatcttgctattgatatcgctatgctctttttctgtttctgcaaaaaaaatcattcaaggcattactcaagatagtgaaaatattgttgttgctaaaggggatattcccactcctgaaaaatttacaaccaatattcttaactatcggcagaaagctgttgatcagttgaccttagttgaaactgcattaaaaaatgtcattgttaacagtgaaaaaatgatccgcccgattattgcattgtttggcgctactgaacgcctattaaataatcgggctgatttctttcttgaaagagaaaactcgccccgttttagtggatttcatttggttgaatatcaactctttaaattagaggatatgcaatcgtcagccgagtcagccaaggcactgttaagaggcattagtgatctaaaaaaacgcttagcgattgaagatattcccattgctaaattagtgcaatctgcaggtgatagtttagagctgattttaaccgacaaattagccggcattgaaaatcaatatgcaaaaagtgatctgggggatgggtatgccaatttatacggttcacgcctaatcattgagtctctatctaaccatattccacttcaggaatatcaatcactacgcaaacagtatgacactattagcaaactatttttaaaatatcagcgagatgaagaactattccagcctttagatacgctttctgatagtgagaaagccgtgctctttgcacaaataacacaattagcggagcaagttgcacaattacgtaacgtgctcaatattgatgtctattattactataaagaagcatatggtgaaaaataa

SEQ ID NO: 297510 - DNA, 726 bp, Proteus mirabilis
gtgattgctgctggaaatgaagaatactttcctgccaccaatgcgcttgttaagcagaaaagccgtgttgaatcactacaaaatgttattttacaacatcaatttgttggtgaaagaacaattgtttttgccaataaggagactttatttagttatcaaagtggtcatttatttattgaagggattgctcagcggctaaatatgcctatttatactgtgacggataacagtgttatacttgaaaatgaatacattatggtaaaaccgacgactgaaagtcagtttattggtcaccctttacttgctgatacaggtgcatctaatacgctacttactgaaacagtacctaatgagcctaatacaatgtctaataggcaaagagtagatattgaaaataaaaactatgctgcagaaatctatcaattcgtctcacacaattacactaattatagagataatcaagagtttaagttaggttatcagaatgagattagcactatttttcctgactattctgacaatatgaccattgctgatattttaaattacattcagttaaatcgctatcagatcaattatgctcaattaggtgcaattattaggaaagtcgatcaaattaaccttaaatatcataaagaaaaacttgcagagttcagtgataaaataataaatcacgatttacttattgataatgcaattgagaaatattttcattgttttgattaa

SEQ ID NO: 297511 - DNA, 837 bp, Proteus mirabilis
gtgtacagctttggctgggtagggatgcgactggtatctgagcacagcagcgcagcgccccataccacggtttatcatgcttacaatgaccaaagttatacgcctctagcccgcattgaatgtacggataacccgcttaatccgcaacgggcgatttattatacgcacagcagtttaagtggcttaccggaagcgttgaccaacagtgagggtgaaatcgtttggcaagggcaatacagtgcttgggggcatttacagcgtcaaacccgccccacaagcacgtttaaccgtgaacagaacctgcgttttcaagggcagtatttcgacaaagagacgggcctgcattataatacgttcaggtactatgccccggatttaggccgttttacccaacaagacccaatagggttggcaggggggataaatttatatgcttatgcgccaaatccattgacatgggtggatccgtgggggcaaaaaggttgtaaagtaactatcggtgataaaaaaactcatgatatagttttaacattaactaaatcggaatataaagaggcatttggtcatgtagctgattttataactaaaaaaggtaatgatatttttacagttgatagaaccggtgctacaaatagaagacgtttatctcttcaaaattactcaactaaaacagggtttgatagagatgagtttcctatggctatgtttaaagaagggggaaaaggagcgagtgtaagatatattagtattagtgataatagaggtgcaggttcttctatatctcatgcattatccccttatcctgatggaacaaaagtgaaaattattgtggaataa

SEQ ID NO: 297512 - DNA, 510 bp, Proteus mirabilis
atgaatttaaatgttttttttaaaaaaataaatgaaaattattcagaaatagcatcagtaagtgataaaaaaacaaaaaaaagttacttagagagtattgttacgaagacttatgaattgtactttaagaataatgaaaaatataaaaacttattaagtttattatgtgaaattgattataatcataattatgattattggacttggattgaatatgctttatttttaatggtatatgataatgatgttaaaggaaaagataatggtttttatattgataaaattaattctgctataaatagcgggagtgaacttgaagtgttcgtaaaaaaaaatgtcataagtagaataagcttgggttcttttttcaatgatcatagtaatgatggaaatattgatgcatcaatagaaaatataatgagattattaaaaatacgttttttctcacaatcaacagaagagaaaataaaggtagataaaataattgactctttaaaattaaatatttga

SEQ ID NO: 297513 - DNA, 564 bp, Proteus mirabilis
atgatcaataaaatatatgattttcagtcggatgtgactattttttgttcatttatacaggagtattctgaaggggaagaaagcattattgggagagcaatgaggcaaagatgggatgcattcgataatagctacaaagaggtatcattggagctaagatctaatgaacagggtaaaaaaaattatcaatttgattttagtagtgctttgtcgccatttatggtttttagtgaagatgcattattgtctttatctgatattttgagttcaagaggacaagtattacccgttaagacagagagcaaacggaagaaatttgttggttattatccaactaattcactttcaggatgttttgacagaacaaattctatttatcgggaatatcccaatggattaatgattgagaagccagttctcataaaaaataacattactgatgagtatctatttactattgatgaggatattagccgaatctttgttacggataaatttaaacaaagagtagaagatgcaggtttaatggctttcgatttttcagtggaaatagaattatcgtaa

SEQ ID NO: 297514 - DNA, 693 bp, Proteus mirabilis
atgtctattgcaaaacgcaccaaagacaaacgtattgcgttaggtttaacacaatctgagcttgctaccttggcgggtacaacgcaacaatcaattgaacagcttgagagtggcaaaaccaaacgccctcgttttttacctgaattagcaaaagcgttaaattgtgaattatcgtggttgctcgaaggggataataaacaaacacacgcttctgaaattcctccccaagatgaatggcattcagtcagtgaatgggataacgatacccctctcaatgctgatgaagtcgagatccgttattttaaaagtattgaacttgccgctggtgatggctgctgtactaacgaagatcataatggttataaattgagattctccaaaagcacactacgccgctatggcgcttcaccacaaaatgtgatctgtttttccgtctatggtgatagtatgtctccggttattccaaatggttcaacagtgaccgttgatacaggtaatacgcggattgtggatggcggtatttatgctatcgaacaagattcattatttagaataaaattactctaccgtcagccaggcggaaaattaattatccgtagctacaataaagatgaatttcctgatgaatttgcagaaattgactccgttaaaattatgggacgcgttattcactggtctgtgatggcttggtga

SEQ ID NO: 297515 - DNA, 624 bp, Proteus mirabilis
atgttaaccattcactcgttaactaccggtattttaaccgaggtttcattacacctagagcaagggggttgtttagggatcagtggctcatcaggtagcggcaaaacaacgttactcaatgctattgcgggttataccggctatacaggggatattgttttagctaaccaaaatatgaataaattacctgtttggcagcgcccatgtcgttatttaaatcagcgtctttatttattcccttttctcactgtaaagcaaaatttatggctggcacaatatgcggctaagcaaaagcgcagtaaagaaaaagagatagcgttacttgaacagatgggaattgctcatttagcaacacgttatccatctcaaatatcagggggagagcagcaacgagttgcattagcaagagcactcattagccaacccaaactgttattaatggatgaacccttttcaagtttggattgggaaacacgttatcagctgtgggagcttattatctcattaaaaaaacagcagataacgatgataatagtcactcatgagcctcgtgaattgcaagcattagcagataaaacgctgttattatctaatgggaaaattgtgcaagaaagtaaaaactaa

SEQ ID NO: 297516 - DNA, 777 bp, Proteus mirabilis
gtgtatcgttgggcactaataccacttttattattattatttttgatattgggatcacttattgcattaatttgccaactctcttatcacgaactcaccatggttattactgatgctgaatttcattttgccgtattgatgtcactgagcaccgcgttaacatcattgtgtttagccgtgctcttagctgtacctgcagcttgggtgatggcaagatcgtcatttaaaggacagcgttttattgatgcgttactcgatttacccttagtcacgcctcctttggtaataggtattggattattattattgttaggtcatcaaggacctttaacaggggtttttcctcaattatctcgtgcccttttttctcccttagggattattattgctcaaacatatgttgcaagtgcaatcattatgcgtaatagccttgcggcgtttaaagctattgatcctgcttatattcaaaccgcacagaatttaggattaacaccaacaaaaacgcttattttggttgagatcccactttgttggtctgtattaatcagtggttgtattgtggctttttctcgagcattaggggagtttggggcaacattaatgttggcaggggccactcgattaaaaacagaaaccttaccaatggcaatctatttaaatatagcgagtggtgatttctcgcttgcgataggttgtgctttagtactgatagcaattgcaattactctattgtttgctttacaccgtttacagcgtgataggaaattagcatgttaa

SEQ ID NO: 297517 - DNA, 891 bp, Proteus mirabilis
ttgtccaaattaagcaaacaattaaccacattagcaaaacaaggaggaggaagttttaaaaccgttgcggatcgctttaaaatagcctctcgcattgcggatagaatggcaaaactgaatattcaaattcgtgatgtaaaacatatcaaaacaaatcatatcgagctttatatcaaaagccgtcaggaagaaggcatttcaaaaagaacacttcaaaacgaaatggcaggcattaggaatattttagcagttgctggcagaacaaagcttgcctcgcctcaacatgaaaaactcagtaattatgcgcttggtttatcaaatgcgagccgtgatggtacgaaagtggctattagcgaagaacggtatttaactgctttttatcatgcagaaaagcaagatatgggggttgcaatgaccatgcaaatagcacgttatttcggattacgtactgaagaggcgatacagtcagcaaagtcattaaaaacatggcagcgtgctttgaatcgtggtgaaaaaagtgttcgtattgtctttggtacaaaagggggaagacctagagatacgacaattattgatcgtgaaaaaatgttatatgccgtcaatcaagcattgagtttagcttcccaattgaacggtaaattgattgataaacccgatttaaaatctgccatagatcgctatcgaaatgttgtcagaaatgctgggctaacaggtaaatatgcacctcatagtttacgttatgcatgggcagtgaatgcaatggattatcataaaaatcatggaatgagtgatgatgaagcgaaggcaatggtctctatggatttagggcatggtgatgggcgagggcgttatattgagcgtgtctacaataaacttgatatgaatgattaa

SEQ ID NO: 297518 - DNA, 924 bp, Proteus mirabilis
atgaaaaaggaattaataggtcgtacatcatcacggcaaaacgatctctatcgtgtagtaacaaataagattattgaagcattggaaaaaggaacagaaccttggcgtaaaacttggaatactgagaatgaagggctacctgttaatgctgcaacaggacgatattacagtggtattaatgtcatgctcttatggatgggggcgattgaaaaaggagttaattcaaaccgttggctgacttttaatcaagcaaaatgtgcgggaggcagtgttcgcagaggtgaaaaatccacattagtgacgttatttaaacctattacagaaaataaattagatagtgagataacagagactgaagataaattaattcattcatcacgctgttttatgaccagttttcatctttttaatattgaacaatgtgaaaatttaccagagtcattttatgttaaaaaaccaactctaactcattttgaacgtattgataaagctgagactatagtgataagtagcggtatacaagtgatacatcgttatcaggattgtgcatactatcatacgaaaaatgatcatattgttatcccagagatggggcagtttcattcagtggaagattactattgcacattacttcatgaattggtgcattcaacgggacatatttcaagacttgctagaaaaggaattatggcttcgttaccaatgaaaatgaataacccagtttatgcttttgaggagcttattgcagaaattggatctgcttttttatgtgctgaattaggtattcaaggtcatttgcaacatgaaagttatattgcatcatggttaaaaatacttaaaaaggatcataaggctatatttcaagctgctaagtatgctagggaggcatttgaatatctaatattaaatataaataaaaaataa

SEQ ID NO: 297519 - DNA, 312 bp, Proteus mirabilis
gtgaagaatactgttgctttaaatataaaagataaaaattcaaaagagtttttgaatttaattaaaatcgaattattgtcattgtacaatcctcatgtaggtataatagaaggatttataaaacatggaatggaaactttatttaaagatgaagacaaaaaagaaaaagcctgtggatcattaaggaaagctattattgattataactttccatttattagaacacttgaattcaatgttactgatgagactataaataatatttatataaataatatagtaccaagtgagtatatctccttccgccaataa

SEQ ID NO: 297520 - DNA, 1497 bp, Proteus mirabilis
atgtttttatttaaaaaagctgttatcgctttgtcaattaatatcgcattagtttcttcggctctggcctgcacaacgttattagcagggagtgaagcaactaatgatggctctttgattgtagctcgtagcgcagatagtgatgctttaaaagcacaacattttgttattcatccagccaaaaataatcagactggtatttatagcactcaagcccatcatggcgctaataactttacttatccactacctaaacactcattacgttataccactgtacctaattggaaaactcaattgcatggtgcaacgggttttaatgagctaggcgttggggtgagtggtacagaatccatttttgcctcacctaaagcattggcgttcgatccttatgttgaagatacggggatcactgaagatgatattccagatattttactctcaagggcaaaaactgcccgtgaagcaattgaattactgggaaacatcatcgaaacacaaggtgcgggagaagggtttggggttgccgtcgttgataaaaatgaggtgtggtacctagaaacaggtacaggtcatcaatggatggcgcaaaaactaccaaaagataaatattttgcgacgggtaatcaagggcgtttacaggcttaccatacagatagtaatgataatttaggttctaaaaacttagttgagtttgcaatagaaaaaggactttatgatcctgccactgatggcgaatttaatttttctaaagcctatacgcgtgatgatgaacgtgatctcacttataattacccgagggtttgggttatccagcaacaatttaacccttctctgaaacagaatgtggcagatggtcgtcaatttgcgcctatgctgacaccggagaaaaaagtatcagtagaagacgccaaagcgatgttacgcaaccattttgacggtacagaacatgatccttataccaatggattgaatggcaatgaaccatggcgaccaataagtgtgtttcgtacttatgaatctcatgtgatgcaagtaagacctgaattaccgcaagagattggtgaagtgacttatgttggtttgggaatggctgatctaaccgcttttgttccttattacagtggattaaaagcatatccgcaacactatactattggaacagataaagcagataatgactctatctattggaaatatcgtaagttacaaacattagtaatgacagattatcctcaatttgctcctattgttaaaaaagcataccaagaatgggaagctaaaacagcattagaacaaaaagaaatggaggctaactatttgtcaatgagtaaaaagaataaagcagcagcggataacatgctgaatgaatttaacttacgtgtaatggctgatgcagagcaactaactgaaaacttaactaatcaactctttactcttaaaactaaaaatatacaagatgagatcttttttgctaatcaatctaaaaaagattaa

SEQ ID NO: 297521 - DNA, 897 bp, Proteus mirabilis
atgcttcaagaaaatgtagttaaagatatcattgtttggatcgagcaaaacttagattcacgtttatcattagatattattgctgaaaaatcaggctataccaagtggcacttccagcgcttatttaaagcatatacaggaatatctttaggcaaatatgtcctagcacgccgtttatcttgtggcgcttatgcattgaagatcactcgtagtagccttttagatatttctttaaaataccattttgattcgcaacaaacgttttgtcgtgcgtttaaaaaacaatttaatatcaccccttctgaatacaggaaaaagcaaggttgggatattagtgagcttatctttccagcattagaaactgttgaacttaaagcaaaatatgaagtaatgaccttaccttctaaagagttgataggtatggctcatcaatacaataaaaatatttcagcatggaattatgataagaaaaaatttagaaaagaattctggaagaagtttttaaaagaaatacataccatccctacagaaatgtatgccacacatcgtgcttctgcaggctcgctagatgatacgacttatatttatacaacagcagtaagtaaagaacaattaacaagctctgctaatatttccactatgtctaacgtagaattacccaatgggaaatatttagttattactttcgagatggataatattttagattccctcaccgggtatgatgatattatttatactgtatataccaaagtattgccaaagatgaatttgctacgtcgagctggtcctgatattgagcgctataccttaaaacaatcggttagctatgataagttaatcggtcatagtgagcaacatctacaagaaattagttactatatccctgttctttag

SEQ ID NO: 297522 - DNA, 513 bp, Proteus mirabilis
atgagtaaagtgttattattaattattttttttagttattttgttagtgctaattctagtttagatgttaattttcgtgggatattaactagcaccacttgtcaattatcatctgattcattagaacaagaaattgcaattaataatttacgttggcaatatttaaatgaatatggacgtagcccaatcaaatatttttttctaaatatagaaaaatgtagtgatactgatttagcaaaaacaatttctattacttggaaaagtaacagtgtgattgtaattgatggaaataattacattgctactgatggtaatacaaatattctacttggtatcacaaatagtgatgataaattgattgagcttaataaaccaatgcagttttctcaagttgaaaaggtaggtgaaatgcaaaaaattaaatttggtgtttttgctagtaaacctaatgaacgcaatattaatattggtgattttatcagtgttgtaacattcacagttgagtatgaatga

SEQ ID NO: 297523 - DNA, 540 bp, Proteus mirabilis
atgatgagtttccatttttataaatataaattacttcaaattttaatgttttggatagcatgtgtattaaatacgaatgctgatgttcttattaatatatcagcaacaatgctagcaccagcatgtagtattacgagtactgacggttatgatccaattgaagtaaattttgatattgtcaatgttgaaaaattaaatatttcacctccaaggaaaagtttttcaatatttatcagtgaatgtgatttaacaaaatctttggcgattgttatttcacctaaagctaatggttctatgatggctaaaggtagaaatatattagcaacctcagtagagggacttggtatatcctttagcgatataacgatggataaagatacatcaatcgatgttggtaaaaaacaacaaatttatccagagatattaaataataaaggtaaaatagatatacaatctgaattaattaatacaaaaccaataaatgaattacctaaaggatttttcaatgcatcgatgtcagtgctcattacttataattag

SEQ ID NO: 297524 - DNA, 411 bp, Proteus mirabilis; identical to SEQ ID NO: 296339

SEQ ID NO: 297525 - DNA, 207 bp, Proteus mirabilis
atgaattattattacagtcagaaagagctattacaaagctcaaaagccattcagataggattagcccaaaatagagacaataaaaaatggcttgaagaaaaaacataccttcttacccatagttttgagaatgaatacttattaggcgaacaaatactgtcaatgtataaagcttatattcctgatgaattagtgaataaacgttaa

SEQ ID NO: 297526 - DNA, 1566 bp, Proteus mirabilis
atgttagacaataatttaaaagctcaactgaaagcttacctagaacgattaacccagccagttgagttagttgcaacattagacgacagcaaacattctgctgatatccaagccttattaaaagaaattgaaccgttatctgataaagtcacataccgtgaagataacagtgctaatgtgcgcaaaccatcttttcttattaccaacccagggaaaacaactggcgttcgttttgccggctcgccattaggtcatgagtttacttctttagtattagcattattacaaactggtggtcatccatctaaagaagccccagaattacttgaacaaattcgtcagttagacggtgagtttcatttcgaaacctattattcgctctcttgtcataactgccctgatgttgttcaggcattaaacttaatggcgattttaaatccgaacatcacccatacggcgattgacggaggcatgttccaaaatgaaattcaggaacgtaatatcatgggcgttcctgcggtattcttaaatggcaacgagtttggccaaggtcgtatgactttagctgaaattgttagcaaagtagatagcaatgcagaaaaacgcactgcagagttactaaataaaaaagatgcctttgatgttctgattgtcggaagcggccctgcaggggcgtcagcggcagtatatgctgcacgtaaaggcttaaatacaggtcttatcggtgaacgttttggtggacaagttcttgatactgttgatattgaaaactatatctctgtacctaaaacagaaggtgcaaaattagctggggctttaaaagctcatgttgatgattatcaagttgatgttattgacagccaaactgtcagccgtttaattccgggagcagcggaaggtgatctacaccaaattgaaaccgcatctggtgcgattttaaaaacccgtagcttaattattgccacgggtgctcgctggagaaatatgaacgtaccgggtgaaaacgagtaccgtactcgcggtgtaacatactgcccacattgtgatggtcctctatttaaaggtaaaagagtggctgttattggtggtggtaactcgggtgttgaagctgccattgacttagcgggtttagtggagcacgtgaccgtactagaatttgcctcagaaatgagagccgatgctgttttacaaaataaactgcgtagcttaagtaatgtcgatgttatcttaaatgcccaaacaacagaagtatatggagatggcactaagttaacaggactgaaatataaagatcgcactaacgattcaatgcatgatattgccttagcgggtattttcgtccaaattggtttactgccaaacacacaatggttagacggaactgttgagcgtaataaaattggtgagatcgtggttgattctcgtggtgaaaccaatattaaaggggtatttgctgcgggtgactgtacaactgttccttataaacaaattattatcgccgcaggtgaaggcgcaaaagcctcattaagcgcctttgattacttgattcgcacgactgcaaaataa

SEQ ID NO: 297527 - DNA, 411 bp, Proteus mirabilis
atgtataaagcttatattcctgaagaattccaaaaaatgggtgtagaaatttactctgtttctactgacactcattttactcataaagcatggcatagcagctcagaaactatcggtaaaatcaaatatggcatgatcggtgacccaactggcgcattaactcgtaactttgaaaatatgcgtgaagcggaaggtctggcagatcgtggtactttcgttgttgacccacaaggtatcatccaagcaatcgaaattactgctgaaggtattggccgtgatgcagctgacctgttacgtaaagtaaaagcggctcaatatgttgctagccacccaggtgaagtttgcccagcaaaatggaaagaaggtgatgcaactttagctccatcactggatttagttggcaaaatctaa

SEQ ID NO: 297528 - DNA, 138 bp, Proteus mirabilis
atgctctacgcttggttaggcttacacatgaaaaagttgcaaaaaaaaccacatgctaaaaaagtgttcaatcgtatgtgctcaagtttattagctagtgcagggattgggcttttagtttcacagaaaagccattaa

SEQ ID NO: 297529 - DNA, 1056 bp, Proteus mirabilis
atgaaaaaaaatataccttttgttgttttacctcttattattgctggatgttctagtggtggcggtgagaacaaagataataatgttattcaggaaaagaaagtcgatgttatatctaataaccctacatctagtttaaataaagaggagggtaaaagagtcaatgaagcattaaataaagaagtaaatgaagaagtaaatgaagaagtaaataaagtaacgaataaagtagtgaatgaggtggtaaataaagaagtaaatgaagtggtgaatgagatagtaaataaagaaataaatagaatagatgaaaaagaagatgctgcggaaatttcaaacgataaaggaatatccgtggatgaaaaattattatcagataataaagaaaaagtatatacaggtagtaagatagataagatataccattctaactgggattatgggaaagaaaatattcctgtttataatattgaaggttcaaaagatccatatgagaattatttatctagtgaggaaaaaataattactttcgtaacagataaaggcgattcgcatcaatttagtttattgggtgatgttggatattatgggtatcgaattgaattagatgctgatagaacagcaagttatgcttcttatatttattctattgaaaaagaccttattgctgaaaatgtgcctaatgatttaaatgctgtgtatagtaaaaaagacggttttgtgtatggtccattagatcatagatctgatcaaataaacgcagtcgttagaacagcagacattacaatgaattatactaatggcatagttaaaggtgttattactgaaaatgatccacatataggtaatgatgaattatttaaaatagatggtaatactaaaagtttagtaataacacctactcggcatgtatcaaatggtatcattcctaatgatagagcagcaatggatattcaatttgttaattctgcagaaaatatagatgatcacaaatatattttaggaactacaaaagcggagtcatgggtaggtgtattagcagcagaaaaacagaattaa

SEQ ID NO: 297530 - DNA, 1134 bp, Proteus mirabilis
ttggttgaggatcctactctattattacgattatttattcctgcattaattagaaatgatgtagaagttgctcgattacagttagcaatttcattatttgaaaataaagagaatgaggcggcattagaacaatttgataaactgaaaagcgaaagcttgaatgataacatcattgatattattaataaatattccgaattaatcaatcaccagaatgattggtcatttaatggtggcattgtttatttaaatgagtcaaatattaataactctcctaaattaggtgttaatgctgcaaattggaagagtacatcaaagcctgaaagtgctgagggtttttcttatgtaggggtagctgaaaagaagttatcgatatataaaaattacttttctttattgaatattcgaggaaagggaaaatattattgggataactctaaatataatgaaatatcttctagagtgaaagtgggattgggatataaagatttaactaatgaagtgttatttttacattttgtcgaatactcatggaatccaaataaaactcaacaaaatggttctacatttcatcgttattcaaatgcaattggaacagaggttgaaataaacaattggttaaataagcaatggaaaaattcactttcagttgagttatcaaggcaaagttatcataagacaaaactattggatggtaatgtttattctgtatctgatacactattgtatatatcaagtagtaatcaatattggttttctggaatagatttttatcataaagaagctaaaagtaaagctaatgcttttgatcgattcagtgtccgtgcaggttgggggcaagaatggttgcaaggtatttccactcgttttcaagttggttatgctaagcgtatttatcaaggagcaatagcagaagaaaataattattgggttcctgatttttataaaaaaccacaaaaaaatgatgagtatagtgtttatataacattgtggaatcgaaatttttatttttatggaattacacccaaaataacatgggcatatcaaaaaatagatagtagtaatttatttttatattatgaaaaaaaatataccttttgttgttttacctcttattattgctggatgttctag

SEQ ID NO: 297531 - DNA, 786 bp, Proteus mirabilis
atgagtagacaaaaagtagcaacacgtttacgtagagaaaataaacgtacattacgtaaagagcaacgtaatgccgcccatcgagataatgttatggttttaccaggatttggggatctagaaacaattggtatggcgagagagaaacgtgatcaacgaacactctctcctcgtaatgaagttcaacgccaatatatgaacgctattaaacatcaaaatttagtttttgcgacaggggaagcggggtgtggtaaaacgtttttaagtgcagcaatggctgctgatgcccttattaataaagagatagagcgaattattgttactcggcctgtattacaagctgatgaagatttaggttttcttcctggcgatatagcagaaaaattcgcgccttattttcgtcctgtctatgatgtattagttaaacgtttaggcgcctcttttttacaatattgtttacggcctgaaatcggcaaagttgaaatagccccatttgcctatatgcgaggacgtacttttgaaaatgcatttgtcatattggatgaagcgcaaaatgtcaccattaatcaaatgaaattatttttaacgcgaatgggagaaaatgtgacagtgattgttaacggtgatattacgcaatgcgatttacctgccaatgtaaactcaggattagctgatgcactaagtcgttttcaagctaatgagtgtgttggtgtcattaaatttaatgaagaagattgtgtgcgttccagtctatgtcagcatgtattagcagcatatagtgattaa

SEQ ID NO: 297532 - DNA, 996 bp, Proteus mirabilis
atgcccaaaactcttatgagtcttaaacaaaatgattttacgcataaaaaaattatcgtaggtattagttcatgcttattaggggataaagtgaggtttgatggtgggcataaatgttgtcatcttgctgctgatgaattatctgagttctttgaatatcaatctacttgcccagaaatggctattggtttaccgacacccagaccagcattacgattagttcagtctaagactggtgaagttaggttaaaatttagtaatggaagtgaaggtgacttaacccaattgatgaatgattactctatcgaatatttgaggaggtttaatcaatttagcggttatatcgtgtgtgcgaaatcacccagttgtggattagaacgtgtccgggtttatgatccaataggcaacggcaataaaaaatcgggtacaggcatttttactgaaaatctgaaaagaataatgccgtggttacctatagaagaagatgggcggttaaacgatcactatattagagaaaattttattacacgggtgtttgcgcttaatgagctaaatcaattgaaaataaataactttactcgccaggcattaattgattttcatacaagatacaaactattgttattagctcattcacaaccgctttatcggcaactagggcgctttgttgctaacaataaagattgggattcattagagactttctttgttgaataccgtaatcgatttatggctctattacaacatcaagccactcgtcgtaatcacactaatgttcttatgcatgtgcaaggatattttaagcaagatttaacttctaagcagcgacaagcattaagtcaattgatcttagagtatcgtcaaggaatacaacctttattggcaccattaacattaattaatcattacttatcagaatacccagataattatctgagtaaacaaaaatacttttatccttatcctcaatctttaagattacgttatggtttatga

SEQ ID NO: 297533 - DNA, 177 bp, Proteus mirabilis
atgtctacaatgaaaactgaagtcgttgttattcgtttaaccaaacaagagcgagctgcattagattcaataaaaacgatgccattacttgcagattggctaaaggagctaggcctttccaagtggaaggagcaggcattacaattagaacaatctaaaaatggtcatagtaattaa

SEQ ID NO: 297534 - DNA, 222 bp, Proteus mirabilis; identical to SEQ ID NO: 296686

SEQ ID NO: 297535 - DNA, 591 bp, Proteus mirabilis
atgatcggaccaattaatactgcaacttcgacaaatggtgccagcaacagtattagtaaagaaagtcagcaagacatagaatataagcaaccacaaataaacgaaagtgaaaattatcaaaatcaattaatagaaatatctgatgatatgtctatggtggcaactcttttttctcagcgattaggaaaattattagacaaaaaagccaataaagggcaagaagctttatatattgcagaagatggtgctgatgagaaacttgataaggtgatgcttcaatttagaaaatcggggagaagtttacaggaattattgcaatatttacgtaaaatgttccctgatcctagtgatctcgttatggttttacgagaattacttaggaaaaaaaaattaggtgcacaattagatgcaggtattgaaaatgagatcaataggttacttgcaggtgaggagggtaagcaaattaaggcgggcattaatattgctctccaagctaaagcctttgctaaattactttgtttagatgcatcagtattaagagacctttaccgtagttacattattctggatctgtctcttatacacatctga

SEQ ID NO: 297536 - DNA, 1554 bp, Proteus mirabilis
gtgctatcagataaattaaataaaccttttattctaagcagcgcagtaaaaaaagagcggatcagtggaaaatttgatatttcttcacctgaagacgcctttgaattaatggtaaagcgtttgtcattactttattttaatgacggagaatctatttatatttatcgcgataatgagatacagcaacagctatttcaagtgaaaaatatcagcttgagtaaactgaaagagtatctacaagatgttggattatatgatctccgctacccattacgtgcaggtcacgatcagcgtactttttatctctcaggtcctcctatttatattagcttagttaaggctgctgctgagcttttggataatgatgtacaagaacaaattaatgaaaatatcaataatcaagttccaaccggaagctctcgttatggcgatgagtttgtgcagatatttccattaaaaaacacttttgtacaagatagaacctatatattacgtgatgaaaaagtggttttaccaggtataacaacggttttgcaacagctatttatgccatcgggagagaaagaaaaaacagtcagaagagcgcgtgagattatcgaagataatgataaatatcaggatgataaaattaccaacgatatacaagatactcattcaccgattatcactcaaatgggcaaatataatgttgaactcgttcctttacctggatcaaatagcctgttggttaaaacgagtcgagaaggtttagctttagttagctcacttatttcacaattagataaaccgaaaagacaagttgaattgtcattatggataattgatatttctaaaagtaaagccgatagtttgggggtgaattggcaggggagttatggctcgggtaaaaatacatttttctttaataccgctagtttaagtgctgtatctggttttagttttttaagtaaaatcaaagcactcagtgaggaaggggaagctaaaatggtttctcgtcctattttgttaactcaagaaaatccccccgccatatttgataataacaccaccttttatacacaaattaaaggtgagcgagttgcttcattagaatctacaacattcggcactatgatcagtgtattgcctcgtattagtaatactaaccaagagattgagatgattatcaatcttgaagatggcgccgagaaaaaaagtgatgatgaagatagagaagaagggattgaaaaattacctgttattaatcgcacaaatatcagcactgtggcgcgagtttctgaaggcggtagtttattaattggtggatatacacgagaagataacataaaagcagaaaacaaaattccttttttaagtgctatacctttagttggccgagcatttagctatcagtcagataataataaaaaaatggtgcgtatttttatgttacaaccgcgtttattagataaaactgatacgcacggattggactctttaactgaacacccatttttaccgatggataaaaaaacatctcaagcgctaaaacaaattcaggcatttatgaggtga

SEQ ID NO: 297537 - DNA, 1419 bp, Proteus mirabilis
atgagtaaaataaaaacccgttttgcaccaagtcctacaggctatctacatgttggtggtgctcgtactgcactgtattcctggttatttagccgtcacaacaagggtgagtttgtactgcgtattgaagacaccgatttagaacgttctactcaacctgccattgatgcaattatggacggtatgaattggttaaatctaaactgggatgaaggtccttactatcaaaccaaacgctttgatcgttataatcaagttatcgatcaaatgttagcagctggtactgcttatcgttgttattgttctaaagaacgtttagagaaactacgtgaagatcaaatggcgaaaggtgagaaacctcgctacgatggttgttgccgtcacggtgatcacaaccataccccagatgaacctcatgtagttcgttttttaaatcctcaagaaggatctgtgatttttgatgacaaaattcgtggcccgattgagtttagtaaccaagagcttgatgacttaattatccgtcgtactgatggttcgcctacctataatttctgtgtagtgattgatgactgggatatggaaattacacacgttattcgtggtgaagatcatatcaacaataccccacgtcagatcaatatattaaaagcacttggtgctccagtacctgaatatgcacacgtatccatgatcttaggtgatgatggtaaaaaattatctaaacgctataacgcagtgagtgtaatgcaatatcgtgatgacggttatttaccagaagcgttattaaattacttagtacgtttaggttggtctcatggcgaccaagagatctttagcatcgatgaaatgattaaagatttcactttagaagctattagtaaatcagcaagtgcgtttaatactgacaaattactttggttaaaccatcactatattaataccttacctgctgaacaagtagccgtacacctagattggcatatcaaacaacaaaatattgatactagtaatggcccatcactggttgaattgattaaattactcggcgagcgttgcaaaacattaaaagagatggcggaaagttgtcactacttttatgttgactttgatagtttcgaagaaaccgcggcgaaaaaacacttacgtcctgtcgctcgtcaaccattagaagtagttcgtgataaattatcagcaattactgattggacagcggaaaatgtacataaagcaatccaagaaaccgctgaagaattagaagttggtatgggtaaagtcggtatgcctctacgtgttgctgtcacaggtgcgggtcaatctcctgcactagatgttactgttcatgctattggtaaagctcgtagcatcgctcgtattaataaagcattagattttattactgacagagaaaatcaagcttaa

SEQ ID NO: 297538 - DNA, 675 bp, Proteus mirabilis
atggaatattatctgcttgtggttatcaagtttattattggttttacaataattttggctcatatgaatatttcagggaagacacaactctctcaactaactcccattgattttattggtaattttgttttaggggggattatgggaggggttatttacacagatgcaatcccgctttaccaatatgttattgtctttttgataggtgtattttttatttcttttctcaattatatcagtaaaaaatttaattttttccgagcagtagcgataggtaatccgatcccgattattaaaaagggaagatttattatggaaaacattactgagaagaaaaataagattgatattcttaatatcacttctaggttacatgcccaaggaattcattcttttcaagaagttaattatgctcaaattgaacctgatggacaaataacggtggtgtgtgatggtgctaaaatgccctctatcattattatgaaagatggtgttatccgaacttctgaacttgagcagatagaacgagatgaaaattggttaaacgaagagatgaaaaaacaacatatagataacccagaagatgtttttttagccgaattttgggatggtaaagtcaatttcattttgcaagacggtaagatcaaacacgatttcattccgactgctgagtag

SEQ ID NO: 297539 - DNA, 903 bp, Proteus mirabilis
  misc_feature (855)..(864): n is a, c, g, or t
atgagtttgttatttacgcctaataaattaggacctcatcaattagacaaccgtattattgttgcaccaatgtgccaatattctgcgcaagatggaatacccacatcttggcatacaatgcactatgggcaattagcattatcaggtgccgctttagtgattatagaagcgacggcggtagagcctcgaggtagaattagctataaagatctcggattatggtctgaggaacatggtcgcgcattaaaacagcttattagcgatataaaacagcatactaatgctaaaataggtatacagttggctcatgcggggcgaaaagcatcaacatcgttgccatgggaaggtggaaaatcattggctcctgatgatgagaatggctggcaaaaagtagcaccttctagtattgcttttggtcaatatcatcagcctcaagcattaacaattgatgagattgaaaagataaaaaacgcatttgttgaagcagctaaaagagctgagtcagcaggtattgatgttattgagatacatggtgctcatggttatttactgcatgaattcttatcaccattatcaaaccatcgcaccgatcagtatggcggtgattttaataatcgtagtcgcttgttaattgatgtttttactgcagtcaaaaaagcagtctctgacaaaatgtgtgtgggagtaagaatatcggcgactgattgggttgagggaggatgggatctggaaagttctatcgcattaactcaacatcttgaagatctcggttgccattatattcatgtttcttccggtggcttatcagacaaacaagccatcaagctaggacctaattatcaggttccttttgcnnnnnnnnnnttgctcaagccatctataatgaaacacaattacccgtga

SEQ ID NO: 297540 - DNA, 135 bp, Proteus mirabilis
atgcctctcttagctagctattatgcgctgaacgaaaatattttttcaagagcaatatttgctttttatagtcaaatttatactaatgcagtgtataatatggggtatggtgatttgtcgaatgatataacttaa

SEQ ID NO: 297541 - DNA, 336 bp, Proteus mirabilis
atgcattgtggtgcatgttgcgcctattttagagtctctttctattgggctgaaatgaaaagtggtggtggtgttgttcctgacgaatttaccgaacccttaaccccttttctatcatgtatgaaaggaactaatgagaaacaaccacgctgtgaaaaattaattggtgaagttggtgaatgcgtgagttgtgcaatttatgaacagagaccatccccttgccgtgagtttgaacaatcttgggctaatggcgtaaaaaatgaagcttgcgatcgggcaagagccgcttttgggcttccccctcttcctaatatttctctaccgcattctgcgtag

SEQ ID NO: 297542 - DNA, 1008 bp, Proteus mirabilis
atgagctataagtgtcctgatattaaagatgcagattttggtggcctttatcctatgacctttatgctagtagatatattattgttacaatatctctatggcgaaaatatgaccacacgccttgaaaataatacctatggttttcattccaatacgggacgcgccgcttactctttaaaaagcatagaagataaattagtgagctgtatttgggatgcaggtggaattgatacattagatttttccctatataccgttaatcaagtcattaatctcaatgaaggctgtttttcagatattggaggattacggagtaatatctctattgcctataacactattattgaaaatgcgattggtggtaaaggtgatgacactctcataggaaatccttttgataataacctaatcggtggtgatggcaatgatttattctatggcggtgatggcaatgatttattctatggtggctctggaaacgatgttatatacggagaaatgggaaatgatgtgctctatggtgatgatggagatgatatacttattgattattatggtgctaatatgttggatggtggtaagggtaatgatcggatctgtgtagcctcaatggatagagggctccctggcagaaatatcattctagggggagaaggtgatgatgaaatatatttgggcacaggaactcatcgtataacaggtggacaaggaaatgatgcctttaattttttctgttatgagggagttgaaagcaatagttccatttgggattttgaaaaaaacaaggataaaataacgttgatcactagagattatagaaaaatagatatatcaaaaatgaaaaaagttgataagttatcaggaagtaaaaatgaattttcattaaatcataacaaaccagccaacaaaaccatcatagacgtttcaacatcttctaacgatgataagtccattgtacatatagagattgtcggtatatttaaccatgatgaactctttgcagtataa

SEQ ID NO: 297543 - DNA, 150 bp, Proteus mirabilis
atgctaaaatctaaaactatatgttttaatttatatatctttttaggtacatgcttttctggtgtggtgtatgcggatagtttttttaatcctaacttaatttcaaatattgataatgaagtagcagatttatctcgatttgataaataa

SEQ ID NO: 297544 - DNA, 693 bp, Proteus mirabilis
atgcatttaatatctaaacactttattgcgttattttttctcttcagtttttcatcgctatcatatgcgggaggtgttgcattagctgcaacacgcatagtctatcctatggatgcaaaacagacgtcaattactcttaataatacagataaaagattacgctttttagtgcaatcatggattgatgatagccaagatcaaaaaagtaatgaatttattgttacaccaccactgtttgtcagcaaaccagaaagtgaaaacaagctaagaataatttatgctggtaaggcattaccaaatgatagagaaagtttgttctggttaaatacaaaagcaatccctgaaattgagcgagaagaaataaaagataaaaatatattacagctagcagtattatctagaataaaaatttttattagacctcaaggattaaattttaacatagaggatgtacctaatagtcttgagtttaaaaaatcacaaggaaacataatagtaaataatccttcaccttattacgcgacattaattaatttagaagctgataatgaacagctaaatagtattatggttcctcctatgggaacagtaatgattaaagtcagcaagcctaactatagtcaaatatcttatcaaactattaatgattatggtgctagtacacccaaagtaacgaaacagattggtaagtaa

SEQ ID NO: 297545 - DNA, 336 bp, Proteus mirabilis; identical to SEQ ID NO: 296684

SEQ ID NO: 297546 - DNA, 1137 bp, Proteus mirabilis
atgtttgttgctgcattaatttttgttttaacgatcaccttggttatctggcagccgaaagggttgggtattggttggagtgcaacggccggcgctatattggcactcctttttggtgtgatcagttttcaagatattccgactgtttggaacattgtgtggaatgccacagcgacatttgttgcagtaattattattagcctacttttagatgaaagtggcttttttgaatgggcggcattacatgttgccaagtgggggggtgggaaaggaagattactattcagttatatcgtgctacttggtgcaatggttgctgctttatttgctaatgatggtgcagcattgatactaacacctattgtgattgcgatgttacttgcacttggtttcaacaaaggtacgacattagcctttgttatggcagctgggtttatcgcagacacagcgagcttgccgctgattgtttcgaacctcgtgaatatcgtttctgcggacttctttaatattggatttactgaatatgcatcaattatggtgccagtcgatattgcgggaattgttgcaacgcttgtgatgctacattggtttttccgtaaagatattcctaaccaatatgatgttaaaaaactgagtgagccagctttagctattaaggatatgactacgtttaaagccggttggcttgtattgttgttattgctcattggtttttttattttagagccattaggcattcctgttagtgcaatagcggcaattggtgctttaattctttgggtaattgcagccaaaggccgtacgattaatactaaaaaagtgttgcgtggcgcaccgtggcaaatcgtcattttctctttaggtatgtatttggttgtttatggtttaagaaatgcaggattaactaattatctttctgaaatacttaattaccttgctgataaagggttatggatagcaacaattggtacgggatttattaccgcctttttatcatcaataatgaataatatgccaacggtattaattggtgctctatccattgaaggaagtgacgcgacaggggtaattcaacaagcgatgatttatgccaatgtgattggtgctgatttggggccaaaaataattgagatctaa

SEQ ID NO: 297547 - DNA, 180 bp, Proteus mirabilis
atgtctaaaaaagaaataccttttatgttagataattcttttttatataattcagcagagcgttttcttgaagctatagcatcatctatatattttaaactagctaagccatatgcagcttggatttcatttactttagcattagagcctagcattgtaatttcggtttctgattcatag

SEQ ID NO: 297548 - DNA, 630 bp, Proteus mirabilis
atgttaagtcaggtaaaaaataataaagcagattttgatgctatataccttttaacattaaggcttactgcacttataatatttccattactaatcggtttaggtattattgcacaaccttttatactaattgtattaggtgaaaaatggagttatgctgcaacattactcagcatattatgtataggctatatgttatatcctatacatgcaataaatttaaatctcttacaggtaaaaggtagatcagacctttttctaaaattagaaataataaaaaagatacttgttactattatactaataattactgttcctttaggtattgaagctatttgtataggaatagttatacaatcttatttagcactattgattaatacatactatacaggtaagttaacatctataaatataaaaaaacaatttaaaaatttatttcctatttggataattactatcatttgtagtctagtaagctggagtttatcctttaattttaaaaacatttatattcagttaatattaatattaacaataacacccagcatgtatataatatctatccgtatttttcaatacgagttattcaatattattatctccaatatatttaagaagaaaatttaa

SEQ ID NO: 297549 - DNA, 912 bp, Proteus mirabilis
ttggcaacggcattaattgctggctcagtgcttttttctggcctagccatcgagcctaagtcattattaaccataggagcatacgatctaactgtttcagggagtgaattgtctcatgtcagaagaacagaaatcacgatagataagtttattgctgatgctataaatataaactatggggatttagttaatgttgtatttattcataataatgaaaaaatggtattaccaacttatgtacgtggtatttttaacacacaaataaatagttatccttatgccatgatcaaaattccattagaaacactacaatatataaaaaaaagtaaaagtgtctcaaaaataaatattctattaaaaaatgtgcatgatattgatagcgtaatagctaaaataacaaggattaataaagaaaaatctttaaatttgcaagtgatccctgttattgagagacaaagttatattatttctattgtgacattctttaagtggtcaatgctattattgtatagcattattgctatttattattattttttagtgaataaaatcattatcatcactatcaaaaaagctattggtgatctgttcgaatttaatcgattaggtatttggcgaggtagtttttctcgattatttattttattggctatttttatgactataacaatttctataacgatattattaactcatcagctattatcttggttgattaatttgaaacaaatcaatatttctttatctgataataatagctattcattaatgctcccttggctatggcaatatgatgctatgtttaaaatccctctattattatttttttccgcaacaatcgcttcgtgtaactctatttttaaagttagccactatttacaaaaatatcaaaaaaataatattactatttag

SEQ ID NO: 297550 - DNA, 600 bp, Proteus mirabilis; identical to SEQ ID NO: 296655

SEQ ID NO: 297551 - DNA, 411 bp, Proteus mirabilis
atgcataatcagatattaaaaaaactgccacaaatagagcaaacgcatcaaataaaactactttatgtcgctgaaagtggaagccgtgcttggggcttcgcatcaacggatagtgactatgatgtacgaggtatttttatacgacctcgcaatgcatatctttcaattgataaacctaaagaaacatttgagtggatagaaaataattggtttgatgtaggagcttgggatattacgaaagcattgcatctattacgtaagtcaaatgctatcttatttgagtggttacaatcacctattgtttatcaacaatatgctggtatccaaaaagaattatttgagttggcacaattatattatcaaccccaaactcccctaatgctcgagaaaaagccacaatacaaccactga

SEQ ID NO: 297552 - DNA, 792 bp, Proteus mirabilis
atgaatgcctatatagataatactttaaaatttaaaaacattattttctctaaccacattcttttgttaattagaaaagattgtgaaatatccataacaaaagataatgttaaatatcaaatagataacgacagtatcgtttttataaaaaaaaattcagcattagatattatcttaggaaaaaataaaatgcctgaatttatatttttatctcatgaagttatgatggaagtattaaaaattactattaacaataaaaaagaggaagttactcaagataataataaagatagctttataaaacaagcaaatcatgaagatattctatttttcaatagattaaaaaataaatttaatgatgaagtcattacaaataacaaaacttcgcttagtcagatactaaaaatcgcatatttactgttaaactttgatatacctaaccttatattaaaatcaaaaccagaattaacatcagtaaaagtaaaagatattattattagtgacttacaacatagctggtctctaaaagagattagtagtaaattatttattagtgagtcttcattacgaaaaaaacttgaagcagaaaaaactaattttatgactttattaacaacggtaagaatggcacacgcaatgaatcttctggctacaacaaatttaacaataggacagatatcttcattgtctgggtataaaaatacttcctattttattaaaaaattcaagaagtattataaaagctctccgaaaaaacttaaatgtctaaattatagggataagataatttaa

SEQ ID NO: 297553 - DNA, 681 bp, Proteus mirabilis
atgtcagctattttgcttaaattaactcggtattctatatcagaaatatctaatgattactcttttacttctcagcagaatttttcaagagcttttaaacgatattttaaggtaacgcctgaattttatagaaaaagtaaattttgggattttagatattatcgacctcaacataaagtatttgattttaaaaaaataaattgtcagttaatttatttatcaaaagatagattgcttgataataattctgatgattttaagttttttgatatttctattccttttgactttaagtcaaatattgcaatagaggggctaggctataaaaataaaaaacagattgaaataataaaaagtcttgttgattcatcaaatgataatttgtgtgtatcttataattatttccttagtagtaaagttaaaaataaaattactgtaaaatataatataaaatatattcatgattataatttttcctttaataaagaaggtctaaagtattatctattttcatttttaggctcttgggaagattatatgattttatccaatattatctatatgagagaattaccgctattgcaagccaagagaagagatggctatgatatagaaatatttaattcaggtaaattagataaaaacatttgttctttaaattatcttatccctataatttag

SEQ ID NO: 297554 - DNA, 1113 bp, Proteus mirabilis
atgtttaaaaataatgttcgtggctttatcccacctgaaaaatgggataatggaattaatgcgtttttactaaattataatttcacaggaagaaatagtaagaactttaaggataacgttgataataagaattattttttaaacttaactcctggtattaatcttggttcatggcgatttagaaatgaaagttcatggaactatgccagtggtgaaagtaagcaaaataaatggaggaatataagaacatatgtacaaaaacctattattccattacgtgctgaattaacccttggtgactctttttctaatggaaccatttttgatagtcttggttttagagggattaagctagaatctgatgataatatgttgcctgatagcatgagaggatttgcacctacgataaagggtattgcgaatagcaatgctattgttacagtcaagcagaatggttttgttatttatcaaatttctgtacctccaggtgcatttgaaataaaagatctctatgccacatcaagtagcggtaatttagatgtcacaatcaaagagaataacggtaaaattacacaatttgttgtaccttattcaaatgtgcctattttacaacgtgaaggacgcttaaaatacgaattgattggaggggaatttcgtagcggagcagattatcaagataaacctaattttggtcaattaagtttagtatatggcttaccttataatatgacgttatatggaggaagccaattttcaaataattatcaagcctatgcgattggtttaggtggtaatctaggcacctttggggcgatatcagcagatgtaatacaggcgaatagtatattgccaaacgatgagcataaaaaagggcagtcattccgattactttatgctaaatcgattaatagcacaggcactaactttcaaataatggggtatcgatattcaacgcaaggctattataccctaaatgaagttagttataaaaaaatggcagggcgtgaaatagtaacagataatggaataataagagatgaggataacttatctaactactataatttaaattattgtcttcaaggagagttcctgttagtcccacttgattga

SEQ ID NO: 297555 - DNA, 651 bp, Proteus mirabilis
atggatagtagttcaagcttctctggctattatggacgctatacttcaatcgctaatattaatgcgaatgccactatctcaaataaaaatacctcatcatttggtttttctgctaatgggggcttaacgattaccgctaaaggagcagcacttcacccagatggatttaatggtggtactcgcttattagttgatactgaaggtgttgcaggagtaccagttgatggtggccgtgtaacaaccaataattggggttatggtgttgttaccgatattaatagttattatcgcaatgaaacaacgatcgatttaactaaattacctaataatatagaagcgacacaggcgattgtagaatcttcattaactgaaggtgctattggttatagaaaatttgaagtgttaaaaggtgagaaggcctttgcaataattaggttagctgataactcttatccaccatttggttcaataattagtaatgctaaaggacgagagctaggaataattagtgatgatggttttgcttggctaacaggtattaacccaaatgaagaaattagagtatcttggggagctgaacaacaatgtgtcgctaaacttccaaataaaatagaaccgagtaataagatattattattgtgtgaaaaataa

SEQ ID NO: 297556 - DNA, 489 bp, Proteus mirabilis
ttgatagaattaaaaaataaagttcctgagattttcagagatgcggaatatgttgaatgttataagcaaaaacttaattcattcgcccatttctcaatacctgttggtgttggcaaggttgaagacggccaaaacactgttgatacggatctaatggtcttctcttacaaagagatattggcgggggtttatgcttcagaaggggtaattaaaaggatcaagcaagcagaaaaaaattcacatcaaaagatggattttagtatcagcattattcttatgcccggtaacgtgaaaatggataaggtagttgcgttaggcgtgacatttacaggagatacatctaaaaatgatccagtattaataagcagaattaaatttggcaataaaccactgacttttaaattatcagatgtgtcagtaaaccaattaatgcaatacggtatggttccattcttagtaactcctgaatatttcacactatataagtaa

SEQ ID NO: 297557 - DNA, 315 bp, Proteus mirabilis
gtggctattcctcaattagaagcattgggctatgaactcattattcgtgagccttcatggtatcagcaccgtatgcttaaactgagtaatccgatggttaacttacatgtatttggaaaaaattgtcccgaacattggcgccacctattattcaagcaatggttaacaacacatcctgatgatttagccaattatgcggcgattaaacagcttgctaagcataatgtaaagacgactcaagattataacctgaaaaaacagagccttgtacgtgcaatttatcagaagatttttacctcattgattggcgactaa

SEQ ID NO: 297558 - DNA, 351 bp, Proteus mirabilis
  misc_feature (329)..(338): n is a, c, g, or t
atgggattagatattgtcatgtttaaagatcaatttacaccacaacaaaaaatggatatttgcacttttgaagaaggtgatccgacggaaaacccttgggttaaagggaaacctgcccaaatacacattgaaattgtcccccataatcctaattggcttatacaatttaatgaacaaaaatcgttaattcagaatgcattgtcagatatagcattatcaattgagcacataggatctactgcggttgcaggattggctgctaaaccaataatcgatatcgatttaattatagaaaatcctaaagatgaatcatcttatattcctcaatnnnnnnnnnnacctggctactaa

SEQ ID NO: 297559 - DNA, 291 bp, Proteus mirabilis
atgacaatagaagacgagagttttatcactaaacataatagaagaatgcaaaatatttttactaagaatgaaaatagtgatgaaatgaaatataccattgctaatactattagaaataattatgaagatattttagaacaaatagacaataagtgtgatgatcttaaagataaatataaagatattttactggatgttattgattacttaagggacgataaggattggaattttgattcattaataatccgttacagctatttcatagataattacttacacctattttag

SEQ ID NO: 297560 - DNA, 210 bp, Proteus mirabilis
atgaatattagtttaatcgcagcattagcggcggatcgtattattggtatggaaaaggcgatgccttggacattaccgggtgatctcgcatggtttaaaaaaaatacattaaataaacccgttattatgggccgggtgacttatgagtctatcgggcgtcctttacctaatcgtctcaatatgctgaaaataatgatgaaatcatggtga

SEQ ID NO: 297561 - DNA, 210 bp, Proteus mirabilis
atggtgattggtggcggtaaggtttatgagcaattcctaccaatggcgaataaattataccttactcatattgatgctgaagtgattggtgatacaaccttccccgattatgagcctgatgagtgggattctacttttatggaataccatgaggcagatgaaaataattcgcataactactgttttgaaatattaaaaagaagaaaataa

SEQ ID NO: 297562 - DNA, 756 bp, Proteus mirabilis
atgcagagttatcactctctatcggctcaagtttatcaattggataaaccgataggatgcagtttcggcgatgttgaatactatcaacagcgattaaaagatgttaaaggtaaaattttagagccggcagtaggaacaggacgtatccttattcctttattgcaatcaggttttaatattgagggatttgatctttccgaagagatgcttgaattttgtaagaaaaatctaatcgagcatgggtttacaaccaactacgtaactcaaaataatttagtcacttttgaagtcaatacccctgtcgaggctattattattcctacagggacattcctcttattaaatacgcaacagcaggcgatccaagccttaaaacagtgttatcaagcgcttgagtttggtgggcgcttattggttgatattagtcttgcccatcattttgttaaaggtgaatgtactagtcgccaatttaatacaccagaaggcgatctaattaccttacagataattaatgctgaaattgattatataaatcagttaactacttcacaccatcgttatgataaatggcgagatggcaagatcattgaaagtgaatgggaagttttcagcttaaaatggtttggtgtgtctgaatttgaacaaatactacgcttgattggttttaaacagatcacaatatcagccgattaccagtatctgcaaacccccagtaatacgacagaaattatgacttttgaagcgtataaaaaatag

SEQ ID NO: 297563 - DNA, 363 bp, Proteus mirabilis
atgggcatgggtttagaaatatatgatgagaaagggcgactcattattggagaagacactattataccgcgccacttggggcaatttgaccttcctttgtcccaatatggatctcttactattcctgagatttccttaggaggtgaggttgtttgccatttctggctacggtatcgctctcgatggagtggtgagtttcatgtagataagcctaatgagagaacagaatactccatatctggaaatacgttaaactaccgcgttgattacaatatctatcgctgggagaacaatggctctggtggcgggcagacacaagcgaatgactcattctcaagtcatgttgtcgtatgggtggtgtga

SEQ ID NO: 297564 - DNA, 615 bp, Proteus mirabilis
atggttggtgtagaaatttacacaaataataggctgatacaattaaccgataaactcgaaacaatatgtgttttgagaaaagcaactcctgatgaactaacgtcatcatcaggccctcatgatagctatccgagaatctatgcgttaaatagccaatggatggttgctccgatttccaaggtaagcatacctcaacacggagttggtcttgaagtttatgatgagcaagggaaaatgaaattttcatctcttgctaagttggtctgctttgagaaatattatgatgtcaatacggggagcgctggcaaaggctcattaagaatcgcaggcaaaagtggtcatcggtatggcatgattaagactcgctctatggggtattttcataatacaaacatacgaagctacatagaccctgacacgtgggatgaagtttggacattcaaaagatatagcgagcgttatgtcttgattgatgatgtgggagggttaacatttgagtatcgatacgagttcttaggagaagaggatggctggataagtatgcctccgagtcgagaaggttctggattaatggaacaagggcttatgatagacgtttcaatgttagaagattaa

SEQ ID NO: 297565 - DNA, 1005 bp, Proteus mirabilis; identical to SEQ ID NO: 31749

SEQ ID NO: 297566 - DNA, 936 bp, Proteus mirabilis
  misc_feature (908)..(917): n is a, c, g, or t
atgtattatggttttgatatgggcggcacaaaaatcgagctcgccgtttttgataaagatctgactcaagtatggcaaaaacgtgtaccaacgccaaagaatgattatcaagctctattaaatgtttttaaaacactcactttagaagctgataatgatttaggctgtaaaggaaaaataggtatcggtgttcctggcatcgtcaacgcaaaagaaggaactgtatttaccaccaacgtgcctgctgccaaatataaaccgatgatccacgatctggctaatattcttgaacgccccgtcaaagttgagaatgatgctaactgttttgccttatcagaagcatgggatcctgaatttcgtcattatccttcagtactgggtttaatattaggtacgggtgttggcggtggttttgtcattgatggcaaagtactctctggtaaaaatggtattgccggtgaaataggtcacatgaatcttaatgtagatgctgataatgtgattggtgagaccatgccaaaaatattatgcggttgtggtagaaaagcctgctttgagacttatttatctggtcgtggttttgaacgtatgtataaagcctttaatggttcaccacaaagagcggtagatatcgttgcacaatattatcaaggtgatgaacagacccaacagcatgttgaccgctatatgaaagtattagccatttaccttagtaatattctgactgtacttgacccacatttaattgtcattggtggcggtttatcgcaatttgacgcactgtataccctattacccgattatctctcacattgcgtatacggtaatacgcaaattccaacaatagaaaaagcacgttatggtgatgcgggtggagcaagaggtgctgcctgcttaaatttattagnnnnnnnnnnctcaaatttattagactga

SEQ ID NO: 297567 - DNA, 813 bp, Proteus mirabilis
atggttagagtaaggcaccatacctcagttgaaggcctagaagggataaaaaacacacagtcaatcaaccctgcaagaggaacaccaataggagtgcatatcgagattgctccgtttggagatcccaaaacggcaggtgcagacataggatcttggaaaagtggttcatatgttgagtttgaggttccgaaggaaatgatagttgaaactaacgttgggccaagaaaaacaggggtcataccaactgaacagccattatctctacataataagaatactgtgtttaaaaaaacaatcttggtggtctcgtttaacagaaaaaggttgtcgataatgaatatttactatgataataaacttttattagccttgtattcatatttacggcaaactgagttatccatagatagagggttaaatgaatggaagaatgctagatcttacttaaaacatcgctatttagctgataaactaatcatggcattggctataaataaaacactacatcagaagaacacctttagtaaggtatattgctatgcatacctaaagttacgacataaacaatatttgacacgacaagagtctgatacaatatgttgtttattaagaactattggaagttatctttctgaagattcacctgatagatctaatttaattaaactaagaatagaactgtataatgctgcaaaattagttagaaaaaggattaccaataataatcgaataatattagctgatagagtagagcattataatcagcatttgcatggtactttttattctatagaagaaataactagtttatag

SEQ ID NO: 297568 - DNA, 921 bp, Proteus mirabilis
ttgaagagcaaaaatcagttttgggctggtattggtttaaaaatattaggcggattattaacgcttgttgcaggtgtttcttctatttttaccgctggctcttcaatggtattaataggagtcgcaacaaccttatttgttgctgatgctgggttaactattgctgatgaagtgtatcaatctattcataataaatcttttatggatgagattatgcaacccatatcagatgcggttatggaagctatcgataaggttagtgattttctagtgagtttagttaatagttctttggatggactcaaagaattagggctagataaaaaaatcatcgaagagatgaaaaattcaatacaagacaaattgaaaatggcaactaaaatacttgtcacagtcgttttatttgttgccgctacggcattgagttttgttattggacctgccatgaaaggtatttcagatgcggttaataaaatatcgaatcagcaaattagacaaatactaaaaaaagtgctcaatgatggacttgaagcggtattggggaaaatgatcaaagatatcattattaaagcgcttgaagaagcactggaaaaaattgataagcagttagctaaagagatttctaaaaaagcaagtattatgttgaatagaacggtggttgcttctaagttaaccaattcagcagcaacaaatactgttaatatttatggttctgttatcgcgtcaaaaataatccagtctattgccggtagtaaaaaattaactgcggttttagatattattcaaaaattaatggataagataatggaaacttatcatgagaatattgattctataacagatattttaaaaaacctcagcgataaatcttcagtaagtaataaattaaaatcagacatgataagaaatatatctatttaa

SEQ ID NO: 297569 - DNA, 309 bp, Proteus mirabilis
atgaatatcgataagaatagaggatctgattctttattattaaggaagaatattggaaattttattagagaatctcgtatacgtaaatctctaacaggagcccaattaggcgaattacttgatgtgagtcagcaacaaatatcaagatatgaaaatggaataacaagtatcaatattgaaacattagatatgatattaaaattattggatgctgactggtctgagttttatcgaaaagttcttgtcgtagatattataaaacataaattaaaaaatagtgattcgtttccattctatttgcgtgtttag

SEQ ID NO: 297570 - DNA, 285 bp, Proteus mirabilis
atggaaagagaaaaatacgaaattgataaaacttacgatactaaagctattcatcaatacttagggaaagagatccgttcaaaaagaaaagcgataggactaacaggtgaagatttagctaaaaagttaaatgtcagtcaacagcaggtatctagatatgaaacagcagagtcaaaaataagctttgagaagctattgttaatatctgatgttctagatcttaatattcaatatctattaaaagttatcatcagtgataaatttaaaattatttctggtgattaa

SEQ ID NO: 297571 - DNA, 495 bp, Proteus mirabilis
atgaaatttaataaaatagcattaacagttctattagctacttcagctatttctttaaatgctatggctgataattctaatacaggtgttatcaagtttagtggtactgttgtaaatactccatgtaatattgatcaagaatcattagagcaagatgttaagtttggccagttatctcgcaaatcattagaatctggtcaggccgcggagaaggagttttctataaaatttactaattgtaattttgatgagtttagtaaagatgcttcaggtaaaacattgttagcgacatctacaggaaatacaaataatttaggtattgcaatcgatggttttgaatttggtaagccaacagatgttctatcacgaattgttaataaaattggtgataatactttaacatttaaagcattagcaaaagtcgtcgatccatctaaagatgtggtagaaggtacatttagcgcgatctctaatttccgcattacttacgaataa

SEQ ID NO: 297572 - DNA, 567 bp, Proteus mirabilis
atgaagcaacgtaaatttcttacacgttttgaagtgaatgctattttaaagcaggctaaggaaggtaggtatcccgaaagagattactgtatgtttttaatgtgttttttacatggttttcgtgttagcgaactatgtaatttaacattaagcgatattgatctagaaagtagaatactctatgtcaggcgtttaaaaggtgggctttcaacaacacaacctattattgatgaggaatatgaagccttatgcaactggttgaaaagtagagaaaactggagagaatcagattctgaatgggtatttttatcacaaaaaacgggccccatttcccgtcaacaagtttatgggttattacgccgtttaggtaaaaaagccaatgtttctattagtccacaccctcatatgttacgccacgcctgtggctacgcactggcggatttaggcagagatacacgtttaattcaagactatttaggccatcgcaatatttcccatacggttatttatacagcaagtaactcaaaacgatttatcaatatgtgggaaacgcgaaactcacaatag

SEQ ID NO: 297573 - DNA, 864 bp, Proteus mirabilis
atggaaaaatcccgcacaacattagaccaatggatcaccttacaagctgttgttgattacggtggctttgctcaagccgctgatgtgttacataggactcaatcatcaattagctatactatcaataagttagaacaaaccttgggtatagaaatactttctttagaaaaaagacgcgcagtattaactactgagggagaactattgctaacactttctcgagaagtgacagaaaaagcattatctctagaaaaaaaggcaaaaaatatcaaatttaacaataagttaagaattaacgtactaattgacccaatgtatgtcgctgatctttttttaaataaaatctcacaatttattaagcagaataaacagtatgatattaatatttataggaattctctcaacaaatcagaaattttagcgcaaaaagaatatgatttaattgtgtcaccttattatattaaatcactgcaacctattgttttagaaagcattaaaaccgccttagtaacacatccagatagcccattacagaaactacaagatgaggaattattgcaggaattacaaaaacatagctgtatttctctttctcctgattcacccgatactgataatcaggcccaagtcattcaagttggctctgtagagacagcaattagcttaattcagcatggtttaggttatgcacgtctcccccttatttttattcaagatgaattgaataaaaaaacaataaaacaattaataacgcataaaaaagagaaggaatataaattctatttatattttaataaaaattcatttattaatgaaaacttgcaaagtttattatcaacaattagctattcaacaaatatctaa

SEQ ID NO: 297574 - DNA, 249 bp, Proteus mirabilis
atgaaggttcaccataaggaaaaaaaagtctatgcaggtattgcttcctcaattgccatgagcaatattccttatcttactcatcatacttttagtggtggcctcggtattagtaattatcgtactggcatagcacttgctggaggtatccaatatcagccaaataatgatatagcatttcgatttaactcatcaattaatagtgaacaagagcttatttttggcggcggattagcttatggctggtga

SEQ ID NO: 297575 - DNA, 399 bp, Proteus mirabilis
atgagtactaatgtagctataagtttatgtgtttatagtaatccaacacaaacaaaatatgatatagatacagggttgaatgcagtaacagagtattcaaaactgaaatctgcatatatagttggaattagaaatattaatgggaaaattttagctactagtgtttttgtatccgatatcgataataaaaacgacccaaaattagctgatgtttcactagaaatattcaaacttcatagcccaacaaaaaacctcgtatcacaaatacactctatgcctattagtaaattgaaatttaatttagaaaagggctcaataaaagacgctttttcagaaaaagaaattgatgttctttatgctgatttttatatgaaaaatagcattgatggtagaagctaa

SEQ ID NO: 297576 - DNA, 195 bp, Proteus mirabilis
atgggttctgcttgtagctccattgccaaacgcgcatttgacactacagccggcacatgcaaattaatactgcaacctgaaaacttattggcgatcaaagcggcagattccgcagtagtaaaatcaggttgtggagctacagccccaatcatttgtaacacagtgacattttctagtgttttagtggggagatag

SEQ ID NO: 297577 - DNA, 777 bp, Proteus mirabilis
gtgaaagtaaaagatgctgaagatcagttgggtgcacgagtgggttacatcgaactggatctcaacagcggtaagatccttgagagttttcgccccgaagaacgttttccaatgatgagcacttttaaagttctgctatgtggcgcggtattatcccgtgttgacgccgggcaagagcaactcggtcgccgcatacactattctcagaatgacttggttgagtactcaccagtcacagaaaagcatcttacggatggcatgacagtaagagaattatgcagtgctgccataaccatgagtgataacactgcggccaacttacttctgacaacgatcggaggaccgaaggagctaaccgcttttttgcacaacatgggggatcatgtaactcgccttgatagttgggaaccggagctgaatgaagccataccaaacgacgagcgtgacaccacgatgcctgcagcaatggcaacaacgttgcgcaaactattaactggcgaactacttactctagcttcccggcaacaattaatagactggatggaggcggataaagttgcaggaccacttctgcgctcggcccttccggctggctggtttattgctgataaatctggagccggtaagcgtgggtctcgcggtatcattgcagcactggggccagatggtaagccctcccgtatcgtagttatctacacgacggggagtcaggcaactatggatgaacgaaatagacagatcgctgagataggtgcctcactgattaagcattggtaa

SEQ ID NO: 297578 - DNA, 897 bp, Proteus mirabilis
ttgttaacgttatggcctttatttgcgttaattgcgctaggcgctattttaagaagaaataaagcatttgaacctgcattttgggtagggactgaaaaattaaattattttttactctttcctgcattacttctcaatagcttggctaatgctcctttatctgatcctcaattacctcaccttgctggggctattttctcagtagtcattattaccactattttgtgtgttatttttaaaaaaataaccggctggtctgctggccgctttggtgcgatcgttcaaggcaatattcggtttaacacttatttaggtttagctattgtcgctgatttatttggcgttgaaggtttaggaatagctgctttgatattagcaaccttggttcctctatcaaatgtgacttcagtgctttgtttaaccgcaggacaaaatgtaacttttcgtcaattaatcttcccaattattaaaaatccattaattatctcttgtgtaatagggattgtaatcaatttatcaggaatagggcttccttttggtagcgatcaatttctaaaattgttagctgcgactagtttacctttagggcttatctgtattggtgcggcattacatttatcaacactaaaagcagaaagtaaaatgattagtattaacacagtgactcggttgcttattgtaccgataattgcatatagtgttgctaattttttaggtttgtctccattagttatgatgcttttagtcattttcttttctatccctacagccccaacttcttatattttaactcgacagctaggaggggattctgagctaatggcggggatcattacttcacaaaccatgcttgcagcaattaccttgccgatcgtattaagttttttaattccataa

SEQ ID NO: 297579 - DNA, 216 bp, Proteus mirabilis
atgttctcagaaagacaatcactggtttctcagttaaaaaatacccatcctcgtttccaagctctctatgataaacaccatcgacttgatcaagaaattgctaaattagaaggacctaatggcgcaggctacaatgatgaagttgcaaaactaaaaaaagaaaaactctatctaaaagatgaaatgcaaaaaatacttcaacaagctgagaaataa

SEQ ID NO: 297580 - DNA, 504 bp, Proteus mirabilis; identical to SEQ ID NO: 52325

SEQ ID NO: 297581 - DNA, 333 bp, Proteus mirabilis
atgagtcatgctatagaatttattgaaacctcaatatttactcagcaaatcaaactattggctacagataaagaaataagaatacttcaaaatgaacttatcagtaaacctgataaaggcgacttaattaaaggaacaggtggattacgcaaaataagaatggctgtaggtaacaaaggtaaaagtggggggactagagttatttattttttagcgactaaggaagttatctatttagttatggcgtatccaaaagcaataaaaattagtttaactgattcagaaaagattgagttaaaaaaactaacaaaaaaacttaaaggtgaacggtga

SEQ ID NO: 297582 - DNA, 534 bp, Proteus mirabilis
atggccatttgttactatggtaaagtggataagctggcaattgttgctggtcaagatcaactagattatcctgaaataaaaaaactgttgtccagtgatgtggttaatatgcaacaacaggcattattcgatcctgatggattaaagacctggatcattgaaaatatcaccgctgactggttaatggattttattttgaattatagtgctgatgttgatttggctctttatcaagaaaataaattttttcctgtttatcaagcttgtatgaaagaagcatttaaatatggaaataagggctatgctcaagatttattaatcacgatgcaaccttggggatttactccagaaatgattagcacacctacaacattatggtatggactaaaggatacgagtactgttcactcgcctgattttggcaagttattgtctcaacgttttccccatgcacaacgttatgtctatgataatgaaggtggctctttgttgtggactaaaacatcacagattttaactaatcttattagttaa

SEQ ID NO: 297583 - DNA, 678 bp, Proteus mirabilis
atgttaataaatgatataagaatatacgatgataaaacgactaaaattataaagggaaaggcttttatttataattcaaaaaatgaaaatgttatttttcaatcagaaaatcagtcatggcgtattgaaaagagatcattttttatttgtgccagattattggcatttattgattatgctagagatttttcaaaaatgacagcagttggcactaattttgatattaatcaacaaattttttatataaaagaggggagtggaacattagaacatctgattattaatgaggcactgaaagatgaaagccaattagaacctctttttgtgacaataagacacagtgaaagttactggcttatattacatctgattagttatttggatgaaaaaaaaagcaatattgcacaaataggtgaacgatatggtgtatcagggacacattttagacggctgtgtaaacgttatttaggtaattgtggtaaaagtcaattacgttcatggcgtgcggcatcttctattttgacaacgctatcaacagatgaatcattgactcagattgcagtcgataatggttttagttcagcatctcatttttctaatgaaattaagacattatttggtattacaccaactgaatttcggcgaattggccaatatctttatgaacataaaaaataa

SEQ ID NO: 297584 - DNA, 573 bp, Proteus mirabilis
atgtttaatccatttaatccaggttattatactgaagcagaactttctcagttcggttttaagaatattggaagaaatgtttctatagctaaaaattgtactatcttaggcctcaataatatcaaaattggaaataatgttagaattgatgggtttacaaccataatagctaatggaaaaggttttttagatttaggctcatatattcatattggtggatattctgcaatttttgctggctcaggtgtcataatgaaagatttttcaggaatatctcaaggggttaaaatttatactaaaagtgatgattattctggtaataaaatgacaaatcctacaatcccttcaaatttaacgggagtgatcgaaggagaggtaatattagaaaaacatgtaatcgtaggttctcaatcaattatactcccgggagttactttaagagaaggaacagctattggagctaactcattaataactaaaagtacacaagaatggtgtatatattttggtaatcctgcgaaaaaaataaaaacaagacagaaaaaacctttagagttggagaaagaaatataa

SEQ ID NO: 297585 - DNA, 567 bp, Proteus mirabilis
atgaaacttaattatttgaaactttttgtgatctctgcattatctgtaggttctgtttttgctgtttcagctgaagatcctgtaggaaatggacctgtaaccgtgaatggtggcgaaatattttttaaaggtgaattagtaaatgcagcatgtgctgttgactcttcatctgatggccaaatagttaaattaggtcaagtgagaactgcaaaattagcgaaagctggtgattttagcgaaaatactaattttactatccaattaaatgattgtgactctaaagtagctagtactgcaaaagttgcttttacaggggtttctgctgcaggacaagatgacgtattagcagtatcttcttcttctgctggtggtgctaaaaatgtcggtattcaaattttagatagtaagagtgcaccaatgtcttttgacggcgctggattcggtaatgcaactaaattacatgatggaaaaaatattattccattccaagcaagatattatgctttaggtgcaactgaacctggtatcgcaaacgcgaacgcaacctttgctgtccaatacgaataa

SEQ ID NO: 297586 - DNA, 540 bp, Proteus mirabilis
atgttgtgtgaaattggttctaatgttagattaccttttgctgtaactcctggccttttccctgcaaaaggtgatttaacattagagcctcaatcaaaaaatattgtcgtaacttgtgatgcaaaaacctatctagcttttactcctactgataatagagctgggacagaaaaaaaagaaggtgattcttattttggtttaggcagttataagatggcagtcgatggaaaagaggctgttgatactaaagtaggttactacacagtttcaatgaaaaatgccacagtaaaagaagatttgactagtgaagaaaagaaagtctatgtaatggattctagatatggcagatctacttctaagacactagtaaaaaatgattcattaggttgggctcgtagtaatgctaatgattatgctgacggtcaagtatttgcggcagattttgaagtcacaccaaccatcaatagcgcactaaaaaatagtgatggtgatgctaagttagatggtttagccacattaacattccaattcggaatttaa

SEQ ID NO: 297587 - DNA, 546 bp, Proteus mirabilis
atgaaaaaatcattattttcactattaattctatctacacttgctttatcaacacaagctattgcacaacagattcaccttggtggttataatatagatatccaaggcagagtaattgacgagaaactaacttgtgtcgttcaagatattgctccaattcaattggataatgcttacgttgattctttactacttactcctgaaaaacgatttagtgtggatttttctggctgtactaatcaagcaagagatagaaaagtcaaagtagttgttgcacgacaacacgctactcatttaatgaatactggttcgacagaaaatgataccaatgctcgagtagcattattgggttctacaggtgaacttgttccacttaatggtgagcgagaacaacgtacattttcttcggaggttgccggtgaacgtggtagcttagaatttttattaaaatatgatagaccagaatcgattgatgatgctgttaccgcaggtgctttcaatgcagccttatctcttgatgcttacgtcactgatgatatccaataa

SEQ ID NO: 297588 - DNA, 255 bp, Proteus mirabilis
atggataataagatagataaagctgacaaaagagcaagtgcgggtgttgcttctgttgcagcgatggcaaatattccttatgtcactgatcgcacctttagtttaggtgttggtgttgggaattatcgtaacgccaatgcactggcaacgggagcacaatatcaaattatcgacaatgccgttattcgtgtatcagcatcatggaatacggaagatagagctgtagttggtggagggatctcttatggttggtaa

SEQ ID NO: 297589 - DNA, 417 bp, Proteus mirabilis
atgaaaaatgaaactaatattcgccgtggcagacattgtgtattcctgatgcacgtccatttggtctttgtcacaaaataccggcgaaaaatatttgatcaggatgcaattgaaaaattgcgaggctactttgccagtgtttgtgctgattttgatgttgaactggttgaaatggatggggaacgggatcacgttcatttattgattaattacccgccaaaactggcgatatctaatctggttaacagccttaaaggggtatcgagtcgattacttcgacgtgatcgtcctgatattgcccaacgtgattactacaagggggttctttggtcgccgagttatttcgcggggagttgtggtggcgtaccaatatccattatccgccagtacattgagcaacaggaaacacctagttag

SEQ ID NO: 297590 - DNA, 672 bp, Proteus mirabilis
atggaagcggtacatgctcgctcttatagctcgatattttcgacactctgcttaacaacagatgttgatgatgcttatcgttggagtgaagaaaatacctatttgcaaaagaaatcagatattattctgcgttattatcaagatagtgatccattaaagaaaaaaattgccagtgtatttttagagtcttttttattctattctggattttatttaccaatgtattggtcaagtcgagggaaattaaccaatacagccgacttaattcgtttaattattcgtgacgaagctgtgcatggttattatattggctataaattccaaaatcagttattaaataaatcatcattagagaaacaagatattaaagactttgctttctcattattattagatttatatgataatgaagttaaatatacagaagatctctacgactctgtcggttggacagaagatgtaaaaaaattccttcattataatgcgaataaagcgctgatgaatttaggttatgaagcactatttccagatgaaataactaatgttagtccagcaatactttcatcactatcgccagatgcaaatgaaaatcatgatttcttttctggctcaggctcttcttatgttattggtaaaacgatcaataccgaagatgatgactgggatttctag

SEQ ID NO: 297591 - DNA, 390 bp, Proteus mirabilis
atggatggtatgatgaaaaaagttatttttgtaagtgcaatatcaggggggatcttattttggtcaatacatttacaagcggataattttgattgtcgtaatgcggaaacacaaacagaaattaaccaatgtgcataccaagattttcaacaaaaagatgaagagctgtcacaaatttatcaacaatattatgcgaaattagaaactaaacgacaacaacagttacagcatgcacagtcagtttggatgacatttcgtgacctctcatgtcaatatgaggcggactattaccaaggtggcagtttggctccgatggtttacagtagctgcttaaaagataaaaccatagaaagaattaatgatctgaaaaactatattgccttatattaa

SEQ ID NO: 297592 - DNA, 294 bp, Proteus mirabilis
atgaaattgatctatagacctaaaagtctaaaagacgttaattttgaagaagaacaaaagaaattatcttggtcaaaggaaagagggaaagtcatagtttataatcccacaccttattttatgaattttcaaacaataaaatttaatggaaaattggttgatgatgtttcttatgctaaacctttttcaactaaatcatttgatataaatgataataatgaacatggtcttataagctgggaacttattaatgattatggggctaatgtggatttatccgaagttagaatataa

SEQ ID NO: 297593 - DNA, 534 bp, Proteus mirabilis
ttgatattattatcagcatctttattccctaaaaaaatattatcttggtttaatattgatgaggctcttcttaatagcattataaatgcttatcctgaacgattgtttattagcatcctaataggattaatttctattttttctgtggtacgagttgcatctaaagctggcatatttgataaaaaaatcaagcttagcaagatagcttttctacaaggtagtgttgatcttgcttctaatgaacaaccatcactactaaataattgcttagacgaaatcgtctattttttctctcgttcaaagtataagattgttatttttgaagaccttgatagattgggaaacactgaagtatttataaaattaagagaaataaatcaaattgtcaataataacattttaactgatccagtcagatttatttatgcttgtcgtgatgacatttttctcggtgctgatattaaaactaagttttttgactttattctacccattattcctataatggattcaagtaatgcttatacactgtag

SEQ ID NO: 297594 - DNA, 621 bp, Proteus mirabilis
atggaccatgatgccgactatggcgtgctgaatgatattgccagagggcaatcagatccccgaaaaatagtccttcagtgggacgaaatgatccggaccgcaggctccctgaagctgggcaaagtacaggcctcagtgctggtccgttcattgctgaaaagtgaacgtccctccggactgactcaggcaatcattgaagtggggcgcatcaacaaaacgctgtatctgcttaattatattgatgatgaagattaccgccggcgcattctgacccagcttaatcggggagaaagccgtcatgcagttgccagagccatctgtcacggtcaaaaaggtgagataagaaaacgatataccgacggtcaggaagatcagttgggagctctggggctggtcactaacgccgtcgtgttatggaacactatttatatgcaggcagctctggatcatctccgggcgcagggtgaaacactgaatgatgaagatatcgcacgcctctccccgctttgccacggacatatcaatatgctcggccattattccttcacgctggcagaactggtgaccaaaggtcatctgagaccattaaaagaggcgtcagaggcagaaaacgttgcttaa

SEQ ID NO: 297595 - DNA, 390 bp, Proteus mirabilis
atgaaaactaaaatagtttatcaatggaaggaaaaaagacgggatagactctcttttttaggggcagaagtggttttttctgtgttatttggtattgtaaacggtttaatatatatgttatttatgaccttgttacctgattccgttgagaatgatcctgataaattatttttctaccaattctcttttagttcttatggtatagtcgaattcatattattaatagcacaaatctacgtatttgcacttattttaactcaacgagtaagagattttggtttcaaatatcctatcactattgcactgatctttaccattggcaccatggtccttacgccatatccattacttatttcttcagataccactattataatattatttttataa

SEQ ID NO: 297596 - DNA, 576 bp, Proteus mirabilis
gtgtctaaaaaaattattgctaccaacctattacttgctctccccttcagtctgttatcgttacaaattcatgccgcaatgacacaaaattcacctgataaaatcattgttaccgcatccccctcacaagatccgcaaggaccaatttcaggtttagtggcaacaaaaacactatcaacaaataaaatacttagtgatatagataagacaccacaatcaatcagtgtcattacacgcgaccagatggatgcgcaagatgtcagttcagtctctcaagcattgcggtacacacctggcgttttcactgaatatcgcggcagttcaaaccgaaatgatgaaatctttattcgtggatatagctatgccccccgttttcttgatggacttagttatggtatgggagcctcatcttctacaggagctattgacccttggctattagagagagttgagctgatccgtggcccgtcttctgttctatatggtcaattaaatccaggtggtcttgtggcaatgaccagcaaaagacccacttcaacaaccattaatcatattcaagcacgtgtaatgcagtaa

SEQ ID NO: 297597 - DNA, 570 bp, Proteus mirabilis; identical to SEQ ID NO: 53713

SEQ ID NO: 297598 - DNA, 318 bp, Proteus mirabilis
atgaaaaaacatttaactcctattatcatgttattaatattactacctgtgttttctgtaaatgcttattatatctatgaaactagctgtgaatacataatggataataataaatcaaaagaaaaccaagaagttatattgaagatatcaaactgtccatcaataataaaaaacgctaatagtatattgaatattaaaaagaacactgctatttcaataaaaaatagcgtaaaaacatcttttatcttagatagtaataaagtggttttagctgacaatattaatgatcaatttaccatttcagtacattatcaataa

SEQ ID NO: 297599 - DNA, 402 bp, Proteus mirabilis; identical to SEQ ID NO: 198506

SEQ ID NO: 297600 - DNA, 519 bp, Proteus mirabilis
gtgtcacaaaaagatataaccatagagtatcataatcttaaagcttatatgtttaaatctaatgaaaataataagttagatgatcgttatacattaataaatataagctgtccttcacctgtttcacctgtactattttcaataaaagcagatgaaaaaatgggaacaaccacagataatgatcaaactcattttggccttggcactataaatacaacaggtaagattggttttttccaggtatctattgaaaaagcaacagtagatggcattgatgttaatatttatgaaacagataacgaaaataatattggaataataaaaacaagcccacaattaaaaataggcactctaaacggatttagtcaagatggtgtaacacattcgaaagggaataactatcaattaaagttaaaaatttcaccaacaatttatagtttaaaagaaacaaatggccctcttgtcgatggtggagaactttcaggctctctattattcgatttttcatttggatcttaa

SEQ ID NO: 297601 - DNA, 438 bp, Proteus mirabilis; identical to SEQ ID NO: 296602

SEQ ID NO: 297602 - DNA, 531 bp, Proteus mirabilis
atgcaatttactatagataatttacataaattcccagaagaaatagacactgaaaatagtgataatatttattcttatcatgaccttttctttcatcataatcatgttgtacctagctggaaagtgttattagattatatctatgaagattgcgatctagatgtattaactcaatatattgaaaaacatgcacaaactctaagctatgatgaaatagatctgattgaaggagacaattatgaccttttatatatgaaagttatttgtaacgataaccttagtgacaatgcatacaatttagtattaaaacctgtttatataaatactcattactgggatgagaaactaagtttgactaattttctacggttaataatgaataataaagtaccgttaaataatgactcttataaaaatgcaatacaatgcttttctccaactgagaataaagagaatatagaatcctttatatcatggttctctaattataaagaaatactatatatatgcaaatttattgcatggagatag

SEQ ID NO: 297603 - DNA, 531 bp, Proteus mirabilis
atgagtgttttttcattttttataaatgcccaagcgaatgaattaaattatcgctatgaagggatcacctatatgtcaggttctatcatatcaacaccatgttctattgttatgtcaaatcaatatcaggtgattgatttctcttcgttgactatccccatgctttcttctgatattttcttagaagaaaaagaaaaacctctgactattgaattaataaattgtggtaatttgttttctactatcgatagtaagacttggaatatccaatttaatggatatgtttcatcgaatttagattcttttttattaacaggaccttcacgagggctaagtatatttttattggataaagacaaaagtttaatttatccaaataaaatctattcactaaaaaatagtgtattaagaacaagtaataaacaagctcagctttatttacagttttttttacagttaggattgactggggaatatattcaagctggtgattatcaaggaataataagtttctttatagattaccagtaa

SEQ ID NO: 297604 - DNA, 333 bp, Proteus mirabilis
atgcgtaaattactttctatctctgcaattgctttattaacttcaattattgcaacacctgcattagctgctaaaacagaaacttacgactgtgaagggcaaaaaatcagagtttctttccctaatgatgatttggccgtaatggattataatgatgaattaatcgtgttaaaatctgccgtcgctgcaagtggtgcgcgttatgttggagaaagtttccaactgtggggtaaaggtagtgaagagttcaatttagcgacgatgtcagaagatgaaatagttaatgatcgtattgctgaagatacagggcgtacttgtaaaatagtaaaataa

SEQ ID NO: 297605 - DNA, 156 bp, Proteus mirabilis
atgctatcaatattatctaactctatatatcctcttgggtttttagataatgcaatttgcggaatacttaaatataacctttgtgaatcaaaatctaattcacttttagcttctggtatcgcagacaaattgacacagctagtatattcagaataa

SEQ ID NO: 297606 - DNA, 309 bp, Proteus mirabilis
atgtatgtcgtgtataatgaactaaatagtcgtatcggcgcttacattagaaaaacacggaaagaaatggggatgtcggctttagtattaggtgagaaattaaatatgagtcaacagcagatatctcgttgtgaaaatggaaagactaatttaacttttgaatttattaataaagtccttgttgctttaaataaacaatggtatcacttattcaatgaagttatctatcagtttgatcatgaacagtttatatacatcataaataatgaaagaaactatcaatttattctatctgaaatgaaaaagtaa

SEQ ID NO: 297607 - DNA, 282 bp, Proteus mirabilis
atgctattaaaaaaaatatttttagtgtcttttttattccctacactctcttacgctaataccttaccaacatcaaatatagataattcactaactcccaaccatgataatcttgcccgtttttcactcggtgacaatagtcaagcatccggcagcggtgccactgctataggtatcaatagccaagccaccaatactcgttcggttgctattggttatgctgcattagccaatgaggaaaatacggtttcatttggtaatagtgaagagaaaaagaactga

SEQ ID NO: 297608 - DNA, 195 bp, Proteus mirabilis
atgaattttgtcaatgaactaaggcaaaccatatctaatttaaataaatatcagaaagcaggaagtaaagaaggtacggtgaattttgattttaaatctttttttaatgacttatctaacattagagataaatataaaaatccaacaggtactgtcgacgatccttttgatgttgaaaaaacaaacgagatttaa

SEQ ID NO: 297609 - DNA, 159 bp, Proteus mirabilis
atgaaaaaacgaacaaacagtgtttatactactggatttaagcaagaagcggtcgcattagtcagcgaacaaggttatagcgttccaaaagcggcaggttttttagggatcaccgataaattactttatagctggaaagcaaaactcgacgctgagtaa

SEQ ID NO: 297610 - DNA, 291 bp, Proteus mirabilis
atgcgccgtcagcttgagtacaagcagctctggcgaggaggtcaggtactggcaataccaccggcctacaccagtcagaagtgcgcttgctgtggtcatacagcaaaggaaaaccgccagtcacaaagtcaattcgagtgccttgaatgtggatatacagcgaatgctgatatcaacggggcacgtaacattttagcggcaggacatgccgtgcttgcctgtggagggagggtgcagtcagaccgcccgtcgaagcaggaacccgccgaggtgattcagacatcagtctga

SEQ ID NO: 297611 - DNA, 273 bp, Proteus mirabilis
gtggcttctggttttttagatcttaaaactggctttgctgaagccatttttacattaccggaatgcatgggaaaaggatatgcaggacttattcttaaacagctacaatatgaagctaaacaaagaaattttgttcagttatttttagatgcaacgcctaatgcgatgctattttatttaaaacaagggttcactgttttagaagagcgagagtactattctagcttggctcaggcaagtttacactgttatcgaatgtatattgatttataa

SEQ ID NO: 297612 - DNA, 228 bp, Proteus mirabilis
ttgagttgtactaatgctaaagcattagcagtaaaggcctatgccaaaaaagttggtacacccgttattcgttatcctgaattagcaaggaagctacatcataaatatcatttatttgaagtgataatagatcaagatttattagatgttatggatgttcttatttggctaaaaagagtagaaattgaagggttatctcgagaagaaatggactatatcaataattaa

SEQ ID NO: 297613 - DNA, 237 bp, Proteus mirabilis
atgggtctcaccacatttaaagagttatttaatcatgtttatggaacatcgccaagaacatggatatgcgaaagaagaattatttacgcacatcaattattattaacaacagaaatgagtattgtcgatatttctatggagtcaggattctctagccaatcttactttacacaaagctatcatcgacgttttaatatgacaccgagtaaagcgagacatcttaaattaaaattataa

SEQ ID NO: 297614 - DNA, 159 bp, Proteus mirabilis
atggttaaaccaacaatgtcattacgctctcaacatgttaagaatttagcaaaaaagataaaaaaaatgcgtgccatagaaaaggcgattaattgtaataaagaagcagatctacttgttattattaataaaaacccaacacttgtttttataaaatag

SEQ ID NO: 297615 - DNA, 1155 bp, Proteus mirabilis
atgaatacaaaaagtaagcgtaaaattaaagttggtcttatcgttgatgagttttttggagctgcaaatactcgctttggtggatatggttatttagctagatattatattgctaaatatctaaaaaatgaagaatttgaattcgatgttttattaggtaaaggtaaaagtcacttttttgctgaaaaaacaattgttgatggtgtagcgctgtataaacttcctcgtagaaaatggtttactcaacaatttttaaaaaagaaagattatgatatttacttcagtgttgaacttacacacgataatgtactaaagaatgacttaaatccatctaaacgactaattctgtggatacaagaccctaggcctatgtatgaatgggatgaaatttttacagtgaaattaattccagaaacatcttactataatcaaaaaatttataaccttgttcactcttggtacaaacaaggaagagtgcgatttattactcaagctaagtgtcttaatcaaaaagcaattgatttatatggcttagataaaaatgttccaatcgattttgttccaaacccaattgacattgactataaattcgacgttacaactcaccctaaacaaaataatgttgtttttttagggcgcattgcatccgttaaacgaggttggattttctgtgaaattgcaaaaaaaatacctgaatacaatttctatgttttaggtaaaatatttagagctgatgacaaaaatcatgacatcatgtctgaatatgaaaacattcctaaccttcattttgtaggacatgtcgaaggtgaaaagaaaaataaatatttacgcgatgcaaaagtactagtgaatagctctattcatgaagcactacctgtttcattccttgaagctctatcttttggtacattacttgttagtaatagaaatcccgacgatttaacatctaagtttggtatccatgttggtgaggtgctaggtaatggttttgataaagtagacctatttgtgaatgcagttagagaacttattgaggatgatgaaaaaagaaaattattatcaatggaagctattgattatgttaaaaaagttcacaatgttgataatttcataaagcacacacatgctatcatcaaagatgagttaacaaaataa

SEQ ID NO: 297616 - DNA, 825 bp, Proteus mirabilis
atgttttccctaagatattacttatataaagaatattatatgaataatttcataattagtttaaaagataataatgaagatagacgtaaacatatatctaatcaatttaattcaaaaaagatccctttcttattctttgatgctataaataagaataatttagatatttcagaacgtttaaatataatctttaataaccctaatttaactcttggagaaaaaggatgttttttaagccatatttttttgtggaaaaaaattatagatgaaaatattgatgtggctggaatttttgaagacgatatttatctaggaaaacattctgaaaatttactaattaattattcatgggtgaataaagacattgatattataaaaattgaaaaatctaataaaaaaataaaaacgtctatcagaccaatgaaaaaagttaataatattcaaatagttagattaagaagccgtcatttaggaacagcaggatatattattacaaataaaggtgcccactttttatttaatcatatttcccaaaggcccattagcaatcctatagatcatgaaatatttaatgatttattaatagataataaatatattgttggacaaaccatgccttgcttgtgtatacaagattttgttttcaataaaaatgataacaattttcctagtgcattagaagataatagaattcatcgtattacacataataacacaggaaataagaataaaatttcacgagaaatatctagattaaaagaacaaataatagggttcacgctaaaaggcacaatagaaagaaaagtgtatttttacttaaaataa

SEQ ID NO: 297617 - DNA, 1257 bp, Proteus mirabilis
atgacaatttttaaaaccgcatctatatatgttttatcgaatattattaatgctgcaatcccatttttattattaccagtaataacaaaatacttaagtcaagaagaatatgggcaagcagctatgtttcaaagcttggtattaggtttagcagcttttgtaggattaaatatacaaggtttttctattagaaaatatttcgataaaaatgatgtgattaatactgaatatttggctaactctaacggtgcttgctttctagttcttatattcacaacgatcatcacaagtatttttttaggaatatttaataaagaaattagtaacctattatctatacctagtgaatggataaacattgcagtattaacatcagctactagctttattgttcaattaagattgggacaatggcaagtaaggaacgatgctataaagtatggcttattattaataacccaaagctcattatatatggggctttcacttatattcataatttcaatgaagttaggatccgaaggtcggattttaggtcaattttattcaaccctaatattctcaataatatcaattggttacttatataaggataaattattaaaactagataacataaaatattcgatgcttaaagaaataatattttatggcattccattaatacctcatacttttggctttttcataatttatacatctgatagaataatattaaacaaatacttaggtttatcatctgtcggaatttatgtattagcagtacaagtcagctctgtagttactatattatgtgattctataaataaagcttatatgccttggctttttagtaagctaaaacttaataataaaaacgttaatcttagtattgtaaaatccacatattattattttttatttttaattttcatgtcctttctatcctttttgataggtccatatattatatcatttattgctcctacatatatcgaagcaagtcatattataggatatttatgcttgggccaagctataagttctatgtatacgacgatatcaaactatcttttttacactaaaaatacaggtgttatttcgacaataacaataatatcaggtattttaaatgctatacttatggctataatgatttattactctggtttatttggtgctgcattagctttttgtatatcaaaactgatccaattaataatggtttggtacatttcaaataagtattatcctatgccatggtttatttatagatga

SEQ ID NO: 297618 - DNA, 1092 bp, Proteus mirabilis
atgcaaataattattttatattatacattgatagctatatttataataatagttgaagctaattataaaaatttaaagctctccaagaatagtttatatttcatatattcaacacccttgttaatatttttctcattcacagcttttagagattataatattggtactgacacagaaaattatctttattttttctcaaaggtaatagatagtgataacctttctatattttcaacatcaagatttgaatttctttttatatttatatcatatatagcttcatttttagaaaatgaacggttttatttaattatagtgagctttattcaaacaattgcattcttttttgctataagattatggtcaaaaaaccctgtagtatcatttctattcttctgcagtttatttgtttcttataatcttggaacaaatatactaaggcaaggtctagcaataccattcgcccttatcagcatccattatttactagaaaaaaaaattaggccatttataatttttttacttatttcttttttctttcatcatacgtcaataattatgattctattttcattcttatgcttaaataagtttaggataaggacttatattattttttggctaattgcaattatattactatactcaggaagccttaagtttattttagagttaggaagagacttgttttcttttaatgaatcttatagaaatattcttagtaacttttcattagatagctatcaagttggatttaggttagattttatattatttagttcaataccacttttaatactactaattacaaataaaaaaaatataataaaggaaaatatttttttaattaaattatacttttccttaaatactttctttatacttataatggaaataccttattctgatagattcgggctttattcgtggatacttttcccattgttaataccaaatctcattaaagaaaataaatttaaaatactaagaaataatgtcatatggttatttttaacttttattgctggtgttgtatcatttgttttctaccctataatgcaagtgtcattaaattttaatgaattaatataa

SEQ ID NO: 297619 - DNA, 996 bp, Proteus mirabilis
  misc_feature (473)..(482): n is a, c, g, or t
atggaaaaatttagcattgtcatccccatgtataatgtagaaaaatatatacatcagtgtattcaatctatattatctcaaacatatcaaaactttgaagttattgttattgatgatggttcatctgataatagttcaaaaatagtagatgaaattatcaaaagtgaaaaaagagtaacattaattaaaaataaaaataatggcccatcaatttcaagaaatattggtattgaaaaaagcactggtgacataatattattcttagatagtgatgatatgtatgtgccaaatactctacaaacttgtctagatgaaataaataaaaatagactcgatatactttattttaatagtagaggattctgtgatgaattcaatgagattcagaacaaacaagcattagattttataggtgacaggaaaagacatataaatataataaataaggttcttacaggtaaacaatactactnnnnnnnnnnatactactctttaatgtttaaatataataatttttactcttctatttgttactgtgcatttaggtcatcaataattaaaaatcaaagattcgttgataatgttattcacgaggatgaattattcacagccgaaatattattaaaacagaatacaaaacgagtattatgtattcctgacattctttacttaaggagaattagacagaattccattatgacaactgctattcaagaaaaaaatataactagctatagaattataatagaaaaattattattattaaatgtaaagaatatttatttagaaactcatataaataaattagcctttaacaaggcatattatagattaaaactaaaaaacaaaataacattaaatgaaagattagataatatgaagtgggtatacaacctaaatgtagccaagaaaaaaaataaaataatattatatatgttatcactattcccagaaatcaccaatacatatcaaaaaatgaaaaagataataaaatga

SEQ ID NO: 297620 - DNA, 864 bp, Proteus mirabilis
atgaaaaaattgaaaaaatatttaacaagaaaaaagaaagagaattatataatattttcaatatattatttcataaaagttactagctcaatatttattagtgattctttatataggaagtatatatttaaaagaaaatataaaagaaagttaaacttaaaaaaaccaacaagctttaatgaaaaaattcattatagaattttaaacgaccacaatcccatatatacaaaattagctgataaactattagtaagagattatgttagggagaaaattggtgaaaaatatttaataaaactaattaatcattataatactccttctgaaataaattttaatactcttccgaaatcatttgttttgaaatgcaatcatgatgtaggaagtgttatgattataaatgataagagtaaaataaacgaaaaagctattaaaaaaaaattaaaaattgcattaaaaaataatatttattatcaaaatagagagaattatcctgaagattataaaatccactgttttaatggcattcctcggtatatagaattacaattttcgcgttttagtcatgataggagaattaatatatatgattttaactggaacttacaaccatttttaatggggtataaaaatactaatgaaagtatcgagaaacctaaaaaactccaagaaatttataatataagtaaaactttatcagctgatttcgactattgtcgtgtagatttctatattacaccagatgatagtatttattttggagagttaacatttacaccatgtaatggcatggatgatttttatcctaatgaatgggattatttatttgggaaggaatggattatagatgattcaagaaaataa

SEQ ID NO: 297621 - DNA, 849 bp, Proteus mirabilis
atgattcaagaaaataaaaacgcttatcctttagttagtattataatatcaacttataataggaaaaatctattaaaacgagctataacttcagctatcaagcaagattaccctaatattgagataataattagtgatgataattcactcgatgataatgaagaaatgatagaaaatataaagaagcaaacaactatacctatattttatataaaaaataaaaaaaacatgggggcttgttttactagaaatcaaggaataaaaatagcttcaggaaaatatattgctggcctagatgatgatgatgaattcacacctaatagaattagtttattagtaaaaaactataatcctaaatactctttaattacaagcaattctattttaataacgaaaaataaaaaatataatttattcaaagataaaaaagctaaaataatctcatttaaagatagtttatgggaaaatcaagtcggtactcaatgtttagttgaatctgaacgcatacgaaattgtaatgggtttgatactaatcttacttcagcacaagatgctgatatgtggattagacttattcaaaaatatggtaatgcgcttagattaccacaagtaacttatttaattcatacagaacacgaaaacaatagaatttcaacttcggctaaaaaaataacggggttaattacttattataaaaaacatgaaccacatatgtcttctggacaaaaatcttatatgaattttaaaattcattactggaaaaataaaaaaataacttttaaaagtctctttttattaactccatcatccatctttcatattttaagtgttttttttaaaagaaaatga

SEQ ID NO: 297622 - DNA, 879 bp, Proteus mirabilis
atgaaaaaaataaaatattttatccgagatgtgcttagaatacttctaggcagatatttatatacctatatcagatttttatttgtacataaatatattccaaacttaaataaaccatcatctttttctgaaaagataatatttagaaaattatatgataacccaaaaaaatattcctcttttgtagataaatatacggttagaaaatatatagaaagtaaagttggatctgattatttaattccattactaaaagcaaaaaaatttataactccttcagactttgattcattacccaatgagttcgtaattaaaacaagcaatgggggaggaggagaaaatgtactaatagttaataataaaaatagcctaaacttagatgaaatatgtgacagatttaataattatcttaaagtaaaaattggaaaaaaaatagatgaatacttttatgatatagaacaacctatgatattgtttgaaaaattattacgagatgatttttatggttatcctcccgattttaaaattcatatatttaatggtataaagaataaaaaaataattcaaattgatgaaggtagatttaaccatcataaaagaagcttatataacgaaaaaaaagaaaagcttccttttaatatacagcctaaatatgaatcagtatctgataattttccatggccaaagaattggaatgaaatgttagatatatctatgaaattagctgatgactttaaatatgtccgagtagatctttataatgttaatggtaaaatattcttcggtgaattaacattctgccatggtagtggttgggaacctatatatcctaagaaatatgattttttattaggtaagtattggcatgaatatgaataa

SEQ ID NO: 297623 - DNA, 1026 bp, Proteus mirabilis
atgaaagcattgtcaaaattaaaagcacaacccgggagctggatgaccgatgtacccgtacctgagcttggtcataacgatgtgatgatcaagatccgtaaaactgccatttgtggtacagatgttcatatttataactgggatgaatggtcacaaaaaaccataccggttcccatggtggttggccatgaatatattggtgagattgttgctattggccaagaggttaaaggttttaatattggtgatcgcgtctcgggggaagggcatattacttgcggtcattgtcgtaattgccgtggtgggcgtacacacttatgccgtaataccattggtgttggcgtaaatcgtccgggttgttttgcggaatatctggttattcccgcttttaatgcatttaaaattcctgacaatattccggatgaactggcggctatttttgatccctttggtaacgcagtacacacggcgttatcttttgatttagtgggggaagatgtactggtttcaggtgcgggacccattggtattatggcggcagcaatctgtaaacatgtgggggcacgccatgtggtgatcaccgatgttaatgaatatcgccttgatctggctaaaaaaatgggtgttacccgtgcagtcaatgttagcaaagaaaatctaacagatgtgatgaaagaattaggtatgaccgaaggctttgatgttggattagaaatgtccggtgcgccaccggcttttcgtaccatgcttagtacgatgaatcatggtggtcgtattgctttactgggtattcctccttcagatatggctattgattgggggcaagtcatttttaaaggattatttattaaaggtatttatggtcgtgagatgtttgaaacatggtataagatggcggcgctgatccagtcaggtcttgatctctcaccgattattactcatcaatttcctatcgatgaattccaaaaaggctttgatattatgcgttcaggtcaatcgggcaaagtaattttagattggcagtag

SEQ ID NO: 297624 - DNA, 1200 bp, Proteus mirabilis
atgtctactcactctttctataaacaaattaatcaacaactcgaacaaacacgtcaagatggcttatttaaaaatgagcggatcatcacttcttcgcaaagtgccgatattgcggttgctgatggtagtcatgttattaacttttgtgccaataactacttaggtttagctaaccacccacaactaattgcagcggcgaaagcgggaatggatagccacggttttggtatggcgtcggtacgttttatctgcggaacgcaagatctacataaaacattagaaaagaacattgctgaatttttgggtatggaagatgccattttgtactcctcttgtttcgatgccaatggtgggttatttgaaacactgatgggatctgaagatgcgattatttctgatgcgttaaatcacgcatcgattattgatggcgttcgtttatgtaaagccaagcgttatcgctatgccaataacgatatggtggcgttacgtgcccaacttgaacaggccaaagcagataatgcccgccatattatgattgccaccgatggggtgttctctatggatggggtgattgctgatctaaaaagtatctgtgatttggctgacgaatatggtgcattagtgatggtggatgactcgcatgcggtgggttttgtcggcgcacaagggcgcggtactcatgagtattgtgatgtattagatcgcgtcgatatcatcacaggaacattaggtaaagctttaggtggtgcatcgggtggttataccgcagctcgtaaagaagtggtggagtggttacgtcaacgctctcgtccttatctattctcaaattctttagcccctgcaattgtgagtgcctctattgcggttttagatatgctgaaatcaggggatgaactacgcgctcgtttatggcgtaacgcagcacttttccgtgaaaaaatgacggcagcaggttttactttagcgggggctgatcacgcgattattcctgtgatgttaggagatgccaaattagcgcaacaatttgcagcacgtttacttgatgaaggtatttatgtcaccggctttttctacccagtagtaccacaggggcaagcacgtattcgtacacaaatgtcagcggcacacacaccagaacaaattgaacgtgctattgctgcatttattaaaatcggtaagcaacttaatgtgattgcataa

SEQ ID NO: 297625 - DNA, 1077 bp, Proteus mirabilis
atgaagttaaagaaattaaaatgggtgcactattttctaaatctctataacccactctttggtaagatgaaaaaaacggcaacattttcatctgatatcaaatttaacagtattgttattttttcaaccacagcgttgggggattttatgtttaataccccagccatcagagcaattcgtgcacattatcctgatgcacatatcacactggtttctagtgtaaaaaataagctattggtggaaaactatgagcaaatagatagtgtcgtgtattgggataataagatcagaaacttgttacaggtggctttacaagctaaaaagtataaacctgagttagcgattattttacattcccacctcccttatgatgtgttatttgctgtgatggcaggttgccaatatattttacgcaatacttttcatgttattcctgagtggttccgaaaatggattattgctgaacaccaaccctctcaatatcatgtgatccaaagcaaattaaatattattcgttatttaggaattgatagtactgatactaggatggacctcccttgtaaaatagaaccattagctcaaagtaaaaataacattgttggttttcagatgggagcatcaacacaagagcgtagatggcctgttgtatcttttgtggaattagcgaaaaaattaattgatagtgcgccattattacaaataaagctaataggttcatcgagagagctggaattgccagaagcgttttttgcgttgttacctgaaagatatcatcaaaatatagaaaatctggtaggtaaaacttcactacctgatctgttaagtcaaataaaaaccatggcggtattagtcacgggagataccggcccactacatttggcaatagcattacaagtacctacggtaagtttatttgtaaccgcaaatccaaagtggacaggaccttatcaagatctcgatattcatactattatccataagatcccgcaacaggatgaaaatagagcactttcgatggatttgattactgttgatgaggttctaactgcagtaaataacaccctaaaagataaataa

SEQ ID NO: 297626 - DNA, 1068 bp, Proteus mirabilis
atgaataatataaatcaatcatttaacagaatactggttattaaacttcaacatcatggagatatgttattaacgacacctgttattaattcgttaaaatcagcttatcctaatgcaaagattgatgttttattatacaaagaaacattaccgatgcttgaacataatccattaataaatcatattttttatcttgaccgaaattggaaatatcaaggtaagttcacacgattaaaaaaagagtggcaactagggaaaaccttacaaaaacagcaatatgacttagtggtgaatttagctgaccaatggaaagccgctattttcgccttagttaccaaagccccagtgcgcctagggtttgaatttgaaaaacggcaaaatagtaagttttggcaaaaatgtcacaacattattgtacctactgcagagcatggacaattacatactgtagagcaaaatctttctattctagcccctcttaatgtaccaattatttctgatgttaccatggcatatagccaccaagataaacaatggttagaagagacaattaaaaagcatcatatccctaaaaactatattgttattcaaccaacctctcgttggttttttaaatgttgggatgaagataaaatggcgacattaattactcagcttcagcaagataattactcaattgtgttaacatcagggccagaagcgaaagagcttgagatgatagaaaatattttagctcagtgtcctgataaaacatcaattaatgtattagcaggaaaaacatcactctctcagcttgcggcattaattgatcatgctgctctttttattggtgttgattctgtagctatgcatatggcggctgcattaaaaacaccgctaatcgcactctttggctcatcaaaattagagcattggcatccttggcaagccattggagaaactatttgggcaggtaattacgctaaaatcccccacccagatcaaataaaaaccgatacacaacaacgttatctttctgctattcccgttgatgctgtatttaatgcagcaaaaaggtacttaagctaa

SEQ ID NO: 297627 - DNA, 1134 bp, Proteus mirabilis
atgaacgcccctttacgattagccattgttagacaaaaataccgtccagatggcggtgctgagcgctttatcgcacgtgcacttgatgccttatctagtgatgcactagaacttaacgtcattactcgacaatggcagggtgatacccatcctgattggcatatacatctatgcaaccccaaaaaatatggtcgtattagtcgggagtctggttttgctaaagcggctagagcatgctggcaagaaaaccactttgatattgtacaaagccatgagcgtatcgcgggatgtgatatttttcgtgcaggtgatggcgtacatcgtcgttggttattacaacgacagaaaatattaccgcgttggaaaggacgttggttattttatgatagataccaccgttatgtgatgaatgcagaacaacagatgtatgctgatccagcgttaaaacaagttatttgtaactcacagatggtgaaaaaggaaattattgcggattttggcctctctgccgataaaatatctgttatttataatgcaattgaccataatgtttttgtaccagcaacaaattctcaaaaacagcgcttaaaaacacagtataatatccctcaagataagccttgttttatttatgtaggatcgggatttgaacgaaaagggttagctgcagctatttcagccattgccaatacatcgtcaatcttacttgtcgtaggtagtgataaaaatcagccaaaatatgaacaacttgcaacacaattaggctgtagacagcgtatcttctttttgggtatgcaaaaaaagacgctcgacttttatcaaatagccgataccttattactaccaacgctttacgatccgtttcccaatgttattcttgaggcgttatcatgtggtttgcctgttatcacttcaaccagttgtggtggggcagaatttattcaaaatggtaaaaatgggtttgtttgtgatgcgttagatattcctgcattaacagaggcaattgtgcaaattccaacaaactcagcatggtctgaaatgtcgcaagtggcgcgagaaactatcctcccctatacaccgaagcgattatcagacgagcttatttcactttataaacggatattaactttgtga

SEQ ID NO: 297628 - DNA, 1104 bp, Proteus mirabilis
gtgaatcaacgacatatactttttattattgatggattaccaggtggtggcgctgaaaatgtcacgctcaggctggctaatggttttcatcagcaaggatatcaagtcactcttttatccttacataataaattggcgtatgaattacctgattttattgactatattgttgatcatgatgaataccgaggtatctttagaaaactaacagagatatctcgcagagcaaaatctcttgataaggtattaacgcgactttttgcacaaaaaggtcgtcctgcattggtactttctaatttacataagacagaccgtattgtttgtcgagcgaaacaactaagacattgtaatgtttggtactgtattcatgggatctattcacaatcttatcttggtaataaatcgggtttctcttattggttaaaaaagaagaaaattcagcgagtttataaagataaaaaccttatttgtgtttctaatgcggtaaaagacgatttaatacatgctattggcgtcgatgcacagcaattaaaaacaatttataacccatttaatattatggagatccaacataaagcctcacaacctaacccgtttgcagggaaagcgtatattttgcatgttgggcgattccatgaagttaaacgacaagatagattgataaatgctttcgctaaagccaatataccttgtcaacttattctattaggggaaggtactcccgttattaagcaacaattacagcagcaaattgcccaactcaatttaaatgaaaaagtcatattagcgggttttatcgctaatccactccctatcattcaaggtgctaaagttgttgcactcagctctgacagtgaaggattaccaaccgtactaattgaagctcttatctgtggaacgcccattgtaagcactcgttgccctggtggcgtaagtgaaattatgacagacgaactggctaactatctttcagatatggatgcagactcactcgcagataaactacgtctcgcttattacgcaccacctcaaatattgccatcatcttatgcaaaatttgaaataaaccatattttaaagcagtatatcgctttaattccgtaa

SEQ ID NO: 297629 - DNA, 804 bp, Proteus mirabilis
atgttggcactttctgtcagacagccacttaatatttattattggctcattgcgatatcattagtttatatcagtttattgagttgggtacttaattcatggtctatgacagaaagtgcgcaccatattgatcagcaacagcaaaatacattatcggtctatcaggtgatgttttcgccacctaaacaatctactaccatgattgaaccgagaataaagatcgagtcacaacaaccacctattgcactaccaagaagtgagaacggtgaatttattgaagcgcccaaacaacccgcaaaaaagcgtcaacaacaaccggccccaataacacctaaagcgataaaacaggtaaaaaaacagccagtagtagacaaaacagtacctataaaactacctgatttaacaaatcacaacatagttcaaagtacatcacaaccatcagcagaaaacttaacacagcataccgcgagttcattggcagggagcagtcgtgcattaagtgaaaatggtattgggcagggagagtctgaaaatcactatatcagtttattgcgccgagaaattgagcgtcataagcgctatcctgcgcaagctcgtcgtatgcaagatgaaggactggttgttgtgcgtttttcattaaccgatgaaggctatatttcatccgttgtacttgagcagacctcaggggtggcatctcttgataatgctgcacttgccgcggtaaaacgggtaaaaccaattggcccgaaacctaataacttatctgatcctttaactatctcgttaaaatttcaattaaattga

SEQ ID NO: 297630 - DNA, 3078 bp, Proteus mirabilis
atgcatgtagtgctttttcacaaacgtacgttagtctccatgatggtttcactctccttattttctctcaatagttattccaagacgaaggataatacaaccgatcttggacaaattcaggttgcagataatttagaaaaagatcaacaaggttatgctcaagtctatgaaaaggatgtggctaatatttatttaggtaaagcccttattgaacgttatcaaggggtatcgcctgcagatttatttaaaagcgcgataggtgtttatagtggtgaagcccgtaatggaggagcattggatccgaatattcgtggtattcaaggccaagggcgtatccccgttactgtggatggtactgagcaggcgattacggtttatcgtggttatagcggtgcatctaatcgtaactatattgattcaaatttgataagcagtatctatatagaaaaaggcccttcacttaatcctaatataaaaacagggattggcggaggggttgccattaaaacattagatatacgtgatattgtacccattggtgagtcttttggcattaattttaaaggggatattagtaataatgccacaggctataaagatatttatatcaatatgattgaagattatcgtaattatccaaaattctatcataaatattcttttttaactgatcctgcattagaaataacacctgaaaaaaataaagatttaaagtttaatgattatgcgtttcgtattggaataggatttgagaatgaaaaatttgatttactctttgcatatgcattacgtgaaaagggaaattatttagcaggtaaaagaaataaagacgattatcttaaaacagattacatgcatgagatacatgctacagatcataaattcaggttaacaccttatgtgccttttattgctcatatttatcgacctggtaatgaagtgccaaatacatctaatcgtaaccgctcttttttagtaaaaggaactctatttccacaacaagcgcatcgtttctccattaattatcgatacaccgatttattatttggcgatattatgccattacgtttaagttgggctcgttatgaagaaaatttagttaatcaatggcctttggcaaatattacacaacaagcaggcatattaacctatcaatataaaccagaagataaaaaaacagatttattactgcgtttatggggcaatttaacgacaggaaatactaatactcgaggaggagcacctcgacaacctaagaatagagatataactaatgattttgatcgatatttatttatgaaatcaaaatctgaaagtggtatgagttatgacactgatactcgttttttagatacagcttctctatatcaagataataatcgttatggtgttgatttttcatcgttatttaaattatcacctcagttttctatttctttttccggtcaatatcaattggaaaaattagatagtcatgagcttgaacttcccatgggttttgatttcgtgaccgaggggcgagcagggcaacgtcatgaagtcaatttagcgttagccacagattggaaaccattaccctggtttgcgatgaatattggcggtaaatatcattactatcatctgacggatacctttttaaataataaacggaagaatagggttaaaaattacgagaaaacagcccctatccgcggttatctgatctcttatcgacgagtattaacgccagaagagtatttactctatcgcgcggttaataaaattgatgtcgatactttacctgacgagttaaaaaattaccgaagttctgctgagctgagtaaaaaaattagagactttcaacaagcggatttagtttatcctgaaggtggcgctttgctagaggaaatcaaggagcagattgttaggccatatcttcagagaatacagcatgatatggagcatgaagattttattcgtaataaccatggaaagatgcaaataaaaaacgctaaagccatcccgatgaaaagagagtttagcctttggttatttgatgaaaatggcgtgctatctaagagtaagaatattttacttaatggttttcttgatatggaggaaaaagtccctcatccagtgacgggggagttagtttatcgctttgaaaaagatgttattaatcctcaggcattttctctatcagaagatattcaagatccctacgcactggagcctagctatcagcatggcgcattttcccctttaatctctgccaccctttatgccaacgatatggtgcgtttttatggccgttatactgagcaattgcgtttgcctaacttatttgaagataccagtggtttttcaggctctaaagctcgctattatggttttaagttaaagccagagcgagccaaaagcagtgagtttggtgtggttgttgattttacgcattggttgaatatagagcgccacgctgatattaaaattaattactttaaaacgaacattgaaaatgtatttgatagagatgctaattggcaaattagacagttagaaaaacaaatattagaaggtgtagagttacaagcccggtttgataatggatttattttctttgataccgcattagtgtatagccataaaaataaagtctgtgatgaaaatgctttttatgagcttgatgcatcaggattatcgggtattaaaaactgtatgacagggggataccctggcggatttttgcgcacctcaatgcagcctaaatactcagttaacctacatttaggcacgcgctggctaaatgataaattagaattaggtagtcgctggctctattcatcagaagttgaaaataaagatgagaaatggcttaaagaaaatttacctaatagctattttggcataaataataatccgatgcgttgggcaaaagtatttactattgatgcttatgcaacctatcaatatagccccaatttatcttttgaaataacaggaagtaatttattaaatgaatattacattgatccgctgacccgttctggtatgccggcaccaggaagaagtttgcgattaggtgtaacagcccaattttaa

SEQ ID NO: 297631 - DNA, 1353 bp, Proteus mirabilis
atgcattattatcaaaggctaataaagtcattatttattattaatatcttatttcattcgtcacagggggcggcaacacaacctaatcaagagccgcttaataaagagaaggtcgctcaattaggtcaacaactgtatcatcatttacagcaacagcagtggtatcaagcggaaaaactattagttaattatcagcaattaccattacacgaaactttattagtctattatgctcaagcactattagcacagaagaatggtaatttcttacaagctgaattttattatcatcagcaacttaagcagcaagcagattttattccggcacaaacaggcctaattcagctctacttttctcaaggagaatataaaaaagcacaataccagctaaatcaattaagtcgtttatcgggattatcacctaccattaatcaagcaattatctattatcagaaacagcttaacgattattttaaagctaggcgtttttatcaaatcagttttttttatgatgataatattaatcatgcaccttatcttgatgagcaaattgtttcgcaatcaacgcaagtcatcatgaccagaaaaggcgctcaacctatagcatcgatgggggttagtcatcttttttctttctatcagcccacttttatttacgctaataataccctatcaggctatttttcagcacgctaccgtgattattttgcatataaacaagctaattttacacatttatatactcaattaagttatcagtaccaaaaaaaggattatcggtggactttatccccctattatgaaataaaatcacctaaaaaggcgtttgagtatcaatctattggggtatataccgggctatttttctccattaataaatatcattctattaatttatctataaattattatataaagaaatataataaagaattaataaacttaaataatcataagcagctatatgctattagctattactatacattagcagagaatgttcaattagttaatcaattaaactattatagtagtcgtaaaaaaaacactttattaaattatcagcaatatgatataaaaacgggtgtttattacttattaccaaaaaattggcaagtttctctttctttacaatatcaatttaaaagttttaataattataatccattattaaataagaaaagagaagataatggctttgtttttacaacaactattaaaaataaagcacctattatctgtggtttttatccagcaatagaattaagttatacccgtagattaagcaatgtggattggttatatcaatatcagcagcatgaagtcttatttaaattagaaaaacaattttaa

SEQ ID NO: 297632 - DNA, 525 bp, Proteus mirabilis
atgacaataccaaattggcacgaagaagcgatcagtaaaaaacataatagaaatggatttaattgtggcgatgcagtactaaaccaatttctgtatcgccatgcaagacaaaatcatgagaatggtagtgcgaaaacatatttagctatcaataatagtaataatattatattaggttattacagcttatgtcctgcttctattgagttcgaaagaacgcccgaattgatcaaacatggcttagcgcgtcatgatatccctgtttttaaacttgcacgactagctacggatctatccgttcaaggaaaaggtttgggtgggcaattattgcttgcagcaggaaggcgttgtctttccgttgctagtgaattgggaggcgttgctttacttatagatgctaaaaatgaacgagtcgctaattggtatattagctacggggcaataccattattagatacccctctttctttattaatttcctttaaaaccatttatactgcactttcaatggcaaataaaatataa

SEQ ID NO: 297633 - DNA, 1968 bp, Proteus mirabilis
atgactaataatgaccacctaactccggtagagccaccagcattagataaagaagctagctcaggcactcgtcaccttaccggtatctatttaaaaatcaccaccacgctggcgatattcatttcgttgtatgctatttactctaatgccttatccaacacccaagagttttatcgtaatactatttttcttagtggtattttgatccttggttttattttatttccattctctaaacgattttctaccgcaaaatttaatggctgggattatctttttatcgctttaacattaatcagctatggctattttttctttaactatgttgatctccatgtggtaagaaaaagtattcccaacacaatggattatgcgatggcaattcttggcattattgttctttttgaagcagcaagaagaacaacgggctattttattcctagcctagccacattcgctattatctatgccctatttggccaatactttatgggtatttttggtcatgcaggattttctgtagagagactgttatatcgtttatttatgaccagtgaaggtatttttggtattacactctctactgcctctaccgctatcgtggtatttattttattcggttcgtttttaagtgttagtggtgccacagcactatttaatgatttagcgctagctatggccggacgtcgccgtggggggcctgctcaagttgccgtcatttcatcagcattaacaggttcattaagtggtagcgcggtcgccaacgtagccactacgggaacctttaccattccattaatgaaaaatattggcttaacatcacgttttgcgggtgccgttgaagctactgcatctacgggtggaatgatcatgccaccgattatgggtgcggctgcttttattatggcgggctttttgggaatttcttataccacgattgttattgccgcgattattcctgcgttgctctattacgcggccttgatcatggcaattgatattgaagcgaaaaaacaaggtttaaaaggacttagcaaagagaatattccacaagttaaagcggtattaaaagcacgcggtttattactattacctttaattattgtaattggcacattattaatgggtaaaactcctatttatgcgggttttcttggtatcttaaccattattgttgccagctggctcacacctgataaaacggtaagaatgacattaactaaagtggctgatgctttagcagaagcggctcgtggctcggtacaagtgactatcgcttgtgctgccattggtgtgattatttgtgttgttaccatgaccggtatcggtgcgaccttagcatttaatattgtctctatgactgacaatacattatggatgatcttactggttgtgatgttagtctgtattgtattaagtatgggcttaccatcaactgctctatatatcgtggttgccgttacagtgtcacctattttaattaaagccggtgtgatgcctttagcagcgcatttctttgtcttctggtttggcgcgttatccaatattactcctccggtcgccctagcgagctatacggcagcaagtattgcgagagccgatcctatgcaaacttcatgggatgcggtacgtttagcactccctggttttattattccttttattttggtttataaccctgcattactgatgcaaggtgataatttaagtgttatctctatcgggttaatggtcattagtgcattagtgggaatttatgcactaagtattgccactgcgaatttttggataatcaaaacaacatggtttgaacgtatcgcctttgcagcggccgctattttaatgattaagcccggactatataccgatttattaggtatggcgttgatcttacttactggcgctttccatctgttgcgctctaaaaaacagttggtcaatgtagggcaagtatctggagaaaactag

SEQ ID NO: 297634 - DNA, 468 bp, Proteus mirabilis
atgcaattgagctctcgccaaatcagagtttttaagctggctatacttttaagtacagggaaaaaagtccccacgattaagattatttctgctcttgaatgctcggagccaacgctcacccgtgttttaaaagaaataagagagtcttatagtgctgaaattaagtacagtaaatcatccagatcgtatcaaatgactgaacgaggtcagcttgataataaaacattacgtcgtatgcgagaggcattatcttcgaatgaagaactacaacatagtggcacaacgagtcgtgtttatttagataaagataagaaaaaatcagtatcactatctttaaaaatgtcagcactacgaaaaatagataaactttcgtttttaagaagtacaacccgaagtcagacggttgagtttcttgttgataattatgtagaacatttaattcaagttgctctccaagataaaaaataa

SEQ ID NO: 297635 - DNA, 1017 bp, Proteus mirabilis
atgtttaacttaaattatttcaaagcagactcatcaacatttattattaaatcggtcaacgggaaagtgcgccaacaaggtaaaggcttaagtttttggtataattcggcgacaacatctattgcagcactgccgttaaatgcacaagaagccccttttatctttaacttccaaactgctgattttcaggcactacgtattcaaggacaaatttcattccaagtcacatcacctgaaaaagctgctgaagtcctcaactttaatttaagtaagaatggcaaatcttacgccagtgaagatcccctaaagctcaacgatcgcgtggtgcgtattgctcaaaccctgatccaagccaagatccaaagcacccctttacgagaagcactacaacttagccaatccttggttactttagtgatgaaacaacttactgaacacccttcattagaggccttaggtattactattttagatgtttctattgcggccatttcaccctctcccgaaacgcttaaagcattagaagctgaggcgcgggaatccttactcaaagaggctgatgatgcaatttatgcacgtcgtaaattctcagtagagcaagagcgcaccattaaagaagctgaattagaaacagacttatctatacagcgtaaacgacaagaaattgaagaagctcgtttagaaaatgaacgtaccctattacgtgaacaagccgaaatagaaaaagagcgtcttgaagccaaagtcaatgccgaagcaaaacgtaaagaattagtcgcgttaagtgcggaaaatcaacgcatacaatctgatgctgatgcttatgctattgaagcaactatgcgagcttaccgtgagttgcccgttgaaaatctcaaagcaatggctctagcaaaaatggactcacaacaattaatggcaatggcatttgaaactttagcgcttaattcaggaaaaattggtgaattaaatatcactcctgatttatttagccaatttatgaaaaaaagaggataa

SEQ ID NO: 297636 - DNA, 624 bp, Proteus mirabilis
atggcaaaattagataaagaacaggttattgataacgcattgattttattaaatgaagtcggtatggaagggttaacaacacgtaagttggcgcaaaaactaggggtagagcaaccgacactttattggcatgtaaagaataaacgtgcgttattagatgctttagctgagactattttacaaaagcatcatcatcatgttttgccattagcgaatgaaagttggcaggattttttgcgtaataacgcaaaaagttttcgtcaagcgctattaatgtatcgtgatggtggaaagatccatgcaggcacacgaccatcagccaatcaatttgagacatcagagcaacaattgcaatttttgtgcgatgctggctttacgttaacgcaagctgtttatgcattaagttccatcgcgcattttacacttggttcagtgcttgaaacccaagaacatcaagagagccaaaaagagcgagaaaaagtgccaaaaacagagataaactacccaccattattaacgcaagctattgatattatggatagtgataatggtgaagctgcattcctttttgtgcttgatgtgatgatttcagggctagaaatagtgctaaataatcatcattga

SEQ ID NO: 297637 - DNA, 537 bp, Proteus mirabilis
gtgaaaaagattgaggcaattaaaaaactcttagaatatgacaagcgcggtcgctgcgtttttactaattcagatctggccaacatctttcatcaagataatgaacgggcattgcgtgcaggaattaaacgtttgcaagacgatggcttactcactaggatcattaatggtgtgtacttatacaatttagcgcagtcaaaaggcagcgatacgttggagcaaattgctaaaactattcgacgtggggaatataactacattagcttggagtctgccctttctgattttggtgttatttcgcaaattccagtagatcgcttaactgttatgacaacgggacgttccggtgaattcaaaacgcctttgggtacaattgaatttacacatacaaaacgagctccaatcgacattatagagaataccactttagtcggcagaccacttagattagcaacaaaacaaactgcatacagagacttaaaacgagtcggccgaaatacacatttagtaagcaaggaggaactatatgaaaattga

SEQ ID NO: 297638 - DNA, 921 bp, Proteus mirabilis
atgaaaattgatcaagaaaatttcgcgctattggtgaataaagcaatgcaggtcggaaatgtatctcacatgcgttccgtgatagagaaagaactcttacactacgatattttatttgcgctagaaaaaggtggacttctaaacaaactgacttttcaaggtggcacttcattacgtctttgttatggtggtaatcgtttcagcgaagatctggattttgctggcgggaaggattttagctcagcaatgttggcagatatgaaacattgtatagaaaaatacattggcgaacgatacgggctagaagtaacagtaaaagaaccaaaagatctaaagcaagatcctaaatattctgaattgagcattgataagtggcaaatagcagtagtgacttctcctgagagaaaagatctaccaaaacaaaaaatcaaagtagaagtggcaaacattccagcctatacaagagagccccaacctctgcaaataaactatgattttttgcctgatggatacagtgatatgctaattttgacagaaagtttggatgaaatcatggcggataaaatcatttctttgccagccactacaaggtatgtccgccaccgagatatatgggatttagcttggttacagcaacaaggcgcgacactcaatatggacttagttaaaaataaggtatcagattataaacttgagcacttcaacaaaatgttggaaaactttctcgaacgacttcctagtattgtatctagtgaagcattcattgcagaaatgaaacgtttcttaccaacagatgtatttgatagaaccctcgctcaggataagtttcaagtttacctgcaaaatactttggcgaaactatttaaaactgtgagtaacgaattactaggcaaggtcactaatagtgaatttagaatgtaa

SEQ ID NO: 297639 - DNA, 1014 bp, Proteus mirabilis
atgtcctcattgtcccctgccagcgaagttattcttcgtcatctagatcatttcgcagacaggcacgtactcatagcaggtgatcttcaagacacgctagcatcacaaattcaggccaaaagtgttagagcctatacaaatcaatatcaccagtggctaccgctactcaaatccatgggtgataatgcattttttggtttagcggcagatcaatcattcgtaaaatattgcgacactttgatttatttttggcctaagaataagaatgaagcaacttttcagttacgtagcttatgcgcaagtttatctgtcgggactgaaatcttcatcgtcggcgaaaaccgtagtggtgtaaaaagtgctacggaattaatgaatggtatagcaaagctaaaaaaaatagattcagcacgtcgttgtagcctcttttttggttcactaacctatcaaacactctttgatcgaaataactggtggcaaacttatcgttatgacgatttaacggtgatggcattacccggtgtttttagtcaaaccgcattagatgaaggcagccgattattactctctacatttgatgatacaatggtaggtgatttactggatatggcctgtggttgtggggtgattgccactgtattaggcaagaaaaacccgatgttaaaactcacactctgtgacgtcaatgcagccgctatttcatccagtattgccacgttaaacgttaatgaattagaaggacgggttattgcaagcaatgtctattctgcggtagaagaaacttatgattggatagtctctaatcctcctttccatgatggcttaggtaccagctatcaagctgcggaagacattattcgtctcgcacctaactttttgaaaaaaggcggtaaactgcgtattgttgccaatgctttcttaccttatcaagatattcttgatcacgtgtttggctctcatgaagtgcttgcatcaacaggtaagttcaaagtttaccaagcaaccaagaaatag

SEQ ID NO: 297640 - DNA, 1638 bp, Proteus mirabilis
atgctaacactgcttcatttactctcatccgtggcacttttagtctggggaacacatattgttcgcaccggtattatgcgtgtgttcggctctgatttgcgccgaattttaggtaaaagtattaataaaaaatcgaatgcttttcttgctggtgtcggtgttactgccttagtacaaagtagtaatgctacggcattgctagtgatttcgttcgtcactcaaggtcttatttctattacacccgctttggtgattatgctaggggctgatgtgggtacagcgctaatggcgcgggtgctgacattcgatctttcgtggttatcaccgttactgattttattgggtgtcatgacttttttaagtcgtaaaaaagagcgtatcgggcaactgggtagagtgggaataggccttggtttaattatcttagcattacaactgattgtgacttctgctgagccgataacccatgccagtgcagtacaagctatttttacctctttgagtggggatacgattttagcactactggtcggcgctatttttgcgatggtcagttattcaagcttagcggcggtattacttaccgcaacattaagtgcaacaggctttatgcctttatatattagtttatgtattgttattggttctaatattggtagtggattgttggcattaatcagtagtcgtggtcaaagtattagttcacgtcaagccgtcatagggagtctgttttttaaattaattggcgccttgctggtattgccgtggatcaccctaattgcgacaaaaatccaacaatatgatttttcccctgcggaagtgattatctattttcatgtgatttataacttagtgcgctgtgtgttgatgttgccgtttgtggggccaatggcgaaattatgtcaaaaattagtgccggaattaccggttactgggacagaagttgcacctcgttatttagatccatccgccgttgatactccctctttagctattgctaatgcagtcagagagacattacggttaggggatgtggttgaacagatgttgcaacgttttcaagccttaatggaaggagatcgtctgcaaaaaagggagattagccagctagaagaggaagtggaattgctccatagcagtattaaattgtatatggcacaaattcagcagcatgatcttggtactgaagactctcgtcgctgggcagaaattattgataccgcgatgaatttgcaacaatcttccgctatcatagcgcgtatgtctggtgaggtggtgaataaaagtttagatcatcacttaaatttatcggaggaaggacgtcgtgaattacagacactccttgagcgtctgcaaagtaatctgaatctggcgatgtcggtgtttgtttccggcaatatggagcatgcgcgtaaattacgccgagcaaaacatcgattccgtttactcaaccaacgttactcgtttgctcatgtagaacgtcttcatttgcataatatgcaaagtattgaaaccagttcgctgcataccagtttgttgggtgatatgaaacggttgaactccttattctgtgcagtggcttaccacgcattagagcggagcggatcttcttcagaacaggttaatcttcaacaatga

SEQ ID NO: 297641 - DNA, 1029 bp, Proteus mirabilis
atggcacacattgtaactcataatcacaccaccagagaagtctggttaacacaactcgcgcaggcaatcagtgatcctgttgaattactccaacttttagcgctggaacatcacgctgaactacaacggggtgctcaggcgagacgactttttcctttacgggttccccgtgaattcgttgcgcgcatgaaaaaaggcgatcctaacgatccattacttttacaagtattaactgcacatgctgaatttaccctaacgccgggattctctacggatccattagatgagcaacaaaatgcggtgccgggtttattacataaatatcagaatcgtgcattgcttttggtcaaaggtggttgcgctgtcaattgccgttactgtttccgacgccattttccttacgaagataacaagggaaacaaagctaactggcaaaaggcaatagagtatatcaaaaataacccaaaactcgatgaaatcatcttttcgggtggcgatccgctaatggccaaagatgacgagctagattggttaattactcagctagaagccatcccccacattaaacgtttacgtattcactctcgtttacctgtggtgatccctgcgcgtattactcataggttatgtcagcgcttacagcagtcacgtttacaaaatattatggtattgcatatcaatcatgcaaatgaaattgatgatgcgttaatagaagcttgcttaaaactaaaaaatgcccatgttacgctattaaaccaaggggtattactgcgaggggttaacgataatgcccaaacccttgctgatttaagtcgtgcactatttgacgcaggcatcatgccttattaccttcatgtgctagataaagtacagggagcagctcattttatggtaccggacagtgaagcgcgcgaaataatgaaatcattaatgagtcttgtctctggctatatggttcctaaactcacgcgtgaaattggaggagagccaagcaaaaccttgcttgatttaggcttacgtcaggaatga

SEQ ID NO: 297642 - DNA, 696 bp, Proteus mirabilis
atgaaaaagaaatttctctattttaccttactagcggctatatcaacatcagcgctagctgtaacaccttcggctcaattacagatcaatggggatataaaaccgccaacttgtacaatcaatagttctaacaatacagaagttgtctttgactatggccgcatatcgccaagcttgataccacaatcttcaaactatcaatatgtggatatgaaaccagaaacaagcatcagtattgaatgtgatgctaaaacttatttgacgtttatacctactgacacatatggtgatgtagatcttgattataatactagttttgatagtgcttggtttcgcttagttgataaagccaacccagataaagctgttggggcttcattttttaattggaaagatgcaactgttgacggaaaaacggcttttataagccgagcaacacctaaaacagctgaagtaggggtatctgtcttagttaaaaataatattcatgggtggacatcagagcaacaagaggatgtatccgccgcatctcttaaattagtctcaggtgaaatctttaccacaaaatttataccaggaatatcatctcatacatttattctttctcgtgataagctagctaaaaaagcgatagatattagtaatggactcgattttattggtgaggccgtattaacattctctttcggtgtttaa

SEQ ID NO: 297643 - DNA, 147 bp, Proteus mirabilis
gtgctaaataatgatgtatataatcaagtattcccttcgttattaatgacaagagctatattaggattagggtttaaattagtttgttatgacaatattctgtcaaatattggtagcgaaaaattttatgcggaaaaatatctttaa

SEQ ID NO: 297644 - DNA, 480 bp, Proteus mirabilis
atgtcagaaatgatttacttaacgctaaaaggaaacaaacagggacttatttctgcggggtgttctagctatgattcaattggtaataagtatcaggatagtcatagagatcaaatacttgtctattcaacaacctatgatttagcaaggaagcagaatgtatcacacgcgccatttatcatgataaaagctgatgacaaatcctccccccttctgataagtgcaatttcaaataatgagattctagattgcctttttgaatatcatcgtgtagataaaagtggtgtaatgattgcctacaaaaaaattctactcactaaagcatccatcatccgtattacaaatgagtcaccgaactcgttaactgaaaatgaaatgcaaccatttgaaaaagtgtcactactatacgaaagtattacttgcacacacaatactgcaaacacttcaggttatagcatccgaagcgaatcaattctgtag

SEQ ID NO: 297645 - DNA, 579 bp, Proteus mirabilis
atgaaaatcaatgatgtatactttaatagatttgacgttcctatagtaagttctccaaatccttacaatgattcattaatagataatcctgttaaaatctttattgttgtcaattacaattggggaatagggcatacaggtatagttgttggagaaggtgaagatgctttgttatatgacccatctggaggttactccgaatgcccctccagaaaatgttataataatatagaagaattacgaattccacgtggttcaggcgaatacttcaaatatcctgagtttgattgggatgactatctatcgtttcaattatgggatggtcctgacgttcaggtaattgaatttgtagtacctagagctcaagcagaaaaaataacagaactaatttatgaacatggtggagcaggatgggctatgtgtgcagacaccgtgttcgaaatacttaaagaaagtggcggtatatttaactcattggataaaaagctctatttccgcgaagacccttggaatctcagagaaaaattaattgaccttcactacccaaaacgtggaggggttatatctggtgcttattaa

SEQ ID NO: 297646 - DNA, 438 bp, Proteus mirabilis
gtgcttattaaatctagtttttttatcacattaatatcactatttataagtattgttgttttttacttagaaacagttcatgagtttttctttaaactttatccctattctgtaaactctaaaatagttattgaaatacagaaaatattatcatattcatttttttcttatctgatagctcttgctttaatcacactatttttcattaaaaaaattaattttgataaaaaattccgttttatcatatatttattaattccctatataatcaatatgattgtttggtattttaatggatatcaagttattaattataaatatacttcagtaatggttactgattttttatttatatcctatgtcatacacttcatttttattattcctatcattgcatatatactggattacactttccgttttaaaataaaaaagtga

SEQ ID NO: 297647 - DNA, 1206 bp, Proteus mirabilis
atgactaaaatatttaaaatcccctttgccacgcaaggggataaaacagttgtgcctgttgagatccaaacagatggctcagtatcttatactcaaggttacggttatgattatgagcgtgaccaagtcactgatccggccgcaaaagatattgaacgtgaaaaaatgaatagcctattttacgatatcaccgagtctattggtgaaatgcaattacaaggttttgctaaatggtcagaagcgggcaagccctatgccattcgtagtgtggtttatcataacaataaggtatggcagtctaaaattgagaataataatattgagcctattgccggtaatgcatgggctgagttaaaagctgatatcaccgcgaatgaagtgggcgcttataacaaagccgaggctgataagcgttttcagccggtgggtaaatatcaagtggaaggttatagctatgcaaaagcggaatctgatactaaatatcaacccaaaggcaattatgctcctgcgggaaattatgcgaataaaggcgatagctataccaaagcggagtctgatgggaaatatcaacctaaaggcaattatcaagcttcaggagattatgccactaataccaatttaaaaaatgagcttaataaaaaatttgataagggtaatatttctcaagcgaccggaacctcaacggctcatgttattagccaaaaagccgccactgatgcttttcagccaaaaggaaattatcaacccaaaggcaattatgcattagtgggtgcatcctatactaaaacggaatctgataataaatatcaacctaaaggcaattatttagcgacaggttatagttattctaaatcagagtcagatggtaaatatcagcctaaggggaattatttagcatcaggttatagttattctaaaggtgagtcagatggaaagtatcagccaaaaggaaaaggattgttaggaaacaatcaaaaatggatagatgtaactaaggaacgtaaaattggagaggtttacaccaataattcagaaggacctatttatgttcttatatggtctgatggccgtgcagttgaatttaaattagatggtattttaattaaagggtatagcagtttggataattgtagttttgttgttcctaaagggggaacttatcaacttttaaatggaagaatgggaacttggatggagttaagataa

SEQ ID NO: 297648 - DNA, 2433 bp, Proteus mirabilis
atgtcaaaaattaaaaataatgtttctatcactgaaatgagccggcgtggcttcattcagtctgcagctgttctttctggcgctgctgctgtagctggaacggtatcattacctttctctgctaatgctcaaacaccccagggtattcgtcctgatgagacgtctgaaaccatcaaatacagtgcatgcttagtgaactgtggtagtcgttgcccattaaaagttcatgttaaagatggcgtgatccgccgtatttccaatgaaaccatgtttgatgactcaacctttggtcttcatcagatccgtccttgcttacgtggacgttccgttcgttggaaaacttataatccagaccgtttaaaataccccatgaaacgtgtcggtaaacgtggtgaaggtaaattcgagcgtatctcttgggatgaagcgacttcgattatcgctgataagctaaaatatactatcgatacctatggtaatgaggctatttattaccaatatggtactggatctaccggagcgaatttacatggtagaacagcctgtaaacgtctattaagtacagtcggtggcttcttaagtgactacggtacttactcttattcacaattaaccggcatcgtcccttatgtgtatggtgatatgctggaatctctgttaacagaaatcgaaaactcagatttggttgtgatgtttggtcataatcttgctgaaactcgtatgtctggcggtggtcagttctatgaaacactgaatgcgttagataagagtaaaagtaaagtaattattatcgacccgcgtcgtactgatagtgtcacaacattaggtgcagagtggatccctatctatccgggtactgatgctgcattagtggctgcgttaggttatgtgatgatccaagagggtatcactgatgaggcatttttacgtgaatattgcatcggttgggataaacaaactctgccagcctcagcacctgaaaatggctcttacaaagactatattctcggtaatggtcctgatggaattgctaaaacccctgagtgggcaagtcaattaaccggaatttccgttgcgcgtattattcaattggcacgtgaaattggtaatgccagagcggcgtggatctcccaaggctggggtattcagcgtaccagtaatggtgaacaagcttgccgtgccattatgatgttgccattaatgtctggtcatattggtcgtcctggtactaataccggatgttggggcggtagcattgaataccctgtcgcaagttttgccataccaaatccagtaaaaacccagatcccaacatttatgtggtctgaagcggttgctcgtggtgaagagttaaccagtaaaaatgccggtgtcagaaataaagataagctggatacgggcattaaatttatgtggtgttactccagtaatgtgattggtaaccagcatgctgatctcaataaaacacatgaattactgcaagatgaatcaaaatgtgaatttattttagtgtgggataaccacatgacaccatcagcaaaatatgccgatattttactgcctgatgtcactactgtggaaactaacgatcttatcaataactcttatgctagtggtgcgtatcattatatggtgcgtttacaaaatgccattgagccgttatgggaaaatcgtcctaactatgatgtattggcagatatcgctgaaaaattaggtgttaaagagaaatttactgaaggtagaacctaccaagagtggattgagtattgctataaccaagtaaaagcaaataacccagcgcttccttcttttgctgaaactaacgatatggggattgtggatagaaaacttcctcctcgtagcgcttatgtggcattagaagcatttcgccaagatcctatcgccaacccactaaaaacagcatcaggtaaaattgaaatctattctgagaaattaatgcaagacactgaaggttggatcttaccagaaggtgatcgtattcctgcaattccagaatattgtaaaaatgaagaaggtgttgaaaacgttaccttaaaagagaagttcccactgcaaatgacgggcttccacgataaaggtcacgtccactctacctattttaacgtcgcaatgttacgtgaagctattcctcatcaattttggttaaaccccgttgatgcggcacagcgtggattaaaatctggcgatattgctgagatttataacgaacgtggtcgcttgcatattcgtgtcaaagtgacagatcgtgtattacctggtgtgattgcagtaccacaaggtgcatggcgttcacttgatacaacaggtgtagataccggtggatgtattaatacattaacaagctggcacccatcgccgtttgctaaaggaaatccacaacatactaaccttgttgaagtgaaacgtgcataa

SEQ ID NO: 297649 - DNA, 1257 bp, Proteus mirabilis
atgcagcagcaactgcttacatggatacgtcagtttaatgaagagtacgctcaaatcacttctctgttacttgttttattgatcatttttgttgttgctcttgttctccactttattttgcacaaacttgtgctccctaagctttcaaaagctatcagtaaatacgatcaaaagtggcaactctcttttgaaattaataagttattcagtcgatttgcctttcttatccaaggtgtagtcattaatatccaagccttattatggatgggacccggtaagacacaggagatattaaccaccacagctcaagcatggtgtttacttttcggtttattgatgattttctcaattatggatctctgtttgcagatcatgagaaattccccttcttttggccgattaccccttagaggtattttccaaagtttaaaattagtcgccagcgtgctgattggtatcatgattgtttcattactgatcggtaaatcaccgcttattttattaagtggtttaggtgccatgactgcggtgttgatgttggtatttaaagatccaattatgggacttgttgccggtattcaactctccgccaataatatgattagcttgggtgattggttagaaatgcctaaatatggtgctgatggtgccgtagtggatattagcctcaccacagtaaaagtacgtaattgggataataccgttacgaccattcctacttattctttaatttctgattcgtttaaaaactggcaagcgatgacacaatcaggtgggcgtcgaattaagcgcagtttatctcttgatatcaatagtatttactttttagatcaagagaatattgataaattagaaaaggcacagcttcttgaaccttatataaaaagcaaagtaggtgaaatctccagctataacgctagcctttgtcatgagcatcaaatgccacttaatcaacgtggtatgacgaatgtcggtacatttcgcgcttacgtggaagcttatctaaaaaatcatccgaagatccataaacagatgaccattatggtaagacagcttgccccaacctctgaagggctacctatcgaaatttatgcctttaccaatacaaccgtgtgggtagagtatgaagctattcagtccgatatttttgatcatatattcgctattcttcctcagtttggtttacgaatacaccaatcaccaacaggtagcgatgtcagagcattaaaattccctaccaatatcgacacaccatag

SEQ ID NO: 297650 - DNA, 1014 bp, Proteus mirabilis
atgacgagtaagtcgggaaatcaacctcacacagatgaggcgcctgcaacgcttttggcagatacccatgatcaattaagccagcaatctattgatgaacaagctgcgctttggttcacccgtcaacatagtcagcaaatgagttcacagcaacgacaagcctttaaacagtgggtagcagataaagataatcaacaagcttatcaagctatcgcggaaatttggcatagttgtgaagccttaccacgccctactattgtgcctatagaaaaaaggaaatcttcactctggcgcccctttattcacactacagccgcactctgtttagttgctgtgttatatcttccttatagtcatttacctgccctgttaatggataatatgaccttagccaccagtaattttcctaaagagatgaccctcgctgatggctctaaagtttttttaaatagaaatacacaggtacgcgtctcgtatgtccaaacccaaagacgcctttggttagataaaggtgaggcttattttaaagtaaaacccaatccttatcggccattttatgtccatgctgatgagcgattaattaaagttgtcggtactgaatttgaagtgagtcgttatcaaaataatcaaattagtgtcgccgtacatgaaggcattgttgaagttaaagccacagaaaaatcccctgcgacttacctatatgctggctctcaagcaattagccaatcaactgataatcaatttgtcatttcctcagtcaatgctgattctgtaggaagctggcgttttgggcaactccatttctttgaacaaccacttggtgacgtgatcactaaattaaaaccttatctggatatcaacgttcatatctcatcagccgatgtagccaaaataaaggtatcaggtgtggcaaatattaatgacgcgaaaagctttattactgcacttccgctacttttaccggttaatgttatttttactgataaaaataatgtgttaattatcaataagtaa

SEQ ID NO: 297651 - DNA, 1050 bp, Proteus mirabilis
atgcaggtcacaaggaaacaagagcgtgttattcgtcaagcacttgatcattggcaacaatctggtgagctatcagcacaacagcatcaacaactagaaagtacattacaacgccttccctttgattggaaaagattgagtcgctatgctttttggatagctattgcctgcttaattattgctgccgttaacctttttagtgataccgcattaattcattatcttatcgaattatttagtgtctctgagattatgcgtgtggtatttcctgcgcttattgctggtatgttttatttttggggctttaaacgccaacgcaaagaaatactatggcattacagtactgaatttattctctttttagggatattatttacggcggtttttctttggcaactcggtgagttgttagatgatggtagtggtaatattgcgccacttcttttaatgggttgcattatttatgcggtgattggctttatcagtcgctcttcattagtgtggttatttttcttattaatgttgggcaattggtttggtgctaaaacgggttatatgtccggttggggcgcttattggctaggcatgaattatcctattcgcttcgtgttatttggctctgcattattagctggatgctattttttgcaacatattttaatgcgtcgtcgcttattttttatgacaaagataatgggactgtcttatctctttattgcgttgtggatcatgtctatttttggtaattacgatccggatacgtggtattacatttcaagtgtgcagttattaccttgggctttattatttgctgttgttgctgtcatttgtatttatatcagtttaaaaaccgatgatggcatgttgagaggctttggactaacattccttggtatcaatctttatacccgcttttttgaatatttctggaatagcttacatagtgcaattttcttttttatcttggctatttctctgatttttattggacgtaaagcagaaaaaatttggcatgccattgaaaatagccgcatggtaaataagcaataa

SEQ ID NO: 297652 - DNA, 390 bp, Proteus mirabilis
atgtctaaatcggcaaaaggtacgacagaacggcatggacggaacgtaaaagctaaatctggtttaaaccgctcaatactggagcagggctggtatgaaatgcgccgtcagcttgagtacaagcagctctggcgaggaggtcaggtactggcaataccaccggcctacaccagtcagaagtgcgcttgctgtggtcatacagcaaaggaaaaccgccagtcacaaagtcaattcgagtgccttgaatgtggatatacagcgaatgctgatatcaatgcggcacgtaacattttagcggcaggacatgccgtgcttgcctgtggagggagggtgcagtcagaccgcccgtcgaagcaggaacccgccgaggtgattcagacatcagtctga

SEQ ID NO: 297653 - DNA, 2487 bp, Proteus mirabilis
atgttaattccttattcaccccacacaatatggaagaccatttgtgcgactttgctattaagcttggcgtttttctcacaagcagagcaggacgattctgtggaatttaacattcatatgctagacgcggaagatcgcgataatgtcgacctttcacgtttttctacctcaaattatatcattccgggtatgtactatttagatattcgtctaaatggtcgcgactttcctcgccaaaatattaattatattgaagtagcagataatcattccgtggcgtgtatcgaccctactcttttaaaaaagttaacaatcaaccaagaaaaccaaaaatatatcaaacaaatatcaccagattgttttgatattagccaattacccggtatctcgattaaaaatgatggtggtgtacttgatatcacgttaccgcgctcattaatgaaatatgaagaatctgattggactcctccggagctttgggatagcggggtctctgggcttatttttgattatacactaacaggaacgtcaactcgccctaataaaggcaataataacaataccttaactggttatggtcaagcgggattaaacttgggtgaatggcgtttacgagctgaatatcaaggcaattattcttctgaatattcgtctaacaatcgttttgattggaaccaaatttatgcctataagccattacctgatctcgcagccaaattaacggttggggaaacttatttaaactctcaaatttttgatagtttccgttttacaggagccaatttacaaagcgatgagagaatgttacccccttctctccaaggctatgcacctgaaattcatggcatcgccaataccaatgcaaaagtgacggtaactcaaaatggacgtttaatttatgagacaaccgtacctgctggccctttcgtgattaaccatctacaaaataccgtacagggtcaactcgatgttagagttgaagagcaaaatggtaagattaacgaatttcaagtgcaaaccgctaatttgccttatatgactcgcccaggatctgtgcgttttaatacctcactgggacagtcatccgtgaacaaccataaaatgcaaggccctattttctatcaaggggatttttcatggggaatgaataatacatggtctctctatggtggtgctttacttaccgctaaagattataacgcatggtctttaggtatcggccatgatatgggacgttttggtaccctttctggtgatattacacagtcttatagcaaaacctatgataatgaaaaaatcaatgggatgtcttttaaactaaactatgcaaaaacttttgatgagtaccacagtaccattacctttgcaggttatcgtttctcagaaaaaacatttcgctctttttctcagtatattgatgagcgttataacggcatcaataataatggctatgaaaaagaaatgtacaccattaccggtaataaaactttttgggcagatgatgcagagaaatcgaccaccctatatctctcttatcgtcaccaaaattattgggataaaaatactcaagagcagtatggtgtcacagtaagtcgcaatttttccattatggggattgagcaaatcaataccaacttgtcagcatttcgtacccaatataaagggaatactgacgatacgctctcttttaatatttcactaccattaggaagtggtcgcaatattggttataacttgcaagataacaatggcaaagtgacacaaatggcctcttatgctgataatcgtgattataataatttatggcgcataagagcaggcttaagttcggataagaaagccaataccgatggttattatcaacatcgttctcagtatgcagaaatcaatgccaatgcaagctatcaacaagataattacttagccgtgggcgcaacgataaaaggcggttttactgctactcgttatggcgctgcattacacagtagcagtatgacctctagcaccgcaagaataatggtggatactgatggtgttgcaggggtgccctttaatggtcaaagcacgactacgaaccgcttcggcattggtgtactaaccgacttaacaagttataacaatgttgatgcacgtattgacgtcgataagatggatcaagatatcgaaacgcgtaaagccattgcttcaacaaccttaacagaaggtgccattggttattaccaatttccggttcgtcaaggtgaacgcttaatggctgtcttacagacaactgataataaataccctccttttggtgcagaagtcaccaatcaaaaaggggaaagtattggtatggtgatggaagaaggccttgtttatattgcgggtgttaaccttaatgaatcattaaatgtaatttggaacggtaaaacaaaatgttcaattaccattcccgcggaaataacagatcccttaaaacatcaatcgctcgtttgtcaggatcgttaa

SEQ ID NO: 297654 - DNA, 396 bp, Proteus mirabilis
atggggcctgctggttattttgtcgcttactcgcttgccagagagaatctacaattaggggcgacagttattgctgactcagtgaatccattggcattaacccgtgatgcctatagagaaatagctttatccacaagaactggttatttagaaattgagatcatatgttccgatataattgagcatcgtaaacgagttgaaaccagagtgtctgaagtcgagggattaaccttgcctgacaggaaacaagttacagacttagtttatgaaccatggaacagagaacaccttattttagactcatacagtttatccagtgatgaatgtgtctcgcggatcattgacgtcctttcccaatgttcaactcttgagaccccatcaaacgaaggaaattag

SEQ ID NO: 297655 - DNA, 453 bp, Proteus mirabilis
atgcgtagtcgtccagcctctcgtttgatagtcctttcacctgaaagccatgtactactctttaagttctgccataaatatgatgctttagagggaaaaacatattgggctacacctggaggacaacttgagtgcaacgaatcttttgagcaggcagcgttacgtgaattatttgaagaaacgggcctgacaagaaaaactacgggaccacaaatagcctccagaaccttccctatgatactgccaagtggtgagaatgttattgctgaagaacgtttctttataattaatgcagataaatcagatatcgactgctctggttggagtcacaacgaaaaagaagtcattcacgatcactactggtggaccttagaagagcttagacaaaccaatgagatcattttcccactcgatttgataattaatatacttgaaggtctccccagtacttaa

SEQ ID NO: 297656 - DNA, 3594 bp, Proteus mirabilis
atgacgacaagagagtatttgcaaaaatcaatttttgagttggaagcaatattcgaacggtcgcacaataatgctagtgaacttgaacgactattgaacgaactggcctttcgaaacacagctaaggcgcgaatgctgacgactaaagtcgaacaagccctaactgccgttaacgattgcagtttagtctctatgcctagttccactccatcagagcttaatcctaattcagtattcactcaatcatccgaagttgttgcccacaatacacccgaaatgacggtacaactaaagcataaacctactccagacacagaccagcaaattgagctaggttcgttcccgtctttcactccgtctggtaaggcaaatgatgcgcccgcgatattgactgcatggacagcactcgaagctctgtcacctcaaagctataagcgcccagaagatatggcagctggtgaccgttctagagttgccctattggatcgagacattccatggggaccaaatgcccgcagcaagcctaagcataaactttatttcgaaatcattctcggcgctatcgcactcgacaaggcgacagacgaattggtcaaggtttttggtgaggatgaggagcaatcaaggccggatggcaagaaagcggccataggctcaatcttggtcgacaaggaaggctttgttcttgaaaataacggagtcgccgtttccagttttgcttgggcgctcaaaccagcactcgatctgaagcttggtagcttaggagcctggccgaaagtagaacggcacattatcgagtgtttagagcagatagttagtcgccataacgaggatggagaacccttaccgatcgatctggatactattattaatgctcatagatggcttgtgtcacaattcgatgtacccgagcatttggttgaaccaccttcatttgtaatcaaagtatttcattatttcaagaacaaaacaccacctgagccttcgttgctgaattctttctaccttgaagatcttgacgaagcagtaaaattgctcgaagcggataatgcaggaattggtttgcaacgttacatgggaataggcagacctagccagaaaatcgatgtgttgtcccccgtttccgcagtcgagccgttcgtcgcaccgtcgctcataccgcaggctcgttggccttcacaaggtggtcacccattagtgttacttcaacaggccgctgtgaatgcggcgcgtgttgagctggttgatgctccaggtatcattggcataaatgggccaccgggcacaggaaagacaactcttctccgagatatcgttgttggttgcattcttgatcgagccacagctatggtcgccttcaacaaaccacaggatgccttttccacaacaggcgagaagcaggcatttggctctaatgcttttctgcatttctacaggttacatgaatccttgaagggccatgaaatcgtcgtagcatcctccaataacaaagcggtcgaaaacgtcagcaaagagcttcccctcaaagaagctaatggacgccatgaacaaattgcctatttccgatccatcagtgacttaattgcaaaccccaaacgcacaggcgccttcgaaccagaggatgctaccctatccgaacctatcgagacctggggattgattgccgccacacttggtaatagcagcaatcgaggtaatttccagcaaaatttctggtggaacgaggaccgcggtttccttacctacctgaaagctgctcgcggaatgaacgtcatgcgtgaaatcaaggatgaacaaacgggagcaatcattgatcgagtgatgcctagcgtagttatcaatgagcagcccagcaccaacaaagcagatgccgctgccgcttggcaaaaagcacgaaccatattccttaaactaaaggaaacgatagatactgaaatagccagtatcgaaagtatgcgccgagatattcaggcactcaagggagcgaccattgaacttcaaaaactggaacagcttcgtcctagtctaaatgaagccctcgaacagacataccagattgctgaatctgcccatagggaacaggaaaaggcaaagtcgcaagttgagttgaacaaggctttgctcgatagccatcttgctggtcgccctggttttttctctcgcttgttcgggaccacagcttggaagtcttggaagtcggccttgcaaaatctctcggaaaccttacagcagtctgcctcacagatgctgattgtgaatgatgatcttgagcttgcaagagctaagtggaacaacgctaagtcccagttacaacaactagaacatgaaatttcaattaaatggcaggtagtagagaaattgaaggcaacagcgactcgggctcgaaatctcatgggtgacagagttgttgatgagcagtttttcgagcgagagcacgaggctatccacctgacagcaccatggcttcccgatgaaattcatcgcctgcgtgaggatctcttcgccgccgccttggctgtgcataaagcattcatcgatgcttcggctaaccacttacaacacaatcttgggttattgatgtcgaacatggtagctggcgcatttcagtctccagctcaccgtagacttctccctgacctctggtctagcctttttatggtagtacctacagtatccacaaccttcgcctccgtccggacgatgttcggagatctgcctcctgaaagtattggctggcttctagtcgatgaagcgggtcaagccgttcctcaggcggcaattggcgctatcatgcgggcaaagcgttctattgtagtaggcgatccgttgcagatcccgccagtagtttctcttcctgagaagctgaacgctgcaatctgccagtttttcaatattgacccgttagaatggtctgcccccacagcatctacgcagacactcgcggatcaagcatcacgcttcaaatccacattcatcacggacgctggtgatcgagaggttggattacctctccttgttcacaggcgctgccagaatccaatgttcgatatctctaacgctattgcctattcagggcaaatggtccatgccgtcagacctaaaaaaccggattctattggatcaacattaggacaatcacgctggttcgacgtcaatggcgatgccgagacgaaatggtgcgctgacgagggagacatggttgtgcaaatgcttaaaaaattagcggcatcaggcattacaaatccagatgtctttatcatcacaccattcaagatcgtagaacagcaaatgcgtcggcgtctcaacagtgagacaagtctgctgaagacgttaggtgtaaagttggatgaatggagccgtgatcgtgtaggcactattcatacgttccaaggccgagaggcagacacggttatcctgctactgggtgctccgaaagccagtcagcaaagggctcgccagtgggcagctagcccgccaaacattattaatgtagccgtctcacgggctaagcaaaacctatatgtggtgggttcagctgttgcatgggctggggcaggaactagtctgcaggtcctacaacggcaattagcataa

SEQ ID NO: 297657 - DNA, 726 bp, Proteus mirabilis
atgttatggaaagttgttcgtattgatttcactgagcgttgtgcttgtgttttcggtagcaaaacgcactatatcacatcaggtaagggatatgtcgttgttgataatgaaggtaacgaaaggttctccggtcctaattgcgcgcgcaatcctgattatgttagtaatccagaggaaaaagttcctgatctgacgaagggatgtttagaacctgatagtgaagacgatggggcagcaccaagttctcggcttaaaggtaacgacgggaaagtgagagttgcttctataataaatgaacataacaaacaaaacgctatcgcatatctgttattgcgtgttcaaaaacttcaaagtatccctaaaattaaatacagtaaacttgatgctatttatagacgataccaattggctagcttaacagataacgattttatttttttgtacaaattaatagacagtaactcttttccagaatattcacttaaaaatttgcaggctctttatgcttgcgaattttggatcaatcaatttattcaagataatcaggaaaaagatttaagctatgttgaaagtctgcggagttatcttcatgctaaactagcattgactccgtctcaaattactggattgaataaatggttcgataatactaatggacgaaaaatggttagattaaaacctaacccatttgctatcgatccaacagtgtattggaagaaaaaataa

SEQ ID NO: 297658 - DNA, 3279 bp, Proteus mirabilis
atgagccatatcttcactgaagccaaattggaacaggcgataatagaactgttaggacaacatacaaacaatgctgggcaaacctgctatccgcattatctcggcattactattcctcgcaaaaacaacagtgaagtattgatagtggatgatttgcgccagtatcttgctaaacagtatcaagcagatggcatcaccgacggtgaaatcaccaggattgtacagcagttgcaatctctccctgcgagtgatctctaccaaagcaacaaaaccttctgccattggctcagtaacggctttttacttaagcgtgaagatcgcaaccaaaaggacctatatatcgaacttatcgatactcaaaccttgcccgaccaattagtaaaattatttgcaggggaagaagtgctatccgtggcagataataatcgctatcggctagttaatcagttagaaatagaaggtcaggcgcgagacgacggggtgcaactgcgaatccctgatgcgattttatacgtcaacgggctaccgctggtggtctttgaattcaaatcggcagtgcgtgaggaagaggcaacgctatttgatgcatggacacagctttgtgtgcgttatcgtcgcgatattcccaagttatttgtctataacgccttgtgtattcttagcgatggcgtgaataacaagatgggtaatctatttgccccttatgaattctactacgcatggcgtaaaattaacggcaacgaatcaacggaaaagcagggcatcaacggcctgtacaccttaattgaagggttattccaccctgctcgtttattggacgtactaaaaaactttgttttcttccctgataccagtaagcatgaagtgaaagtgtgctgccgctacccacagtattacgcggctcgtaagctctattacaacattgagaaagagcgtaaacagatcactgcggatggtgaaaatatcggtggtagtggtaaagggggcacctactttggcgccacagggtgtggtaaaagctacaccatgcagtttttagcgcgtctattgatgaaaagcgtcgattttgccagcccaacgattattttaatcactgatcgcaccgatcttgatgaacagttggcaaaacagttttgcaatgcaaaggcctttattggcgatgaaattattgtgcctgtcaccagtcgtcaagatttacgtgataagcttgcaggacgtgctagtggcggggtattcctcaccactattcataaatttactgaagatatccaactgctttctgagcgcagtaatattatctgtatctcagatgaagctcaccgtagccaaatcaatctcgaccaaaaaattatcatcaaccaagaagacggtacggttaaaaagacctacggttttgctaaatatctacatgattcactgccgaatgctacttacgtcggttttaccggaacgcctatcgacgccaccttagatgtcttcggggaaactatcgatagctacaccatgaccgaatcagtaaatgatgagatcaccgtgcgcattgtgtacgaagggcgtgcggctaaaattgcccttgataacagcaaactggaagagatcgaacgttattatcaagaatgtgaagcccaaggcactagcgaatatcagatagaagaaagcaaaaaagccatggcgaacatgaactctattttgagtgatcctgatcgtattgatacgttagcgaaagattttgcgcaacattatgaaaaacgagtagaagaaggttctaccatcaaagggaaagcgatggtggtttgtgctagccgtgatattgcttatgcgttttatcagagcctaaaattacaacggccagagtggtttgaagcgaaacaggcaattgacggtgtggaactcaccgaacaagagaaaagcgagttaatgcctttaccaatggtcaatatggtgatgactcgtgggaaagatgatcatgaggcgatgtacaacttactgggaacaaaagactaccgcagagagttagataaacagtttaagaacccgaaatccaactttaaaatcgccattgtggtggatatgtggctgacgggctttgatgtgcctgagctagataccatctatatcgacaagccgctacaaaagcataaccttattcaaaccatttctcgagtgaatcgtcgttttgaggggaaagagaaggggctggttgttgactatatcgggattaaaagccgtatgaatatggcgctggcgatgtattctaaagccgataaatctaactttgaagatgttcagcaatccattgtagaagtccgtaatcacctcaatttgctttcacaggtatttcatcaattcgatagtcgcgattacttttcagactcgccaacacggcaattagactgccttaatcgggcggctgagtttgtcctgcaaaccaagaaagttgaactgcgctttatgggcttagtaaagcggttgaaagccgcttatgatatttgcgtgggcagtgaagatatcacccaagatgaacgtgaacatatccatttttatttggctgtacgctctatagtctataaattaaccaaaggtgatgccccagatacggcgcagatgaatcaaaaagtgcgagagatgatagcggaagcccttaaagccgaaggcgtggaagagatcttcactttaggggacgaaaaagctgaaaatatcgatatttttgatgatgaatacatggctcgtatcaataaaattaagttgccgaataccaaaatgcaactgttgcaaaagatgctccaaaaggccattagtgatttccaaaaggtcaatcagctgcaaggaattaatttctccaagcgtttccaagcattggttgagcagtataaccaacgcaaagaaaatgatgtgctcaatggcgaagagttcgacgatttcactgcacaaatggcggatatgatttatgacatcaaggcagaaatgatgtcgtttgaggatatcggcatcgatatggaggagaaagcctttctcgatattttgcagcatatgtgccagaaatacgattttacctacgatgacgacaaaatgctggcacttgctaaggacatgaaacttattgtcgatgacagcacacaataccctgactggagcaaccgggaagatattaaagcgaagctgaaagttgacttgattttgttattacatcgttatggctttccacccgtggccaatgacgaagtatataaaagtgtactggaacaagccgagaactttaagaaatatcagttgggatga

SEQ ID NO: 297659 - DNA, 1431 bp, Proteus mirabilis
atggggagtgaggtaaatttattaactcttggtgatgtttgctacattactgatggtgctcattctaaagttgaacggcaggtatctggtgttatgtatttaacttcgaaaaatattggaagggggcaattaaaactagataactttgattttatttctgaatcatgtttcttgaaactattcaccaatacacgtaaagcacaaaggcgattacaagctggggatgtgctaatgggaattatcgggacttttggaaattattatctgtataaaaagactgaccattttggtatttcaagttctattgcaatattacgtgcggagccaagtaaattgcttcctgagtatctatgctattatatctcaagtaactcattcaaaaatatcgtcgaaaagtttaagggcggttcagttcaaggatataccaatatctcgacgttgaaagccttgcctattcctgtaccatccctagatattcagaaaaaaattgtaaataatctcactcccattgatagcaaaatttctcttaatcaccaaatcaaccaaaccctagagcaaatggcgcaaacgctatttaaatcatggtttgtggattttgaccctgtgatcgataacgcgctagatgccgatttttttgaacaggatttaggcttttctgaagaattactgcatcgagttgaagtgcgcaaagcagtgcgtgaaagtgataattttaaaccgttatcagaggatattcggcggttatttcctgatgcttttgaagaatgtgctgagcctgcattagggcttggggggtgggtgccgaagaggtggcaaatatcaacagtagatgatgaacttactgtaaaaggtggttctaccccaagcactgcaaacccagatttttggaaacaggggaatattcactggacatctccaaaagacctttccggtagccaagagaaaataatgctcgatacagagcgaaaaatcactgtacttggactaagaaaaattacatctggattacttcccatcaatacagtattgatgtcttcacgagcccctattggctaccttgctatggcaaaaattccagttgcgattaatcagggatatattgcaattactacaacaaaaaggctttcacaggagtatgtcctttattggttggattcttcgatggatgaaattaaagggatcgctggtggtacaacttttgctgaaatcagtaagaaaacgtttaagagtatctcaatggttatacctgatcctcaagtgattgagaaatatacagttacaattaaaagttatcttaataaagtaacgttaaatgcaaaagagagggggagcttagaaaaactccgagacacactcctcccaaaacttatctccggcgagctgtctttgagtgatataaaaatagatatcccagaagaaacactcatctaa

SEQ ID NO: 297660 - DNA, 180 bp, Proteus mirabilis
atgataattattccaacttttaatgtgcttgcttatttatcattagaccaaacaattcactaccaaacacaatatcatatcgtctcgccagggcctgaacgtcttaaagcccctcaatgtgaatattggtatacggataaaagaaatttatacaggggaatgggttttttggtgtattag

SEQ ID NO: 297661 - DNA, 705 bp, Proteus mirabilis
atgaaaaaagtattactcagtcttgctatgctgagtgtaatatcaacgccggtattggctaaagctcctgtagctaacttaaaaatcaatggtgatattaagccaccaacttgtactattaatggagcaacacaaagtgatatgattttcgattacggagtcataagcccaacacttatccctcaatcgaaaatttattcttatcctgccagtatggttcaaaatacagttacagttgaatgtgatgcaaaaacatatttaacctttgttgcgtctgatacttatgataatacagaattaagcgttaataatacatcaggctggtttcatttagttgataaagcaaatcctgaaactgcggttggagcagcttattttgtatgggataatgtgatcattgatggcaaacctgcatatatttcacgagcaaatgacgtggctattacagggaaaagctacaataacgtcctatacaaagggccaactaatggttggacatcagaacaacaaataagcgttgataaaaacgccctgactctaatttcaggtaaaattttccaatcaaatttcagacagggaactgaaagtagttctaatcaaaccttcattttatctagaaatgaattaagtaaaaaaggaatagatttatctaatggtttagattttatgggtgaagccgtcctcacttttaattttggtgtctaa

SEQ ID NO: 297662 - DNA, 936 bp, Proteus mirabilis
ttggcgaaaaaatgtgcagatttaggtgattttatttgcttaaaagaattggctataatttatcgagacggtaaagagggggttagaaagaacattgcgaaagcatctgaatatgaacgacgtattagcattaattcgtctcactttgagttagaatcagaaaaatatgaaatggatagaagatggaaggaaaaaagagataacaaacttgattatttactaaaccaagaagagagtagtaaacaacaactagcattagcaagattttatagtattgaagatagtggaaaaagtctaatttatgccaaaaaggcatatgatttaggaaataaagaggctactgagttaatttatcggtactatatgcaaaatatctgtgaagataaagataatatcaataaagcagactactatcttaaagaatggctaacaacaggagaagaacctagtaaatacagctcttctaatgaatacaaatattctagtattagtatcattgctgattattatttagagtcaccgtgtttagttgaacgaaatcttgataaggctattgagtggtatcaattatcgttagattatccatatgaaataaatgattttttgtattctgaattaaataatatgtatactaatacaccaaaatacataagcaaggatcctttcgtgaatgtgtatttatctacactaaaaaatcataacgattatattttagatatgaatattcgattaggaaaaatgaattttgcaatatcttcttttgaaaaactttatgaagtacttctactcaaaggtgatgtgaaagaagcatattattatggtttactattaaattatgatgtgaataatgtcgctatgttttattctttatctgacattgagcgtaaaaatattgaatatcgtgttgctgattatttaaaagaaatacaaaaataa

SEQ ID NO: 297663 - DNA, 1728 bp, Proteus mirabilis
atgcaagaaaaaccattctcccttacatcacatcatactgacaaacaacatcgtttattaaaatggagcttactcagcttatattttatctctgtccccttattggctgatcccgtcaatcaagcactctctatcgatgcccgcgagcaacaacgccagcaagaacgagagcgcatgttacaacagcagaacaaccccgttgtggatacgcgtattcaacagcctgatttaacgctgcctgattatccgcaaaatgaacaaccctgctttaccatttccactatccgtcttgatggtgagtccgctaccgattttcagtgggcattaaaggccgttaacgacgccaaaggccagtgcttgggtagccaagggattttgttagtcctcaataaagtccaaaatgccattttagaaaaaggttatgtcaccacccgcgtgatggcacaagagcaagatttgaaccaaggtgagttagttctcacgcttcaaccgggacgaattaatgccattcgttttgatgaaggcacttcatggcgtgggcgtttatggaatgccattcctgctgcctcaggcgatattctgaatctgcgtgatattgagcaagggctagaaaactttaaacgcgtacccaatgtcactgccgatattcgtatcgaacccggcccaattgatggtaccagtgacttagtggtcagttggcaagaaaagcgtcctgtgcgattaagcttcagtcttgatgatagtggctcaaaaagcactgggcgctatttaggctctgcgacgctagccattgatgcgccgtttgcccaaaacgatatgttttacgccaatatcagtaaagacttgtttgataaaggcccttttggtaaccgttcttacaccctgaactatttcattcctgttggcaattggggctttgccgccaattacaatgaatataattatcaccagaatattcccaatgccaacgaagtgttacgttatagcggtaagagcgataccgcacaatttaccctatcacggttactgtttcgcgaccaaatccacaaaaccacccttaatctgcgtacttaccgaaaaaccgccagtaacgccgttaatgacattgatattgaacaacaacgccgccgtaccgcagggtgggaaatcggccttaatcagcgcagcttcttaggcaatgccacactcgatgccaatattaactggcgtcgcggtacaggcgcctacggcgcacgccgtgcccctgaagaagatacccacagcggcagtgcccgcgtgggcatttttcttggggacatcagtttcaatcaacctttcacgttgggcgaacagccttggcgctggaataccgctttacgaggtcaatggactcagcatgccctaacaccacaagagcgcatgtccattggcggacgctataccgtgcgtggttttgacggtgagcaagtactgtcgggtgaaaaaggcctgttatggcgcaacgaactggcatggaatgttttttctaaagggcaagaactgtatttagccgctgattacgggcgtgttgaaggccaaagtacccaataccttgtgggacatcaacttgccggtaccgcattaggacttcgtggctcacttttctctcgtttgagctatgacctgtttgttggcgtgccattatataagccgaaaaaattcgatacgtcaggagcgacggcaggttttagcctcaaccttgaaatttaa

SEQ ID NO: 297664 - DNA, 603 bp, Proteus mirabilis
atgagtgttttaaatgaaaattgggagcccggttttggagcaatttatacttggtttgcaatggataaacatggaaaaattgcggttatggtaaataactgttttggtgatctaccaataaatttgttaagtattaaaaatgtagaatcattgcttgatcatctttgtgaatatatgtgggaagaatctcaagtatttaaccattatccgaaaaacaagaatggcaattttgaacttgatttatactctgcttggcgacaacgctctgatttagataggaataatattatctgtgttcttcaagctgacttgataaaatcaggtcattatagtgaggctaatctatccgctaataaaggtttttttgtttatcatggagttgaaggcagtaaggaaggagaagactatcctgttggttttactggaaaaactaaaatgggagactattttaggtatttagtaccaacaatatacgcctcaatcaatgattttccagaagaattacgtcatggaatagctgtttcggatacagtagattttactatcgatagagtgttggataacgataaaatcaacgaatacttcccaaaaatgtaccgctag

SEQ ID NO: 297665 - DNA, 687 bp, Proteus mirabilis
atgaaaaaattgctatttagtcttgctacgctgattgtaatgtcaacaccagcattagctactccaccaggcgctaacttaaaaataaacggtgatattactccccctacttgcaccgttaatgctggtgataatgatattattattgattatggtgtaatatccccctcttttattcctgctgaggaaaattacgcactaggagctaagagtgccaatatcaaaatatcctgtgatgcaagcaattatttaacacttaaggtatcagatacttataaaacaagttcaacagattcagcgaaaattagcgtttttggattagttaatgcaaaaaatacagaacaagagattggtggatatataattgatgtcattgatatcaaagttgataataaacgagcttatttaggaagagtggcagataagatttggactggctcgtccgcaactatttttaaagataccttaacagcgttaactagtgaacctcaagcccaggttgataaaaacaatttaaaacttatagctggaaaagtgtttaatgcaaaaatacaaataggagcttataacgaaagtaggtatgcgtatattttatcaagaaaaaaattggcacaaaacaatatcgatttaactgatggaattgattatataggtgaagccgtttttacttttaactttggtgtctaa

SEQ ID NO: 297666 - DNA, 966 bp, Proteus mirabilis
atggatttcagaaatgtactgcgaaaaaatgccattcgcactcggtttgtgatagtcacctatttactattaatgctaatgatcggcttattagttgatagcgcgataggtgccaatcctcatttaagtttaattgataatatgctggcatttctgacattccaatcactgcctattgcttcattgattattgttgccatttcaattgtgttgctgattattgttcactttaaagggcataaaatcatgttgacgggcatgaaagcacgattaattaattctgaagagccattaaatgcccaagagcgacaattattaaatatcgtggaagagcttagtttaagtgcgactttgggctatatccctaagctttatattttagatacaccagaagccaatgcctttgctgccggctggtctgaaaaaaatgcctttattggtgtcactcgtgggttgttaaatcaacttaatcgccaagaaatacaagccgtattagcccatgaaacaggtcatattattcatggtgatacccgtttaacactgtatgtgggtattttagcaaatgttattttaacggtaacaaatatctttggtagccgcttatatatagcctctggtaaccgtggtggtaaaagtaatgatgccgccagtaaagcacgattgattttaattgtactcaacgttgttttacccattattactcaagtgctctatttctatttatcgcggacacgtgaatatatggcagatgcggcagcggttgatctcacccaagataatcaatcaatgatcaatgcactaaagaaaattgcaacacaacacgaaactgaaaattttgaagatggctcgacaggacgagcatatcgcaaagcagcctttatttttaataagggagactcccttttttcaacccatccttcgattgaaaatagaatagctgtgctcgaagggaaaaaaactttttaa

SEQ ID NO: 297667 - DNA, 813 bp, Proteus mirabilis
atgcatgattatcaaatgcctttggttctattcaccgtaatgagtcaatgggggatcggtgccgtacttgccttatctctttatcaatggcaaacacaaaactccgccatgttaagccccaaagcgttacgtacaacgattgcccttatttggttaattgaagtaattggttcttctatgtcaatgggacacctaggcgatcctctcggcgcttatcgctcagtacttggtattgctcactcatggttaagtcgtgaagctattgcctttgttatgttaaacggtttaatttccctctgggcattagcaagttggctacaaccaaataaaatacgccgtaatagcctactaggtctgttctgtggccttattggcttacccgttattttaataacagcacaaatttattatcaaatgcaaacacatgcgttatggcatacccccgcaacacaaataagttttattggtacggccctattattgggttttggctctgttattccttggttacagttgcaaggtaaaaaaaccattcatacattgcatttcggtgcttttatcggcttactgttagtattgatgggattagtaatacgagttcaaatttcaggtgctaacgtagcgagcttattgttatggtggcaagtcatcgccagtttaataataggatgtgttattatcacactatctcgtagctctttgtttacaaaggctttaatatcaattattactatttttatcctttttagcggtgaaatcgccggcagaatgctattttatggcaatgtgatgtcccaatcaccttggttttaa

SEQ ID NO: 297668 - DNA, 1878 bp, Proteus mirabilis
atgaatgtaaaagagatcattcgtcatgaaccatttggaacattactcggttatgcacctggtggtgttgcgatttactcttcagattacagcagtatagataaagaagattatgccgccaatgattcattccgtagttatattggtaatgagtatatggggcataagtggcaatgtgttgaatttgcacgccgttttctctatttacattacggggttgtttttactgatgtgggaatggcttatgagatcttctcgttacgtttcttacggagaacgattgatgacgatattttacccttgcaagcttttgcaaatggcagcaaacagccaccgacggtaggagcgttgcttatttggcaagaagggggagagtttaaagtcaccggtcatgtggcggttattaccgaagtattagaagataaaatccgtattgcagaacaaaatgtgatccacactaggttaccgcgaggtcaacaatggacacgagagttaccacttaaagtgagtgataatggctattttatcgaagatacctttgataataccaccttgctaggttggatgatccaaacagaacctaatgcctacagtttacctcaacctaaagttgcccctgaattgttagctattcatgaggccaaattagccaacaaggggcaatttgctggaaaatggctagatgaaagcgatccgttagaaaaagcctatgtgctagcacagcacggtcatacgattaatcaagacagctatgaatatttcaccatttcagaaagtgctgagcatgaacttatacgtgctagcaatgaaatgcatttgatgtatctgcatgcaacggaaaaagtgctgaaagacgataatttactgcgtttatttgcgatccctgaagtgttatggccccgtatccgcctatcatggcaaaatagacgtcatcaaatgatcactggacggttagatttttgtatggatgagcgcggtatcaaggtgtatgaatataacgctgattctgcatcttgtcatactgaagccggattaattattgaaaaatgggctaaacagggtggcattaaagcaggttataacccgggtgaacgtctattagatgcgttatcagatgcttggaaacacagtgatgcgaagccatttgtacatattcttcaagatgatgataatgaagaagattatcatgctcgctttatgcaacaagcactgactaaagccggttatagcagcaaaattctgcgtggactaaaagagctgcattggaatagtcgtggtcagttaattgatggtgataaacgtattgttgaatgtgtatggaaaacatgggcttgggaaaccgcgttagatcaactaagagaagagagtgaacaacagtcacttattcctattcgtattggtgatccggcgggagaagttcgtttagttgatgttcttttacgccctgaaatcacggtttttgaacctctttggacacttattccaagtaataaagcgatattacctattttgtggcaacttttcccagataatccttatctacttgatactgagttcactttaaccccacgtttgtcgcagagtggttatgcggttaaacctattgctgggcgctgtggtagtaatattggtttagttgatcaccaagaaaatgtattaggtgaaaccagtggtcaatttgaacatcaagaaaatatttatcaagagttatggtgtttaccaaaagtgtctaaccgatatattcaggtttgtacctttacggtagatggacattatggtggttgttgcttacgctctgatccgacattagtgataaaaaaagacagtgatattgagccattaattgtccttgaagataaacactttttagcggattaa

SEQ ID NO: 297669 - DNA, 945 bp, Proteus mirabilis
atgtttggatcttctaacgtgatcttgagaaataagcgcttatccagttatcaattagcacgacttcacacttttgaagcaacgggacggcatttatcattcgctttagccgcagaggaattgtccttgacgcctagcgcgatcagccatcgtattaatacactagagaaagaattagggataaagctatttaatcgctttcatcggcgtattgaattaaccgaagaaggtgaacgtatttattgggcattgaaaaaaacacttgaagatattaatcaagagattttagatatctataatcaagaaatatctggcgtattaacggtgtattctcgcccttctattgcgcaatgttggcttgtacctcgtatttctgattttactcaacgctatccttctattgaattaaacttacttactggcaatgacgatattaattttcgtggttatggtatcgatctcgctatctatttcgatgataaacacctgaaaaatctctattgtgaagatttaatctcagaatcaattattcctgtttgtagccctgaatatgctgctcgccatgaattagtaggtaatatccatcaccttgctaattgtactttgttacatgatagacaagcttggagtaataactctgattttgatgaatggcgcgcttggagtgaatatatgggattaggattatttccaaataaaagtaatatttgttttgatcgctctgatttagctgttattgctgccgttaatcattccggtgtcgcaatggggcgtaaacgcttaattcaaaaacaactcgcaaataatgaattaatagtcccttttgataattgtgagtttttttgtgcacaacgctattatctggttacccgcgatgaaaagagtaacgctaaagtacaactttttattcaatggctgaaaaaacagatcttacaagggatgtga

SEQ ID NO: 297670 - DNA, 1329 bp, Proteus mirabilis
atgaccacgatagatataaataaattaaaaaatgattatccactggtacgtgatttagtggatttaaaagaggtggtttggtttaaccccaatgttacctcaactgaccagggacttccttatgtaggtttaacgcaaaatgatgtgatggatgcacaggcaagattacaacgttttgcaccttatttaatgaaagcctttccagaaaccgcatcaactgaggggatcatcgaatcagccgttgtggatatccctcaaatgaaagaggcactagaaaagcgctataacacccttattgagggacaattgcgtttgaaaaaggatagccacttacctatttctggttcaattaaagcgcgcggggggatttatgaagtgctcactcacgctgaaaaattagccatagaggccgggcttctgaccacagaggataattatgaaaaattattttctgatgaattccgcaaattttttagccaatacagtattgccgtcggctccacgggtaacttaggaatgtcgattggcattatgagtgcaaaactgggctttagcgttagtgttcatatgtctgcggatgctcgtcaatggaaaaaagacaagctacgcgctcatggtgttaatgttgtggaatatgagcaagattacagtattgcggttgaacaaggacgtaaagaggcagaaaaaaatcctcgttgtttctttattgatgatgaaaattcaaaaacattattcttgggttatgccgtcgctggattgcgtttaaaacatcaatttgaagcgcttaatattccggttgatagtgaacatcctctgtttgtctatttgccatgtggtgtaggcggagggcctggtggtgttgcttttgggttaaaactggcatttggtgatgcagtacattgtctatttgctgagccaactcattctccttgtatgttacttggggtatatacccagttacatgatggtatttctgttcaagaagtgggtatcgacaatattactgcagctgacggtttggcggtaggtagagcctctggctttgttggacgggcaatggagcgtttgattgatggctattacaccattgatgatcaagagttatataacttattgagcttgttaaacaaagaagaagggatccagttagagccttccgctttagcaggaatgacaggggctattcatgtttctcaagctaaagattatctacaaggtttatcacttgatagtcaaaaaatgcacaatgcgacgcatttagtatgggcgacggggggcggtatggtgccaactgatgaaatgcaaaaatatcttgcgcaaggggaatag

SEQ ID NO: 297671 - DNA, 2367 bp, Proteus mirabilis
atgaaaaaaattaaactctctattatgttacttatgcttttttcatttcctttatatatttgtgcaaaagaaattgatgaagagaagaacaaagagaaagcagatatccttactgttagagaaaataaaacaaataataaagaaacattttcttcattattattaaataatcgcgaagaggtaaaaggcaaaaaactagatgaaataaaagctaatactattggtaataccgtttccaaaatagctggggtacaaaccgaaggttttggccctaatgcggcaagacctataatccgtagcttatcaggtaatcgcgtagggattttagttaataatttaccgattaacgacgtttcatttattagcggaaatatgcctatccccatagatataaataaaattaatgaaatagcaattagcaaaagctctgaagcacttctttatggtggtggtagtagtggtggcgctattcatctatgggatgatcgcattatgacccaattacctgaaaagaccatttcaggtgccgtcacctttaatggtagtaccaataatggtaatggtggatctgcaacaattaaatttagtgaccaacaaaactgggtatttcatctttctggcgcgaccaaaagagttactcactataaaatacccacacgttcaaaagccggtgcttgctatagttatcagcaactcaaagatcactttaaattacgtgatcaatgccaagtggagatgaaagtttctaaccgtcttaatcctgcattttacccttatatcagcgaattttggaaaaaaaataagattgcatacgaacttgatgaagatgataaatacacttttaaagataaagattatatctcaggtcttggctatgttaataatgagcctaacgtactctataaatcaggtagctctaattttattgaacatgttagccccccaaaacattatgttgaaaataataataacgagatccctaatagctttttaaaaagtcaaagcggtaccgcatcactcacttatattaacgatgaaggatatttaggtctatctattactgattttcaaacttcttatggcgtgccgggatatgcctatcttaccacaaaaactagccgaaaaatgtataaacctgtttcggtttcaaaccataatcaacggatagatatacaaggaaaacattatcacttagcgccttttttaagagatagtgccttttattactcttattctgaatctaaagatgaagagttagtcggtcaaatagcttcatcgatatttgatactcaaagccatcagttggctttagaaactgcacattcccccctatttgatagacttactggtgcgattggggtgaatgctaatcatcgtgacctaaaaacctctggttatgatgcctatttacctagcgtattaactaaagaatatggattctattggatagaatcattagatttatcgccttttgaaatcaccgcaggataccgtcgtggctatacaagtcatcatctaaatattcctagtcattataatagcggaagaggaaaaggtgccaatccacaaaatagctcttttaatacaagtgccaacaccttagcgctctcttttacacctattgatgaatggacgttaaaattacagaaaaatatagcttatcgtgcaccggaaataaatgagctctatacccatggcccccattttgcttatttaattgaagagcaaggcgatggtaaatttaatacagaaaaaagtaacagtattgaattatcatcggtgattgaagtcggtaatttctctaataaaataagtgtgtataagacagattatcgtgattttaaattccgacgtcttacaggcgtaagtcgtggaggggtaaccgtcatggagtgggatgaaaccgatctcgaaacaaaaggattagaatatgaatttaaatatttatatgaaatgccacgcgatcatcatctcacctttacattatttggagattttgttgaaaataaaagtaaaagaaaactttttattgcaggtaattatttacctaatttgccaaatgaaaaacatggtatcaacattcattatcagtatggcgatttaactgcttttggtcgtgccatttactataaaaaacagaaagaaagtggtggtttattgcgtggtggtgatttaattttcccttcttataccctcgttgatgccgggatcggaaaaaaattcccgttggataaacttactgtttctgttgatgtagtgattaataatctaactaatgtcgaagcaagacccgctagctctcaattaaaatatttagcacctctaccaggtagaaattatggattaaacgttaaagttgatttttaa

SEQ ID NO: 297672 - DNA, 1224 bp, Proteus mirabilis
gtgggtcatcatcaccataatcacaatcatgtttatcctgatgaacagcatgtacatggtattccctatattgaaatgaatagcaaacgatgggatcttcgtggtgaaaaaaataaccctttcgcgggtattgaatcaatacgttttaatgcaaccagaaccaattatcatcatgatgaaaaagaaggtagcgaaatcacaacccaatttaaaaacaaaggagatgaattaaggctcactttcacacatcaaccggtgtggggatggcatggggtaattggtgggcaatttaatcagcgcgattttagcgctcaaggtgaagaagcttatgttccccctactaaaactaaaatacactcactttttttattagaagaataccatttaggcgatttccgctatgaattaggatttcgccaagactggcaatcactattaaataaagcgacccagcagaacaataaacagagtgcttcctctatttctgcaggattagcatggaattttactcaagattattttttaaatttatcattatcacacgccaaaagatcacctgtggctgaagagctatatgctaatggaattcatgctgccagccgcacaatagaaaaaggcgatgctaatttaaccacagaagttgcaaataatattgatttgggaataaccaaagtaacaggtgatattcaatttaatattaatgcctattacaaccgtattaacaattatatttatgggaaatttacaggacctgtattagataatggctatcgttcattacaatatatacagcatgatgcggaatttaaaggtatagaaggaaatattgattattactattatcaagataatttaatagggatttctggtgattatgtcagagcaaatctattacataacaaaggcaatattccaagaatgccagcctatcgtttaagtgcctatataaaacaccacttaacaaataaattaacggggaatattcgtattgaccattttggtaagcaaaataaaactgcagaatatgaaacaccaaccacatcttataacagtgtgagcttaggtggagaatacctaggatctttggatcaagctgactataccgtttatgtcaaagttaataatctttttaatgctaaggggaaagatagtacttcttatattaaagatgaaatgtatttacccggtagaaatattattttaggcacaacacttacattctaa

SEQ ID NO: 297673 - DNA, 471 bp, Proteus mirabilis
atgggaaaatctgtttttaattgtacaatgatttatatttcaataagttattctttatttgctaatgccaacaccaccaacattgttgaagataaacaatcagatcaaatattaaaggtctattctacccctttacacacatctcgagaaaaaatggcaactcccatagtggtgataacgcaagaagatttacgcacagttcgtagtgcttcaattgctgaaaccttaaccacattacccggttttcgtgctagtttttttggcggaggctcagtgcatccagttgtgagaggcatgtctggaaaccgcgtgaaagtattacatagtggtagtgatcttatggatgtttcgtcaataggtgcagatcacgcaattactagtgagccttttttgagtcagcgtattgaagtattaaaaggttctgcaacattactctatggtggcggtactataggggggcgattaatgtaa

SEQ ID NO: 297674 - DNA, 1509 bp, Proteus mirabilis
atgatcgattttaaactgaagttaaattatcaacgcaaatataacagcagtgatatcgatattgatgatgaaatgcagatctcgcgccaatttgaaagcgatcgcgggcgtattattaattcagcggcgatccgtcggttacaacaaaaaacacaggtatttccattagagcaaaattcggcggtacgaagtcgattaacccattcgctggaagtacaacaaataggccgttatatcgctaagcaaataatcggcgaactaaaaaagcataataaattagaagaatatggcttaaatgaacggattgatagcgttgaaagtttaattgaaatggcgtgtttaatgcacgatattggcaatcctccttttggtcattttggtgaagctgcaattaaacattggtttcgtaaggtgttagcacctgatgcttccatagaatttgataattgtccttttttacctattcgctattcagcagaccgacatttaaatgaattaaaacagactttgcgtcaagacttatgccatttcgaaggcaatgctcaggcaattcgcatggcgcatcacttgttaaaactcaatttaacctatgcgcaaattggctgtgttttaaaatatacacgtccagcttattggcaaggtgctacgccgaaagaatttagctatttaatgaaaaaaccaggttattactggtctgaggctgaatttgttaaggaagtacaagaaaaacttgcaatgaaagatttttgtcgtttccctctgacttatattatggaagcggcagatgatatttcttattgtattgctgatttagatgatgcggtagaaaaaggtatttttgatatcaatcgtttagtgcagttattaaaaaatgcatggagtgaaagtggtgcggtaacagaaggtgatctgtttgatatcactgttaatcgagcttttaagaaagttgatcaaaatgaagctaagcgtagcatgcaagatcaattttttatgtatttgcgcgtctatattaccggaaaattagtaccttacaccgcctatcgctttatcaaaaacttacctcaagtttatgaaggcagctttaaccatgctttactggaaggaaagagtgctgaacatcgtttattggcaacgttaaaacgagtggcgcaaaagtgggtatttagtcaccccgaagttgaagagcttgaaatgaagggctatcgagtgatcagtgggttattggatatttataagccattgcttttattatcgaccgatgattttctaagactacataaatataatgaacatcctcattatgttattgagacgcgtttatatcataagctttcgattaaacataagcttgcttataatgaagcattagaaaaaatttacgatattaatagtgaagagggaaaaaccttagagttttattatcgtacaagattgatacaagattatatcagtggtatgaccgaccattatgcatatgaagaatatagaaaattaatggtatgtgattaa

SEQ ID NO: 297675 - DNA, 288 bp, Proteus mirabilis
atgccaactcaaaatgatgtgagcgtaacacgttcatcactgaacctgagaataaagccggaagataaaattctgatcgaccgtgccgctaatgcagtggggaaaaaccgtaccgagtttgttctggaagctgctcgacgtgcagctgaagaaacgctggcagatctgcgagtcattaacgtcagtcccgaagtttaccaggaatttattagccagcttgattcagcgcctgagagcaatgaggcactacgaaaaacaatgatgtctaaatccccttgggagaaatga

SEQ ID NO: 297676 - DNA, 513 bp, Proteus mirabilis
atgacattgaagctaacagcacctgaaccactcaaatcagtccatctgctggagggtttttcctccggagaagaggctttagatctctggctaaaaaaccgggcaatgagtaatcaaaactctggtgcgtcgcgcacttttgtgaccacttcggataaccaggtaatggggtattatgccttgtccacaggggtcataagcaccaatcaagccgttggtcgattccgccgtaatatgcccaccgacatacccgtcattctacttggcaggctggcggttgatacaagggctaaaggtcttgggatcggaagaggacttgttaaggatgcctgtcatcgcgttattcaggcatcagggctggtgggcattagaggggtggtggttcacgcccttactgacgatgcaaaacggttctatgagcatattggcttcttgccttcgccgctcgacccgatgatgctgatgataacgcttagcgatctgcaactcgctatgggcatttccccgaactga

SEQ ID NO: 297677 - DNA, 2496 bp, Proteus mirabilis
atgcgtaagagtattatcgctttatcaatattaggtattattttttcgaatacgattaatgctaatgaaataaaaagaattaaagtgggcggatatattattcctccggcatttgttaatgctttagaagaaggtatgtcggtgcccgttttcttacgacttaatgatgcaaataaacaaaaccaaagtgaaaagaaaattgcagatgcgattattgttatcgataatgataaaataaaactatcaagtattcaattaatcgaaaataatcaaggcgcaacactaaatcagttattagttgataaaattgaaagtaaaaaaaatgctatctttaatgaaaataatagtatagctattgatattaatgctgttcttcaattaaatgtctcttcatttaatttatcattagatgttgataagtcagcttttgcacccaaagaacatgctagacaatccatattaggaaattcatctgttaattcattttctgctgtggccaactatgatttgggcgtctttcaaagtcgtgttaaaaacgcccaagattcatccagtagctactttaatttagacacgttattagctaaagctgaacaccattttaatattaatgcatctgcctacagtataggtaaatccaattccaatattgaactctatagagcaatgtatgaacgtgattttaatggattgcgttttgctatcgggttaatgagcacttggaatttacagtccttagccagcttaacagtattgagtagcagtaaaatttatgcagcatcaatcgggaataattcatcaagtagggtggtgaataaacagcaatcattaactccgatttatgcttttttaaatagtccaggtgaagttcgtatttatcgccaaggtaaattattaaatattcaaaatttcccgatgggtaattttgaagttgataccagcatgttgccttatggtatttatgaagtaacgattgaaaccgttattgatggcaaggtagtgacaacacaacatcaaaccattaataagtcttttggcaccgctaacggtaattttgaccaattaaattgggaaatttatggtggctatattgattttgataaacgtcattatatcaaagagggtggcgcttataaccaaactcccgaaaaaagttatttaatcggtagctcttttgcttataactttcctctgttatccggtattcgttttcaaatgtctaactatggatttgataaatttattgtacaggagacgaatatcagtgtagcggtaaataactatctttctattgcttggcaaggaatgttagagaatcatggtagtcaccgtaatattagtacgctttctattaatatcccagaaggctatggttcattatgggcatctaaagagaaaactatcgtaagaggtgatttaccgctatatgaggctgacagttactcttatggaggaactattaatttcgataagataatggatagaacgggttcatttactatcagcaataccaaagataagcgagttggtagtgattctattaattatgaatatgcaaatacattattttcgggacgttatggcacggtaggattaagagctggggttcagcgttatcattatgataatcaaaatagcactaatgaaaaatttattaatcttgatttctctttacctctttcaacgtggttaagtactgggatctcttcaaccaatggcaatgtaaaagccaatatttatgtgaataagaattttgaaaactccgtgatcactaatgcgggggtttctgtttctaagttagtgcatgataaagataatggtgaatctgacttctcaactctaggttacgcttcttatgatacgaagtataactctggtacggtgaccattaatcgccctgataataaacgactcaatggtaatttaacttctcgtggctctatagcttatagtgaagggatgatcacacccagtggtcaacaaggtaaatctggcattattatcaattcagacattaaaggtagtggcagtatgctcgctaaagttaacgggcaaaattacccgattagtggaaaaaatacctttattccattatctccttattcagattatgacatccaattaatgaatgatggcaaatcgaaagacagctttgacattatttctggccgaaataaatccgtcacattgtatccaggaaatattgccttttatcaaccggaagtgaggcaattagtcacggttttcggacgtctgaaatcccctaatggtgaacttttaaaatatgcttcaattcgaaatcatattggtcgaactaaaacagatcaaaatggtgagttttcaatggatgtagatgtccgttatccggtgatctcgttactacaagaagatcagcaaacaatctgtgaagcagacttagatcttaaaggggcacaaggagcaatgtgggttggagaggtaacttgtcaacctcagtctagtttcgtaaaaagataa

SEQ ID NO: 297678 - DNA, 927 bp, Proteus mirabilis
atgaccagtttacgcactgtatcaaaacacccagagcaattagaaaccacaccattaattgcggaaagtcatcactatgatgaccctttggagcctcaaaaactggtatttttagaggcagttaatcaacagcgttgtgtgattaactcaccacagcgcaatagccaactcaccaatacaatacctttttttatcgtacttttagttatggcctgttatacgttgttcggatttgttgataatcatattgctactaaaaattccattgaaataatggccaaacatgtagaggaaaaatatggccacaaaaaagaacaaaatatgttatcagcaaaattaattgaattgtataaaccttattttggaaaagataaaattagtctctgggagtatataaaggcttataattcaggtaattttgttatagatggccaatatgaaaagtacctcgtcatcggctggctaatttttttccccggttttttatggctatttggctatctctctttctttacgcctcctgtgtaccttattgctgataggcaaagaggaatactgtatagctatggcatgggaaaagtacgtttaacccgctataaagaggcgcaatttggttatgcgggcaatatgttggcaattaaactatatggcattaatgaaaaaacaggccaattaaaaacgatcctctatcgccccaatgtatcccactactccagtttcctaaccagtaccgacagtgaaaaccaccgttttattactttccttaatgcctatatgcaacaaggccgagatgccgtttcgcctgttgattaccaagcccgtaagccctttttatcttttggtaaaaacccacttcctgctgattttgagcaacaggtcgaacagattctggtaaagcttgatcaggagaaagaacaccatgcgtag

SEQ ID NO: 297679 - DNA, 3219 bp, Proteus mirabilis
atgactggagaagtgaatgagaaatatttaacaccgcaagagcgcaaagcgcgtcagatggtgaaggcggtaaacgaagcgagcccacgaaacttaccggccgacgcggtggtatgcccatgtgaaaatgaacatcgccctgtttatccggtgcgttatgcttattctaatttgtttggcgataaagacgcaaaagcggctgttcctccttctatttcaacgttactttctgcctcgtcaatctctgacacaaagggattttcggctcgattgctgcgcacaggttggatttatgtctttgaagaaggggaatttcctacccgccctgatacaaaagggcagttactgatttttaagcatactgttcaacattacgacaatgggtatgtctattcggatgacgataactccactgaggctataaatgcaaaagaaaaaggggattcagaggaaggttttatcccttacttacgtgactcactaacgaaatcggtacaagaacaatcttgtcaatatccgtatttaccgattaaaaaagacgtcatgaatgcattgtttttatttagtgatatccctctgtctgattatgtcttagataaaatggagacggatgcatcttatcgacaagcctttatgcaaaaaatcaatttaattgattttaatgcaaatcctcacgcgcttgaactgaatgctgaacatattgaatatttgattgaagaatataaaactgaatcagagcagttttcagcctttactgaatacacaaaatccatcggtgatccgctgccaaaagagtatttctcccatattacgggaataaatagcgccagtaaaagtaccgataccctgctaaaccaagcaacacaaaatttagattacaacgaaaaaagttgtctagtcgctctgtatgatcctgttggttatcagaaagatattttatcactttatacctttgtgactgtcacatatgcgatgtttcaatattattggcagtatccaaataaaatcggtcactatctttcggcattagaaactcagtttaataatcccgaggttgctaaaacagagcaaggaaaatcattaaaagataagtttaccaagcatattgatattcagggctggaaaacgtattggccacaaattgaagccggtaataaagagtttgaaacattgcaaggcaatatcgttcaactctatcgtgattttttaagcaacccaaccgtcaaaaatcaggtaggtggcattaaaaactatcttgaccatgcttttttaataaaagagcaatatcaaaaaacgaatttttggcaccgagcttttttcgatgaattaaaagcctacagccagctgcatgaacagttattgacccctctaaaaagttcaccatcagggcgagtcacgcttgatttactattgtcaattgataacgatgatggggatatctggaaagagtatatcactagcttactagacctattgaacgaagataagataaaagataaagcgctcagtgaatttaaaaagcatatcttaccgtcattaaattcagccgtcatgatatgttgggatgcattgggttatgcttatactcaagcacatgccaagttaaataacgccaaaaattatgttcgtcgtattagtcaagcaggcctcaattttcttacgcataaagtactccctgcttttttagggtattttggtatagctgtgagttttgacgagcttacgaccttaagcgctgaagagtttagaaaaagaatgaattcactggaagggattaagcagccactcaaaagtttctcaaagaatatgaagaagatgtttgattgggatactcgatttaaatcagcgggtctaaaacagattatcacaaccgctaaatttaaattaatggaaggctacagtgctatgtatttacctacagataagaaatccttaaacgctcacatgaaattagcactagatatttatacactgctcacaagtatcattgaatttagtacagtttcacatacgaaagagtttgataaacaagacccattaaatgccgctgccgtgaatatatttcgtgttcaaatggtggcacatattttaaataccgcagaagcagtagttgaaatacgccaagcagctcgaggttatgcgacatcagtgacttttccaccgcttcagcggttattgactaaaattcagttgcctgaaatccaaaccaagttagggaaagtgggcttaaaagggcttggatataccgtggcaattttaggggtcgcattacccctcgcggaggcatcaacagagttttataaccatgattacattacaggctcagcaaaaattgcggaagcggtagggacattggctttttcagtggggctagcagcatggggtgccactgagggtgcagttgcaactaccattgcggcatttgcgtgggagttaatagttatcggtgcgatcgtctatggcgtcggtgcagcaatttacacgtattttaaaacagattcgtttgaaaagttattgaagcagtgtttttggggaaatggggataagtattttgcggggggatataaaatcgaaaataacgataaattaaataggcccccatcaaaagagcaacaactagaaaaatacatcaaattatttgatcattatgagaaatattatcagatagaacttcaagagtttgctaatgttttctttacctcacagttgcaagtcaaagcaatactaaaaccggattttcagccaagctatggtacagcacactactctattcaatatcaatttaaattgtccaattttcaatatggtatttcagatattgaatatcaattggtagaaaagaaaatgccacatatttatccctcagagactccgattaagtatatatctaaacaaggtaacacagtggttaaatataaaggtgctgaatatttagcttcacaacaagaaaaatttaataccgcatttgaaatggctttacaaaacaccattgaaatagctttacaaaaggacacaatgctaggtaatgggcagcttactctaaattttgagatagaagcaggtatatttacgggggatccgataggaaaatctattccctctatttactggtattacattgtagatcgcattaaaggcgaaattgcaccactacgttaccgaaacggcaaccctgacgaaaaaatatatggctgtattgatgaggagggcacggaatga

SEQ ID NO: 297680 - DNA, 756 bp, Proteus mirabilis
atgtttatatattctgatctaaagaataagaatgtgattgttacaggagctaatggtgatataggtattgcaatttgccagaaataccttgaacagcagtgtcatgtttatgcattatatcaccaaaatagaaataacttagataagctaaaaaaagagagtgaatattgtcaccgcttacatatattacaatgtgatatcaataatgataaatcaattcatgactttttagataaactaaaggcatatgctaatgctattcatatattaatcaataacgcaggtgtaattaaagatgaattattttctgctataaatataagtgaatttgaatatgttattaaaaccaatttattaggaacttgtcaatttactaaacagttattgcttttattaagatcggcagaaaaagcgaccattattaatgttgcttctattgcagggattgttccaagtattgggcaaagtaactatagcgccgctaaagctggaattataggttttactcatacgttggctgcagagttggcaggtaaaggaattcgagtcaatgcggtggcaccaggtatgattgagtctgacatggtcaaaaaagtgtcacgccaagtcgtacgtcatattaaatcggttattccattacaacgattgggagcaagtgctgaagttgccaataccattgtatttttaagctccgaggcatcgagctatattgttgggcaaacattaattgttgatggtgggatggtgatgcgatga

SEQ ID NO: 297681 - DNA, 633 bp, Proteus mirabilis
gtgaatattgagtggatacgcgagcgagtaagtacagcgttgatgaatgtttgtattatagaaaatgggccgttaagtgccatggaggaacaagcaatacttgtaaccgataggtttaaaagaaacccaatacgctatgcgggtgaaagaaagtctcgatacagactcccctcacatccactcaaaattaagcaaaaacatgccaaaggaaaatcaaaaccattaattaatgaagttacttatcgcacttcatcatggcgcagaggtattcatcaattgcctaacgaaatgcgcttatggttactctattgctatggtgattatcaatattatcgtgagcaaatactcattgttccctatatttggcatgagtttcagcgattaaatagtaaaaaaaggataacgaaaaaagttaagcaacgacttcaatctcttaccttactagccattcaggcggtaaaagcagaaattaatcaaacagcaaaaaaatatacggatgttaagctcgctgaattgttgggcgtcagtgctgatgcttggcgaaagagctataaactgtattggatttgtttattagattgttgctatcaattagatagagattcgctattcaaaattagcgctttaagctga

SEQ ID NO: 297682 - DNA, 357 bp, Proteus mirabilis
gtgaaggtctttaatatcgaaccagtacctaaaccaaggatgactcaggctgataaatggaaaaaacgtcccccagttttaaagtattttgcgtttaaggacgaagtaaagttaaacaaaatcaccctacctgaatcacattaccacattacattcattctacccatgccgaagagttggagtaaaactaaacgctccgaaatgaacggtaaaccccatcaacaaaaaccggataaagataatctcgaaaaagcattacttgatgctatttttgacgatgattcacgtgtatgggatgggcgggtaacaaaagtgtggggaaaaagggggcagataattatccaagaggtgcgatag

SEQ ID NO: 297683 - DNA, 288 bp, Proteus mirabilis
atgaatttacgcaatgaggcaaaagggcgtgaatgtcagattagaataccttcagtttgtaatggtaactctgaaacggttgttttagcccattacagaatgtcaggtctttgtggcgtcggaataaaatcgcatgacttatttggcgcttgggcttgtagtgcatgtcacgatgaagttgatagacgaacacgatttacggatatggagtatgcaaaacaatgtcatctagaaggtgttttgagaacgcaagccatattgatccaagaagggaagttgaacgtgtga

SEQ ID NO: 297684 - DNA, 336 bp, Proteus mirabilis
atgacaataaaacaactacagaaaaaaattcatcaacaaaacattgaggctggatggtgggatatcccaagggaaaaaggaaccttactttgcttgatccattctgaaattagtgaagcaatggagggagagcgtaaagatctaatggattaccatttaccacatagaaaaatggcagaagttgaacttgctgatgctgttattcgtattttggattatgcggaagagttcggttacgacatcgaaagcgctattacagagaaactcgaatacaacaaacatcgagtagatcatcagcgagaaaatagagttaaaaaaggaggtaaacgattttaa

SEQ ID NO: 297685 - DNA, 1386 bp, Proteus mirabilis
atgaaccaagttccgaataatttaatggcggaacaaaatgttattggaggactactgcttgacccgcaaagtgataatgcgcaatcaattttttcactgctaaaacctgaagatttttatgcccgacaccatcaaattatttatctcaccctgcgagaaatgtatacccaacgtatgccaatagacatcatgacggtgacggattgtctggagtcaaaaggccgaattaatcaatcaggtggttttgcctatcttgctgagatggcaagagaaacaccgagtattgctaacattatggcttatgcgaaaaaaatccgagagtgttccgcacagcgttttgttatcgaaaagacggttgaaattcaaaagctcatgatggcgccaagtgagttaggttttacagataaaattgaacaagcacaacgcttgcttgatgaagctacttcgtttggaaaaatggggagaaaaacagggttacgccgaattgatgatgtgctggatgatgtttttaccgacatttgtgaccgacaagataacccagagaaacatcgaggattaaaaacgggatttaaagattttgaccgcctattaagcccaaaacagattgtcatcggttcactgttcgtgattggtgctcgtccaaagatggggaaaacaaccgttctcactgaaatggcaaagaatgtttcacaacaaggtaagcctgtattgctgttcagcatggagatgacagataaacagcttgttgaacggacactagcccaacaaacccagattaattcagataaattttaccaaaagttagaggagcatgaatgggataggctttgcagtgccatcggtcgccttaaagatgagcccaatatttgggtggatgatacacccggcatgtccttacaacacattcgttctgaaagtcggagaattaagcgcaaagtcggtgatattgggtttattggtgtcgattacctcactctgatgcaagcgggaaaagctgaccgtaatgatattgcctatggtgaaatcactaaggggctaaagatattggcaaaagagctcaatacggtggttgtgttgcttgtacaattgaatcggggattggaaaacagggcagataaacgccccgtaccaagtgattcaagagacacaggacaaatcgagcaagattgtgattattggttaggcatttatcgtgatgcggtgtaccacgataatgcggatgaaacgctgaccgagatgattttaaggctcaatcgacacggtaaaacaggcaccgtgtatgttgatcaacaaggattgagtattacaccggttgatcaatatatggctgcttatcgcgctcaaccgaaacgagaacccaaaaaatattgtgaaaaatcgttttaa

SEQ ID NO: 297686 - DNA, 348 bp, Proteus mirabilis
atggaatgcgcaaatacacgcaaacaattcaatcaatttatctctaatcacctaatagcgtcagcattacaagcattgagaaataaaactcagtctgccgtggctagaacgttaggtgttcatgattcaacaatcctacgtcgaactgaaaaatatcctgaaatatgcgaaacgcttgtcgcatcgggaattattgattttgtgatggaaggagaacgaaaaatctcagaagaagagtaccgatttttgtggaaacaaatgggtgaactttctcaaatgaaaataaaagaaaacgcctcgattgcggcaacaaacgaggcgtgttgttcaatggaattcaccatttaa

SEQ ID NO: 297687 - DNA, 210 bp, Proteus mirabilis
atgaacaatatcgcagaacagcgaaaaaaactgggaatttctcaagctgttttagcttcatcaataggatgggggcagtcacgaattgctaactatgagttaaacattagaactcctagcttaaatgactgccgagctattgttgaagcattacaaaaattaggggcaaattgttctttagacgacgttttccctccaaaagtagcttga

SEQ ID NO: 297688 - DNA, 645 bp, Proteus mirabilis
atgaaaaaagtaaatgaagttattggcgaaaggttaaaatccattcgtgaatcaagagggctaagtcaagctcaattagctaaattgtgcggctactctgctgcgtccagaataggaaactatgagcttggagagcgcaagattagcgctgatgatgcgattgttataagtgaagctcttggtatatcacctgccgaattaatgtttggcagtcaaagtgagcaagtgatcaaaaattatgaataccctctattcacaaaggtacaggccggcgctttctcaacagaatttaactcatacacccagaaagatgctgtgtcgtggatacctacagctaagaaagccggtgagcgtgctttttggttagaggttgaaggccaatcaatgacagcaccaccaggaggtaagccaagttttcccgaaggaatgcttattttggttgatcctgatgaagaagtggaattcggagatttctgtgtcgctcgtttgctaaatgatgaattcacattcaaacgattgattagagaaggtggcgttgagtatttagagccattaaaccctcgtttcgacctgattcctattaatgggaactgcacaatcataggtaaggtaatcaagtcacaatggcctgacgacacgttttag

SEQ ID NO: 297689 - DNA, 780 bp, Proteus mirabilis
atgggtattcctcagaaaagagctatcgaaaagctaggtttggtttttaatcacatagataatctaaccaaattagatcggttcacatttgagcaaatgttaaaagactctgagtatttagatgatgagccgacaatgtacatggttaaagcccttgcgtatggggcttatcaagataatcaaaatgctttaaagtacttcgatattgcaatgaaatatggcgatattagcgttgctaaaaactatataacttatttgacaaaaactttacaattcaaattaagctacaagaaatcaattgaacttgctaataaatatgataatcaatacctcacatttgtggcaaggaacatagcttattcctttgccgatataaaaaattcctcactactgacagaaaaacttgttaaactgcacgggaatgtaaatctagatcaatacccatatcttgatttttctcaaccattaactgagttagaggtttttatgaagtctggcaaaatatcagagccgaatgctagatggatcgttgaaaaagctaatgaagttgcagccagtaaaaaaataagatgtttatctagcgaattttatacaagttcagataataacgactttgcggttattgtttcagttacgacttcagatcctgatgtactttcagatatggatatagaaatagcatgcgcattagctgaaaataatgatttatcagataaaaatgttacagcatggttccgtagcgatgaaagtaaagaaaactatgcggagctattgaaatga

SEQ ID NO: 297690 - DNA, 366 bp, Proteus mirabilis
atgagtgtaacagcgaaagattttttggatttagcgaaaagcaatctatcagaaaatagtagcgaaatggagcatagaaactgtatctcaagagcatattattcactatatcatgcaacatgttcatcactaatttactgtccaccaactacccatcaaggcgttattaattatttgtttagcccagcagaaagaaaaaaagagccttttgatcaaaaaatattaatatctgttggtgctgttcttaagcaacaaataataaaaagacatatggctgattatgagttgaataaacaggtttttaaaagcgaagctgaatccagtgttatggcaattgaaaagacaataaaaaaacttgaagattaa

SEQ ID NO: 297691 - DNA, 318 bp, Proteus mirabilis
atggcaactattacagtcaaaaagtcacgcaagcctgagtttttacgtggagcatctgcaaatagacgtcacgccagacggaaagcagaagctattgcaaaaaagaatattgagttgaaattagaatcagtatttcctcaggagaaaagacttacatcagtagaaaaaacactgtcattaagtcacataccagttactagaaatattgaacctaaattcaaaccatcggtagataactgttgcttacctaatgtagcagtattttcaggagttaaaacaaaacagccgagcagtgagttcggggttacggcgagataa

SEQ ID NO: 297692 - DNA, 237 bp, Proteus mirabilis
atgaaatttgaagatttaacagaagcgtctcaagaatcggctcgtgcggttctatcaaccatgctagttgatagttatcgacgcaattttaaattaactcgtgatgatattttagaattaggtcatagagttagaaaagcatttgtgacattagagagtgaagaaccaaaacctgaaatgtgtggtagtggttctattggttgtgactttagtaataaacaagccccgtccatctaa

SEQ ID NO: 297693 - DNA, 282 bp, Proteus mirabilis
atggctatgtttatagtgagagtagaattacctgatgctaattattcagactatcaggctctatatgatttaatggaaagctacggattttcaaagcaaataactggtgataatggtgtagtatacgatctccctgatgctgaatattactgcaatggagattatgatattgaagctgtaagtagcacagccttccaagtagcccaatcagttagagctaatgctaaagttcttgtaactgaaactgaaagaattagatggacggggcttgtttattactaa

SEQ ID NO: 297694 - DNA, 591 bp, Proteus mirabilis
atggaaccaagggattatcgattttataaaattagcaaagaagctaccgagcaaatcaaaaaagaaaccgacgaaatccaagctaaacggcagaaactactcaacgaagccattgaaagcgttggagctgaaggcgttagttttagcaattcatggggtgaaaatggtacgacaattcgcgcatttgcttttgctgtagataaagaatttgattttgcagttaaagagattcatcgaaccagcgaattaagggttattcgagccaaagccaattcgaagaaaggtaaagagtttaacgccacattagacgcggcgaaagatgaactcaataagaaactaaaagacttaccatgctttaaagattacatcatcaataagtttgatattcaatgctgctctattagccagcacggtagcggtgctggaatgcgaatgctagagacgattgtcggatacccacaaactgataaaagctttcttatttgcgccataccaaatcatgagagaggtatggataagcaaccaatcattccagattgctttgaagagataacttacggcgtgttttacgatctatcaaacagcaagtag

SEQ ID NO: 297695 - DNA, 165 bp, Proteus mirabilis
atgccaatgttcaaagtaacttgcaaatggaatggtaagccttgggaaaaagatattgaagcagaaaatgaaagtgattgtgccgagcatgtttatttatgggcagtaattggagctaaagccaatatcacggaattagacatcaaagaaatacctctgcagtaa

SEQ ID NO: 297696 - DNA, 261 bp, Proteus mirabilis
atgggtgatgtaggagacgattttcgcgcatacaaggaaatggtaaaagagcggaaattagagcgacttaaaaataatacggagcaactaaaggatatagatattccgtacaccagagattcaagtggaactattcactttcaaacaaagaaaggaaaggttctattttatccaacaacaaacaaatatcagcacaagcgaagcgttaaacgaggcggactacttaaggctgttgagttagcaaagcgcctcggaatttaa

SEQ ID NO: 297697 - DNA, 156 bp, Proteus mirabilis
atgaaaactaactattacagcgctatgcgtgattgcatggcggtgcgtatcactacgcctcaagcacgtaaaaataaacgtacaagcccatggttattcagtttagctgtggtcattgtaacaaccgttggtgtaataccgacatttgtgagttga

SEQ ID NO: 297698 - DNA, 255 bp, Proteus mirabilis
atgcaaatttcatacagctactcgaacggaactcgagtagtagacggtaaaacagtcatggaatttgacgaaagtagcaagcttagtattgagacaggaagcttcgctgagctggctaaattaacggaaatcgacccagtggaagccctgcaatggattatgcagttcgacaaggaagagattgacaggattgtcaatgaagcaagcaaggatgccaatatttctaagctagctctgctaaggagggttgcgtga

SEQ ID NO: 297699 - DNA, 255 bp, Proteus mirabilis
gtgattaccaacatatacggactcagaaacgactggcacgaacggcaaatggaacgagaagcgtttgttaattctcaggaagagaaaatatcagttgatgaggttatggatagcctgcccgaagaactactgtgcatggatttggcaaggaagttaaatccggtatttgaaattagcccccaagcacttgatgcagttttagatggaattagaacggctattcagatagggatagataaagaggttttaggatga

SEQ ID NO: 297700 - DNA, 819 bp, Proteus mirabilis
atgaaacccggtatctattacgacatttcaaatgaggactatcaccatggattagggatcagcaaatctcagttggatttaataagcgaaatgccagccgaatatatttggagcaaggaagctcctgttgatgaagaaaaaataaaggcattggatttcgggactgctatccattgccttttgttagaaccagatgaatacagtaagcgatacaagataggccctgatgtaaatcgtagaacaaatgcagggaagcaagaggaaaaggaatttctcgaaatgtgtgaaaaggaaggtatcacaccaatcactcatgacgataacaggaagttgatgctcatgagagatagtgcaatagcacaccctatcgcaagatggtgcttagaagctaacggagtagctgaaagtagcatttattggaacgacgaagatacggacattctttgtcgttgccggccagataaaatcattcaagagcaccactggattgttgatgtaaaaagctctgctgacattcaacgatttgaccgctccatgtacgaatatcgttaccacgtacaggactctttttattctgatggatataaatcattaacaggcgaatcccctgtatttgtctttctcgttgttagtacgactatcgactgcggtagataccccgttagagttttcaatttagaccaacaagcaaaagatattggtcgaacaacctacaaacaaaatttaagaacgtatgcagaatgcctaaaaacggatgaatgggcaggtatacgcacattatcactgccctattgggctaaggaattaaggaatgagtaa

SEQ ID NO: 297701 - DNA, 807 bp, Proteus mirabilis
atgagtaacccaccattagctcaagctgacttacaaaaaacacaaggtacagaggtaaagaccaaaacaaaggaccagcaactaattcacttcattaatcagccaagcatgaaggctcagttagccgcagctttgcctcgccacatgacaccagatcgcatgatacggattgtgacaacggagattcgcaaaactccagcacttgcaaattgcgacatgcagagttttatcggtgctgttgtgcagtgttcacagctaggattggagcctggtaatgccttaggtcatgcttacctactcccattcggcaatggtaaagcaaagtcgggtcaatcgaatgtgcaactaatcattggctaccgtggaatgattgatctggctcgtcgctcaaatcaaataatcagcatttcagccagaacggtaaggcaaggagatagtttccactttgagtatggactgaatgaaaacttaacgcacgtaccgggtgaaaatgaggactcaccaattacacacgtttacgctgtcgcaaggctgaaagatggcggtgtccagtttgaagttatgacgcataaccaaattgagaaagtcagagcatcaagtaaggctggtcaaaatgggccttgggtctctcactgggaagaaatggcgaagaaaaccgttatccgtcgcttatttaaatatctgccagtctctatcgaaatgcagaaagcggtcattttagacgaaaaagcagaggctaatgtagaccaagagaatgcaactatttttgaaggagaatatgaggaggtaggtactgatggcaagtaa

SEQ ID NO: 297702 - DNA, 165 bp, Proteus mirabilis
atggcaagtaaaggcgtgaataaatgtattctcatcggtcacttggggcaagaccctgaaatccgctatatgccatcaggtggcgcagtagcaaacctcacactagctacatcggaatcgtggcgtgataagcagactggtgagatgaaggagaaaactgagtga

SEQ ID NO: 297703 - DNA, 177 bp, Proteus mirabilis
atgaacttagtaatacgcaatttaagcacaaatgaaaaggtgacactaactatagctatttcagaagaagattttaataaattatccgagagagaacaggacgatttaatagaaaacgtaacggctgattattacgaaaataaagcagcggaagaaatagagcgtaaatttaaatag

SEQ ID NO: 297704 - DNA, 195 bp, Proteus mirabilis
atgactattacattaacaacgaagcaaataatggctatggctgattttgtcggcttaaaagtagaacctcacggattagatattaatgatgagactgaatacaccatcgagccacgtaaagataaagaaaccggtcgtgtgcatgtattttactgtactgaatatccagaagaaggcgccattcagctggactaa

SEQ ID NO: 297705 - DNA, 174 bp, Proteus mirabilis
atgagtaagcagatggttttagttgcaaggacaaacaaggttggctctgactctgaatgtaggctgggcattactgaggacgaatgggataaattaaccgaagaagagcaatcaggatatatcaatactgcaattgataatcttgttgattggtatgtgaagacagaagattaa

SEQ ID NO: 297706 - DNA, 534 bp, Proteus mirabilis
atgaaagttgaacaatctcaagtgactaaattagtgataacgggtgtagaacgtcacgaccctattcatgtttaccttgaggactacggcgataataaaaacggccgtgtcacaattagcgaatggggtgattcatggtcttgcttttggggctcgatgggtagctcactaattgagtttattcataggattaacaatcactactggataggcaaattagattctaatttaatctctgagatagatgatgataacgatgcaaatgctaaatacgctaaaaagcaagttatcaaactacgcaaagatgatgaaatagataaatacgaagcaagggaatattgggatttaatcgaattatcagatgatgttaaagatgattgttgcaatagttttttaggcggtaagttgcttagcttgtttggtgataatgcttggtataacgactggccttctattcccaaccctcaatatctaagaatggaatcacgattaaatgccgttagtgaagcattaaaacaaatgaatgtgagttaa

SEQ ID NO: 297707 - DNA, 726 bp, Proteus mirabilis
atggatgtgagtatgattcctatatttataatggtatccacaatgattgaactatcttcaaagtttaaaaatattattttttgggcattaacagcttcaatagctttaattgtttttggtatttttgttattgatatatttgccaatgacgcgcaaggtaaagataagttgagcataattttttcttttctatctgcttttttcgctcttctatcttcactgggtatactcataacaatcggggtttatttttctcaaaaaaatgatgataaaagaaaacaaaaagagatagatgaaaaattaatttattttattagggaaaaggttagtgattttaattttaaaataaaaagagtcttaacatttcttgagaatgatgataaatatcatggaataggagttagtggaaataaaattatatacaaagacccattagaggatgagtacaatattactaacaccataaaccttaagcttaaaaataatgattttttggatagaaataatatacatgcgagtttatatttatttatatttatcttagacattgactcattaagtgagaatttcattaataaaacatatagctatgttatgtattcacatgcgcattcactagacatccctgatgaacattttagctgtaaagataaaaatgaattgatagatttcctaaaagaaacagaaagggaaataacatctagactaaatgaactttattattaa

SEQ ID NO: 297708 - DNA, 162 bp, Proteus mirabilis
atgcaaataatcggatatgtattacacatgttaatacagggttctgctgtgcctgttacggaagatatttatacgcaatcggaatgcaataaacgtgctgaatatttaatgtcagtgaggaatgttaaagttgtttgtggagaggtatggaatgaaagataa

SEQ ID NO: 297709 - DNA, 1002 bp, Proteus mirabilis
atgggcagaagcagaagtgcaaagaacaagggtttaccgcctaacttgtatttgcgtaaagggatttactattacagggatgtaagaactaaaaaggaattttctgttggctcaaacaaatcattagcaataaccgaagccatacaagccaatttggctatttataaacctaaagagtcattagttgacagaattaataatgttcactgtgtaacattgcatgagtggcttgatacttatagggagaaagtaaacaacagggggttaaaagagaagacgctctacgattacgaatcaagaataaagttaatcaaattacactttaatgactgtccaattgagaatgtaacaccaagagatgtagccacatttatttcagagtaccctaaaaaggcaatggcaaaattactaaggtccactatgctagatgcctttaatgaagctattgcggatggtgtgataaaggaaaatcccgtttccgtgacaaagccaccaaaaacaagtgttcagcgatcaaggttatcactagaagagtttaaatacgccttggagcacacaaatgacaaatataggcatatgttcctattggcgatacttacagctcaacgtattagcgatattatcaatatgaagtgggatgatataaaaaatgataggctgtatgtcactcaaataaaaacaggttctaaagtagcaataccactctcattaagactggagtctattagttattctattaaagatgttttaaatctcatgaataggagctcagataaaatctgtggcaataccacagcaaaaacattaagaggtaagtttatcgaagccctacctgagtatttagagaataaaccaacatttcatgaaattagaagtttatctgcaagattatatgaagaagaaaaaagtgctgagtttgcaaagaaaatacttggccacaaatctatgagaatgacagataaataccttgatgatagaggtaatggctacgttgaattgtga

SEQ ID NO: 297710 - DNA, 5859 bp, Proteus mirabilis
atggataattttttattagaaaaactacgtaagaataaatttatttcttatctattaattatggtacagtttttatttcctactgtattgtcattaacaccaacagtacatgcctatgcctccgcaacagaaaataaaaacacaaatagtgaacgctggttagctcaacaagcaagtcaagcaggggcaatattatcaagtgagaatagtaaagattccgcttcacagtatttttttaatcaggctaataataaaataaatcaagaagttgaaaattggttaagtcaatatggtaaagctcaaataaatctaggtgtagataaaaatttcactctaaaaaatacagaagcaaagataattattccgttatatgagaataataattatcttctttttaaccaaacagcattccatcgcagttatgatagaaaccaaggtaatataggatttggtattcgtaaatttgacgatacccaactatatggttttaatacccattttgatcacgattttactggtaataatagccgtatcggtattggccttgaatatcgtcgcgactatttttcagtgagttcaaattattataataggctaacgggctggaaggactctagcatcaaaaaaggatatgacgaacgccctgcaaacggttgggatattagaactcaaagttatcttcctgcataccctcaattgggtttaaaagctaattttgagcagtactatggtgataatgttgatttattcaataatacatctaatttaacaaaagatccttttgcatttactgcaggactaaattacaccccatttcctcttatcacctttaatgccgaacataaattaggtaaaggtggtgataatgatactcaacttagtctctccttaaactatcaatttggtacaccaattaaaacgcaattagatcctagtaatattaagccattgcgtctacttgaaaatagcaaatatgattttgttgatagaaataataacattgtttttgattataaagagcaaacttacctttctctcaaaacccctgatttaatcgaaggatatagtaatgagcaaaaagtcattaccattagtgtagaatcaagtgcagggcttgattatattgatgttaatggcgctgattttattcaaaatggcggtaaaattattaaacaagcgccaaatagctatttactctatttgccttactataaccaacaaaaaggggctacaaatacctataatattgtcgctattgcatacgataaaaaaggccgctcatcatcgccagaaacaacaaagattgttgtattaaaagataataacgctgaaaatgcgactatttctgccacaccacaaaaaataggtattgatgaatcatcaatcattactttaagctttacaaatcatgaaggtgaattggttgaaataaatgatgcccgtatcgttcttgataatggtgttaacggagtattatctgatacacaatacaatgccaaaaataaaacttaccaggctaagtttattggcgtaataccagaaacagctcgtttttatgctttctataatcaagtaattcatcaagatatatcaacaacggttagcgtagaaaaaaatacttctcgttatcagcaagtcacattaaaagcagataaaaatgccattacactaggcaattcaacactattacgccttactttctttgataaaaataagcaaccaatcgaggtagataatgcacaaattttattaacaaatagtgagcaaggtgatatttcaaacacaacctatgatcctaccacgaaacaatatacggctacatttgtaagcaaaaatgtcggggatgcgattttccaaccgtcattaaataatgaagttatttctgatgttaaagaaatagtgaacgtttctaccttcaaaaatattaatttaactacagttaatgaaatgtatgtaggggattcatctaaagttgtcatgaccatcttggatgataataatcagccaatggaagtcgataatgcaaaaattcagatgattagagtcaataatcaaacaggtaacggcgttatctctgaaacaatctataatgctgcagataaaaactattcggctcaatttcaggcaacagaaacaggtaaagtgactttctacccttatgtcgcgaataccccttaccctgatagtaaagctgagacatccattctttctcattcagagaaatataaaattgtttccttaacggctgaaccagaacaaattatccaaaatcaaacttcagtgatcacggcagtagtgcaagataatcaaggtcaacccgttactgataaaaccgtcgaaattgttttaatcacaaatagcggaaccttgactaaaacgacgaaagtatcaggaaaagcgggggtttaccaagccacttataccggaactgaaccaacaacggcaacttttaccgtcaatgtcgatgatatacaaaataatgatactaaagtaaatgtaattgtttggggaagaaatgatgtcaatgcaacacttgttgccaataacccgtcattggatctaacacaggtagagcataactcgttattaacacttacactaacagataaaaataataatccattacctacggataacgcggttattttacaagaacaacccaattacgggatcctagatgcgactaaaaaaattagtgcaacccaatatacagccaattttaatgcaactaaggtaggtacggctaaattctttgttgaattagaaggatttcgtttaaaaacaacagcagaaattaacgttattgatagtaaacctacaattgatttgaataatgccaccattgcgtccaatcctagccatatttatagcacagaagaaaagcaaaatggccatacacgtagtaatgacaataacaattggcgtacatccactattactttagatataaaagatcaatatgggaatttattctcccctgatgtccctatcgatatcgtgattaaaaatacccaaaatggacgtgtaagcgaagccaaagaagtcaaacctggagaatatcaagttgtttatacgccgactgagcaaaatataccttttaccgcgactttctatgcggtaataaacaatgtacaacaaaatcaaatttcaaccaccgttgatgttgaaccgttaatacataatgtaaaaatgggcgcaagtttaattccaatcccttcacatattactgtgggtaatgcatcaatattaaatgtgatcttctatcaagacaataaaccttacattccttccggcaccgttgaaattagactcgctgatgattcaaaagcgttaggccatatggaggcaacaacgaaaagtggccatatctttcaggctaaattcatcggtgaaaatgtaggtaaagctaactttgaaatatttgttgataagcagcagtatactgaaggtaatatcaacgcaaccgttaatgtaacagaatcttatcgaggaaaattgaatgcggagccgagttctattccggtaaaacaaacttctgtattaactttacaaattcaaaatcatcttggtcaatcaataaaagtcagtgatgatgatgtacaaatcattatgttgcaaggtgatggtaataccgcagaaggtactattagtgaaacaacttatgatgccaatacaaaatcatatcaagcgactttcactggcactaaacaaggcaaagctcagtttatctcgatcattgatggacaaacttataataatacctcaactactgtcactgtaaagcctgcctataattcagccaatatgggaagagaaacttctccgatcacattgaataaaacctctgatgtttatttaaccctactcgatgcgagtggtcagcccattcaagttgataatgcaaaaatcatgttaaatacaccgaatttaggctctttaactgtgacaacatgggacaataccaataaacgctatgtggctacctttacaggctcagcgataggtaatgcagagtttagtgcttatgtcgataatcaaaaaatagcagatgttactacttctattcaggttaatgatagccctgatgcattttataatccgagtctagtaccatctccaagtgttattacagtaaataataaatctgaaattaggttaactattcaagatattaacggcctgcctattaaaggaaatagcgccaatattatcttagaaacaccaacattaggttcattatctgaaacagtatgggatgaaagtataaatgcatataaagcaacctttactggtaatcaggtaggtaaagcaaacttctcagctattattaatggcaaggtggggcaagcaaagacatccgttcaagttaatgaagtctataattcagcgacgttacaacctgatcctagcactatactatcaggggatacctctgagctaaccttaactttatttgataaatcaggtgaacaagtgaggatcacaaatgacaatgtcagtattaacattcttacaccaaagcttggttcactcaataaaacaacatttgacgccaagacaaaaacatataaagcaaaatttaatagcgctgggttaggtactgcacaatttaacgtttcgataaatggtattgttcgttctgatattaccgcgagtattatcatcaaaaaagcgtatgaaagtgcatcattaactgcaatgccttcatccatctatacaggtaaaacatcggaattaacactgacatttaaagatgccaacaataaacctattgaagttaatggtgccaaaattatcttacgagatggtgaagcaggacaattaacggatacaacttataacgaggccaaaaaggtatatacagcgacatttactggtacgctagcaaccaatgctaattttaatgcatcaattaacaataatattgatacatcaatcaaaactacggtaacagttaaggagctatccttagatagtttcaactatcaactgatcagtaaacctaactctatctatattaatgatgaatcaacattagaattgaaaataacagatgctaatggcgctgtagttcaattggatgatgtcagtattgctcaatcatcaaataaccaatacggcactctcagtaaaacgacctataacagcaaaacaggcacttataccgcaacttttaccggtaaaaatgtgggaacagaaaccttctatgtggttattcaacaaaccgtgttaagcgaggtgaaaacaactgttacagtggataaagtcataccgatcaccgatattgcttatattgattcgaataattactcatttgaattaaatgaaggattccctacaacaggttaccaattctcaagtttcagttttgtgatgaaaaatggaaccaaagcatcggattatacatggaaagcaaatcaatcatgggtcactctgactcaaaatagtaacaaaatgaatgtcatgttctccaaagcaccaaacagtgaaaataaaacggtaactattacagcacaacctcgtgtagaaggtgtaggaaccgcattctcctatacatttacactaaaacgttggtttacattctatggtggacaaccgttacctgctccgagagcatggaaaatatgtacagataatggattagataccacaccttcatccttacttacctcaggtacaaataaacgaggtataggaactgttttctcagaatggggtaaaggaggttcagttttccacgcatggtcttccgatatcaacgatcaacaacaggttggtttagtgaatctttatgatgggtcagttaaataccttaactcatattttcaatatgaccctgtatgtaaaacagacttgtaa

SEQ ID NO: 297711 - DNA, 1209 bp, Proteus mirabilis; identical to SEQ ID NO: 296606

SEQ ID NO: 297712 - DNA, 888 bp, Proteus mirabilis
atgcaaaatcaagtcgcacaatcaatgaaaaacagtatcaaggtatacttggtaaactcatttactcgtgatcattgcggtggcaaccctgccggagtcgtcctcaatcctcccaagctaacgacagaacaaaaaatagccattgctcaacaagttggattttctgaaacggcatttgtctattcgggtgatgacactgattttaaagtggatttttttactgctgaaggagaagttgatttttgtgggcatgcaacattagcggtttttttcactctgtcatcgcttaagttactcaaacctggcgattatagccaaaaaaccaaggcaggaattttaaccgttaccattaatcacgataatattgtgatggaacaaacgcttcctattacccgtaaggggccttgtattaacgatgtcgcaaaggcgctgggcattctacctgaagtgatagaaaagacagatttaccaatagagattgtctcaacaggattaaacgatatttttgttcccgtacaatttggctatttagatgccttacagcctgactatcaagctatcgctgctttaagccataaatttgatactatcggctttcatatctttgaacttagtcatgatcaaaatattactgcccactgccgaaactttgcaccacgctatggcattaacgaagaatcagccacaggtagctcgagcggtgctttagggtgttatcttgttcatcaccttttgccaaacaaaaggcaatttttgttcgaacaaggtagagcaatgcaatgctcttctttaattgacgtatttattgattcgacagcaaaaaacgtcactcgcgttcaagttggtggaaaagcgacattgattggtacaaaaataattgagatctaa

SEQ ID NO: 297713 - DNA, 336 bp, Proteus mirabilis
atgaaaccattacaactgtttaaaattttaggtgatcaaaccagactagatatcgtattgcttttaaaagcatctggtgagctatgtgtttgtgatatctatactgcgttaaatttatcgcaacccaagacatctcgacacttagctatgctgagagagtcgggtcttttgctcgattcgaagcaaggcaaatgggttcattatcgattatctcctgcattattgccgtgggtgaaaagtatcattgatataacttacaccacagagaaaaatagagttgcagatttactcaagatcctagagaaaaaagagtctagtcatcgttgttctgtgtaa

SEQ ID NO: 297714 - DNA, 429 bp, Proteus mirabilis
atgagtaaatctaatcttattgcctttcgtctcccagctgaactacaaaccctgtttaatgaggctatatcgaactctggtagcgataaaacagcatggatagtctccgctatcaaagagaagttaaaccgtccagacagcaatcctgacgctcgcatactgtcgctggtggaacgcctagaatcgtctgtcgcatctttaattgctggtaaggcagatatcccaccgtatacctataatgagtctgctgttgtttctgtggttaattctgtactgtctgagggtgtaaccaatgggcgcattattgctgcacggattaacgaggcaggctatcaaactaaggcaggcaaagcgtgggataaagatatctattctgcatggaggcgccacaaggatatagtaaataaattgaattatttgcaggactaa

SEQ ID NO: 297715 - DNA, 660 bp, Proteus mirabilis
atgctaataaataaattaaaaaataaaaatgagtcaccagaagacattatagagaatttgatatatgcctatcaaaactcaagagaaacatatgttgaaaacaagagagtgtttcgtgggcgtagtcattctgtctcgggtatttttgaagatctatttgctgattatttatcaaaaaatttacctgatagtaatcaatatttcgtagaccagcagttgttttcatcagcagcaaatatacgatttttcccagatatattaattatgaatgataaaataaatcgcgatatcatagacttaaagcttgattttggatggtctagaaatgatgttttttcattttgtgatacgtggaataaaaaaatagataagttaaaaggaacgagtttaactttcaatgatgggataactaaagaaaaaaagaatggttttttttctgataatttaaaatatcatgtagtagtttcgacaaaattaaataatggaagtaattttattgaaataaaagataaagtgacaaaaaatttggaacatgttgagttatatatactcactgataaggtacacccgaatgattacaatagcaccgccgaagaacgggtaaaaaatatacatatatgcatgagtgagttttcaaggttaatgaataatttatcataa

SEQ ID NO: 297716 - DNA, 996 bp, Proteus mirabilis
atgcaccctctaaaacctcatctaacgtattttgaccaaataaaaaagctagaaaaacgaggaatgagttttgaggatctacctcctgagcaggcggtaaagaaaataatgaatattggatattacaggctatctgggtattggtatccattccgtaagttaaagttaatcccaccagtagcacccgatgaagccagacgtgaagaaacattccttgagggtacaacctttacaacggtatacgcacactatttatttgatgtaaaactaagaagttctattttttatggaatagaacgaattgaaacttatcttaaagcaaaaatagcttacgaactaggtaaagtatcccctacggcatacaaagataagaatatcatccaatacagacatcactaccgacatgatacatggctagaaaagttagattctttaatagagcgaaatagtgataaagattgtatacgatggaatttagataagtatggggatattcctatatgggctatcgttgatatttgggatttcggtacaatgtctcgcttctacggaatgcttgaagataaatacaaacatcaaatttgtaaatcgcttggctttctaaagcctaactcagcaaatgtaagagatggactgaaaacagcattagagcaccttaatacagttagaaacaggtgtgcccaccatgcgcgtttatggaataccgatttttcagactcaaaaattagcatcgaggtgttagataatattgatttaacagcctcgcgcttgtctccaaaaagccctgaactatcaagaatggcaggtatcatatttttaatatggagtctgaccaagagaataagttgtaattctacatggctaagttcagtaaatgatcatttagaaaaacatcagggcgttattccgtttaattcaatgggattcgataataacaatatctcaggattaaaaaatctattggataaggaaaaagaacaatcagcccaatcataa

SEQ ID NO: 297717 - DNA, 369 bp, Proteus mirabilis
atgataaagataaaagtatctaaaaggaaaggtcgcaatcaatcatttctacaatattgccagcatgtagatcaacgagtatcacgggctatgcaacggtttcttttcgatgctggagcacaatccgcaatttatacgcctatcgatacatcaacattgattaatagtcagtttagggatgttactgttaatggtacaaaaataacgggacgtattggttactccgccagctatgccgtttatgtgcatgatccgaaagttaagcagaaatttaaacgaccaacagctaaaaaagagttcttgaaaaaagcggtcgaggaaacgctacctaatttaactaagtatattcatgaagaattgaagagttag

SEQ ID NO: 297718 - DNA, 3231 bp, Proteus mirabilis
atgtatcatggcgaaggttacacagtatatgtagatgccgatacggctggccttcttgaggctaaccgtgaaatcgaaaaagcaagaagaaaaataaatgatttaggcaatgaagcaaacaccacaagcaaatcatttactcaattcaataaatcagcaatcgcggtttccagtgcgttaaaaatgcctgaaataaaccgcttatcacgtcaaatgagtgaattggcggggcaaattggcgccgcttcaatggcaacagataaggcaacgactgttaacgcgcgttttacaggtgtgattagcaatgtgtctgggctactaggggcgggatatgtttctaatattggtagcgctactgtttcgctcttgcaacatactcaaggggcaattaatgccacacaagccgaggttttacatactcgcgctattcaaatgaaggctcaggcattgcaagctgctgcctcccaagaagtgattaacgccaaaaatcttaaagcatcaacacaagcagagttaaaagcagctcaggcagcgttagaacacgtttattcattagaaggctctaatgatatcaagcagcgtaatttagagtcactgagggcacgacaggcagcagtgctcaaggatgctgaaataacttatcaaatgactgcgagtgaagaaaatttacagcgagtgactaaagccagtaatgcgctacatgctacggaaactaaaataaaaacgcacttagctacaaccggaaaagaaattgcgcttgttgaggctagagtcgctaaagcaaaagaagcagaaacactagcaactcaaaaattaaatgcggcattagcattagagcaaaaagcgaaagccacactagccactacaacagacgcggtgaccgtagctaatggtcgcgcagcccaagcggctagaagtcaatctattgctatgcaaggattgcgaggtgttgtggggttattaggtggcccaacgggtgtttttatgttggctactgctggcgtgtatgcgctatataacgcgatgaatgatgacaccgcaacgaaagagtttaatgacagagtagatcagtggattgataaaattgacgaactgtcagccaaacaggctcgcgctgtggctaaccgcttaggcgagaagatagcggaaacaaccacacaactagaagggcagaaagaaagtcttgaaaatactactcaagaattaggctcttacaagcgacaattagctgaaataaataaagaaattaaatcccaaaaagagcaaggtattgaggttggctctccttatgtacgcgatgacttagtcaaagcaattaatgaactcaccaagaaacagcagcagtatgagctacttatttcagaaggtgagcagaatattcgtcgctggacggtatcacaaggtaaagccgctaatattgcaaaagagagagcaaaacaaacagacgaactcagcagagcggaattaatttatcaacgccaagctaaagggatagttgatgctaaccaacaattagctagatcactagagctaggcagtgacgcagccgttaagaaagaacaagccatcaaagagttagaaaaggctttaattgctgatggttttgttaaagactccgagttatttaaacaaaaaatacaagagttaacggatgagcttgataagaaggcaagtttaaaccttgctaactctcttgctgagatagagcaacgaacacaagccctcactattggcatgaaagacggtaagcctgcactggatgaatacaatgcctcgttactgcttatgcaaatggggataaaaaaaggttcggctacctacaataccgaactcccgaaagcgatagaggcaatacgcaatttacgtgaagctcaagaagccgcactaaatagcaaatcaaatgctaacaagtcgttgaaagcgattaataaggcaaatgatgccattaaaaaacaacagcaacagactgagacgttaagaaaagaatttgaattattgagttctggcgcagctaacgtaaatagagagatggctatttttaacgctgttcaaagtctgggtgctgatgcgacagacaagcaaaagaaagctattgctaaagaagccgccgaagtttttgacctcaaacaaaaagtcgatgactttattaagtcgcaagaaattactccagagttaaaacttgcaagagcatttagacaagaatctgaagagcttaaacgcatgtttgataatgatttcattgatgaagaaacgtttaaggcgttaggcaataaagcaatgaaggcatttgatgctggaatggctgaaataaaaataaacgcggttattgacccaataactgaagccaaagggcaatacgacccgatacaagcactggctaacgaacacgctaagaaacttgagatgatccgccaattcgaaacagaaaaaggcgctattactcagcgtggcttagagttaatgaatgccgctaatactcaatatgagcaagaccggttaaatgctcaatgggagatatggcgcaatcaaagccaagccaatcaattcttagctgatgggttggacgcattaggacagcgctctactaacgtactcacagggctattaactcaaacacaatccattaacgatgctttccgtaatgtcgccttaaccatcgtagaccaagccgttggcgctctggtccaaatgggtatgcaacaagttaagaatatgattatgggtgaaagtatggcgacagccgctcaagcatctgcattggctcaggctgcggcagcacaagcggcatgggcaccagcggcattaagcgcatcaatagccacattaggcgcagcagtagcaacgggaacatcatcatatacggcggctatggcagctagtaaaacgatggggttggttgctggtgctcgtaaaaatggtggacccgtaaatgctggctctatgtatcgagtgggtgaaggtggtaagcctgagatattcaaagcatcgaacggtaatcagtatatgataccgggtgataatggtcgagttattagcaatcgacaaatgggtaaaggtggtaatggtgttagcatgggtgatatgcattttacattccaagttcaagcacctaatggcatcactcaaaaggaagcacaacaaatacagcaaatggtgagaggtacggtttatgacgtacttggtaacgaaatgcgtagcggtggtgctttggaaaaagtaagaagttggtaa

SEQ ID NO: 297719 - DNA, 342 bp, Proteus mirabilis
atggaaaaattacaacggttagcaagcactatagcccagatttatgttgataatttaaaagctgaaacaggagaaacattagtaacttataacggtatcacaggtaaagttacccctgaattactggccgctgggttgtttgataatgcggtatttgcggttaaagcggatggagaagagattgacgttgaaggtaaggcgtatgatttattatccccgttaattaacttatcaacaaagccttactccctaacggaacaggcatataaattgattaattttctaaatgtgcaggcactaaaagcaggaagcactttatcaaccttatcagttgtacattaa

SEQ ID NO: 297720 - DNA, 174 bp, Proteus mirabilis
atgagtaagcaaaaaagaaccttcaagccagtgtcaattgatagtgaaataatagaacgcgtcaaaaagtttaaagaaaaacagggtgaaaaagattttttcattcaacgagcacctattagtcaattaattcaagggttactaattaatgccttacataacgaaggattctaa

SEQ ID NO: 297721 - DNA, 531 bp, Proteus mirabilis
atgaaaaaaatcatgataacggctctattggctttatttttatcgggatgtgataacaacccgccagcaccctacgggtttaagtgggggcagactaaagaaagtgtgaaagcattaaatttaaaagacacaaattgtaattttggacattcttgtacattcaaagaaacacctgatggacatgacgcagctattttatttgcaacatttgacgataagctaggattattttatatactttatactgaaaattttgatcagaaagcgacaaccaaagaggaagcatttgagctatatgaacaagcgggaaatcaactacaaaaagtatatggtgctcctgtaaataaaacccgtgttcttaaaaaagaaagcgattttttaaattgcttagcaagccaaggttgtggtgatattaatatggattttgataaagatggatacaaagcaaacttaagaatgagcgtatcaaatcaagggaaaacatatctaatttatacttttaaaagccctgtatatagcacgtctttgtaa

SEQ ID NO: 297722 - DNA, 438 bp, Proteus mirabilis
atgagcactcaaatactcacactaaaacgtaaaaatccaccagcaacgaacacaccaaaaagcttgcaaactaaaacgccacaggaagcctcgcagcaaccgaagaagaaaaataaggcagatgttcacgcgaagaagaaacaacaccgtatcgaccgtatagcgaagcactggacgatatttaatgagccagaggctaaaccactgatgataggtatcaaagaagccatgattgctgaggttaaagataaaaggctggatatacctgagagtcacattaagcaggggttgcgatcatacattagtcgtaaaacctatctgaaagcccttactctgggcggtaatcgttttgatatgaacgggcagcctaaaggagaaatcacacctcaacaacaagcattagcaaaacaaatgctggtggaatgggctaaaaaatag

SEQ ID NO: 297723 - DNA, 2748 bp, Proteus mirabilis
atgaagccgattgatgttatccgtgaggtgaagctgaaagctaacggacaatggcaagctatattatctcaccttggggcagaagtgcccctaaacacgcacacggcttgccctcattgtggtggtaaagaccggtttagatttgataacaaggacggtaatggcacgtttatttgtaatcagtgcggttctggtgatggattagatctcgttcagcgtgtgttaggtgtcagtgtaaccgaagctgcaaaagaggttgctaacataattggtattgatacccgttcagcgtgtccaccagcctaccgtcgttctgagataaaagcacaacaagacgaactgaaagcgcagcaagccgaaaaacaagctaacgagaagagagagaagcataaacgctttattgaacggtataaccgcactattgccaatgttcaacgtgggagatctgactatctcaaggctaaggggctgcatggttttgaaatggatttattacaggacggttctcttatcattccattattggacgctggtggcgttattactggcgcacaaactattaagcctaatggtgataagcgtttactgtcagatagctcaaagtcaggcagttattaccccatcaatgagcctgtaaacgtctctacggtgattatcgctgaaggattagcaaccgccctaacgtgtcacttaatccaaccagaagcgcacacagttgcggcaattgatgcgggaaacctcattcatgtagctaaggtaatgcgggttaagtacccagagagcaagattattattgctggggataacgatattaagccagaccaagacaatacagggaaattagcggcagaaaaggcggctaaggcggttaatggtgtcgctgttttacccccaactgacgataaagccgattgggatgactaccgcctatcacacggtattgaggcggcaagacaggcatttaatggccaagtggatcagcaagcaggtgaaatagtggaagcgaataacgtgatccatattgacgcaaaaaagaaagtcagacctcacgatgacttagccccattttttgataagcgtcatggtggtttgtattacatcgaacgcaagcaaaacaatacgacgggcgagattgacgaaaaagaaacgtggttttcggatgaaatggctacggtaggtattggctctgatggcaaagacagctatttagttatcgagatgaagcaagaaggtagcaaccgcataatttatgaagccattccgagacgtgaactaggttcgcctcaagggtgggggaggttacgctcccgtggcgttaatattacaacaaagcgtggtcaattggatttattagctaactaccttcaacggaaaggaaagcgcgacgaatggacgatcacacataccgcaggttggcatgatggagcgtatgtgatgcccgatggtcatattattggtacacctagccgccctgttgccttttgtggcggaacgtctgccgttgcgggttatatcgtcaggggaaccgctgaaagctggcggaagaatgtcggtaatttaatgaaaggcaaccaatctatgattttaggtggtttagttgcgttagctgccccactaaactcattatcgggcggtagctcgtttggcattcacctattcgctcaatcctcagcagggaaaacaacgactgtagaagcggcttcaagtatctacggtgtacccgatgaactgaaattaacatgggatgcgacaaagtacgggttaacgattgaagccgcctctcgaaatgatggatttatgccaattgatgaaattgggcagggtaacgatgtgcggcatgtggcaggaagtgcctacagtttatttaatggtacagggcgcattcaaggtaataaagacgggggaaacaaagccgttttacgttgggcgattgtggcgttatcaacgggtgaggaagattttgaaacttacctcattcgtaatggtgttaccccaaaagcagggcaattagtgcgactggtgagtgtgccatttaccgatactgtcgagtttcacagccttgatgatggtgatttgcattcacgagcaataaaacgcgcatcaacgcagcattgcggggcagttggtagagcatggattgagtatttagccaacaatcaggacatggccaaccagaaagtgaccttcaaggaaaacgaatggttatcgagtttacccgaagaggcatcaccacaggttaagcgagtcgctacccgttttgccatgttggacgctaccgcagagctatcagcctcaattacgggttgggatagtggcgaatgtagccgatttattcgtaatagcttcaatgaatggctagagaactatggcacaggaaaccgagaaaaataccaagtcgttaaacgggcaagggattttattcaacgctatggattaaatcgctttcagccatacacctatgggaagcgcaacggagatttagaccgagtttacgcaggaagaataacaaaccttgcgggttacttggtttctggtcgcagagaggacggcaaggacgaatatcatattatcccgtcagtatttgaagatgaaatactctcaggtattcaaaagaaattgggggcggaggcgctcgaagaggcaggtattttagtcagaccggaatcagggcgtgtagacggtaaaactatcagcattaatggtagtcagcaacgatttgttgtcttaattgatagtgaggaagaataa

SEQ ID NO: 297724 - DNA, 345 bp, Proteus mirabilis
atgataacgaagaattttaaagttaattcactagcgaatagctacgcagccgctatttaccacgatattaccacacgtaatggcggtgattggttttcgatgaaggtaggcaacaaaacgattgaagttgccattattgacggtgtgaaaggtattcgaatgctcgttgatagctatttgctgaaagccttaaaagggcaatatcccacatgggaggcagttgctattagcttgatagagcaatgtgtcattaatggatatgtcacaggttatggtcgagaggtgtggcaaagcatgattaatgatatgggcgactctttagctgataagggggcgtttcaatga

SEQ ID NO: 297725 - DNA, 597 bp, Proteus mirabilis
atgaatatttctaatattaacgcattcgaacacagtgaacagggtgtgatcctcattactgaagccgccaaccaagaggctatcagctataccgaagcattagaggcattaaacgatggtagctttgatggtgatctgatttttggctttgaattagttttagctatctgcaagggagagtgtgacagcttttttaatccaactaatcagcagcgtgtgatcttgtggcgttggattgtagccgcttcgtttgtcgcagagcaagcagacaataacgggacgcatcaagttgacaacggcagaggtaaaaccattaccgccgctatttatcgcaacaaacatgcagcgttaaccgtctatgcagcaagcgaacgtatgttactagctaatcacattgagggcgctgcttatgagcactatggggccgagaatggcgcaattatggcagtaaagatatatagggattttatcaatcttgagcctaaacgtggttgccgactatcagagcgagggcgtgaggggttatctgttcttcatgatgatctcattagggcgatagaagatggtgaatttagcgacaccgtaaccattcattaa

SEQ ID NO: 297726 - DNA, 186 bp, Proteus mirabilis
atggcgaataaagagatagttttatcactggaagtaccccgcatgaaaataaaccgagtgctgacgctcttaactgtttggcaagaagcaaatcaggacgaggaaacagcccatatgatagctattgccttcgctgctgtgaatgacgcactcaaggatattgattctgctatggagggtaagtaa

SEQ ID NO: 297727 - DNA, 174 bp, Proteus mirabilis
atgagaacgtttctaattgcaggttatggcacaaccctaaaaggcctaacactaggcattaacaagcaagtgatatctgccagcctaaaagatgctcagtcacaagtggtgcgagaggcgcaacgtgacggtttaattgatatccgaatcaactatgtgcgtgaggtgaagtaa

SEQ ID NO: 297728 - DNA, 585 bp, Proteus mirabilis
atgagacaagtcactatcaatgccaccagcttaagtccattcatgtatcaaggtaagcgagttgtcacctttgccatgattgacgaggtacaccaacgcccgaaaggtacagcaaagcgcacattcaacacgcataaaaagcactttattgatggagtggattgttttttgctcactaagtacgtcatacgtaccgagttacccgaactggaaatagctggaaaagcaaaagagttaatgcttatcactgaatcaggttacttgatgatagccaagccatttacagatgatttgtcgtggcaggttcagcgctcaatggttaacagctactttcgtttgtctgactttccagaaattaaacacattcaaatacccacgctggcggaacttgaagccatgccaattggtgaggctcagaacttgattagccgcttagaggctgattcttatcaagggcacggtaggcgtggcagctatgccatgaacctacgtcgcaaagagaagaaagcacttaaaccaatggtaatcgccattgagcaagcctcacagctacacattcaggatatgggagattatcactcatga

SEQ ID NO: 297729 - DNA, 210 bp, Proteus mirabilis
atgaaaaccatcaaattaaatgttggtcacttatctaccttggaagaagtcgaacacatcaacgaagaacttcaagcgttgttaatcccgctgttaacggctgtagagaatgaagctgagacggatacgcattttatgctgagagcagtcaaccgcttagtgtgtgctcaaggaaaagaaatcacaaagttggtggaggtgatgaaatga

SEQ ID NO: 297730 - DNA, 195 bp, Proteus mirabilis
atggcagatatcactattcatcaagccgctgaaaaagcacaacagttagaactgattagcctgatgttgcctaactatcctcgtaacctaaccataagcgacatttccgctatatcgtcactcatggcgaagttatcaggtgatttagctgtatttcttcaagaggaaatcgcagtgcaggaggcgaccaaatga

SEQ ID NO: 297731 - DNA, 174 bp, Proteus mirabilis
atgcgtaatcctcaacctaacgatttctacacgcataaaaataatagcgaaaccgtcaaagttctatcagttcaatttaaccgtgtgacctttcagcgagacggctttgatagccctgtcattgttccattaagccagttcagcaatgaatacatttattcggggagggcttaa

SEQ ID NO: 297732 - DNA, 1053 bp, Proteus mirabilis
atgacggctattaacttacaaatgtttggtacacccaaagcggtgtatcaaagttcaaatattaatcaattatccccagagttggggaatattgcctaccaagtgaataattccctactggcaggtaataacgtaaattcaacttacaccacgactaatactgtagctttaaactacggtattacgggcagtcaatcagcgaaaatttacgccaatcaatcagggcaatatttctcaggttgtaattctggcgaacatttgagcaccccaaaacgggggagcgcaaaacgtggagaatttacaccatttgctaaaggtgatttttctcacctttctaaagaggctaattatcctcactggcaaggtttaatcggggtcactacacaaggcagaattgagttttttgagtccataaaaaagggcggccaatcggctacccttgggaacgtcgatattaaataccgagcaagtgagaactatgagaatagtatccatcttattatcggtaaagatgacaaccttgagttaatacaaaaatgtgcaatacatcacttgcacttatgggtaattgttggctatagtgatcgggcgctagcaaaatctagtgtcaggattgagaccctgtatatactaaaggtgacacatgacgcgccttgcgtctttttttgtgtctgtgcctacgcacacctacaatttgcggtattatatcgctcaaattcaatggtgatgctggcagggcaaccgaaaggttggctggtttcctttagtaccagtagtctcaaccctgtcagtgtcaccacccctatagagattgagacctctggtggtgactccttagataaactaaaggagatcatcgttatgatggcaacccctacccaaactcaattcaaatttttgtttctgagtattaaacgctcagatacaacagctaaaccttgtcgtattgctgttacagcaccgaatgaacacgatgcaagactgatgcttgtacgtgattatatcctgtcattcgctggtcgcttacctgttaaggaggtggctcatgcgtaa

SEQ ID NO: 297733 - DNA, 594 bp, Proteus mirabilis
atgaaatcaaaaaataacagcttaaatgctggtggattcgctcaccctaaattcagcgacgagactattttaaatattaactcagatgatatttccgttattcgatttgaaaatgttcaggtgcggatagttaaaattaataacaatccttggttcgtcgctaaagatgtttgtgatgctctacaactaactaactcaagggctgctttgctggctctagatgaggacgaaaaggatgtaagtttaatttacacccttggcggtaatcagaagttgaatattatttctgagtctggattttataaactgattgcccgcagccgtaaggcaaccactaaaggcacattcgcgcaccgttttactaattgggtattccgtgacgttatcccatctattcgtaaaactggcgcgtatggtgtgccattctcagcgttaaatgatttcaccaaacgtcagcaacaataccaaattacagcctcaaaacatgggcgtgatttgcaatcatgtaagcaaaagaaagctgatttacagcgtgaagaacgcgaattatggaagaagtaccagcctgattttcttgatggagaaatccactaa

SEQ ID NO: 297734 - DNA, 396 bp, Proteus mirabilis
atggaaaagaaaaaccacccatcacaggtggcttctcagaataacgtagcgtcgtctattctatcaaagaacccacctaaaaaacaccgtgcccgtttatatatgttaggtactggcattaatggctttaccgagaatgaaatattaattcattgccgtttatcgtcaggccgtaattacccgaatgaattagagcgtttattgaatatcgaactagaacgcattgatgagcctaatcctgatggtatcggatcacattatcgttaccgctttaaaacggctcaagatgtgcagaaggttattaacttaataaataaacgtgctgaacaaggtaattaccaacccatagataacgaactcataaataatattttaagcctgtacccgacaaaataa

SEQ ID NO: 297735 - DNA, 219 bp, Proteus mirabilis
atgccaacagcaacaaccttaaaagaaaaccttattcgcttaccagaagttatgcgtcgtactggctatggtaaggcgtggatttatcgcctcattgaagcaggtcaatttcctaaatcagtaaaaattggcgctcgttctattgcttttgttgaatcagaagtagatgaatggattgctaataagattgctgaatcacgttctggtgaggtggcataa

SEQ ID NO: 297736 - DNA, 924 bp, Proteus mirabilis
atgagcgtggatatatctgcatatcgtgaatggttgagttattcagaaatagtaacgcttttggcggataaacatgggatagaaatatctattggcgatattgcaagacttgttgcagatgaggcaatttctccatctatatactttcaaactccaactccagcaagaaaggtttcattgaaaactgttccattatcagtagcactagatgatcctgacgcattgataaaggctaatttagaaatgctgaatagcgacgccgtaatgccagaaaccttaattcagcacgcaatcccaataaataatgagatagttagaattgatggactatgggatgctatgttttgtggtgtgattaagcacttcaatgaatgcctttatagccaaggagttggacttaatgaaccattgagaagtttgtatggtgtaagagggattgtgttaattaaaggaaatgacttataccagatattatctcccgttgatattggtgagtctttaaagatagtagaggctatgaaattagctcatgcagatcgtttgaatcctttagttgacaaacatatagctcaattaacccatcttcttaatttggtaaataatggcgattatgctcatcaactcatgccttgcacaaggttgccaagtggcgcattacctgtaattaaaagagctaatattttaaaattaataaataagaatagctgtaaagcagataaaaaagagtcacctaaaaccattaatgctatggctcaatatatatatggattaacttgcgtgaaatatgggaaggatattgcagataaccctcgttctcatattgataaccctagaggggagataaaaactgattttgacttattaaaacttcctttacctagtggcaatactgtttccagctggcttaagaatattgattcgtaa

SEQ ID NO: 297737 - DNA, 1137 bp, Proteus mirabilis
atgtatttagaagttgctccgaatggttctaagtattggcgtatgaaatatagatatgctggtaaagagaaaaggctggctttcggtgtatacccatcaatatcactcgcacaagctagggcgaagagagaagaagccaagcgcatattagcgttaggtgatgatccatctttagttaagaaagcagaaaagagagagaaagaatctcaagtaaataatagctttgaaaaaattacgcttgaatggcatgactataaaaagccgaattggtcaaaaggttatgcggatgatttactagaagccttccagaaagatatctttccttatattggtaaagttagcattacggaaattaaaccgttagatatgttagaagtgcttcggaagttagaaaaacgcggcgtgttggataagcttaaaaagataaggcaggcatgtaaccaagtattccgctatgcaattgtgacaggacgggctgagtataatcccgcatcagaattagccggcgcactgtctactccaaaagctaagcattttcctcacttaaatgtgaatgagttacctgagtttttacaggcactatctgtatgtagtggaagtaagatcactcagattgcgacaaagctattaatgataacaggcgttcgtactattgagcttagagcggctgaatggtcagaaattgattttgataaagctatttgggaaattccaaaagaacgtatgaaaatgcgtcgccctcacatggtgccattatctacacaggccttagaattattcaaagaaatacaaaccataacaggaaagtttaagtatatctttcatggtaggaatgatgcttctaagccaatgagtgaagcggccataaatcaggttatcaagcgtattggttatgatggtagagccacaggtcacggattcagacatacaatgagcaccatcctacacgagcaaggctataacactgcatggattgagacacaacttgcacacgttgataaaaactctattcgtggaacgtataaccatgctcagtatattgatggacgtagagaaatgcttcaatggtacgctgattatatggatactttagagaacggggataatattatttatggcaaattcaaacagccctaa

SEQ ID NO: 297738 - DNA, 288 bp, Proteus mirabilis
atgaataaactaaaaatgagaaaagcaaagttaatcaaaatcaccacgtcaggaacagtaataaaagcccctgaacgagttaacacagcgacaggtaaagttatggccacgatgactattcaggctgagagtgacaagcgtagcccgtacccattaaagatagtggcattcgatattaacgcgctggagcttatgacctgccagaaaggaaacaaagtaaccgccacaggtcgctatgaatggtttaatggttatcagctaacaggggcgcagatagttactgcttag

SEQ ID NO: 297739 - DNA, 189 bp, Proteus mirabilis
atgttacaacgtgaagcaatagaagccgttatgatggagttagcccaccagcaagggcaatcactcaatggacgcgataggttagccattaggacaggtgtagcgcagacaatacaggctaaagaacgtcacagacgaagaatgacagcacctacctaccaatggacgaagccagcaccaaaaagataa

SEQ ID NO: 297740 - DNA, 429 bp, Proteus mirabilis; identical to SEQ ID NO: 297714

SEQ ID NO: 297741 - DNA, 660 bp, Proteus mirabilis; identical to SEQ ID NO: 297715

SEQ ID NO: 297742 - DNA, 996 bp, Proteus mirabilis; identical to SEQ ID NO: 297716

SEQ ID NO: 297743 - DNA, 369 bp, Proteus mirabilis; identical to SEQ ID NO: 297717

SEQ ID NO: 297744 - DNA, 3231 bp, Proteus mirabilis; identical to SEQ ID NO: 297718

SEQ ID NO: 297745 - DNA, 342 bp, Proteus mirabilis; identical to SEQ ID NO: 297719

SEQ ID NO: 297746 - DNA, 174 bp, Proteus mirabilis; identical to SEQ ID NO: 297720

SEQ ID NO: 297747 - DNA, 531 bp, Proteus mirabilis; identical to SEQ ID NO: 297721

SEQ ID NO: 297748 - DNA, 438 bp, Proteus mirabilis; identical to SEQ ID NO: 297722

SEQ ID NO: 297749 - DNA, 2748 bp, Proteus mirabilis; identical to SEQ ID NO: 297723

SEQ ID NO: 297750 - DNA, 345 bp, Proteus mirabilis; identical to SEQ ID NO: 297724

SEQ ID NO: 297751 - DNA, 597 bp, Proteus mirabilis; identical to SEQ ID NO: 297725

SEQ ID NO: 297752 - DNA, 186 bp, Proteus mirabilis; identical to SEQ ID NO: 297726

SEQ ID NO: 297753 - DNA, 174 bp, Proteus mirabilis; identical to SEQ ID NO: 297727

SEQ ID NO: 297754 - DNA, 585 bp, Proteus mirabilis; identical to SEQ ID NO: 297728

SEQ ID NO: 297755 - DNA, 210 bp, Proteus mirabilis; identical to SEQ ID NO: 297729

SEQ ID NO: 297756 - DNA, 195 bp, Proteus mirabilis; identical to SEQ ID NO: 297730

SEQ ID NO: 297757 - DNA, 174 bp, Proteus mirabilis; identical to SEQ ID NO: 297731

SEQ ID NO: 297758 - DNA, 1053 bp, Proteus mirabilis; identical to SEQ ID NO: 297732

SEQ ID NO: 297759 - DNA, 594 bp, Proteus mirabilis; identical to SEQ ID NO: 297733

SEQ ID NO: 297760 - DNA, 396 bp, Proteus mirabilis; identical to SEQ ID NO: 297734

SEQ ID NO: 297761 - DNA, 219 bp, Proteus mirabilis; identical to SEQ ID NO: 297735

SEQ ID NO: 297762 - DNA, 924 bp, Proteus mirabilis; identical to SEQ ID NO: 297736

SEQ ID NO: 297763 - DNA, 1137 bp, Proteus mirabilis; identical to SEQ ID NO: 297737

SEQ ID NO: 297764 - DNA, 1482 bp, Proteus mirabilis
atgattaaattaaataatgttccatccgaatttcgtcccttagaaagctataaaatgttaattggcggcgaatgggtatccagtacatcgcaacaaacgaccaaaacctatagtcccgcaaccggtgagttattaagtgaatatccatcaggtacagctgaagacgtcgatcttgctgtaaaagcggctcgtaaagcttttgatcattggcgtaaaacctctcctgctcaacgccaagcgctattattaaaaattgctgaccgtttagaacaagagcaagaacgttttgcttggattgagtctcttgataacggtaaaccactcaatgaatcgaaaaacatcgatttacccgcctctattgaccattttcgatattttgcaggcgtgatacgctctcataccgatgaaagtgctgtcttagacgaaaataccctgagtcttgttattcgtgagcccattggtgtcgttggacaaattattccatggaattttccattattaatggctgcttggaaattagcccctgccatcgccgctggagataccgttgttattaatccagccacactcacctcactttcattattagagctaggtcgtattttaaatgaaatattaccagccggtgttataaatattgttactggtcgtggatctgttgctggacaagctattctagaacaccaagacattgataaactagcatttaccggttcaaccaatgtaggttataccgttgcagctgcggcggcgaaaaaaatggtaccagccactttagaattggggggtaagtcagccaatatcgtcttccctgatgcgaatatgaaaaaagccgttaaatattccgcattagcgatattaatgaaccaaggacaggcctgtgaatctggctcccgtttattcttacatagagatattcatgacgcattcttaaaagagttaaaagcagaatttgagcgtatccgtgttggtgatccacttgatcctaatacacaaatgggtactcaagtcagccaagcgcaaatggataccattttagggtatgttgagctggccaaaaaagaaggtgcaaccatactcacaggaggtgagcgtattacgggtgaagggtttgatgatggcttttttgttcgcccaaccattattatcaatgccacaaatcaaatgcgtgtcgcacgtgaagaaatttttggccctgtattatgtgtgatcccatttgataatgaagaagatgttattgaaatggctaatgactctgaatatggccttggtggtggtgtctggactcaagatattaaccgcgcactacgagttgcaaaagccgttagaactggccgtatgtgggtaaatacttatcatgaacttcctgctcatgcaccatttggcggttataaaaaatcaggcttaggtcgtgaaacgcataaaatgatgttagatgcctacagccaagtgaaaaacatcttcattagtaccaaagaataa

SEQ ID NO: 297765 - DNA, 1074 bp, Proteus mirabilis
atgaaatttactcctcaacataaaatggatgctgcattaatggcaggcgcatccttaaacacacccaataatcattcaatacaagagcaacatcatcgtttaaaagatgatgctaccgttagtgcttatatgagtcagaattatatttctgtttctgtcgcagattcggttgaacatgtaaaagcacagctggttaatgatttaaaagatgaattaattccaacttatctgtatgtcgtagataaagataattatcttaacggtattttgccggttaaatcattactacttgctgataatgagctttttgtttcggatattatgcgccaaacatttttctcagtttcaccggagcaaagccgacatgatgtttatcagttaattagccaaagtggtttagacagtgtacctgtgatgcattttggtaagttagttggtgtattacgacctcaagatattgctgatttaattgaagatgaaaatacgctagatgcacaaatgcagggggcaacgtcgccattagaacaaccttatttagagacaagtccggtcactttgtggcgtaaacgtgttgtctggctattaatgctgtttattgctgaagcttataccagtacggtgttacatgcttttgaagacagacttgaagctgctatctctttagctttctttattccattattaattggtactggtggcaatagcggtacacaaattacctcaacattagtacgtgccatggcattaggtgaggtgagcttgcgtaatgtatggtcagtattaagaaaagagatcacgacctcgataatggtggctttaaccatgggaatagcaggatttattcgtgcttggaccttaggggttggcatggaagtgatgatagtggtgggattaacgctaatttcaattacggtttggagtgctattgtctcttctattattccaatggtattaaagcgtattggtgttgatcctgcggtggtgtctgcaccttttattgcaacatttattgatggtactgggcttattatctactttgaaatagcatctcataccatgagtgtgtttgcttaa

SEQ ID NO: 297766 - DNA, 411 bp, Proteus mirabilis
atgccgatagtcacaatcacgcccagatataaagataacgatgtttatcggaagtatgcggctaagctatcagctgctcttaatggctcatccctctctgggtatataggtaaatttgctgattttaggaatagcgccatagcgcgtcagtcatttattgaaaaggttcatataagaacgccaaatgaaaaaccttgggatggcgaaactcgacaggctgttagagtgagcgataactttttagtgttttgtaagcactgtatgtacgatgattattaccaaattctggcaatcataactcctgatgcacatgctcgttcagatgcgttgcttccaatattggcagatatggcagaaacttattttcattctttatcgcttaaagagttagctggattagatcagttctag

SEQ ID NO: 297767 - DNA, 579 bp, Proteus mirabilis
atgatggcaatgctatcaaatccaatggataaaaaagatgtggattcaggcttagctaatttagccatgtcgatagctaccattgttgataaaaaggcaaaaggtgatgtatcaccagatgaaattatggatttaattgttggtggtaagaccgtgctaacgacccttgttacatcaatcgatgaaatagtggctttacttgatgacccaacaaaagatgacataaaaaaatatgcaggtaataaccctgatgaggttatgcgtgaattggaacgagtgattaaccatggtaataatgtaattatgatgattgaggcaatgtatagcattgctaaaactaccaaggcttttcatccatttgaaagcatagctgatggttacttcaaagaagttattcttaaaatggctgcactaagaaaccatacacaagcactttatagacaatttaatcagcatattaacccgttacccgcaatggaggttgaagatggattcggtgaagaggatatagcattgtttaattcctcaatagctgaatttaatcaagatctgcttgcaggtaacttgcaatgccgatag

SEQ ID NO: 297768 - DNA, 3276 bp, Proteus mirabilis
atgatgtggcgcatttgttatcaatatcgccaatatctccttgctcttggtttgctggcaggcatattgcctgtcacgcaagccgcagatgatccgactgaaacttttttatatgagcaagttagactaggcaactcgaaaagtaacgatgttttagtttctcaatcactgtatcgtttatcacttataaaaccgaacgatcctagtgtgttgttaatgcgtatccaatttgctgtaaaacaaaaagaaacagtaaaagcacaacaactggttgagcaattacgtatgcatggcgaaaatactgaacaatatcaacgtgcgattaagctactatcattaacccatgaagataaccgccaaatcctacaaaaagcctacctttatcagactgcgggtcgttatgatgaagccttgcaattatatgatgatatttaccaaggcacgccccccgatgaagggttagcccttgagtatctcaatgtattaattgctgcaaaccatgccaacaaaatggcacgtattaagcagatttatcacacttatcccaataaccaacagatagctaatatctatcagcaatatcatcttaccccagcattatctactccctcagcgacctctgcccccaataacacaatatctattcgtgcattaaaacagcagttacgccagcagcctgataatgcagacataataggaacattaggcgtgcgctattcgcgcgcaaatcaacgggcactcgcgatttattatctttctcaagcactcacattggctcccaaacacaacgatagtgatttgtggcgtacgctgttgcaatcaaatcaatattggcatttacttgccaaagcagatgaagcgttattgaatcaagagtactctgccgctaagcgctattttacccaagtacgtcaactcagcccctataaaagtgaagcttatattggtttaggggatatcgagttagcgcaacatcaattagagcaagctgaacgttattatcaacaagcgctacaatatcagcctaatgacgcggcgactttgcatagcctgaccaggctctatcgtcaacaatcgcatcaaaaagccgcccaatttatggctaacttaacatcacagcaatacaaaaatttagcccaagactatgggtatatcatttcaggtatacaacaagacttagctgctgatgatgaacagcaacaacactatctcagtgcgattgagaaacgtaaggctatcgctaaagcgtatcctgatgaagtctggaatatttatcgtctggcggatgatttacttatcactcaacaaccccaacttgctgaggattactttaatcaacttaatcaacgacgacctaatgatccctctcgacgatatgcctatgcgttatatctcaataaaacagggcgagcacaacaagcacttaacaccttaaagacgatccctttatcgcagcgcagtgaaagtatgaacgccttagatagccaattacgttttggtcaaattatggcgcatgcacaatcactaagagaacataaccaacaacagcaagctgtcgaatatcttttcacccatattcctcctgagcaaaaaatagaaagctatctgttattagcgcaatgggccgaagaagatgaccaactcaatcaggcattaaattattatcatacagtattaaatttagcgcctaataatgaaacagcactattaggtgcaacagagatatctttagcgcaacatcaaatagatcaagctcgttattacttagctcagatagaacaattatctcctgaaaaatttaaccactattcactaagacgtttagcaaacgctgaaaaaacggcgggaaatattgataaagccaaacactattttatctatttagctcgccaagttgacaaggagccagatagtgctgatggattaattttacgtgatattggtcgtttttatcgtgatagccaacaagttcaatccgctcatcactattatcaacaagcgatgctaaaagagggtatcacgcatacactgccaacaaacaatattgaatacaccacacttatgcgtaacaacccaaatgataattggctatcacgtagtatacgtgatgatgcgagtacgctttatcgtcaacaagagtggcgttttaccctagagcatgattattggggatcaaatggcagtgagggatactctaaattacgcgctcataccaccatgttacaactggatcatcctatttatcatggccgtttcttttggcgtactgattttgtgcacttaaatagtggcacattaggtacagcgccatacgatgctaaatttggtagttgttatcgcacaggttgtttccctctaaagcaaaaagcctttggtgttagtcctgctatcggttgggaaaatgagcaatggcaatgggatttaggtaccacgccactcggttttaatgtgactgattgggtaggtaaaattgcttataacgatagtttttatcatctcggttggagtgtagatcttcaccgtcgcccggtaaatagctcactacttgcctttgctggccaacgtgatagttggaccaatcaagtttgggggggagtaagaaaaacggggcttcgtttaagtggcagttatgatctgggaggcaaggatgggtattggggagaaatatcgtttgatagattaacaggaaaaaatgttaaaaataacagcagtgtgaaagccatgggcggttattactataagttaatcaatgaaaatgatcgccgcatttctgttggcttaaatagcatgctttggcattacaataaagatcttagtggctacaccttggggcaagggggttattatagcccacaacaatatctctcattctcactgcccgttaattaccgtcaacgtactgaaaattggtcatgggaagtatctggctctctctcttggtcttattcaaaaaccgatgatagcagacgttatccattacaaaatctcgtttcaagcgataaatttaattctgatcccataaaagaaatatttaagcatgagagaaatatcattgataagggggattcgggtcatggttttggttatacagcaagagcattaattgaacatcgaataacaccacattggtttataggtgccgctatcgatattcagcaagcgaaaaactatacgccaagccatgcactaatgtatttacgctattcatttgatggatggaatggtgatttagatcttccgcctaacccgcttattccttacgcagattttaaataa

SEQ ID NO: 297769 - DNA, 1710 bp, Proteus mirabilis
atgaacaagactaaaacaactcggttcagttttttacattactggcatgggttgggcgcctggaatttttattttttgctaaagtttgttttgctttggtatggttatttaaaatttgatgcatttagcaatttgttgtttctggcatttctattattcccattaccaaaaacgttttggtatagattacgtaattggatagcgatccctattggtattatgctgttctaccatgatacttggttacccagctttgctacggtactagagcaaggagggcagttaaaaaatttctcatttgagtaccttgttgaattagctgtcaactttattaacttaaagatgatcggggtggcctttatcttactggtagggtatctctttattgaacagtgggtaagggtatcggtgtttattatcgcgggtgtattgtggcttaatattaacggatttactcacttttcaggtgcaatggtttcttccgtctctgcgaatagttttactgagcaaagcagtacatcgatagataagttgcagccacaaaacacagagagagtatcgtctgaacaggtgatagcgcaaaataataacgtactgagctcaccttatccgccacaaaaacagccagctaataataaagtgctagatgaatggctcgctcagttttatcgttatgaaaataaacgggtcacaccggctccagcccaactttcttctaatgcacaaccctttgatattttaattattaatatttgttcactctctaccgctgatgcggcagccgtcggattacagcaacatcctatttggggtaactttgatgtgttatttaatcgctttaatagtgttgcttcttatagtggccccgcttcattacgtttattaagagccagttgtggccaaacacaacacgctgatttgtatgatcctaccgatatgcaatgcttattgatggataatctggctgctttaggttttgagaagaaattggtgctcgatcataatggcgagtttggtcattatcttcaagaaattagagagttaggtaatcttaatgtgccgttgcaagatcaaagcggactctctcatcaaattaccgcttttgatggctctaaaatctataacgataaagagaccttagagcgttggttaaaagcacgagaaaaatcagatgaaaaacggacggtgacctttgtcaatttagtgtcacttcatgatggtaataggttcgttggcgaaaatacaacggctgattatggcaaaagagcctcagcgctacttgataacttaaatgcttttattaatacccttgataaacgtggcagaaaagtgatggtggtgattgttcctgaacatggagccgcattacaaggtgatataactcagatgtctggtttgcgagatattccaagccgaagtattactacggttcctgtcggtattcgttttactggacttaaaaatcaacgtttacctcatacacctatgatgatcgataaaccaagcagttatttagcgttatccgattttattctccgtaatgtgaatggcgatatctttaaccaacccaccattgattggaatgctttaacccgtgacttaccacaaaccgcgacggtatcagaaaatcaaaataccattgtggttgattatcaagggaaatcttatatcaaattgaatgaaggagagtggatagactaccctgattga

SEQ ID NO: 297770 - DNA, 714 bp, Proteus mirabilis
atgcgtaaagtcacacttactcttagtgcaattgcgttggcgttaagtttaaatggcgcagcaatggcaaaagttcatatgccagaagttgttagcccaggggttactgttactgaacttgcacatcagcaaccaattaaatgggtttctgttgcagaaattgaaaaaagcttagaaggccaagcaccaatggcggtaggttttgatattgatgacaccgttctgttctcaagcccaggcttttatcgtggtaaactggaatattctcctaacgatttcagttatctgaaaaacccagaattctgggaaaaaatgaacaacgaatgggataaattcagtatgcctaaacaagtcggtatcgatcttgttcagatgcacttaaaacgcggtgatactgtttatttcattaccggtcgtacacagactaaaacagagactgtgactaaatatgttcaagaaggtttaaatattcctgcagacaaaatgcaacctgttatttttgccggtgaccaacctggcgcaaataacaaagtaagctggatgcgcgatcacaaactgaaaatttactacggtgatgcagatgctgatatcgcagcagctgatgagctaaatatccgagggatccgtatcttacgtgctgctaactcttcttaccagccgttacctaaagcgggacaatttggtgaagaagtggttatcaattcagagtactaa

SEQ ID NO: 297771 - DNA, 774 bp, Proteus mirabilis
atgtcagaccgtaattttgacgatattgctgataaattctctcgcaatatctatggcacaacaaaaggaaaaatccgccaagcggtgatttgggatgatttacaacaattattaactcaactccctgatcgtccgttgcgtattttagatgcggggggtggtgaaggttatttttccagacaactggcaaaattagggcaccagataattttatgtgatctatcacaagagatgcttaaccgcgcacaagaagcggctattgatgaaggtgttgtcaatcaaatgacgtttatttgttgtgcagcacaagagataaaccagcatctagatgatggtgttgacttaattctattccatgccgtattagagtggatcacagatcagaaaaacgccataaatgtacttaccgatatgctacttcctaatggtatcctatcgttaatgttttacaatgcgaatggtattgtcatgagaaatgctattttgggaaatttccatttggcaaatccggaaataccacgcagaagaaaacgctcattatccccacaaaatccgctacaacctgaggatgtttatcaatggttagcgtcattttcaatgacgattttaggaaaaacgggagtgcgtgtttttcatgactatttgcaaagtcgtcagttgcaaaataaagattttccagcgttgcttgccttagagcaacgctattgtcggcaagagccctatatcagtctggggcgttacattcatgtcatggcacaaaagtgtgtaaattaa

SEQ ID NO: 297772 - DNA, 1038 bp, Proteus mirabilis
atgataagaaaaacattgctagccagcttattaaccgtaattagtggtaccgtttttgctttacctaatgtgacaatcctcgcaactgggggaaccatcgcagggggtggtgactctgccacttcttcaagctacaccgcaggaaaattaggcattgatacattgattaatgccgtacctgaggcaaaaaaagtggctaacttaacaggcgagcaagtggttaatattggttcgcaagatatgaacgaccaagtgtggttaaaactggcgaataaaattaatacggattgtgataaaacagacggctttgtgataacccatggtacagatacgatggaagagaccgcctattttcttgacttaaccacagcatgtaaaaaaccggtggtgatggtaggggcaatgcgcccagcaacagcattaggtgctgatggtccattaaacctctataatgccgtggtggtggcaagtgataaagcatctgaaaatcgtggtgtattagttaccatgaataattcagtgatcagtggtaaagatgttgtcaaaatgaatacgacagaagtgcaagcattccagccgattaatgcaggtgctcaaggttatgttcatgatggtaaagtacactattacactgctgcaacaccgcgcgctgagaaagttgcctttgatgtcagcaaattaaccgaattaccaaaagtaggtattgtttataactatgctaatgcatctgatttaccggctaaagcgtttatagataaccactttaaaggtattgttagtgcaggtgtcggcaatggtaacttatattctgacatcttaaatactttagctgatggtgtaaaaaaaggtgttgttgtggttcgttcaagtcgtgttccggttggatttaccacacaaaatggtgaagtagatgatgcaaaatatggctttattgcttcagaacgtttaaatccacagaaagcaagagtgttattacagttatctttgacagaaacacaagatcccgccacgatccaagaaaactttgaaaaatattaa

SEQ ID NO: 297773 - DNA, 1770 bp, Proteus mirabilis
atgaaacctgccatgtcacaaacatttattcccggcaaagatgccgcactggaagactctatcgctagctttcagcaaaaattaactcagttaggttttaacattgaagaagcttcatggttaaatcctgttcctaacgtttggtctgttcatattcgtgataaagattgtccgttatgttttactaacggcaaaggtgctactaaaaaagcagcattggcttcagcattaggcgaatattttgaacgtctctcaaccaattatttcttttctgatttctggttaggtgctgatattgcagaaggtgagtttgttcattacccaaatgaaaaatggtttccactgacagatgatgatgctgtacctgaaggcttattagatgcacgtttacgtcaattttacgatcctgaaggtgagctatgtggcagtgaactggttgatttacaatcaagtaattcagaacgtggtatttgtgccttaccgtttattcgccaatcagataaaacacctgtatatatacctgttaatatcattgcaaatctttatgcatctaatggtatgtcagcaggaaatacgcaaaatgaagctcgagtgcaagggctttctgaagtgtttgaacgctatgtcaaaaatagaattatcagcgaaagaattagcttgcctaaaatcccccatgaagttttagctcgttatcctgctgttattgaagctattacgacattagaaaaagaaggcttccctatttttagttttgatgcatctttagggggacaattccccgttatttgcgtcgtgctgtttaacccacaaaatgggacttgtttcgcttcttttggtgctcatcccgattttggtgtggcattagagcgtactgttactgagttattgcaaggccgtagccttaaagatctcgatgttttcaatccaccgagttttgatgatgaagaagtcggtgaccacactaatcttgaaacccactttatcgactctagtggtttaattagttgggatctgtttaaaaaagatgcagactatccatttgttgattgggatttcagtggttcaaccgaagaagaattccacacattaatgtcactgtgccagcaatgtgatgcggaagtgtatattatggattatgaccatttaggggtttatgcttgccgtattttagtccctggcttatccgatatttatcctgctgaagatctgcaactagccaataacattatgggtgtccattggcgtgataccattctttctttaccaacaagtcatggcacaaaagaagagtacctctcacttattggtcaatttgatgaagatggcttagatgactttactcgtatcagagaaatgattggtattgcaccgggtaaagataatggctggagtcatttacgtgtaggtgaattaaaatcaatgttagcactcgctggtggcgatttagaacaagcattagtttgggttgagtggacacaagatttcaacgcatcattatttacaccagcgcgtcaaaattattatcgttgcctgcataatcttttactcctacgtgaagagcatgatcgtgagcctgcacaatatatggaggctttttctcgtatgtatggcgaggaaacactgcaagctgcattaaatgcaattgaaggtaaacaacctttttatggcttgcaacccattgatccatcattagcgaatttgcctgttcatcaatctttattagccgcgtatgaaaaattacaacaagcaaaacgtcaatcgaataaataa

SEQ ID NO: 297774 - DNA, 1170 bp, Proteus mirabilis
atgatgcagatgtatttccaaacatttaagcgtgttttattaggcatgttagaaaaaccgatgtggatgttattattggtttctctttgcattatgagtttagtctacgctaaacctgtattgtgggatctgcctgtggcggtgatcaatcaagatcatagtcccgccagttatgcccttatccgctcattagatgccacacctaaattaagcttaaagggatatgataatttagatgaagctcgtcatgacatgatcatgcgtgaactgtttgccattattatcattccaacagattttgaaaaaaaactgcttaatggcaaaaatgttaccgttcctgtgtatggggatgcgaccaaccgccttgctagtggacaaattcagcaagaattaatgcaggcgtatcagcaattattagataactataacggccgtatcttacaaaatgcgggttttagtgcgacacagtcaaaaatattattaaaaccgatccaaagtgaaactatcgccatgtataaccctggggtcagttttgccgccattattttcccaggcttgttagtgatgttattgcaacactcattattaattgcttgtgtacgagtgagtatcgccgtcagaggaacgccaaaagggaagcctccgttagcggtatatttaggcgcgctatctgcacttataccgatttggctctttttatcttcggtgttctttgcactatggccgtgggtattaggctatcgtcaagaagcccccctctatcaaatttggatgttgaccttcccattcttattagcggtattaggattaggtaagttgatcaccgaatgcttgcgcagtgttgagatgatttacttaacattggcatttgtgacgacaccggtattctatatttcgggaactatttggccattacaagctatgccagattgggtattggcaatatcctctgcattaccttctacatgggctgtaaatgctatggccggaattaaccagatgggattatcattccaaagcatcctaggggatatcgtgatgatgctggttttaggcgtgatatataccattttgggggtgttagtgggtatgttgcgcaatggtgagttaaggaaaattactcatcaatttaagcattggatgagacattataataagtcaaatagatag

SEQ ID NO: 297775 - DNA, 417 bp, Proteus mirabilis
atgaaaaatgaaactaatattcgccttggcagacattgtgtattcctgatgcacgtccatttggtctttgtcacaaaataccggcgaaaaatatttgatcaggatgcaattgaaaaattgcgaggctactttgccagtgtttgtgctgactttgatgttgaactggttgaaatgaatggggaacgggatcacgttcatttactgattaattacccgccaaaactggcgatatctaatctggttaacagccttaaaggggtatcgagtcgattacttcgacgtgatcgtcctgatattgcccaacgtgattactacaagggggttctttggtcgccgagttatttcgcggggagttgtggtggcgcaccaatatccattatccgccagtacattgagcaacaggaaacaccgagttag

SEQ ID NO: 297776 - DNA, 297 bp, Proteus mirabilis
atgaataagaaaaaagcaatctcacaatatgaaaatttaatgtcacagtatcaaaaattacgaggcaatattaaagttcctgatgaaatatcaattgatgaagtaaaacaatggttactggacgtaagttcttttatgcataactatttccctgaaaagaaacaatataaagtagatatagaagaatttaataaatatgaggaactatattcttctgatcataaagatatagaaaaagtgatattagctgttggctgtgaactatcatctgtttcctctaaattatatgataattaa

SEQ ID NO: 297777 - DNA, 672 bp, Proteus mirabilis
atgttaacacgcttgtttgttacggggacagataccaacataggtaaaactgttgtcacccgagcacttcttcagtcaataaatcgtggcgggacaacagcagtgggctttaagcctatcgcaaccgaattgcatgaaacggttgagggtaatcgtaatcgtgatgctcagattattcataattcctcacctattgacgctcgctacgacgaaattaaccctattttgctagaaaattgttatgtaagtgaaaatgcaatagacttccatcaaatttcaagtgaactaaataatttgggccaaaaagctgaatgcgttgttatcgaggggaatggtggttggcgctatttacttgatgataatactttttattcagactgggtggctaaagaaaaaattcctgttgttctagtggttgggatccaacctggttgtgtcaatcactcaattctaaccgcgcaatctattattaatgatggtttagaattagttggttgggtggctaatagaattaatcctgggttaccgcactatgcaaaaattgtagaaaggttatctcaacatattccagccccattgattggtgaaatcccgtatttattgcgccctgaagaacgtgatctctcttgttatcttgacttaagccagttagaaatcgctcaacccgcttag

SEQ ID NO: 297778 - DNA, 1212 bp, Proteus mirabilis
atggggatcccgcctagccatattgatcatgtaaaacaatttaatcttggcactgtttttcgattaattgatgaacatggtcctatttctcgtatctcattatctaaaaaagcaacacttgcgcctgccagtattactaaaattacgcgagaattagtcgaagcacaccttattcatgaaacagaatttcctgggttgggatttcggggacggccggctgttggtttaaagttagagagcaaagggtggcaatttttatgtattcgagtaaataatggtagcctactttttagtttaagagagcttgataatcaattagttgttgaagataccttcgactttcctaaacaaaatagtgatgcttttttgcatcatttccttgctgcaatagatacattctttcaacgttatcaatcaagagtagagcgccttactgcaattagtattaccatgaatgcaattgttgatccgattagtggcgttatttatagctctccttactatgctatccaagatattccgctggctgataaaattcaggaaaaaacaggtgttgctgttttcttacaacacagtgtaacggcttggacgatggctgaatcactctatggtgcagccaaaaataacaccgatattctgcaaattgttattgatgatattgtcggtgcaggggttgtgactaatggaaagacattacattcaaacagccatagtgccgtcgaaatagggcatacaaaagttattgattcacagacgcaatgttattgtggtgcaaaagggtgtttagaaacggaaatatcgatccctcagttaattaaaaaagcacagcacttggcgcaagaaaatcccacctcaatacttaatcaatatccgattacggtagaaacgctatgtgatgctgtattaattggtgataaacaagcattagacataattaatttagtggcgcaacgacttggttttattttagccgtgatggtcaatatttttaatcctcaaaaaatattaataggttcacctctgtgtagagcaaaatctacacttttccccctgatccttagtagtatccaacaccatgtattacctagatatgcccataatttggttattgaagaaacagaattgcgcaataaaggcacattgccagcggcatcactagtaaaagaagccttatataatggctcattattacttgagttaatgcaaggctaa

SEQ ID NO: 297779 - DNA, 915 bp, Proteus mirabilis
atgaatatagaacttcgccatttacgttattttattgctgttgctgaagaattacattttggtaaggcagctgagagattaaatatttcccaacctcctttaagtcagcaaatacaagccttagaaagtgagataggggctcgtttactcgaaagaaccaatcgttctgtttcgttaaccccggcaggacaaatgtttttaaaaggatcctatcaaattatggcacaagttaaggcggtagcgacacgagcatcaagaatggaaaaaggagaattaggtgaaatttcaattggttttacctcaacaacaccttttatgcatttggttacgttaagtttgcgtcaatttagggaaaattatcctgaagtcggtattcatatgcatcaaatgaataccaaacagcagatatcaccattattaactggccacattgatttgggaattatgcgtaatacggtgttacctgataatttgcaccaccagctcctatttcgtgaaccttttattttggcagtttatgaagggcatcctttacttgaatacaaagaaacaggcgtaaatattcaagatattgggcaatatccttttgtattttttgagcgagatgtaggaacggcgctttatgatgaaattattcaattgcttagccttgcgggaattacaccaacgatagcacaggaagccggagaggcgatgaccatcttggggcttgttgctgccggattaggtatttctattgtgacaaaatcatttacccgcatgaaagttgatggtgtgcattatctgcattttgctaattcgaatgctttctctgaagtatggttagtttctcataacaaacgaacgatccccgctgcggccaacaggttgactcaattattgctaaaaaatatcttagaagatcaaaaatcttga

SEQ ID NO: 297780 - DNA, 1509 bp, Proteus mirabilis
atggaagcattacttgaattaaaaaatattgataaatcatttccaggcgtaaaagcattatctggtgcgacgttacgaatttatcctggccgagtgatggcacttgttggtgaaaatggcgcaggtaaatccacactaatgaaagtgctaacaggtatctaccaaaaagacgcaggtgaaattatttatcaaggggaacgttgctcttttaatggtcctaagtcttctcaagaagccggaataggtattatccatcaagaactcaatcttatccctgaattaaccattgcagaaaatatctttttaggtcgcgagtttacccgtgcatttggtgccattgattggaaaaaaatgtatgcagaagcggataaattacttgctcgcttaaaccttccttatcgcagtcatcgcttagtttctgaattatccattggtgatcagcaaatggttgaaattgccaaagtactcagttttggctctaaagtgattattatggatgaaccgacagatgcattgacagacaccgaaactcgctctctgtttagtgtgataactgaattaagaaatcaaggttgtggcattgtctatatctcacatcgattaaaagaaatttttgatatttgtgatgatgtaactgtgttgcgcgatggtcaatttattggcgaaaagcccgtttcttcattacaagaagagacacttattgaaatgatggtaggccgtaaattagaagatcaataccctcgcatccatattcctgcaggaaaaactaaacttaatgtctctcacttaagtggtgcagatatacatgatgtcagcttctccctacatgaaaatgaaattttaggtatttcagggttaatgggcgcaggccgtactgaattaatgaaaatgatttacggtgcattgccaaaaacacaaggtagcgtggcgttagaaggtaaaatttgtcagatcaaaaagcctgcagatgcacttgcccaaggtattgtttatatctctgaagacagaaaacgcgatggtttagtgctaggtatgtcagtaaaagagaatatgtcactgacggcgctaccttattttagtcgcactatggggatcttaaatcataaagaagagcaattaactgtcagtgactttattaaattgttcaacataaaaaccccgtccattaatcagatcattggttttttatcaggcggtaatcaacaaaaagtcgctattgctcgcggactaatgacccgtcctaaagtacttattcttgatgagcctacccgcggtgtcgatgtgggggcgaaaaaagagatttaccaattaattaataagtttaaacaagagggattaagcatcattttgatctcttcagaaatgccagaggtaatgggaatgagtgaccgcattttagttatgcatgaaggtcgtatcagcggtgagttttctgccaataatgtcacacaagagatgctaatggcggcggctgttggtaaacaatatggtgctacagtaggagtttga

SEQ ID NO: 297781 - DNA, 381 bp, Proteus mirabilis
atgatcgaaatttcaatacatcctgatattgaaaataaaactattgctaatgaatacgctaaattattaaaactttggaaagaaaaaaaagtattatcttgttatttaggtgctgatggtaaatgggaaaatagtgcgaaattatgtcaatctctcatttctaaaatacatatcagaatacctaatgaacctaagtggcatgaaaatatgcctcaaatacaaagaaaatcaaatcattacttagtttattgtcaacattggctttacccaaatagatatcaaattattgctattatgtcacctaatgcacacgagttagcaaaaacatcattcctagcagagttggaaaaaagggctgaagaatttcaaaataatttttaa

SEQ ID NO: 297782 - DNA, 1371 bp, Proteus mirabilis
atgaatgataataaaatgactccattagagcgcaaagcgacatggggactaggagctgttttctctcttcgcatgcttggcatgtttatggtacttcccgttttaaccacctacggactgcaactacaacatgcgacagaatcgctaattggattagctattggtatttatggattaactcaagcaatcttccaaattccttttggatttttctcagacaaatttggccgaaaatcaatgattgttttcggcttaattatttttattgttggtagccttactgctgctttaagtgacagcatttatggcattattatcgggcgagcattacaaggtgctggagctatatctgccgcagtgatggctctattatctgatctgacccgcgaacaaaatagaaccaaagcaatggcctttattggcattagctttggtattacatttgccttagcccttgttttagggccaatactcacacatatttttggcttacaaggtctattttggggcattgccctactcgctttcggcgggattataatcaccctcattaccgtaccgaatagcgaacatcatatacttaatcgagaatcaagttttgtacgaggaagtgtcaaaaaagttttatttgatgcgcaattattaaagcttaatgtcgggattttttcactacacactttattgatggccgcttttgtcgcacttcctttgatcatgcataatgccggattagttaatgagaaacattgggttgtctatctagtcactatgctgattgcctttatttcagtattaccctttattatctatgcagaaaaaaaacgtaaaatgaaacaagtgttcttactgtgtatctttctgctgattattgctcaagctatctttatgatttcaggaactagcttgtggctaattattttaggtattcagatattctttattggttttaatattatggaggcactgctaccttcattaattagtaaagaagcaccggcaggttataaaggcacggcaatggggatttattccaccagccaatttctaggtgtagcattaggtggtattttaggtggatggctctaccaacattacgatgctcaagcagtctttgctggatgtttattgattggcttagtttggtttgccattagcttaacattacgtcaaccaccttatgttagtagcttacgtatagaattgccggcacatttatcaaatgctcaacaacaacaattagagcagaaatttaagcaacaacctggtgttaatgaagtggtaattatggtacacgaacaaagtgcttatattaaagtggataccaagcagacaccaagagcgacattagaatcgttagtgctcggtgtttaa

SEQ ID NO: 297783 - DNA, 966 bp, Proteus mirabilis
atgaaaagcatgtttacgactcgagagctccctgacgtagatcggttttccgtattcagggataccataaaagaccgctttttatcgtcttatgaatgcaatgaagtcgaattaccgcctcattctcgattttatgccaacattgtcgagcagaaggtggctgatattcgctttattcagctagaatctaacggtcattgggcaattagccgtcctttaagaaacaaattgagtctagaagagcattttcaaatagaactccaacgctcaggtacaagtcatctgactcaagatggcagaacggcctttctacgacaaggcgatttctgtatttttgatatggcaagacccgtttcttggtcgttcgataacgactattcgttatttaaacttttgatcccaagagaaaaattggcaccacgtttaggtaatacacagaacctaacagcaagagcaatacgaggtaatagtattacaggctccctcgtttatagctttgtgatgcgttatatccctttcttagattctatgcccactcaacatgctcagcaactagctgatattttattgaatttaattacgtcagctttcagtgaatacagtattgcaactccacctcaaagcttaggaagatcaacactgttttattttgctcaacactatcttgagcaacatctgtctgatccagatctcagcgtgaatgaatgtgcaaatgcttgtgggatctccgtgcgctatttacagatgttatttaaagaacaaaatacatctgtacttcgttggatctaccaaaaacgtcttgagaattataaaacggctttagtaaatcctcttttagcagagaaaaatattacacaattagcttatgaatgtggatttagcgatatttctaatttaagtcgaaaatttaaatctgaattttttatgaccccatcagagtatcggaaaatacattcattaagataa

SEQ ID NO: 297784 - DNA, 285 bp, Proteus mirabilis
atgagtcaggtaaacgtagacgttaaattaggggtcaataaatttaatgtggatgaagaaaatccacatatcgtcttaaaggatgatattgatccggctcaatttgaaatcttaatgaaagcctgccctgctggtttatataagaaagatgaaaaagggcaatatctttttgattatgccggatgtttagagtgtggtacttgccgtattttatgtggcgaaacgattttaaaaaaatgggaatatccgtgtggcacattagggattgagtttcgttacggctga

SEQ ID NO: 297785 - DNA, 1287 bp, Proteus mirabilis
atgtcagacgatatttttgacgccattattgtgggtggtggacttgctggtagtactgctgcctatgtattagcacaagcagggtgtgatgttttagttgtagagcgaggtaatttcgctggcagtaaaaatatgacggggggacgtttatacgcgcacagtcttgaaaaaatcattcccaattttgctcaagaagcgccagttgagcgccttgtaatgcgtgaaaaaatttccatgctaacggaaacagatggggtcactttagattatcagcatactcaacaagaagaggaagccgctcgctcttataccgtattacgttcttcttttgatcaatggctaatggagaaagcagaagacgcaggcgcacaagtgatcaccggtgttcgcgttgatgaagtgttagtgaaagacggaaaagtttgtggtgttaaagcgggtgatgatgaaattgaagctcatgtggtgatcttagcagatggtgtgaattcactgttagcaaagcaattaggtatgacacaaaaggtggatcctcacaccgtagctgtgggcgttaaagagctactcgagtttacaccacaacaaatggaagaccgatttggttgtactaatgatgaaggtttagcttggctttttgctggcgcaccttcaggtgggtatttaggtggtggatttttatataccaataaaaatacagtttctttaggtcttgtattgggactacataatgtcgacaaattcgaaaaaacggttcctcaattattagaagattttaaacaacatccggttgttgctccacttatcaaagacggaaaattattagaatattcagcacatatggtacctgaagggggtatgaatatggtgtctgagttagtcaaagatggtgtactagttgcgggagatgctgctggattttgccttaacgttggctataccgtaagaggaatggatttagccattgcttcaggtgaagcggctgcaaaagcggtattaatggcgaaagagcaaaacagctatagccagaaagaactaagttgctatcaatctttattaaatgatagtttcgtcataaaagatatgaagttatacaaagatttaccttctttcctcgataatacaagattctttacggattatccgcaaatggcggccaatgtcatgcatgacttattcgtgattaatggtccagaaaaaccagtgcgtaagaaaatactgtctcaggttaagaaagtcggtgtgatgaacttaattaaagatggatttaagggggtacgttctttatga

SEQ ID NO: 297786 - DNA, 942 bp, Proteus mirabilis
atggctagtttactacctactacctttgtttatgccgaaaaagcggatgatttagcaaagctgattgcgtttgctcgtgaccttggtgaaaaggttaatgtgctgtttattggtgatgatgaaagcacgcgcgaatgtgtcaacttaggagctgactgtgtttattgttttgccccgcaagacggtgtgattgctgaagattatgcagcttcttttgccgaaattattaaagaaacgggggcaaatgcattggttttacttgctgcatcaaaacgcgcaaaagcgattgcggctcgtcttggtgtgattttaaaagctggtgttgtcagcgatgctttaagtcttgctattgaaaataatactgtgattgccacacatcaagtctacggtggtttagcgcatgcgaaagcagaaattcgttcaccttatgctattgctactgtgggcagtgcattagatgtggaagccattaaagatgcacccaatgcacaagtggtgcaaagtatctttatcgctcccgcacatacattaaaagtattagcacgtaagccaaaacaaggtagtactgttgatttaggtaaagcgcattgtgttgtgggtgtcggacgcggttttggtaaggctgatgatattgcattagcgtcagcattagcgaaagccctccaaggcgaagtgggttgttctcgtccaattgctgaaggtgaaggctggatggaacacgatcgctacattggtgtttcaggggtgaccttaggtgcagatgtttatgtcgctgtcggtatttcagggcaaatccagcatatggtgggtgtggatagagcaaaaatcattgttgggatcaacaaagataaaaatgcccctattttcaatatggtagattacggtattgttggcgacctctacaaagtgttacctgcattaaccgcgaagctcggcgactaa

SEQ ID NO: 297787 - DNA, 777 bp, Proteus mirabilis
atgaaacttattgcctgctgtaaggttgttcatgacgaacaagacatcacaacacggcctgatcgtacactcgcaaccgataatgcgggtttaaaaattagtttgtatgacttgaatgcaattgaaaccgccgtagaaattgcctctacccttggcgatagcacagtcactgcattaagtgtaggaacacgtgccgtggttgaaaacgcgaaaattaaaaaagatattttatcgcgtggtcctgatgcattaactctggtggcggatgatgcatgtcatgcgctttattcaatggatactgccaatattattgcgcaagcagcacagaaagtgggttttgatttattggttttcggtgaaggttctggcgatttatacgctcaacaaacgggtttagcggtaggtgaatatttaggtctaccttgtgtaaacgccgtaaacaaaatcactgttgaaggtgacaaaattattgttgagcgtgatttagaaaatatcacagaagaacttgaactgacattacctgccattgtgtgtgtcacttcaagcattaacaccccaaaactcccttcaatgaaagcgattttagcggcgaataaaaagccggtcgaaaaactgggattaggcgatatcggtgttgatatttctgctctgacggttgtgcaaacacaagtgagtgcccctgagcagtctgatcgccttgggattattttagacggtgattcagatgaaaatattgccacttttgctgaacatttacgccaagcggttaatcaataa

SEQ ID NO: 297788 - DNA, 1140 bp, Proteus mirabilis
atggattttcagctaacagaagagcaagtcctgatccgcgatacggtcagagagttcgttgaaaacgacatcaaaccaattgcaggtgcaattgataaagagcaccgctttccaagtgaaagtattgcacctatggctgaattaggactctttggtttcaatattgatgaaacttatggcggtacagaagcagatgcaattagttatgtattagccaccgaagagatggcaaaagtgagtgcctctcacgcaatgatcatgggatcacaatgttctttaaccggacccattattcaaaaatatgctgatgaagagactaaagcacgtattttgccgggggtggtttcgggtgaaaaattagggtgtttctgtttgtcagaacctagtgcgggttgtgatgcagcggctcaagagacaacagccgttcgccaaggtgataactatgtgatcaatggttctaaactgtggatcacggcggcacctcagggtgctttctttatcgtgtttgccatgacaaataaaagcaaaggcgtaaaagggatcacggcattcttagttgagcgtgataacccaggtattagcattggtttacctgaagacaaaatggggatgaatggctctgaaacttgctctgtgagtttcagtgattgtgttgttcctgctagtgcaatgctaggtaaagaaggtaaaggctttaatatcgcaatggaaaccttagatggcgggcgtttaagttgttctgcacttgcattagggatcgcacaaagtgccttagatgccacgattgcttacaccaaagagcgtattcaatttggtaaacccattgcagctaatcaaggtattcaatgggtattagtggatatggcaacgcgtgttgattgcgcccgtatgctggtttatcgcgctgctgccgccaaaatggcgggtcttccttacacgcgtgaatctgctcaagccaaactttatgccgcagaagctgccacttatgtgactcaaaaagccgtccaattacatggcggtatgggttacaccaaatcctatcctgttgaacgtttaatgcgtgaagcaaaactcactgagatttttgaaggcacaaatgaagtacaacgtatggtcatcgctaagcatattttagcgtaa

SEQ ID NO: 297789 - DNA, 1320 bp, Proteus mirabilis
atgggtattatttgtttaatcatcgggcttgcgatattaatgattatgtgtatgaaaggcatacatatttttatttctgtctttaccaccagcctgtttcttgctgtgaccgcatggcttgtatcaccagatatgcttaatcctgtcgatgcactattgcaagtgtataccggcggattaggtggttatttcggtagcttcttcttcattttcgtacttggtgcgatttttggcaaattaaccgctatcagtggcgctgctgatagtgttgcctcttttattattggtaaatttggtgaaagagccgttattccttcattagttgcggcttgtgccattttagcctacggcggtgtttcagtgtttgttgcactgtttaccgtttattcaatgatggtgagtttattccgcaaagcgaatcttcctcgcagacttattccggctgtctattttgcaggtgcgggtacctttgtgatgataatgccaggatcgcctcagatccaaaatcttatcccaatgaaattcttaggtacctcagcaacagcgggtttagtaccgggtatgttgaccgcgttgtttcaagtcactttagtgattatttatctcacttggttatttaagcgtgtaaaagcaaaaggtgaaggctgggttgaagacgaaaaaacagcgaaagcagaggaaggtaaaaaagatcgtcaattacctaatgtgctcgttgcattactgccgatgcttattctgcttgtcgtgctgaatatcctgaaatgggatccggctattgcgctgttctgcgccattattgccgccttgcttgtgtacttgcgttatctcgattggaaaaaactcgtccctaatttagccgcagggacaatggaaggggtgacctccctctttaataccgcggtgattgtcggatttggtgcgttagtcatgacattacctgcgttcaaagaatcatttcaagcgattgcgcaatcgggacttaatccccttgtcgtcacggcgatttccgtcggtgctctggtgtttatcagtggttcaggctctggggcgttaagtatcgccatgccaatgattgctgcgatgttccctgccaccgtggttgatcaaggttcattacaccgtgtcgccacaatggcatctatgagtacaacaccgccatttaacggattgattattactgtctttagcgtctgtggtgtcagccataaagagggatacggtcctgtggggacattaaccctcgctatcccactgttagccatgatgtttatgttgctgctgtacacctttttacctgcatctatcgcgacgatgtag

SEQ ID NO: 297790 - DNA, 1134 bp, Proteus mirabilis
atgaagacattaacgcaattgtttgatgagttacaagccgtggtggataacccagttgctcaattagatggttttattcgtagcggtaaaaaggttgttggctgtttccctgaatatacgccaaatgaaatcgtctatgctgcggggatggtgccttttggtatttggggcgcagaaggacgtgagatctcagaagcaaagaaatattttcctcccttctattgtgcgttagtgctttcttctcttgagatgggattagatggggcattaaataagttgtctgtggcattaattccttctctttgtgacaccttaaaatgcttagggcaaaactggaaagcgggtgtaccacaagtgccttttattcaattggtacatccacagaaccgtaaaacgccagcaggtattgcatttttaactgaacaatataagaaaatagcgttgcaattaggggaaatttcaggccaaacggtgactgacgatgcactgaaaaatgccatccgtctttttaatcagcgtcgtgctacattacgtgaattctctcaaatagcagcactccatccaaatttagtcacaccacaacgtcgtaataccgtgatcaaaagtggctatcttatggatgtcgttgaacatacaaaagctgttgaagctattgtcacacaatgcaaaaccttgtctccagaaccttggaaagggcacaagattgttgtcacaggcattattgccgatagcccttctattctacaaattttggctgataacaaaatggcgattgtagcggatgaagtcgcgcatgaatctcgtcagtttcgccaagacattcctgaaaataactcaccttatgaagcgatggcagagcaaatggcccagctagaagggtgctcattgctgtatgacccagagaaaaaacgtggtcgtttaattgccgatatggtgaaaaacacaggcgctgatggtgtcgtctatttgctgacgaagttttgcgatcctgaagaatttgatgcccctattgtgaagaaattcctcgatagagaaggtattccttccatcattatcgaaattgatcagcaaactaaaacatatgagcaggcaagaacggcgctgcaaacttttgcagatgtgctttctgcttaa

SEQ ID NO: 297791 - DNA, 1242 bp, Proteus mirabilis
atgagcaatatagatatgaatgcgccggattacattcctgcgaaaaaacgactgcaaaaaatcgctgctgatgcttatcaacgtgcgtgggatgcaaaaaacagcggtgaaaaaatagggtggtgtgcctctaacttccctcaagaaattgctgaaacattaggtttatgtgtggtttaccctgaaaaccaagccgctgcaattgcagcgaaaggtgcgggtttaaaaatgtgtgagcatgcagaaagcatgggatattccaacgatatctgtgcttatgctcgtatcagcctctcttacatggatattaaacagtgtgaagagatggatatgccacagccagacttcttactgtgttgtaacaatatctgtaactgtatgatcaagtggtatgaaaatatcgcttatgagctgaatattccgatgatccttatcgatattccttataaaaatgactatgacaccgatgatgtcacggtgaaatacgttcaagctcaatttgatgatgccatcaaacagctcgaaaaagttacaggcaaagtgttctccgaagagaaatttaaagaagtctgtgaaatttcgcaacgtacagggcgtgcatggttaaaagcggctgaatattgccaatatgagccgtctccaatgaatggttttgatctctttaatcacatggctgttgctgtttgtgctcgcggtaaattagaagctgctctggcttttgagcaactgtgtgaagagatggaacaaaatatcaaagagaaaaaatcgacttaccgcggtgaagaaaaataccgtgttctctttgaaggtattgcgtgctggccttacttacgagccacatcgaccccgttaaaagagcagggtatcaacgtgactgcaactgtttacgccactgcatttggtgtgatttatcaaaacagtaacgagatgatgcgtgcttactcttatgtccctaactgtgtctctgttgagcgtgctgctgatatgcgtattaacgtgagccgtcagaataaagttgatggtgcgattattcatgttaatcgtagttgcaagctctggagtggcattatgcctgaaattgagcgccgtattcgtcatgaacttaagatcccaactgtgacttttgatggcgaccaagctgatcctcgagttttctctgaagcgcagtatgtcacccgtgttgaagcattgactgaaattatggctgctaacaaagcagaaatgaaaaagggagacttctga

SEQ ID NO: 297792 - DNA, 828 bp, Proteus mirabilis
atgcaacaagacattttcacaatgggcgttgatatcggatcgtctgcatcaaaatgcatcatcatgaaaaatggtgacactattgtcgcgaagtcgttggcatcagtaggagctggaacctctgggcctgaaaaagcaatcaatgaagtattacatcaatttggtggcgatctcagtcagatcagctggatctgtgcaaccggatatggccgtaattctctgaaagaagccaacaaagaggtgagtgaacttagctgccatgcgaaaggtgcgcactttctttttccgggtgtgaaaacggtgattgatatcggtggccaagacgttaaagcacttcatatggatggtacaggccgtttattaaactttgtgatgaatgacaagtgcgctgcgggtacaggacgttttttagatgtgatgtcgcgagtattagaaaccaagatttccgatctcgctcaagagggcgctaagtccactaaaaaagtcactattagctcaacctgtactgtgttctctgaatctgaagttatctcccatctcgcgaataacgaaacaatacccgacgtcattaatggtattcatcgctcagtggctagtcgtattgccggtcttgccaaacgagtcggtgtggaagctcctgttgtcatgacaggcggtgtagccagtaattttgaagttgttcgttatgttagcgaagagctgaacgtccctatcgccacttcaccattatcacaatacaacggggcaataggtgcagccatttatgcctttgaagcgtatcgccatcaactggaagacgatgcgttaacaataggaacattaaaatga

SEQ ID NO: 297793 - DNA, 1236 bp, Proteus mirabilis
atgacaagtcataaagcactggaaggtgtcaccgtagttgaattggcgacctttatcgcagtacctgcagcggggcgtattttagctgatatgggtgcgaacgtaattaaaatcgaatctccaagtggcgataacttacgctatacagcaccaacagaaggccgtccattagatcaacatgaaaacaccagttttgatttagaaaatgcgaataaacgtgggattgtgttaaatacgaaaacagaagcagggaaaaaaatcctgtttgaactattagaaaaggcggacattttcttaactaactggcgtcccggcgcaagagagcgtgcaggtttagattatgaaacattaaaacaacgttttccaaaattagtgtacgccagtgtgacggggtatggcgatgaaggtccagataaagacttaccgggctttgattatactgcattctttgcccgtggtggtatcttaggttctctgtaccaaaaaggcacagtaccgatgaatgtgatccccggtcttggcgatcaccagtgtgcattaggcttggtttcaggtgtgttagccgcttatattcgtgctaaaaacatcggtcaaggtgagtacgtttcaacaaacttactgcatacctctatttacactcaagcgattatgatccaagcggcgcaatatccagattatggccaagcttatcctatcgatcgccgtacaactaccagcccatttattttggcttataaaacgaaagacgatcgttttattcaagtctgtatgcctgtttacgatgcttattatccaacctttatttcgtgtattggtcgtccagatttagcagaggatgctcgttatacacgtctacaagaagtggcaaaaaataatcgatctcctgaactgtatgatctgatttggcaacaagtagagcaaaaaacagcgtcagagtgggctgatattttcaccaaaaacgatatcccattcagcattgctcaaacttgggaagaagtgttggaagataaacaagcttgggcaattaacaccttctaccacatgaaatacaaaaatggcagtgaaaaagccttggttcgtccaccgattgatttcttggaaagtggtttacctgaataccgtcgtggtcctttgttaggcgaagacacaccgtctgtattagctgaattagggtatagcgctgaagagatagcaaaccttgaagccaataaagacgtgatgacgtggaaagaataa

SEQ ID NO: 297794 - DNA, 1638 bp, Proteus mirabilis
atgaccttattagaaacgacagttaaagaatgtctaaacaatgtagtgaagcaatatgcgtcacaaacggccttaattgaaaaccaaagtaaaaaaacactgtcttggcaacaattacaacaagaagtcgagagtgttgcgcgtggctttttatccatggggttaacaaaaggcgatcgtttaggtatctggtctgctaatagtaaagaatggataatttgttttcttgcagctgctcaaattggtattccggttgtttgtattaactttcatttaaaaaaaagagagttattagatttatgccgattaactggaattaaagcactctgtttttctgatggttttaaaagtaatcattttattgaggttattaattatctttctaaaaaagcatcaaaaaataaagacgtattacctcaattatttattagcatgggaaatcaacaggcagaaaaaagcgtctctttatctcaattaaaagaaattagccaaaaaatatcagacaaagcatatcaacatgctattgaacaagttagcgtaaaagatttactaactattcaaatgacctctggcagtacagcaatgccgaaaggtgtcatgttaagccaatataatgttattaataatgccatgctgtcagcacagcgcttaggtgttacgcatgatgatgtgatttgtcttgcggttccgctattccactgctttggactctcttcttgtctcttttttgcgttaacaacagggtgccaacttgttcttcttgataattacaacgctgaagatgtattaaaagccattcaacatcatcgttgcaccattatgcatggtgtaccgaccatttttagtcgtttaatgaagcatgaacaattttctcactatgatttatcgagtcttgataaaggcattatcgcaggagcaagtttccctcctgcgttaattgatgacattgaaactatcctcggcatgaaagggatcactatctcttatggtcaaacagaagcctcaccgtgttgcacgcaaactctccctaatgatgctttagagataaaacgtcattctattggtaagcctttaccttttgttgaaatgaaaattattaatctgaaaacaggtaaacctgtgccagtaggcattttaggtgaaatttgcacccgtggctttcatgtgatgatgggttatgacaatgcgccagacaaaaccaaagaagcgttagacgaagagggttggttgcacacgggggatattggctatatcgatgaacaaggaaattatcactatgcctatcgtataaaagagattgtggtacgcggtggtgaaaatatcagcctgtgtgaaatagaagaagccattgcggaatatgtgggtgttgatgcaacaaaagcatttgggatcccctctgccgatttaggtgaagaagtgattgtcgctatttgtgtgcaaaaaggctacagcattggtgaaagtgaattacgtgaatttctacaagagcgactagctcgctacaaaatccccaaagaactccatttctttacagaatttcctcataccccttgcggaaaaattgatgtgcaggcgctgaaattgcaattgggttatggcgtttcaatcaaggatgaaaaaaacatggtagcgggttaa

SEQ ID NO: 297795 - DNA, 633 bp, Proteus mirabilis
atgaattttgtcaatgaactaaggcaaaccatatctaatttaaataaatatcagaaagcaggaagtaaagaaggtacggtgaattttgattttaaatctttttttaatgacttatctaacattagagataaatataaaaatccaacaggtactgtcgacgatccttttgtttttaaatctcgtttgttttttcaacatcaaaaggatgggacatatttacgcaccattgatggccaagaagttcattatagcgatctacaacaggtaaataatgctgcagatgcgttagaaaaactattaaaaggtataaatggaataagtgtatcaatacaaaggcgtgggggggagcctgatgttgacattgattgtcgaggtagaattgattgtactgacctagaaaaattgctaaatgatctatctaagaaggtatctaacacggatgatattaatcaaacagaatttgagttattcagaaaaaccatcgacgcattagataagaaaattaacactaatttagatgaactttccaaaaaatacagtacagcaaatagtaattatgataattttgttaagattgtcagtagtacaatgaacactttattagaaatggcaaaaggatttttacgtttctga

SEQ ID NO: 297796 - DNA, 783 bp, Proteus mirabilis; identical to SEQ ID NO: 294931

SEQ ID NO: 297797 - DNA, 252 bp, Proteus mirabilis
atggctttttgttttattacgcagcaaatgtgtgtttcatcttgtcgagagcccgcttataccatcggttgttttctttctatctatctatctatctatctatctatgcaagtcctgctacaccaacaaattgttaacactcttcgcgaggcgtttttagattttgtgacacatttttctgctattgtgccaaaaacacattattactttgtctttgtcagtatcaagcatcaatttgctaccaatatttaa

SEQ ID NO: 297798 - DNA, 777 bp, Proteus mirabilis; identical to SEQ ID NO: 295196

SEQ ID NO: 297799 - DNA, 639 bp, Proteus mirabilis
atgctaaagcgtcctttgtctattcaacatcatgattttgcgggttttatgttgatggagtgcctctttgtgatgacgataagtagtcttttattagtttgtattggacgtgcttatccttatattatcaatgagttaacttcttcttatcaacaatatcgtttagaaatttatctaaaacagcgtttgcagttactggaaacgcaattaaggcgagcagggtactgcaatggtgattgcactgttaaaaaggcttctttacctgtaccacttaaaataggtcattatccttatcaccctcatggctcttgtgttttgtttgtttacgatatgaacaataacggccgttgggagagtccagaagaacaagagagtgattactttggttttagattaaaaaacggtcagcttgaacaacgtcgtggtgtgcaaaattgtgattcaacaggatggcaacagatcttcgaaaaagaagaaattgaggtgacagaatttatcttaactccctatacacactattctccaataaaaaaacgtgcatttaactatctatcattatcattaaaattccaagcaaaacaaaatattaacctaaaagtacactatcaaacatcaatactattaaggaatatttcgtga

SEQ ID NO: 297800 - DNA, 930 bp, Proteus mirabilis
atgtctgattttgtcaattttaatgagctagttgacagcattgtcatcgaaaaggattacggcgcgaacaggcctgtcgtggaaaaagaattgctacattatgacattctttatgctctttccgccacagggcttttaaagcacatcacatttcagggcggtacatcgcttaggctttgctatggatcaaacagatttagtgaagatctggactttgctggtggtcgtgacttctgttcagcgcaactgcttgagattaaagcgtgtattgagaaatatgttggtgaacgatatggcttggaggttgtggttaaagagccaaaagagctaagaaaagaacctgattatgcagatgtaaaagtcgataagtggcaaatatcagtgactaccaatccaggaaaaaaagacctaccaaagcagaagatcaaagtggaaatagccaacattcctgcatacaccaacacccttcgaacgcttgttaaaaactatgagcagcttcctagtggctattctgacctgattattagagtggaagagctcacggaggtcatggctgataaattggtttcattcccagcaacaacctcacgtattcggtatagagatatgtgggatttggtgtggttgcaccagaaaggggttaaaccagacgctgaactggtaatgaaaaaggttgccgattataagctcaatgagcattttgaggaatggttgcaagcaagaattgagtctttgcctgcattggttgcgagtgaaaagtttaagggagagatgaagcgattcttacctgtgtctgtcgtagatagaactctccttcacccagattttcttgaatttttacaaattactcttcatgaactgctagtcactatccaaacagatatttatggaagtaaagatccgaagccagtaaaaaaatttgaaatgtag

SEQ ID NO: 297801 - DNA, 885 bp, Proteus mirabilis
atggaattaaatttatgctggtggaatataggaatatctccaccgacaaaatcaaaacagaacgtcaagactgaaaaagttggcttagcgaaaaaatatcttgaagaacttatcattaaaaaaacacttgatatcattgcgttgagtgaggtttctgaaaacgagagctacgcttttaagcagttggcgactcaattaaaaatgggttatatcgatctctcaggaaaaataggacggattattattgatatatcattaatatatcaaatgaataaactagagtttatttcaagtaagtttttaaccaaactccagcctgataatagaatggtaagggtaggcgttgctgttgtatttaaagaaatcgaacatcaaaaaataatcaccctttttttatcacattggccatcaatattaagtgctaatgatacaactcgagaagtggctgctgcaggattaagaagtagtattaataaactctttgaaaataatggagatgatgttcagtttatttgtatgggggattataatacagagccttattctaatgcgatgcttaatatattgtatgcgacaagagattatcatttaataaaaaagaaaagaaaactattatttaacccattttggtatctcttatctgataagaagactaataatttaggtacatattattataattccgcatctattaatcgttggtatgtgtttgatcaaatgattttttcttcatcatttttatatggaaaagaagattgttttaaattagatcttgaacagcttgatttttatcgcgtcctaaatgatgataatcactgccttgatgatatcttttttaagaaatttgatcattaccccatattttgtaggatcttccatgaatga

SEQ ID NO: 297802 - DNA, 435 bp, Proteus mirabilis
atgaatgatgaacataagatattcgaaaaaataaaagcttcactcaatagagcatcttttattattgatctacgaagtaagatagaagataaaatcagtgcagtggtcaaaaagctagaagtgatcaccaataataaagttaaggtatcatttgaagataataataaaagtaatattcattttataaatagtgaacgccttgtttatattaataatgctgatttaagtaaagagggtggttttatactatttggttatagctttagtaaaataaatggctttcctattgagatagaaacggaaatagaatcttttcacgcagaagatattgaaaatttattacatattattgttaatattattgataatgagtctatcaggatcatcgaacttactcatcatactatttataataaattgattaatcaccaataa

SEQ ID NO: 297803 - DNA, 1695 bp, Proteus mirabilis
atgttttataaaaaattgccatcattaaatcttctagttatctctatttcatttgcttttatacataatagtgcagtagccaataacgttattgtagatgcaggaaaatctgcaaacacaacagtgagcaagaatggagatggttcagaaactatttctatcaacaaagcaaacgatatgaatttatcagttaactattttgaacaatttaatgttggaaaagaaggcgttcatattgataatagcgaggcaaaagcaaaagttattcttaacgaagtgacttcaaaaaaaacgagttcattagagggtaaaatctctgttttaggacaagatgcagaattgattatcgccaatccaaatggaattgattgctacggatgtcaattttcaggttcagataaggtgatgttaatttcagggaagttagatagtattacaggcaaaaaaattcacttatcagatggttatgttaatctaaagaatgttaataatttcaatgaaaaacaaacaatcaatgttttttctaatcgtattaatatattgggtaaaaataaaattccagtttttaatgtgatcaatggctatgaaacggttagttttgttgattatgattggaaaggtgaccaaggaaaagagctatctaaagataatcaagaaggcttctctattttagaaaatagtttattaaaaacagatcttttctctctacaaggtggcatttttaatcttgatggggatctaatcactaaaaaaatcaatatcattcgtaataaagaaattaatgctaatgaaaaatcagtattcggaattattaataaaaaaaatgaatttagagcatataatgaagtagatctaatgttcatgttagcatctatgaagttatattttcttgaaatagatgcaaaaaaatcagctgaaatagcattagaattagaggcattagaagaaaaaataatggagttagagcctcataatatacataaaaatagactaaagaaaataagagaactagctgctgaagctaggagagttgctgatcaacagcaagcagaatataacaagatccagagtgctgttcttaaaatcgatgaagctaaacaagcagaaaaaagaaagttggaggctgagggtaaagaaataggatcagcacttcaatatatagaaagtgacaatattaactttaaaggtaaactagctattataaatagcgaagttttatttaatgcgagaaatattaatgttgatattgataaaacaatttcttatgtcagaaattctggtgtctcatttaatgcccatcaagataataactactcgggtagatttgctctgataaatagtagtatcagatttttaggttatcgaaatatcccgataggagatggtaacgacgataatagcttagataaaaataagcttaatgatattaatttaaataaactatctatgcttggttttggtcaaatttttgcacatggagataacataaatataacagatgttaaatttaaagaaactctttcagatgatggattaagcaaaacttatatagatttgatagctgataatgaaattaatattaaaggtcagtttaaaacttatttaattaataaatatagcttatttaagtttgctagcaagataacggagaatgataaggttattttcgatattaacccacataaaactaaataa

SEQ ID NO: 297804 - DNA, 1644 bp, Proteus mirabilis
gtggcaatccattcaagagctgggcaacatactcgtcaaagcgatctgattaatgtagcgcaattaaccgcacaatattattcactaaaaccacaagcaaatcagaatgctcatcgtgtgaaatttggtacatcgggtcaccgaggcagtgccaaacgtcatagctttaatgaagcacatattctagcaattgctcaagctattgctgaagtccgagttaataatggtgtaacggggccttgctatgtaggtaaagatacccatgcattatctgagcctgcttttatttcggttttagaagtgcttgctgcaaataaagttaacgtgattattcaagagaataatggttataccccaacgcctagcgtttccttctctattttaacttacaatcaagggcaccaagacattgctgatggtatcgtcattacaccatcacataatcctcctgaagatggggggataaaatacaatccatcaaatggtgggcctgctgatactgatttaacctctgtgattgaaaaacgcgccaatgaattattggaaaataatttatcgggggttaaacgtctttcttatgatgatgcattagcgagtggttatattcacgagcaagatttaattatgccttatgttaaagcgttaggtgacgttgttgatatgaaggcaattaaaaaagcgggtttgaaattaggtgtcgatccactgggtggttcaggaattgaatactggaaacgcataggtgaatattacgaacttgatcttgagttggtaaacgatcaggtggatcaaactttccgctttatgacattagatcatgatggtgtgatccgtatggattgctcatcaccttgggcaatggaaggtttattgcaactgcgtgataaatttgacttagctttcgccaatgaccctgattacgatcgccatggtattgtcactccttcgggcttgatgaatcctaaccactatttagcggcagcgattaattatctttttcgccatcgtcctcagtggtcaaatgaggtaaaagtgggtaaaacactcgtctctagcgcgatgattgaccgagtcgtggctgatttgggtcgtgaacttgttgaagtacctgtcggctttaaatggtttgtgcaaggtctattcagtggcgagtttggttttggtggtgaagagagtgcgggggcatcattcttacgttttaatggtaaaccgtggtcaacagataaagatggtattatcttatgtttactggctgctgaaataaaagcggtaacaggtaaagatccacaacaacattataacgagttagcgcagcgttttggctctccaagctataatcgtatacaagcatctgcaactcatgagcaaaaagcgttattgtcacgattatcaccagaaatggtcaccgcaaataccttagcaggtgatcctattactgcgcgtttaactcacgcatctggtaatggtgctgctattggtggtttaaaagtgatgaccgattatggttggtttgccgctcgtccttctggaaccgaagaagcgtacaaaatttattgtgaaagcttccgtggctctgagcatcgcgaattaattgaaaaagaagccattgaaattgttaataatgtttttgccagtaaacaataa

SEQ ID NO: 297805 - DNA, 483 bp, Proteus mirabilis
atgcaaaataattatgtgttacgcagtgtgcgttatatgttagatcttagcgatggtcatattgttgatataatgaaactggcggatttcaccgcgactaaagagcaagtcaatcagtggttaaaaaaagacgatgatcctgcctttgttgagtgtgatgatatggccttgggacattttttaaatgggcttatcttttatcgtcgtggtaaagatgaaaaatatcctactccagaagtcgaaaaacggataaccaacaatattattttaaagaaattacgtgttgcctttgaattaaaagacatggatatgattaacatttatgaactagcggattttcgcgtttctaagcctgaacttagcgcgatatttcgtaagccaggacataaaaactaccgtaactgtggcgatcaactggtgagatactttctgaaagggttaactgaaaccttacgtggcaaaggtaaagcggtgaagaaataa

SEQ ID NO: 297806 - DNA, 744 bp, Proteus mirabilis
atgaaaaatactgatctagaattaattattaatgaaaagctaagtattgagaattttcacgactacgcacctaatggtcttcaagtagaagggcgccctcatattcaaaaaatagtgacaggagtaacggcttgccaagctttacttgatgaagcggtacgtttaaatgcagatgctgtattagttcaccatggttatttttggaagaatgagccagttgttatccgttcaatgaaacgcaatcgcttaaaaaccctactatgtaatgatctcaatctatatggttatcacttacctttagatgcccatcctattttaggtaacaacgctcaattagcgttaaaaatgggcgtaaaagttgagggtgagatcgagcctttagtgccgaaagggatttttgatctacctgtcacagccaatgaattaaaaacacgactcgaaaaagccttacagcgtaatgtgcttcactgtggtgacaatgcaccagatgttattcgccatattgcttggtgtactggtggaggacaaggatttattcaacaggcggcagagcaaggtgttgatgcatttgtaacaggagaagtctcagagcagacgattcatatagcaagagaaatgggcgtgcattttttcgctgctgggcatcatgccaccgagcgttatggtattaaatcattaggtgaatggttagcacaaactcaccatttagatgttacttttgtcgatattgataatccagcttaa

SEQ ID NO: 297807 - DNA, 369 bp, Proteus mirabilis
ttgcaactaccaaaagagagcgatctatcaaaagataataagcaaccatcgaaaaataaattaattcagcaaaatgtattaggtggatttgaccaagaaagctatcagcttcttataaaaaagccaagtttaatcaataagctagcacaacagattttaagtgaacacttccctgataatgttcaagaagttattgctaaccgtcttgattttccactacaagaaattcgccaaaaccgagatcccacttttagaaaaaatatcttacgtgcttacaattatcagtgtgctatatgtggttataatctacgttatgatagcgccgtggttggcctagaagtcgctcatttgacatcctccacgccctaa

SEQ ID NO: 297808 - DNA, 231 bp, Proteus mirabilis
atgaatattaaagtcggcgatgagtttttggtttatatggcattgggtgaagagagctatatgaaggaatattatcgtgtgttggagttagatagcgcattatcacaagtgaccggtaaattgctaagaaggacgacggcagatgataaaaatattgggttagggcgttgtgaattagaaggtgggattgaacaatttgcgttagaagatatttatccaatagagaagtga

SEQ ID NO: 297809 - DNA, 468 bp, Proteus mirabilis
atgaataatatgggagcagtcgcagacaaagcgactattttattaattgatgatcacccgatgttacgcaatggtgtgaaacaacttttaagtcttgatacaacattaactgtcgttggtgaagctggcgatggtattcaaggggtaaaattagctgaagagttagatcctgatttaatcctactcgatctcaatatgccgggtatgaatggttttgaaacactcgatcaattgcgattacgatcgctctctgggcggatcgttgtgtttagtgtatcaaactacagtgatgatctgatcaccgccttaaaacgaggagcggatggctatctcttaaaagacatggagccagaagagctattagccgctttaaagcaagcagccgcagggaaaatggtggttagcccaacattaacccccattttagcgcagtcgctacgagaagatcgttctgaaggtgagcgatag

SEQ ID NO: 297810 - DNA, 1830 bp, Proteus mirabilis
atgaaaatgcacaacattcaatggcattatcgcttttcaattattaatcaaatcgctattttaatgttgcttttcacactatttggtgtggtaggtatggctatttctaaccacattattttaagcgtacaaggcaatgcccacgccattaataaatccggctcactgcgcatgcaaagctatcgtttactctcagccttaccccttgatgataagcaccgtgattatctacaagaattagaaaatgatttagatagtaaagagttacgtcaagtattaagcacctcatcactgcaatcacaatatgtacaactgactcattactggaaagagacattaaaaccgactttgtcagcagccaaacagcctaatgatgcgaaacaagaagttatcttttttgtttctcaactcgatacattagtatcaagtattgaccaacttactgaacaaaaaatccgcctagtcgcttatactcaacttatctttaccgctcttaccttattactgctgtttggttctgtttggcattttcgtcgtcgcttattactgccttggcaacaattgatgtccatggctaattctattggacatggtgatttttcaactcgttttcggcctcgtcctcaccatgatgaaattgccacactaggaattgcacttaacaccatgtcagaagagctatcgacgctctacagtgaattagaacaacgagtcattgaaaagacccatgatttacaacagaaaaataaggttctctcttatctttatcactcaagtcaacaactgcattcccaagcgccactttgcgctcgcttaaggcagatccttgcagagctacagcatattattcctgatagctatttgcagatccgtctatatgaagataatcaacatacattatttaatgagataagcttagccccttcctcacgccctgaatattgtccaacgccagactgtgagcgttgcaatgaagatgccagcatcactacaccgttaaataatcgcttattacattgggaattgaccgatcagatccaccgctacggtttattcgtaatgcagttaccggaaaatagtgtacttactgacgaacagaataatttaatgctcttattgactaagcaaatttccgcaatgcttgccatggagcaacaaaatgaacagcaacaacagctattattaatggatgagcgttcagcgattgcacgtgaattacatgattcgattgctcaatcgctatcatgtttaaaaatgcaggtcagttatctacaaatgcaatcggaaaccttgccagataactgtcaaaaactactaaaagagatgcgagaagagctaaatgtggcttatcgtcagttaagagaattactgaccacatttcgcttgaaattgacagagcctggcttattagccgcattagaaaatacactaaatgaatttaatcaacgtttagggtttgctatccattttgattatcagttacctgcaaaatgtgttaattcacatcaaagtattcatgtggtgcaaattgtccgtgaagcattaaataatattctgcaacatgcgaatgcaaactgggccgaagtcgcattaacacttaataatggcatcgttgaactacaaattaatgataatggtgaaggtattacgcctaatcccgaaaagataaatcactacggactgattattatgcgtgaacgcgcgaatagtctgaatggctcttatagtataagggttcgcaaagaaggtggaacgcaagtatttgtcacatttccgttaatcactacccataaagatcctatcgaaaagggagcaaatcataatgaataa

SEQ ID NO: 297811 - DNA, 1392 bp, Proteus mirabilis
atggcactttctcaacacccagaaaaaatgaaaaaaggggtgatcgaaaattggcatcctgaagataaagctttttgggaaaaaactggtcaaaaaatcgcatcgcgtaatttatggatttctgttccttgtctactgctatccttctgcgtctggatgctatttagtgcagtcgctgtcaatttaaataaggttggctttaattttaccactgatcagctctttatgctgactgctctaccttctgtttctggtgcgctactacgtgtcccttactcttttgttattcctatttttggtggtcgtcgttggacggctattagtacggtatttctgattattccttgtctctggctagggtttgccgtgcaagatctcacgacatcttattccacttttatcgttatctctctgctgtgtggttttgctggcgcaaacttcgcatcgagtatggcaaatatcagcttcttttttcctaaagcacaccaaggcggtgcattaggattaaatggcggattgggtaacttaggtgtcagcgtgatgcaattaatcgcgcctttggttgtcagtgtgggcgtttttgctatgtttagtggccccggtgtcgttcaacctgatggctcacgtttatggctagagaatgcggcgtggatttgggtacctttcttgcttatctttacctttgcggcttggtttggcatgaatgatctggctgctaataaagcttctttaagtcaacagctacctgttttaaaacgtggtcatctttggttactcagtatcctctatctgtgctcttttggttcttttatcggcttttctgccgggtttgcaatgttatcgaaaacccagttccccgatattgtcattttacattatgccttctttggtcctttacttggagcattagctcgccctgtgggaggtgcgctatctgataaatttggtggcattaaagtgacgcttatcaactttatcattatggctattttctcagtgctcctgttcttaaccctaccggaaaatggtgctggtggatcgtttattgctttctatggcgtgtttatggtgctgtttttaactgcagggctaggcagtggttcaacattccaaatgattgccgtggtatttagaaaaatcactattgatcgcatgaaggcacaaggggcttcagatgaagctgcgcaaaaagaagccgtaacagaaagtgcagctgcattgggttttatctctgcaatcggtgcgattggtggcttctttattcctaaagcctttggtacatcccttgcgatgacgggttcacctgctggggcaatgaaaatcttcgttctgttctatatcgcctgcgttctgatcacttggttggtctatggacgtaaacacaataaataa

SEQ ID NO: 297812 - DNA, 3639 bp, Proteus mirabilis
atgagtaaatttctcgatagattccgctattttaaacagcttggtgatacgttttcacaagatcacgggcaagagttaaatgttaatcgcgactgggaaaatagttatcgtagccgttggcagcatgacaaaatcgtgcgttctacacatggtgttaactgcaccggatcatgtagctggaaaatttatgttaaaaacggcttagtaacatgggaaacccagcaaacagactatccacgaactcgtcctgatctgcctgatcatgaaccccgtggttgtccgcgtggtgcgagctattcatggtatttatatagcgctaaccgcgttaaatacccaatggtgcgtaaacgtctgatcaaattatggcgtgaagccaaagcgcaacacgctgatccagttgatgcatgggcatcgattgttaatgctcccgaaaaaacgaaaagttataaacaagctcgtggtcgtggtggtttcgttcgctcttcatggtctgaagtgaatgaaattattgctgcttctaacgtctataccgctaaaacttttggcccagatcgtattattggtttctcacctattccggcaatgtcaatggtgtcttacgccgccggtgcccgctatttatctcttattggtggtgcttgcttaagtttttacgattggtattgtgatttaccacctgcctcaccaatgacttggggggagcaaacagatgtgccagagtcagctgactggtataactcttcttatctgattgcatggggttcaaacgtacctcaaacccgtacgccagatgctcacttttttaccgaagttcgttataaaggcaccaaaacggtagcagtaacacctgattatgctgaaattgctaaactgtgtgaccagtggttaaacccaaaacaaggtacagatagcgccatggcaatggcgatgggacacgttattcttaacgaattccacgttaaacgccaaactgaatactttagtaactatgtgcgcacttacactgacatgccaatgttagtgatgttagataagcatgattctggcaagttagttgcgggtcgcatgctgcgtgctgctgatttagtgaacaatctcgatcaggagaaaaatccagaatggaaaaccgttgctattgatgagaaaacacagcaattggtcgctcctcgaggttcaatgggttttcgttgggaaggcgctgccaaatggaatctagagcctaaagacggtaagagtggcgaagaagtcactttacaattgggtcttttagaaaaccatgatgatgtggttgacgttgcatttccttactttggtggcatcaagagtgaatactttgaaggtgttgcccttgatgatgttctcgttcataaactgccagcaaaacgcattactcttgccaatggcgaagaaaaatatgtcactaccgtttatgacttattactggctaattatggtgtcgatcgtggtttaaatgatgaaaactgtgcgacaaactatgatgagatcaaagcctattcacccgcatgggctgaacaagtaacaggggttagccgtcaagatattatccgcattgcacgtgaatttgctgataatgcagaaaaaacacatggtcgttcaatggtgattgtcggtgcgggcattaaccattggtatcacatggatatgacctaccgtggcattatcaatatgcttatcttctgtggttgtattggccaaagtggtggggggtgggctcactatgtgggacaagaaaaactgcgtccacaaacaggttggttgccattagcttttggtctggattggcagcgtccacctcgtcatatgaatagcacgtcatttttctataatcattcaagtcaatggcgctatgaaacggtatcaccgacagaattactatcacctttagcagataaatcacgctttagcggtagcttaattgatatgaatgtgcgttcggagcgtatggggtggttaccgtcagcaccgcaattaaacgttaacccattgtctattaccaagaaagctcaacaagctggcgtcagtgcaacggattataccattaatgctctgaaatcaggtgagatccgttttgcatcagagcaaccggataatccgcaaaacttccctcgtaacttatttatctggcgttctaatttattgggatctgcaggtaaagggcatgaatatttactgaaatatctattagggacggaaaatggattacaaggtaaagatttaggtgaacaaggccaagttaagccacaagaagtggaatggcaagataaaggcggtgagggtaaggtcgatttagtggtgactttagactttcgtatgtcaagtacctgtctgttctccgatatcgtgttaccaaccgccacatggtatgaaaaagatgatatgaatacctcggatatgcatccatttattcatccattaaccgccgcggtagatcccgcttgggagtctaaaaccgattgggaaatttataaaggtattgctaaaaccttctctaaattgtgtgtcggtcatttaggggttgaaaccgatttagtgacacagccaatacaacatgactccgcggctgaaatggcacaaccatttgatgtcaaagattggaaaaaaggtgaatgtgaccttatcccggggaaaactgcaccgcatcttattcctgtggagcgtgattatccaaatacctatgctcgttttacctcacttgggccgttaatggataaattaggtaatggcggtaaagggatcggttggaatacacagacagaagttgatttcctgaaaaaacttaatcgcgttcgtcatgacggtgtggcaaaagggcgcccggcgattgaaaccgcaattgatgcagccgaagttatcctctctttagcacctgaaacgaatggtcaagtggcggtaaaagcgtgggatgcactaagtaaagtaacaggacgcgatcacactcatttagctaaagtaaaagaagatgagaaaattcgtttccgcgatatcgttgctcaacctcgtaaaatcatttcaagtcctacatggtctggtctggaagatgagcatgtctcttataacgcttgttataccaatgttcacgagatgatcccttggcgtactttaagtggccgtcagcagttatatcaagatcatgagtggatgcgtgcttatggcgaaagtttagtggtttatcgtccacctattgatactaaggcaatcgaagccgtgaaaggtaaaaaaccgaacggcttcccagaaaaagcgctgaacttcctgacgcctcaccaaaaatggggtattcactcaacgtatagcgataacttactgatgttaaccctcggtcgtggtggccctgtggtttggctgagtgaagatgatgctaaagagatgggtattagtgataacgattgggttgaagcatacaacagtaatggtgcgttaaccgcaagagcgattgtgagccaacgtattcctgatggcatgatttatatgtatcacgcacaagagcgccaaataaacctaccaggctctgaaataactggaatgcgtggcggtattcataattccgtgacgcgtgtttgccctaaaccgacccatatgattggtggatacgctcagttggcttatagctttaactaa

SEQ ID NO: 297813 - DNA, 1554 bp, Proteus mirabilis
atgaaaattcgttcacaagtcggtatggtactgaacctcgacaaatgtatcggttgccatacctgttcagtaacctgtaaaaatgtttggaccagtcgtgaaggtgtggaatacgcttggtttaataatgttgaaactaaaccgggtacagggtatccgcaaaattgggaagatcaagagaagtggaaaggcggctggatcaaaaatattaaaggtaagttagtaccaagaatgggtaaccgtgttgggctattatcaaagatttttgccaacccagatgtgccagcattagatgattattatgagccatttgattatgactatgagcatttaaaaaatgcaccagaaggctcattacccaccgcacgtcctcgttcgttgataaccggtcagcgtatgaccaagatcgaaaaaggcccaaactgggaagatgatttagggggcgaatttagcaaacgtgctgcggataaaaacttcgccaatatgcaaaaagagatgtatgggcagtttgaaaatacatttatgatgtatttacctcgtttatgtgaacactgcttaaatcctgcttgtgtcgcgacctgtccaagtggtgcgatttataaacgtgctgaggatggtattgtgcttatcgatcaagataagtgtcgtggttggcgcatgtgtttaacagggtgtccatacaaaaaaatctactttaactggaaaagcggtaagtcagaaaaatgtattttctgttatccgcgcatcgaatcaggtcaaccaaccctatgctcagaaacctgtgttggacgtattcgttatcttggtgtgatgctgtatgacgcagataaaatttcacaagccgccagtgctgataatgaaaaagacttataccaaagtcaattagatatctttttagatcccttcgatcctgaagttattaaagctgcagaagagcaaggtattccattaagtgtgattgatgcagcccaacgttcgccggtttataaaatggcggtggattggaagctggcattaccattacaccctgaatatcgtactttacctatggtgtggtatgtgccacctctgtcacctatccaatctgcggctgatgcaggagtgttgccacatacgggggtattaccggatgtagaaagtttacgtattcctgtccaatatttggctaacttgctgaccgcaggcgatacagcgccagtgttattagcattaaaaagaatgttggcaatgcgccattataaacgcgcagaaacggtagaaggtaaaaccgatttgacagcattagagcaagtgggattaaccgaagcacaggcacaagagatgtatcgctatttggcgattgccaattatgaagatcgctttgttattccttctagccatcgtgagttagcaagagaagcttttcctgagcgtaacggatgtggttttagttttggtgatggttgtcatggcagcgagagtaaatttaatctgtttaatagccatcgtattgatgccatcgatatcacttccaaaacccctcaagatgagcgccgttctgaggagaaaatatga

SEQ ID NO: 297814 - DNA, 417 bp, Proteus mirabilis
atgaaaaatgaaacgaatattcgccgtggcagacattgtgtattcctgatgcacgtccatttggtctttgtcacaaaataccggcgaaaaatatttgatcaggatgcaattgaaaaattgcgaggctactttgccagtgtttgtgctgattttgatgttgaactggttgaaatggatggggaacgggatcacgttcatttactgattaattacccgccaaaactggcgatatctaatctggttaacagccttaaaggggtatcgagtcgattacttcgacgtgatcgtcctgatattgcccaacgtgattactacaaaggggttctttggtcgccgagttatttcgcggggagttgtggtggcgcaccaatatccattatccgccagtacattgagcaacaggaaacacctagttag

SEQ ID NO: 297815 - DNA, 1308 bp, Proteus mirabilis
atggaaaatattattatattcatctcaatatttattttgataggattactttctagttcattatcttggttttatatcaaatacacattagggttactttatataacccttagccatttttatcgaaatttatgttttatcgttttactctgtgtcgccatctcgattttggagggtttttatcatcacctcacgctactgctcaaagagcaagtagcatattccaatttagggcatatcgaaatttataaaacagataataaacaggatattactaataagaaagattatttggaaataaccaatgctgaagaaatcatccatttattaacttatgataagcagttattagaaaaaattcaggtaatttcaccacaaattattttttcaggcatgatagaaaatgttatcaataaaaaaacagcattgttttctggcctagccatcgagcctaagtcattattaaccataggagcatacgatctaactgtttcagggagtgaattgtctcatgtcagaagaacagaaatcacgatagataagtttattgctgatgctataaatataaactatggggatttagttaatgttgtatttattcataataatgaaaaaatggtattaccaacttatgtacgtggtatttttaacacacaaataaatagttatccttatgccatgatcaaaattccattagaaacactacaatatataaaaaaaagtaaaagtgtctcaaaaataaatattctattaaaaaatgtgcatgatattgatagcgtaatagctaaaataacaaggattaataaagaaaaatctttaaatttgcaagtgatccctgttattgagagacaaagttatattatttctattgtgacattctttaagtggtcaatgctattattgtatagcattattgctatttattattattttttagtgaataaaatcattatcatcactatcaaaaaagctattggtgatctgttcgaatttaatcgattaggtatttggcgaggtagtttttctcgattatttattttattggctatttttatgactataacaatttctataacgatattattaactcatcagctattatcttggttgattaatttgaaacaaatcaatatttctttatctgataataatagctattcattaatgctcccttggctatggcaatatgatgctatgtttaaaatccctctattattatttttttccgcaacaatcgcttcgtgtaactctatttttaaagttagccactatttacaaaaatatcaaaaaaataatattactatttag

SEQ ID NO: 297816 - DNA, 939 bp, Proteus mirabilis
atgccattgagagagaaaaagtatcaccaaaatcaagagagcattttattttttccaggtcagggtaggccttatttaggtatgggaaatagggtatatcgtgacgttccatcaataaaagaagtatggaattgtgcgagtgaaatagcagggttcgatgtaaggacggtttgtttaaaagggcccatgaataaattggtacaaacctgttatcagcaagtggcgttaacaactatcaatattgcttctctttatttactgcgtgagcattgttgtgtgaatgaggcgggttattcagggcacagcgctggagaatattcagcgttatttgcggcgaacgtactggaacttgaatctgtctttaagttaattagttatcgcgcatctatcatgcaacagctcgctaagaataacaaaggggtaatgtatgttgttaaaaattgctcttatcagacgttatcaacattgatcgaccagcaagatctcgccacaaaggtgaatatttgctgtgataacagtgaacttcaccaagttattgggggggagtatgcaagtgtacgtaaggttgttaatcaattagctaatatgaaaatagaaacgaataaattagccgttaatggtgcttggcacactgaattgatgagcgaagggaaaaatttacttgctcactttttacagacaatccctttttcaatcccagataaacccctagtgatgaatgtttctgctgagattgttagcgatattgagacaattaaacagaatttagttaatcaactcacagaaaccgtaagatggacagcaactatggcgctatggtgtcatttaggctatcacaattttattgaacttggtgatagcaagtcattgtattatttagcgaaaaattcacatacgctaaaagataaaaatatattgcatgttaatgattatatttaa

SEQ ID NO: 297817 - DNA, 348 bp, Proteus mirabilis
atgaaatatcgtatattatttcaaagtgtattattttactcgttaattcttcaactgctagcacttgcctccccgattattacgcaaataattatggataaggtaattatccatcaagccctatccacgcttgatgtgttaataataggtcttatttttgtcgccgtttcagaatctgtattaaaggggataagagagtatatttatcatcatacagcaaataaaattgatatgttgctaagtttgaaattaactaaccatttattcaaacttcctatcagttattttaaatctcgccaaacaggtattattgttacacgagtaaaagagcttgatatcattcgatga

SEQ ID NO: 297818 - DNA, 564 bp, Proteus mirabilis
atgtcaaaaattttaaaagatttagagtttacttttacaggaaaacgttatggtacagatggaaatgacgatattgatgccataggttttggagggatcatttatgcaggaaagggacacgatacaatcacagtcggaacattagcagttaccgcttacaccggagacgggcacgattttgtcagagggggaagtgcttatcttaagattattgatgagaacggtgatttagatgtcagaggattaaatgcatggggagaaattgaaaagtccggtcatggcgatctgaaatatgttggtgcttctgccgcgattaagattaatcatactggatatgaatatggaaatatcaattattcaggagctgctattgcaaatatcatcacccgtaaaggcgcaattagtaatatcaactaccaaggtgctggcggttacaatcaaatttggcatgaaaccaatactggcaatatgacgtttaaagggggggaggctataataaattggttcgtacttggtttaatagctatcaaaattcaaaaggaaatattaattttgaaggattag

SEQ ID NO: 297819 - DNA, 1701 bp, Proteus mirabilis
atgacatttcaaattgcagacacactctattataacggcctaatctataccgctgataatagtaacaatttcgtcgaagctatcgctgtttcccaaggcattattattgcaacaggcacaaaatcgaatttacttgcttactgtaatgaaaaaacacagcatatcgatttacagaagaaaatggtgatgcccggcattattgatgctcatatgcatccattttgggggggagccacattagcaggttgtcaccttgattacctctccttaacaatcgatgaaattctatcgcgtatccaacgctatcttgatgctgatcctatcgatagtgatacagcctggttgaaagtgtcagcatggtatcgtgaagggatgcaaccggaagggatacaaatgacgcgttatcaccttgatagcttaaatacgtctcgccctatcttacttttttctagtgattgtcatagcgtattagcaaattcccgcgcactagaattattaaatattacggctgaaacccccgatccccctgatggcaatattgaacgtgatggtgatagaacacctattggtattcttgaagatgcgccagctatgcaggctattgatagcctaccgcctttaacggcagagcaaaatctacaaatcgcacgccatgtacaaaagttgctcaatcaacaaggggtaacgactatcatggatgcacgtgttggtgagccacaattacgtgcctttaataccttgcgagaagcgggtgaattaacggttcgtgttgagaatgcggttgaaattacccctgatgatgtggctgatattgcagctattcctcatgctgtacaacaagcaataacacgattctctcactggcatcaaatcagtcaaggcgcgcaacccagtgtcgctattcgccatattaagctttttcttgatggtgtattacaagcgccgattatgacagcccgtttacacgccccttatcgtattaatgtcggtacggatgaaacgcctcattggcaagattcagagcatgttggcgatctctatttttcacctgaaatcttgacgccattagtcactgagattagccgtgcaggttatcatcctcatattcataccgtcgctgaaggggctattagtgtcgcacttgacgccattagtgaaatgcgcaaagccttgccagaaaaagatattcgccccggccttgcgcataacgaattaatgtgtgaaaaagattatgcgcgctttgcccaattaaatacctacccttttctctcctttcaatgggctggcgtagagcaacataatattgataaagatcttgaaatgttaggcaaagcacgttgccaatatctagaaaccgccggtaaatttattgatgcgggagtgactgtcgcatttggcagtgattggccgattgatccattaaatgagtggtatgactttaaagttgccatgactcgacaaaaagatccctctcagccacgtttagataatgatcgcaatctcaccttaatcgaagtattacgagccgccaccattaatgccgcttatgcactagatatggataaacagattggttcattagaagtagggaaattcgccgattttattgtcttagatagaaacttgtttgaaatatcggcagaagatattgaaaatgtcagggtattgtgtacgataattgcggggaaacccacaatttag

SEQ ID NO: 297820 - DNA, 555 bp, Proteus mirabilis
gtgtattgtggttcaagtttaggcgcttcaccaatttataaacaacaagcgattctttttgctaaagagctggttaaacgtaatatcactttagtttatggtggtgccagtgtaggaattatgggcacgctcgcggataccgttttacaggaagggggtaaagttattggtgtgatcccaacgctattagaagggcgtgaaatctcacataaaaatctgacagagctccatgtcgttgaaactatgcaccaacgtaaaagtaaaatgattgaactcgcggacggctttgtggcactgccggggggttttggcacattagaagagttcagtgaagtgtttacttggagccaaattggccttcatcaaaagccattaggtatatttaatattaatgatttttatcagccattactggctatgatagataaaatggtagatgaaaaattcttacatgaaaaatatcgtcatatggcgattgttgagcaatcacctatccagttattagataaatttgaaagttatattgccccttcgattaaaacctacgataaataa

SEQ ID NO: 297821 - DNA, 405 bp, Proteus mirabilis
atggttaaaataaactctctaaaaatgtatttaattgcaatattccttttttctttagctttgttttgtttctatgactccataatctactacaaaaactattttatgatgaaagatagaattctattctcatttcaaacagggttgtttttttttgcagcccctttgattatctatttttcttatctaatttttatttgtggatacacaaaaaaaacacaaagaatgaacaataaagtagctggtatatgcgcaggaatagcaatagttggtatcgtttttagctttttcttttcaatttatgtcggtctcgatttaacctctaaaggctattttagttgttataaatcatctgcttttgcaccaaatgaatatgttattgcaaaagagatgtgtaaaaaatag

SEQ ID NO: 297822 - DNA, 1692 bp, Proteus mirabilis
atgtcagtgatagtacctaccaaatctattaatcgtttagatagtttatttgttgctggtggtaagttatttattatttgcttacttattcttggggttttattgcctttattggctattttctggcgaggttttacgcctgatatatcacaaggtggtggttttcaggctgccattgatttgttcaccagtgctaattttctgtggttggtgggtaacagtattagtgtttcgctaagcgttgctgttattacggtgccactggcttacctgtttgcttatgctctacatcgcaccttgatcccttttaaatccttgtggcgtggaatatcactattacccttactcgctccttctatgctaccgggtattgcattggtttatctatttggtaaccaagggctattgcgtagcttactcacagagagtatttatggttattggggattagtgcttggtgaggtgatctacacttttcctcatgcgctaatgattttactctccgcattatccatgtctgatgctcgtttatttgatgctgcatctagcttaggggcctcttcttggcgcacttttcgtagtgtcacttggtcatcgagccgacatgggattttcgcagcattgtgcttggtatttacgttaactattactgactttggtattccggttgtcgtcggcggagattatcaagtactggcgttagaggcatataaagccgtgcttggtcagcaacaatttggccgcggtgctttaatcggtatgttgttattgctacctgcattgttgaccttcggtgtcgatgtttggttacgtaaacgtcaacgtgatgcaatgagctcgcgtgcccaattctatttgccaaaagctaattttcagcgtgacacgctttatctaatatttgtgatgcttatttgcgcgctatttttattggtatttggtacggccgtttactcctcttttattcagttctggccttataacttatcgttttcgttacgtcattataattttgaaggattgcccgggggctggctcgcctataccaacagtattattttggcattttacactgccactatcggctgttttctgatctttatgggcgcttacttaatagagaaaacggcttctcactcttggcttaacaatctgttacgtatgctaagttttgtaccgatggccgttccggggttagtgttgggattagggtatgtatttttctttaacttaccgaataatccactgaactttttatacggcagtatggtgttattagtgctgtgctccattgcacactttttcactaccgcctatatgactgcgagcacggcactgcgccagttagataaagaattcgaggcagcttcattatccttaaaagcgcctttatatcgtcacttttggcgtatcactattcctctttgtttgccggcattattagatatttatcgttatctatttgtttctgctatgacaacggtttccgcggcgatcttcctttatagtccagacactattttagccgcggttgcggtattaaatatggatgatgcgggcaatattggtggcgcggcagctatgtcgacattgattttaaccacctcggcaggagtttcgatattgttatctattgcttcgcaaggtgttcttcgccgtacacaagcgtggcatcagcgtgaagctaaacaataa

SEQ ID NO: 297823 - DNA, 783 bp, Proteus mirabilis
atggaacaacttgataaagataaacagaaaatgaatgagttgttagctacttctagccaagggttattaaaaactgtagagtatatagataatctatctaatttaattagttctaaaactgataatggtacttgtaatttcgacctcattgaccaattcaaaatgtctattgaaactttggtaaaaaaatgtaatgtctttaacaaagatagtcagtttttatctaaaaaagatattgagatagagttaagtgacataaaaataacaattgaagaacttaatgaaattataaaaaagatggaggattttaaatctaatcagttatattgtttttataaagaagcagatgaatataattttactacagttaacgagattaatgttaattttaaaaaggttttttttaataatataaaagatatgttttctcaattatcttcttataataaatcattaaaggaaaataaaggttttttccttaaactatataaattattatttaaaaacaaatacctaagaaaaaaagagataaatgataatgctgttaaaaaattagaaatattggatagggatttattctttttgcttgaatctaaagattttaaaaataattatgtacctgattgggcttgcaaattagtagctaaaataataaatgaatcaatgcctagaaacgatattttttggcgattctctaaagagcgcacagaatggaataaaatttataaatcatttattgtagatagatcatttattgtagagagaaagagagaagaaatatag

SEQ ID NO: 297824 - DNA, 423 bp, Proteus mirabilis
atggcgtcatttaatcctttaatacttaaaatgataagtgaaggtaataaactctattctcagggaaatgttgatgaagcaataaataactccatttctgttttaaatgaattagatgttatctatggggataggtacaaaagtgaagaagctcgattagtaatgatgagcttatatgatatctatttttctcgtggtgattatatagaagccaaaaagtgggcgtctgatatttttaagtgcaatatccctgatattgccacatccgaattagttaatttaggcgccgtttgcttggagctgggtgaaaatgatgaggcttatgaatgctttataaaagcttataagaaaggtaagaatagagcatttaaagaatacccatctaaatattgggagttttttaaatcgaggtataaagagtag

SEQ ID NO: 297825 - DNA, 168 bp, Proteus mirabilis
gtgtcaaaaaacagtcgtgatttaaaaattatagttactagtcaacttttggctgataatgagtggtttaactcagcaagtgtaagtgatattgttgagaataaagatgccgtgtccgctgcattgcgtggtacaggggaaaacatgaattatttcctgtttctctag

SEQ ID NO: 297826 - DNA, 354 bp, Proteus mirabilis
ttgttatttctgataaccttcgagaaactctcactgtctgatgttgatgattggtgggttaagggtgctcatgtagatattgataaaatagaaattgctataaaaccaggtaaatatggacaaataatatacaagcctgtatttagtaaaacagatgttaatacagtagcctggaaaaaagcaatagaaaaattagatctatacttatctgatacaaaaaataaaataaaagtcgttgattatcttgaaaaggcaaaagtgagatggcctgataaagccgctgagtggagtcacttacaaaaagccttgaatcaaaataccgcaataaaaggtataacaggaaaaggttgttaa

SEQ ID NO: 297827 - DNA, 456 bp, Proteus mirabilis
atgataaatttatcaatggatataatagatataattaataaaggatcaatattcaattctatcacttctaatgatgaaagaatatgcttgctatcatattcacatgaagagtttttcagaaacgctaagatttatactattaatattaatggtttttatattgaaatctgtattgctaaactatctaatagaagttatgaaagtatttgtttgaatcaagatgtgaatgcttcaggtgttgatataaatatatcagataagtttagagtaatgacgcaaacagaagaacaactattaaaacaaaaaaatatatcattacccgattattctatatttatagattctaaaatagaacaagtagaattacattttcataatgggtgtaagcttatttatgaaaacaaacactcatttccatcagttttgattaatcctttatttataatgagtaactaa

SEQ ID NO: 297828 - DNA, 264 bp, Proteus mirabilis
gtgtacacctttggctgggtagggatgcgattggtatctgagcacagcagcgcagcgccccataccacggtttatcatgcttacaatgaccaaagttatacgcctctagcccgcattgaatgcacggataacccgcttaatccacaacgggcgatttattatacgcacagcagtttaagtggcttaccggaagcgctgaccaacagtgagggtgaaatcgtttggcaagggcaatacagtgcttgggggcatttacagcgttaa

SEQ ID NO: 297829 - DNA, 612 bp, Proteus mirabilis
atgaataatgaattgaagcgattagaaaaaaaatataatagtattatggtttctcctacagaaaaagaaagtcaatattataattctgttatgtctagtttttcatataagaaaattagtaaagggagattgtataatattaaaccttatgaaatacagagagcaggattgaatcctggtaaagaattaaaagaaaatcctaaaaaaataaaaggagtatgtgtatattactttgatactaaagataatattttattaattgaaatatatggacaaaatgaaaatattataaatagacattattattttcatacagttaaccaaataaaatctatttattttaatagtgggtatcaatcaataagaaatattgatctattaaaatgtaagaatggtcaagttatggaagtgttaaactatggtgagatgggtagctctatatctaattatatttatgactcaggaaaacttatagaaatagatataaaacaaaaagaacataataaaaatgaaatagcgaaatataaagtctattttgagtataaggatgacattttaaatagaatagtagataaacatcctaatggatacgaagagcagcgttatccatag

SEQ ID NO: 297830 - DNA, 468 bp, Proteus mirabilis
atgaaagaaaatattgctgtaaaatcgatagaaaacatatggcaagacccacaatgtttttgtataagtgaatttattagagatgagtttttttattatttcaaatgtttagatattgtatcaatgaagaaaggaagtatagtcgatgcagaatatcttggttgttttaatattgaaaacatgttggcagtaaaacatacaagatttacaaaaacagaaatttatcctgtggatatagaccatgattataaatgctactattatgaggttaatgactccaattggttgaataatatattgaatgaaagaactaaaaatgatagtgattggaataaatatgatactaatatctataaacactttattttggaaaataaagaatattgggtagaagttataggaagtaatttgattttttctaaaaaagaaaaggatgaagctaaattagtactttgggatactatttaa

SEQ ID NO: 297831 - DNA, 357 bp, Proteus mirabilis
atgaaaaaagataaattggttgtgacatcacttgcaaccgagcttttagatgatgtatttataagttataaaaaaaacctcactgatttatctaaaaaaaataatagtggtgacccctattcaaaaatacgaaatgctttagctaaattatcaaatgaagaacaagtgtctattttcaattttattcgattggctatggttgatacatcttcggttatctttggaacactagatggctctcacttcccacctaatatagatggtgattttattgtttcgtataatggtgatgaaattcagggctcattgcaggatgaattaatatctattgcagaagaaaaaggaatatataaataa

SEQ ID NO: 297832 - DNA, 399 bp, Proteus mirabilis
atggcggtaaatccattcaaattaggaaatgtatttaataaaatgaaaactcaggctataaaaacagtatatgggatcatatattcaagaaatgcgctaattactactgatgtagcattaaatatgactccattaagtattaaagtaagtgcatctttattattatcaggttgtagaccacagataaaagataaagatcctataaatatttgtattaatttttatcatattgaatctattaagatatatatgttagacgactatccatatgagaaatattcgtcctctagttttgatgaagttgaagaagaacatcgttcgggaaataaaaggtatatattaagcacttatgatcatgtttttgatattgtaggtcagtatgaaatagtgactgaataa

SEQ ID NO: 297833 - DNA, 594 bp, Proteus mirabilis
ttgctgtttcgagaaaatgctgattatcgcaccggcaccactgcccgcgtagagtatcaagacaccctgacctttacctacgataaagtggggcagttggttcgagaagccagtgctcgcggtgattatcagcatcactatgatgtgctgggtaatatcactcgcaccgagttgccccatcaaagggcatttgaatacctgtattacggctctgggcatttacaacaaacgcaatggcgagataatgagcaactgacggtattggcggaatatcaacgagaccgtttacaccgagaaacgttgcgcaccagtggcgccttagacaatgaaacgggctatgactgtcggggacgtattacgcaccaagtggcacgccaaatgaatacttcaattagtcgcggaaataactcttatcaaacgcgtatagatccaactatcccagggcggcctgaccctaaatattcaattgactcacatacttttactagtggggatataacgtctaaaggcggaattaggaatactcagcaattttgggagcaatggagtcagttaaggccaaactcattgagtgtgcaagtaataagtatttaa

SEQ ID NO: 297834 - DNA, 918 bp, Proteus mirabilis
atgaaagagatagaacaattttatcgtgaattagaatcagctattaattttattttagaagataaagagtattatgattttatagataatgctttagtcgattatatagaaaatgttactaataagtttatttatgaatggaatgatgatttctttgaaaaaaaatgtaaaataacacttaatattaatgccttactaaatgaaaaaagtagcacaatcgtgcttttattaagagatttcttaatggagaaaaaagataattatattgagttgatcaattatttttatttttctgtattggagtgttattgtgaagaatactttggcaacaaaatagaaaaaaatttaaatgaactaatttctgtatattttatcacattgtcttatttttctctagatgatcaaattgttgtttttaaaagtctaattagaagtattaaagctagcaatgaatttattgatgatgagttgtcagagactttaataccacttgttttttatctttccaaggaaaaattaaattcagttaatgatgacttaagtaatgatattgagtggggaataaaagagtttgattttagtttaaaatataaaatttttgttgatggtttttcccatcatgaagatataagctcattattaaatgaactttgcaattatcatatatcgataaattttcctgaaattaactcaactgaaaactttaatcatgtaacttacaaattaataccttgtgaagtaatagtattacttagaatgagagagttaaataaattacctattaataatattgatcatcaactaataaatagatttaagatgtttttaaataaagatatacctttgaataattttaatcgttcattaagaaaatctattttacataaagcattacataaaattagtcagaatcactga

SEQ ID NO: 297835 - DNA, 285 bp, Proteus mirabilis
ttgagttgtagttatgctcgggatatagaacagataattcttattattcaacatatggcttatatgaaaacaacaaaatcagcgacaacttataaacttgattatcatcctggtggtttaggaattcagaagaatattcatcgaaatgattattggaaagtttataaatctacaagtaaaacttctgatgaagttttagggagaataggtcatggtgattttaaaaactatgatcttattaaagaatcgccagtttatattgatagcgtattaatgaatggttga

SEQ ID NO: 297836 - DNA, 477 bp, Proteus mirabilis
atgaaaatgatagattttaacgcctctataataagttataaatcaatgggtaatatttttgttggtgaaaatattagtctttacattagcgagttgtatgaacatcatgatgtcagtcaatctaattattatttacctaatgaagattgtaggatagcttattatattgataatattctaactatagcaacattattagatgggacgattatttcgattgggtgtaacgagaagtataaagggaaatataaaaataaactatattctggtatgttaatgggagaattaattaaactaacaagaagtcagcgtatattaaatggatctattattatagatgaagattatggtatttcttttatactaccttccccttatgatgaaatcgcagattatatagaacatattccattagatctaagaataagtgaaatctatgtgtctgactattctttttgggcatcgaataaaaaatag

SEQ ID NO: 297837 - DNA, 315 bp, Proteus mirabilis
atgagtgtattaaggtttaactattcaactttgttgaaaagaaacaaaagtttatcttatcgtgagaaaataactaagataactaaagtgttgatgatttttcttaaggaaaataacttgattactttagagccatttaaggataatggggaggtaaaagatgaactagtgctatacagttccgatctaactgatttgggcaatcttttatttaaagaatactatcctaaatggtctgcatatatagatcgtggtggggatgtaagtaatataaaaatattaaatgatggtttgaataaactgaaaagaaaatag

SEQ ID NO: 297838 - DNA, 603 bp, Proteus mirabilis
atgtcaaaatatagtagcgctttaaaaatcatcattacgcaccaagtggcgcgccaaatgaatgcctcacagtttgtgaccccggtgatagaccgtcgttatcgttgggataaacgcaatcaacttatcgagcgcagtgtcagttatggtcaaacgggcgaggtttttaccgccggacattggtactaccacagttatcagtacgacccgctgggacaattgacggcgcatttagggtcggtgcaaaccgaacactttctgtatgatgcagcagccaatttactgactcgtccgcacagcgaagcaccgcataaccaagtacaaggcagtgataaatttgattatcgctacgacggttttggtcgcatggtctcccgctatgaaaaaggcagtagctcgggacaacgttatcactatgacagtgaccaccgcattatcgcggtggatatcgaccaagggcccttagggtatcagcgagcggaatactgctacgatatcttagggcgccggattgaaaacggttatggaaagccagtgcgattgccaacacagtcatctatcactaacatgagccggataaagtgtacaaaaggttctagatga

SEQ ID NO: 297839 - DNA, 747 bp, Proteus mirabilis
atgctaatgacaataattaaatcacttatttttatcccttatctattattaagtggatgtggtgagtatatcaatatatatctggataataaattccccgtcaatatgaataatgatggcaaaaaaatcacggtttattcaaccatttcccctgaaacggtagtggaagttattggtacttatacgtctaataagtgccaacgttctcattttaatgcttcttatactaaagtcacttattcctctttaacgcaacaagtggaagcagagcgtaaaatagcagaggataataaaaacgcgacctatatcgtgcctattgatggggggggatggtgtaattggaaattgataaaaatagaactagcgccaatctctaccatttataaaaatcatatggtgattagtaaggttatcccaattgtcgatgacaaacattcaaaaatagaactatttactacattggcccctgttatagtggaagaagatgatcaatccatctattattcaccatcaatcacggaaggtgagaaaaaactatctaataaatcaaatggagaaatttattttaattataaagttgagcctaaactaaccacgactatctcaaaagatgaaaaagttatttttcctaatgggagtattaaagagccgaccttttctatttataatggaagggttagttttaatgaaataatcgagaatagtgatgaaaaggcgtttacttcttttgttcgatatattgattga

SEQ ID NO: 297840 - DNA, 1917 bp, Proteus mirabilis
atgacatttagatacgataaatataatgatccttattgccccgattgtgctaaacataatgcttggatagaaatcttactggtagatgaattgaacaatcctatttcggatatgccctatacactgactgtctctgggggagaaaaaagaacaggtaaaacagatcgtaatgggattgttagagaaacagatttaccgccaacaggggggcgcttttctattaatgcacaaatgctggctgatgaaatggaaaaacgtcctttaagagcacgcagaaatggttcttccaaaattcgctatgatgcaacacaacgtaatgataattaccgctatttaactattggtgatttatgtgatgctgcgcctaaaattttaaaatgggatcaaccagagttacctaaatatcattttaaaaaacagcaacccaatggatatatggtaatatttcgtaatgaacgttgggtttttgaagtatgttcatttagagcctggtcattcttattacatcatcagaaagattactcaattactaatgcctgtaatttaagtatattatctgtattgtcttatgcgagctttaaagctaataatgataaggagcctaatgcaggaaattattcaggctcaattgaggatgttttttttaaccaactctttgacttatcccaaatcccacagcaatttgaggaaaagtcttttaccccaataatatatgatgttccgtttagtgaacgctatacagatgttgaatttattgattcagctaagaatttagatacccaaatgttttatatcgcaaataataaagaagttattgttgtttggcgaggaacggcaggaaaaactgatatatttacagatataaaatttaaaccagttaaactgcaacaggatatggggatcgaaggctatgtgcactctggtttttataattcatttaggactatggatggtgaatattatttaagaccgaaagtaaatgtggatgatgatcaagataaaaagattccattagatttaatcaaaggtttagcttcaaagcgaaaattatttatcgcagggcatagtttagggggtgcattggctttattacatgccataaaattaagaaaatataatccagtgctttatactattggtatgcctcgggtattaaccctttctattacagagcagttgggagatattattcaccatcgccatgttaatgaagacgatccagtcccagcccttccttttgaaaaagatatgaataatatcgcttttataagtgataatgattggctagggtattctatagaaattgcaataacatatatagacttgaaacatcaaggtatggcgagcaaaactattgaacaattgaaaacagatttcaatataaaaaatgatacatttattcaccatggtgatgctgtgcatttttacaaaccaacatcaaaaacatctatgtataaatacgtgttggcaagtgttggatatgcaccaagtcttttggtgaatatggaaatagataaaaaacgctatctcgtctctgatactgatgaaaagctctatctcgtttctgaactactacccgatcatcggcttaaacaagaattttttgaactatataagttacccaaaacagcatcacctggtgtaactggtggtggagatcactcaagtcgtaaatatacaaactttattatttctaaaataattagtttagttaaatataacggattaacagaatctgcatatgatattagagcagaattggtcaatcaaaaaagactatcacaagccaaatacgacgaaagcagttatttgctagacttagatcttatggttgcagatacattattacccacattacttatgccagaaggtataacggcgctgaaaaggttcaaatatgctaatgacaataattaa

SEQ ID NO: 297841 - DNA, 786 bp, Proteus mirabilis
atgtcactgacatggacttcatggttaacaaataccattcaaagtgatgtgtattttttaattaacacgttatcgcaaccaaatccgattaaacaattttatattaatgattggattgaagaggcattccctatatatcgtggaacggcattatcacacttatcgagtgtcagtccatggttggtaaaagtaaaaccctcgcaatactcacatttgggccaagtattagatactatgccattaggtgataatagctggggatgggcttatcatagccaactcgattggcgtacccaaatcactcattggcaaaagcatcaactagtgataatgaatgataaaaaagttatctttcgtttttttgatgcgcgtatagcgcgtacgctattaccaaaattatcacttggcgattgggctgtcttaatgatgcctgttgatgactgcttgattgaaggtgatgaggttaatgaaaactatacgcgacctcaatatgcagatccctttattagccccgtagattatgaattaagagagcatctaattacagcttggcgtgattctgaacaggcttatgttaatgtaattaataacttctatattcagttttgggaaaaacagagtgaattagcttatcagttagatgaagttgacggtcgtttaatagggtttatccgcgattggatggacgaatgtcagaaaaatagattagataccgcctatctgtatgatgatttatttttacgctatctaaataaaaataatctattacctgatatgactatataa

SEQ ID NO: 297842 - DNA, 1974 bp, Proteus mirabilis
atggatggattagtttttacctgtcaatttaaaggaattcctgaagaaacattcactgtgacagaatttcaactgactgagcatttatctgagttatttacactttctttaactgcggtaagttcattaccgtctatctgttttgatgatatgttggggtttgcttgttccttaacggttacgcgcaatggtaaacctattcgtactgtacgtgggctattagctagtgcggagcaacaaaatacagatggtaatcaaacgtggtatcactttattattcgacctgaaatttgggtcatgtctttagggcaaaacagtcgaatttttcgacaaataacggtgcctgacttacttcagcaattattatttgagtctcatattaaagcagattgcaaactctatgctgaggatgcttatcctaagcgtgattatataacacaaaagcgtgaatcagattatcagtttttttgccgtttagctgcagaagagggaataagcttttggtttgaagatgcaggaattgagccacggatgttttacagcgattctcacttaggtatgacggcagatattgacttaatctacaacccacaatatgaaacagatactaaagatcatactgcatatcattggcgttatagagagtcactgctttcagataaaattctttacaaagattataattctaaacgtccttcttatccccttgaaagtaaaatagaaggggaaatacataatcagcatccattttatgaaagttatgggcgttttcagacgcaagatgatgcggatcgttataccaaaattcgaatggaagagatacaacaacaacgttgtgtcggcaatgcattaactaattgttttgctttgatgccaggaaaaattttttcgttatcttctcacccatgctcaaatatgaatcgccgttggcaagtcattgctattactcatcacggcactcaacccttagctgataatagggaagggcaaggaacaacattatcgaataatttaacctttattcctgataatttaaattggcgcccgccttttattcataaaccaacagctgatggcgatgaattagccacagtagttggccctgaaggtgaagaaatctataccaatgaagaaggggctgtacaagtttattttcattgggatcgcatgcgagaaccagaattaggaagctcatgttgggttcgggtagcgcagggatggaatggtaacggttatggctttatggcaatacctaggattggacaagaagtgcttatcagttatctaaatggagatatagatagacctataatttcaggctgtacatataatggacgcaatactccgccactaaacctaccttatgagatgacgcgtactacgtttaaaacaaaaacgcataaaggagaagggtttaacgagttacgctttgatgataaagcaggccgagaagaaatctatcttcatgcacaacacgatatgaatgctcatattgaacataacgcacatttccatattcagcatgatgcaaaaaaacggattaataatgatcaatttaccgaaatcgcaggtaatgatcactttattttaaaaggctcacaaaaaaatcatatcgctggaaatgtatcattacatattgaaggtgatgaaaagacgaaagtaaatggaaatgcggtgcatgaaagcactctgcaaacttattttgtgagtggcggtaaaattgtgcttgatgcggggacagaaatcacccttaaagtgggagagagttttatacggatcactcccaatatgatatttacttcgaataatttggtcgtcggtggtggtagtgcaggaagtgggacttctatcgatttggagctaccgcaaggcgtccctcctttagagttatctccgtatcctgtaaaaaaatactgtgcagtagcagcacagcactcagggggaataattataaaaccaaatgaggatgaataa

SEQ ID NO: 297843 - DNA, 273 bp, Proteus mirabilis
atgagagccacagtctttgggaaaagaattggattacataatgacaaaacgaccaccggagcgacttgtcttgctagcatattaacggtcaccaatgaagggattagcatattgaggcttggagataaaacaacacgttgtccagtatgcaatgaagaaggcacgatagtgactggagagcaaggaatgatactggatggacaaaaaattgctgtagaaggctctattgtccaatgtggctgctcttatggaaagaatagggttacttgttaa

SEQ ID NO: 297844 - DNA, 222 bp, Proteus mirabilis
gtgagcaatgtcgttctttcatatgaccctgaaggtggtgcatctgaaagtgatttaatgataatagttctcactatcatttgtaaagtgttttttttaatcaaaacagaaaaaaataatgccaattttgttaactcactgattaacgagttattttattttgtttttaaaaaaatcattataaccaataagttagcctatactttgtgtggttatttataa

SEQ ID NO: 297845 - DNA, 399 bp, Proteus mirabilis
atgaaacaacctaactggacacttaaattacctgaaaccataagggcggcgatgagtcgccctttttcatggggcaaatttgattgttgtatttttgcctctgaatgtatttacgcacaatgtggtttctcgccaataaagccttatctcaatcactataaaactaaagctgaagctttcaatcttatcaaatccaaatttggctccttagagaaagccgtatcacgctatttcaaatccattgagattgagcgcgttcagcgtggcgacctcgtactgtttaaaggtgaggacggtgactgtttagccgtggcctgggcgaggcattattggggggtaaccccacaaggcgtgaagccagtgcagattaacccaatcaaagcgtggagagtggaataa

SEQ ID NO: 297846 - DNA, 549 bp, Proteus mirabilis
atgagtaaaaaacttttagttactttagttatgaccagtctatcgctatgtgcggcaaatgcacaagccgtaggtgaaaatacactttcattaggttatgcacaaagtcatgtcaaagcagatggcgataaactaaaagaaaatcctaaaggctttaacgtcaaatatcgttatgaattcgataatcagtggggaatgattggctcttttgcatatacgcatcaagggtatgattatcgtttcggttctcaatctgttggaactgcagatttggactattattcattcactgctgggcctgtttatcgttttaatgattatgttagtgcctatggtttattgggggttgctcacggtaaagccgaagtagaattaaaaggcttcggttatcatgagaaagaaagtcaaagtaaatctgcgttcgcttatggtgcgggtcttcaatttaacccccatcctaatatcgcgattgatgcttcttacgaatatactaaattagatgatgttaaagtgggcacatggatgcttggtcttggctatcgtttttag

SEQ ID NO: 297847 - DNA, 582 bp, Proteus mirabilis
atgcaatatcatccattttctgatgccatggtcaatgcgattaatgagggggcttatattgtcttagccgccagactcgatttgaaatcaggcgtcacttgtgcgcataccggtgttgggcaactgattattgcgggggaaacttatttgggtgtgggtagtttaggcgaaatcagtcagctaaaagaaaataagacaaccagtcccccacaattacagcttaaattagcgggttttgataaatcgctggtggggatggtgatgaatgagcaaagtcgaggacgagaagtgcggttgatgatggtcgccatcggcgaagaggggaaaccgttgcttgctgaaatcttatttgttggacaaatcacatcgatcaatgtggtatctggtgaagagaatgccgtatgtgttaatatctcaaatcgatttgagcgatggtcaattggtttgcctgatcggtttactgatgagtcgtggtcatcaagaaggcaaggggatcgtatctttcgttatgttgctcaaatggctgaacgagccatttattggggcagcaagaaagatgcaccatcatttatttataaataa

SEQ ID NO: 297848 - DNA, 597 bp, Proteus mirabilis
atgtctattcttgaatggccaaaagaggtgatccccacacaggaaaactggcaattattgagtaacagcaaaacctttacctcaccatttaatggaagtagccaaacggtacgctttccgggaagtcgttggcgttgcgagctgacatttaataatttaaatgaagcaaaatcgcgccagttagaagcgttggtggcttcattggatggcatgtcaggaagagtgagaatatcgagttggatcagaaaagggcgttatgggtatggttcgcctcgcattgcaataccgagccaattgggtaatcagttagaaacaaaggactggaagcgcaatatgcgcgtgttacagcaaggggatcgcttaactgtgggcaatgaactcaaaatggtggtggcagatgtggtcagtgacaataatgggcgtgcaaatattcctatttcaccgatgttaagaacgtcgcctactgttaatgaagtgctcgaggttgagcgtccttttggagtttttcggctcgttgataatgaacagggtaaatttcagcatcgtcgcttggggtatacccatatcacgttatcttttgaggaggtgttgtactaa

SEQ ID NO: 297849 - DNA, 3252 bp, Proteus mirabilis
atggctggcgcattaggtcgattaaatattgatttgacgctgaatacggcaaatttcaccaatgcgatcaaccgtagccagcgccaaacagaacaatttgggcaaagtattcgcgtcagtcttcaagctatcaccgtacaacaagagcgaatggtatcgcaaaccgcaaaatcttcggcgctttttgcccgttttgcgagtgttaccgcaagtgcattatccattcatcaagtcattaattatgctgatagttggacggaattacagaaccgattaaaactggtgacggaaagttctgtcgggttaaataaagccacacaagcggtctatgatattgcccaaagaacctatcaatcattggatgccacagcacaggtttatcagcgttttgcggataatgccgatcgcttaggcttaagtcagcaaaaagtggcagaactcacggaaaccgtctcaaaagccgtggcgatttcgggagcgagtgcccccgcagcccaagcggcattaactcaatttggtcaagcattagcctcgggtcagttacgtggcgaagagctaaattcagtgatggagcaaacccctgcgttagcgaaagctattgctgacggaatgggtgtcagtgtgggtgaactaaggaagaaagcccaagacggtgaaatgacgatagagaaagtcattcaagccttagaacgtgcagccgacagtgtggataaaaaatttgctaccagcgtgacaacggttagccaaggtttcactaatcttcaatcggcgataacaaaatttatcggtgaatcgaatcaaagtacaggtgcgactcagcttttaacaacggggctttctgcattatcgaatcatttttctgaagtgatgagagtaacggaagctttagccatgacggctattgcaataaaaatagccaaatggactcaagccacttatgcacaagccgctgcaacgaaattaaaagttcaacaagatttaatcgccgctaaagccacaaaagccaagatgacggctgaattagagctagcccgtgttgaaatgcgttctttacaagcgcaacttcaactcgctcagacagaagcacaacgcagtagtattcgaatgcgaatgaaagcgcagtcttccattattgtgtcagccacaaatgcagaaacattagcgatacaacggttgaatgcggcacaaagagccagttctacattagggagaagttttggtggtgcacttgcctttcttgggggacctcttgggattgcgacaggattattgaccgcgggggcaatggcttactatgagtggcaacaacaagcagaacaatcaagacaaaaagctcttgagtatgcagagtcattagacgttgcaacggagtcattaaataaattaagtgatgctgagcgtcaagcttcaatcggaaaactggctgaaggtttagatgcacaaattgagaaaatagaagagctaaagagaaagcaagaggatttaaaaaaatcatcggatttgggtggggcaaataaaggtatctctttttattatacaggagattacgagtcattttcagcggaagtagttaaagctagaaaagatgaactccaagtaactgctgatcttgaaacaaagaatagagaattagaagttacacgtaaaaaaatggcattattgcttgatgcggaagttcaaaaaaatgggatggtctctaatgcctatgcgctttatgccagccgtatttacgatgcttccgtaaaatctgatgaattgattggtaaactccatctacaaggttctgcttttgataatttagcgcaatccattcgttcagctacccaagagcaacagcagttttcggcacaatcgttaattgtgatttctgatgatgcgcaaaaatcaatcgatgcttctcttcgtactattgaaaaatctaaagcaacgggcaaagctttagccaaactcaacgccgaagatgtattggcgagtagaaaaatcacaccggacatgatggggtatgacaaagcgttacaagctgaaattgaagcccaacttgctttacagtctaaaaaaattaagccacccaaaacaccaaaatccaccattgattatgccaaacaatacaccaaaatcttgacggaattagaggaaaaacaagcctcactgattgcggatggacaaagcattcagctgtatggcactacctcttcctttaatgaatacacatccgcattagccgatatcaaacagaataaagacaagtttgatgccatcttaaaaatcgatcccaaagcgattgagacgataaaagaaaaagcgaaagccattgatgatctagcgcgtgccaattcggtcgcgcaatttgcttatgatcgcggtaaagaaattgagcagatgcaatttgaaaccaccttgataggaaagtcacgcgcagagcaagaaaagctcaatgcccttcgtcagattgatgtgctgtatcagcaagccagtgtggatttaggcgaaaaagagttggcgaacttacaacgcaatgtcgaactcactaaacagcaaattgaggcagagcttaggaagcgagaagccatgaaaggtgatccgatggcgggattaaaacaaggcttatcggatttcagtgagtcagccatggatgtgatggagagcgtcagaaacgttactactaatgcccttaataatatgtccgatgcattagccgattttgctttaacgggcaaaggaagctttaaagattttgccaatgcggtgatttccgatatcactcgaatggtgatgaaaatgctgattttcaaagccattgaagcaggcgggcaggcaatgggctttgatatgggatggatgagcaaagggcatgcttacggtggttatacggggcatggcgggaaattcgaacctaaagggattgtgcacggtggtgagtttgtttttaccaaagaagcgacggctaaattgggtgtcggcaatctctatcgcttaatgcatgcggcgcaaggttatgcatcgggaggctttgtgggggcggtcgcaggacgaatacccgttacaccgcaactgacgttagcccgtgcaggtggtgtgcaaatgacggtcgttaatcatattacagtgacaggaaatggtgacgctgtacttgcgcaggcaatgaaagaagctgcacaacaagggacagaagccggcgcacagaaagctcacgcgatgatgttacaagactttcaaagtaatggcacagcacgcagaacattaggagtctaa

SEQ ID NO: 297850 - DNA, 417 bp, Proteus mirabilis
atgtctaacgcgttattgcgtgaattagtgttaaaccaagcactgaaagtgacgccttttacctatttagacaacaccttttatgtcaaagagctggatgttggcaccatgaattacattcagcgtaaacttcgccaaattaaaatcaaactcgccgaagcacaggacatttacttagacgaagacgatcccgaacaatttaacgaggcgataaatcgtgtctacgatgaatatgatgtcgccagaatgttggcctttaagttgtgtgatgaaaaaggggaactgctttttgatgctgaaaatgaagaagacttaaaaggtcttaatcgtttaggacaagggttctctaatgcggtgtttacggccgaagcggggaacagcgaaaaaaacttggagaacggcgacaattccaactga

SEQ ID NO: 297851 - DNA, 474 bp, Proteus mirabilis
atgatgggggagattaaaatcagtgggttagctgaactctcgcaatacttaaaagcgttggagaaaaatgtgggtaaacgtattgcccgaaaagcgatgaatgcgggagcgatggaattaaagcaggaaatcaaacatcgagtgcctattcttaaggaaacggtaccgcatcgacgcaagggcaccatcaagcgcaatattcgttctaaaacgaaagtgcagcgcaatggacaagttaaaacgcgtatttgggtgaaatcattatcgggtaaaaaggtgtctgcctttaaacaggtaacgggaaaaagtgcggcattgaacccgaatgatccgttttattggtggtttgtcgagtttggtaccgccaagatgcccgcacaaccgtttatgcgccccagctttgaagcaaaaaaggaagcgacggccaaagtgattgttcaaacactcaaagaggatattgaaaaagcaaggtag

SEQ ID NO: 297852 - DNA, 345 bp, Proteus mirabilis
atgataggaactgctgcaggacgatttcgtcatatcatcacccttcaacaacctgagcccaagcctaatcggataagtggggatgaagtcatttggcgtgacgtgttaaaagatattcatgcaagtgttgaacctctacgtggacgtgaatattttcaggcgcaacaggtgcaaagtgaaactaccttcagaatacgtatgcgctggttccctcaggtaaaatccactatgcgcgtctgttttggctcacgtatattcaatattgttgccattattgatcctgaagagcgtcatcgtgagcttcaattgatgtgcaaagagggcgtgaatgatgggggagattaa

SEQ ID NO: 297853 - DNA, 327 bp, Proteus mirabilis
atgatgaacatcgttacattgcaggaggtgaaatctcacttacgtattgatcatgattttgatgatgcggatttgcaattaaaaattaacgcggcgacagcagctgtccttgatcatgtgaaaagttgggtagaacgatttcaaggagacgaaacgaaacttaagcaatcccccgatttttatcgagtaaaggatgccattttaatcttaattggtataagagatagggatagagaaggtgtcgatattgcgctttatccccaaggaatgctgccttatcccgtcacctgtttgttggggtccatgcacaaaccgactattttgtga

SEQ ID NO: 297854 - DNA, 1182 bp, Proteus mirabilis
gtgaatcaacgtgaaaaacaatttaccgataacttgattgaggctgtgaataatgcgttagcgaagcgtgatgcgcgtattgatagcttaatggaacagctgtcactttatcagcaactgctccagaaacaagagaatgatattgctgccttactcttgttgttagaagagcaagccagtgcctcactgaatcgccttgaacagtggtttgatgctgaaaaaaatagctttgaacaatccttacatgcttttcttattcagcaagtcaaggctattcctatacctaaaaatggtagagatggtcacagtgtgacattagaagatattaaaccgctgattgattcagcggttaatttggctatttccgcgcttcccaaacccttagatggtaaagatggaaaagatggtcacagtgtgacattagaagagattaaaccgctggttgattcggcgattaatttggctatctccgcgcttcccaaacccttagatggtaaagatggaaaagatggtcacagtgtgacattagaagaggtaaaaccgttggtcgattcggcggttaatttggctatttccgcactccccaaacccttagatggtaaggatggcagagacggtaaagacggctcgagtgtcaccgtagaagaggttaaagcatttgtcatgtctgaagtgagtgctgcggtaaaagcacttcctgtgccgaaagacgggaaagacggtcgagatggcaaggatggtcgagatggtaaagatgcctttaatattgacatccttcccgatattgatgaaaccaaaagttatgcgcgtggcactctagcgacacatcatgggggattatggcgcgcctacgagcaaacaaaagggatgcatggttgggagtgcattgtcagagggtgcagtagcctagcttggtcacttcaagatgaaaggaccttattagttaattcaatactaagcaatggggagatggtacaaaccaaatatgttttcccaacaatgatatatcaaggtgtttttgccataaacagagcgttgccttatcaaaaaggggatgtagtcacttggggaggctcattgtggcactgtaatgaacccaccaaggacaagccaggggaattacattccaaaggctggacgttgatagtgaaacgtggacgagacgggagagacacgaaatga

SEQ ID NO: 297855 - DNA, 1317 bp, Proteus mirabilis
atgccaatattaacgaacattgcccaggccgtggttaagagactggctggtctcggagaaggttggctcacgattttcagagaaccttttactggcgcttggcagcaaaatatggcgcttagccgagaagaggtattaacttaccatcctgttttttcctgtgtgacattaatcgcctcagatattgctaaaatgcccttgttattaaaacgaaaagggcatgatggggtatggcacgagcaaaataaaggtgcttacacggtgatagtgacacctaactcgctacaaaccaggaatcaattttttgaaaattggctcaattcaaaattgacgacggggaatacatttgtttttaaggtgcgaacacctaaaggaaaagtgcaagaactgaaaatactggatccaaaccgcgttaaaccactgataaccgataaaggggaggtgttctaccaattatctacggataatatttcaggaatagcgcaatcggtgacggttcccgctagagagattatccatgatagatttaattgtctctatcatcccttaatggggttaccgcctgtttatgcgtgtgcattatccgctgcacaagggacagcgatcatgaaaaatgccacacatctctttgtgaatgggggtaagcccagcggtgttatcgaagtgcctggcaaaatcagtgaagaggacgctcacacgctaaaaaaattatgggagacgaattatggtggtaaaaatgcgggtaaaacagcaatattaacagagaatgccaagtacaaaactctttcatttaacccagtcgattctcagttagttgaacagttgaaattgacggctgaaattgtctgttcggtgtttcatgttcctttgtataaagtcgggctaggagaggttccctcatacaataatgttgaagcattagatcagcaatactattcccaatgcttacagtctcatatcgaagctattgagatcttattggctcaaggtcttgatttaccgttgtctgaaaaaattgaatttgatttagacacattaatgcgaatggataccgcaacacgctttaaagctcacaatgaaggaattaaaggtgggtggttatcgccgaatgaagtgcgtaagaaggagaatttagcgcctgtcgagggcggagatacaccttatttgcaacaacaaaattatagtttggcggcattatcatggagagataaacaaaaaatgctgacatcctctgataaaagcgagttatttgtggagaccgtgagcgaagcatcggtgcaggacgaaaaacactattttgcggagtgtatcaagtga

SEQ ID NO: 297856 - DNA, 222 bp, Proteus mirabilis
atggctgtcattcagaaaattaatgtgggcgaaaaagccaatgatggcacaggcgatacgttgcgagacgctttcgtaaaagccaatcaaaactttgaagccttaaatactgctgtgcagaaagggggagctgatccgaacggtgacttaggaaaagagctttctaaggagcttgaggcactcacattacgtgtcgaatcgcttgaaaagacgaaagagtaa

SEQ ID NO: 297857 - DNA, 1944 bp, Proteus mirabilis
atggaaaatcaacgttcctacagtctattaacgattaaatcagtgaatgaaaaagacagagaaatcgtgggcatggcgacaacaccgtcaactgatgcttatggcgatattgtcgagccagaaggtggcgtatttacactaccgcttcccttgctatggcagcacaacatggaacaacctattggcgaagttatcgacgcgaaagtcacaccacatgggatcaaaattaaagcaaagatagcccaaatagccagtccaccgggattatctgcacgactcgaagaggcgtggcaatccatgaagtctgggctggtgaaagggctttctatcggatttaaaccgttggaatatgcttttttagatgagggagggatccgatttaccaaatgggtgtggacggaattatctgtcgtgacgatccccgccaataaggattgtcatcttcaaacccttaaatcgatgtttcaaccgccggctgcgtctggctcaaggcgagttgtccatttatcttctcaattatccgctggcgtttcagcaaaaaatgcatttaataaggaacatacgatgaatattgccgaacaaattaaatcattcgaagcgaaaagatcggccaatgatgcggcacgattagatatcatgaacaaagcagctgaagaaggtcgtactttggatgtggaagaatcagagcagtacgataatttaacctcggaaatcaaggcagtagatagtcatttagtgcgtttgcgtgaaatggaagcctcccaagccaaacaagctaagccgattgatgttgagcaaaactcatttcgtgaagcctctcaattgcgaggcgggattataaaagtagacgaaaaattagcgccaggcattgaatttgctcgttatgtgaaatgtttagccgcctcaaaaggtaacacaacacaggcattggaaattgcaaaatcacaatacccagagcaaccccgcatacagaatgtactcaaagcggcggtaaacgcagggacaacgaccgatccacaatgggcggggacattgacggactatcaacattttgcgggtgattttattgactttttacgccctaaaaccattattggtcaatttggtatcggggggatcccgtcattgtttcgtattccgtttaatgtgcgtatccctggacaaatcagcggaggaaaagggtattgggtggggcaaggtgatcccaaaccactgactaaatttgattttcaatctattcaacttggctttgcaaaagtcgcaaacattgccgtgctgacggatgaattagtgcgctttagcaaccccgcggcggatacccttgtacgtaatgccttggcggctgccatcattgaacgcattgatattgatttcatcgatcctaacaaagccgaagtcacaaacgtgtcacccgcttccattacgcatggtgtgaaagccatcccatcaacaggcaatcctgaagcggatgttgaggcagtgtttgaagcctttctgaaagccaatctttcgccgacaagtggtgtttggatcatgtcttccatgacagcattagccttatcaaaaatgaaaaatccattgggtcagaagatgtaccctgatttgagtttcctcggtggggctttccaaggcttacctgcgattgtgtcacagtatgcgggggaacagttaattttggttaacgcgcaagatgtgtatcttgccgatgatggtcaggtggtaattgatgcgagtcgtgaagcgtctttacaaatggaagatagcccaactaatagcagtaaaacggggaccggagcccaattggtgagcatgttccaaaccaacagtgtggctattcgtgcagagcgctttatcaattggcgcaaacgtcgcccagaagcagtggcctatgtgtcgggtgtcaactaccgcacagtcacagggggagataaaagcccaaagtga

SEQ ID NO: 297858 - DNA, 1662 bp, Proteus mirabilis
atgccatattggactaccgcttgccctgactgggaggagcgaataaagcatgggcgctcgatcattcctccaccgatatatcctgaacaggcagagcttgcgttaaatatctttaaacaattaaaaatagttgatgctccgggcagcccaacgtttggtgaagcttgtgctcaatggatatttgacttagtgtctgcgctatttggttcgtatgatacgcaaacgggacggcgatatattactgaagtcttcgtccttatcccaaagaaaaattcgaaatccacgttagcggcggggatcatgatgacggcgttactgttaaattggcgccaagccgcaagttataccatcattgcacctactgttgaggtcgcgacaaatgtctttaaccctgcaagggatatggtgaagtatgatgaagatttggatgacttgtgccaagtacagacacacattaggaccatcacgcatagaaatacggataccacactgaaagtattagccgctgatgctaatacgatctcaggtattaagtcagtaggaacgctgattgatgaactgtggttgtttggcaaacaagcgaatgcagacgatttgcttcgcgaagcgataggggggttggcttcccgaccagagggatttgtggtgtataccacgactcaatccaatgagcctccatcaggggtatttaagcaaaaattacagtatgcccgtgatgtgcgtgacggcaaaattcatgaccctaactttcttcctgtgatttttgaacatccacatgacatggtagaaagaggagagcacttgttagcggaaaacatggccatggtaaatcccaatttggggtattcggtggatgaagtttttttaatgcgagaattccgcaaagcaaaagagacaggagatgcctcttttcgcggttttatggcaaaacatgccaatgtggaagtggggctcgcattgcgttctgatcgttgggtgggcgcggacttttgggagccacaaacagatgacactttgacgcttgacgaaatccttcgtcgttcagaggtggttactgtcggtatcgatggtggcggattagatgatttgctcggtttatcgatagtggggcgatgtaaaaatacgcgtcaatggttgtcatggtctcatgcttgggggcattcatcggtgtttgagcgtcgaaaaagtgaagtggccaaattgctcgactttgaaaaagacggtgatttcaccctcgttgcacaaataggggatgacacgaaggaagtggctgatattgttgaacgaatttatcagacaaggttgatggataaaattggcattgacccttcagaaattgggggattacttgatgaaatcgtgcaaagaggcattgaacaagatgccattgtggggatttctcaagggtggcggctaggcggtgccatacaaaccacggaaagaaaactggctgaaaaagtgttatttcatgctaaacagcccttaatgaattggtgtgtgggtaatgcaagagttgaacctaaagggaatgccatactgattaccaagcaagccagtggtcgatcgaagatagatgcactgatggcgctgtttaatgcgatatcactgatggcattaaaccctgatcctccgcagaaacaatacaaatcttattttatttag

SEQ ID NO: 297859 - DNA, 600 bp, Proteus mirabilis
atgctaacagggcggaaaaagaaatttgcacaagccctgaaaaaagggatgacgcaacgagaagccgcgattgaagcgggatacagcgagaaaactgctcaggtaaaagggagtcagttagccaaagatccggatgtaacagcttatctaaggcgcagtattaatggtaatactaaagttaatactcatttaaatcaaaaagttaactctaaggttaattttgacgttaacactgaagttaattatcatttaaatcatgaggttagcaataaagttaaccctacaattaatcgaaaaattaactctagagttaactccaatgttaattctgacattaacgctgttatcacggataaagagaggtcgtcacaggtacacgactatcctgatcctctggccgtgattgccgaaatcatgatgaaaaataaagacatcgatcctaaattatcgcttgatgccgccgcaaaattggcaccttatctgtgcagtaagaaaggggactgtggcaaaaaagacgaaaagaggaaagcagcgaaaaaagccggtaatcgtttttcaccaatgcctcccccaaaattaatcatcaacaacaagggttaa

SEQ ID NO: 297860 - DNA, 297 bp, Proteus mirabilis
atgagtcgattaaaagtactaaaaccacgtattcccgtgttaaagacgaaagtggttaaaccattagatgttgtcacaaggcgagtgactggatcacaacggcaaaaacgaaggttattaaagtggcaagagaacccgcattgtgccgcatgtgggagcttgttagctttccctgatggatttgaattagaccatatcattcctctatttaaaggtggaaaagacaccattgaaaactgtcaggtactttgtattgaatgtcatcgaaagaaaacaaaagaagaattatctcgctaa

SEQ ID NO: 297861 - DNA, 462 bp, Proteus mirabilis
atgaaatacgggaaactctatgccgtcattgcgatggtaggcattattgtgggaggctattgggtgattaattggcaagctaacagaattaatctattagtagaaacaaacaaagaactaacggaggctctcgaagaacagaagtctattaatactgactatcaagcacgcataatgcgattaaatcagttggatattcaatatacgcaggagttggcgaatgctaagaatgaaattagtcgcttgcgtgatattagcgagcgtcatcctgagcgggtgtatatcaaagcagagtgcccaaaaagcaaaaccactccctccaccagcttggcttatgcaaccaccgcccgacctactgacaccgctctccgaaattattggttactcagagagcgaattgcagagtcagagcaaatgattttggggttacaggattatattagagtggagtgtgtgaactaa

SEQ ID NO: 297862 - DNA, 522 bp, Proteus mirabilis; identical to SEQ ID NO: 297230

SEQ ID NO: 297863 - DNA, 213 bp, Proteus mirabilis
atgtctaatacaatgactggtacagtaaaatggtttaacgatgataaaggttttggtttcatcactcctaaagatggaagtaaagatgtatttgtacattactctgcaattcagagtgatgacttcaaatctttgatggaaggccaagaagtttcatttaccatggaaaatggtatgaaaggcccagcagcaggcaacgtggtggctctctaa

SEQ ID NO: 297864 - DNA, 708 bp, Proteus mirabilis
atgatgcaaaaaataatggaagtttcagtattacccataatgaatcgtgaattaactatgtcgagtcgagagattgccagtttaacgggaagtaatcattccgatgttaagcgttctgccgataggctttttgttgctcaaattttaacccagccattggctgagttcccttttgaacataacggcaatcaatatactgaatatcgttttaataaaagagactctctggtgttggtagctcgattgtcacctcagttcacagcaaaaatagttgatcgctggcaggaattagaatcaaaaatgcagccagtcattcctcaaacattaccagaagcattgcgattagcagcagacttagcagaagaaaaacaaaaattggaaagtgaactggcgattgcgacacctaaggctcagtttgttgataattatgttttatcccatggttctatgacatttcgacaagtgtgtaaattactgcaggcgaaagaaaccgattttcgttgttttttaattgataagaaaattatgtatcgcttgaataatacgtttacgccttatcaaactcatgtcgatcttggtcgctttgagataaaaacgggaacgaaccaaaaaaataaccacgcttttgcacaatcaaggtttactactaaaggtgtgaagtggattgcagggttatgggctgaatataaagttgaggatgagatttaa

SEQ ID NO: 297865 - DNA, 264 bp, Proteus mirabilis
atgaataaaacaaccagtaccgattgtgtgagcggtttaaaaaaggcaatcgataagtcaggtgggcagactcatctagcgaagctaataacagacatatcaggtaagaccgtaaagcaacagcaagtatggaattggctaaatagaaataagcgaattccttcagataaagttttatttgttgaactggcaacaggcataccaagggatcaactgcgaccagatctttacccaaataaaactgacggtttaccaaaaccatag

SEQ ID NO: 297866 - DNA, 684 bp, Proteus mirabilis
atgtcgattgcagaaagactgttatctgccagattaaaagcgggtttaagtcaagcggaattagcggataaagtaggagttagtcagcagtctattcaaaaaattgaatcaggccaaacggcatttcctcgcaaaattgaagatattgcacatgcagtcggtgtctctgctcactggttacagtttggagcgccagacgaaaacggttctaaaacaaactttgaagtcaaagaatgggaagatattgggtatcataacagtgattttattggtattcctgtgttggacatagagttatctgcgggttctggagctaatgcagaattaattgaactggaagagtacacttatccttttcgcagagatgagttgagaaagcataacgttagtgcaaataatgctcgtatagtaaaaatcattgggaatagtctataccccgtattaaatagcggtgatttagtagccgtggatattagtaagagagatatacgtgatggtgatctttacgcaatacgtgatggagttttattgagggtgaaaatattagtttatcagccagatggcggaataattattaaaagctttaataaagatgagtacccagatgagcagctcagtaaaaacgagatggctgctcgagtacatattattggaagggttttttggtcatcgagaagctggtag

SEQ ID NO: 297867 - DNA, 888 bp, Proteus mirabilis
atgaacgctaaccctgcatttaactacaaaagaaatcgtgacaagttattcgctaatttaatatcaatcattgatggtattctttccgacggggagctatctgatacggaaattttatatgtaactacatggcttaatgagtcacatcaaatatctgataacccatttattcaactacttaaggacagaattactcgaattttagatgacgggattataaccaaagaagaaagattagatctagttcaaaccttaaaaaatgtacaacagtcaatcatggatatgcccagtgttgacttgtattcaaaagaatcagatgtaaatttgttaatcgggctttgcaaagggatagttgcagataaaaaactcgaagttgatgagataaattatctcgattggtggttatctaagaatggtcagttaaaaaaaaattatcctgggaaatatctttatgaactcattaagaaaataaaaaaagatggggtgatcaataaagacgaaagccaacttttatatcaagctttagttgacttttctggtacagatcttgaatacggtgttgtggacggtatgtcctctatattaccttgtgaccaattagatgtagtggaggtcaaaaattcatctttctgtttaacaggtagttttatatcagggaaaagagctactatagctgaaagaattaacagtgctggtggctcaattgttgatagagtgacacataatactcattttcttgtaattggagctatgtcttctcgagattggaggttttcaagttacggcagaaaaatagaaaaagctatccttgatcgtgataatggaagatctaatgtaaaaataataacagaagagctgttaattaaatcactaccagcttctcgatga

SEQ ID NO: 297868 - DNA, 204 bp, Proteus mirabilis
atgacaacagaacccgtaatcattgcgccagatggtttcactaacgaagatatcgcaaagtggatgaggggcaagttgcagtgcatagattatctccctgttttacacggtaagcgagaaagactaatgagcgatgtaaaaaagctagatgccgaaatagcagagtacatcagtaaaagcgctattcagatacaaagtaaatga

SEQ ID NO: 297869 - DNA, 468 bp, Proteus mirabilis
gtgaaccaccaggacccaatttttacaattactagctcttactatctaaacgaaatgcaaagtgttgtttcaggtaggatcgataaatttatatcaatcgcactatttatccttggtggttctgttatggcctctttctctaacatgttcatcataggggcgcttatttcagcgctatcagcaattcaaattttttgccaatttggtaaacaatctgacgcctctaatggcagagccaagcaatatttagcattaatgcatgatgcgtcaaagcttactgaagaagaattacaccaaaaaataggcagcctattacaaagtgacgtatttgtttttggctccttgtataatcccgcgtataaacgtgccgctattcacttaggattgccggacgatacgaaacttacaaggtttgagtctgtaatggcttggctcgcaggtgacctgcctatttccccacataattga

SEQ ID NO: 297870 - DNA, 1344 bp, Proteus mirabilis
atgaaatcagaaagtttagtgattaaaattgggggatctccacttgatacccctgaatttattgccctgaaaaccgaatttaataaattgagccaccctgctcgaccagaaataagttggacacttattgagtcactttgcttatccctatttaaaaatcatggtatcgacctacaaaacggtgcttactataccattgcaagattacaacagcatggtttaagcggttttactgaaggatgtgagttattagcaaatgttattgtgacttattgggatagcctgtggccggaaaagccaaatcaacgtacagaggtattaaactggtttaataccaaagccagcgctttattaagacaacaatcctatcaagcaaaagatctacgattaatctatcgttcagagcgcgcgttacagttaataatcgataaactggctaaaacaacttgggaaaaactgcctaaaattgaaaacttactgtggtttttccaaaacttagccaaacaaattgaaaagcaagaaaaacagacgcaacaagatagtgccgaacccgttagcgtaccgccattagtctgtattcaacaaccgtcgaaaacaacggacaaagcagcccccacttttgtgattgaaacgcctcaacccgcctcttctttcactgtagtagcaaaaaaaatgagtgcgacccgaggttttatatggggctgtgtgctcagttgcatactgtttttagccgttggatttggtgtacatctctatttaaaacaagagatgaatgcgattacttcaatacctgaaggtgcggctgccaaatggttgtttaaaccacagttaaatagctacgaatatcatttagcattattagaaaaacgttctcctctttctaatttacggctaattgatacgatgcaagaaaaagccaaaaacgcttggcctacagatgcagagcaaatttattttacacgtaattggcaaaatctttatcaaacgcgcttagagaatatgccaattaatgatagctggtctgaaaccgcgacattattacaacaactttctaataaaatagttcagcaagaacgaaatagaggcagttttacactctcttatctaaaaacggcaatttatgatattcaaaaacagcacaataaagttgagccaatcgaagaaaaactgcgacaactcgctgtacaaattgaaacagggcaacctatttctcctgcaactctcaataatattgataataaaattaatgggttattagctcgttattatgatttacaaaaacaagctgaacaacaaggtttaaaacccggctcatattcatcttttggattagatcatgagtga

SEQ ID NO: 297871 - DNA, 390 bp, Proteus mirabilis
atgtctaaatcggcaaaaggtacgacagaacggcatggacggaacgtaaaagctaaatctggtttaaaccgctcaatactggagcagggctggtatgaaatgcgccgtcagcttgagtacaagcagctctggcgaggtggtcaggtactggcaataccccctgcctacaccagtcagaagtgcgcttgctgtggtcatacagcaaaggaaaaccgccagtcacaaagtcaattcgagtgccttgaatgtggatatacagcgaatgctgatatcaacggggcacgtaacattttagcggcaggacatgccgtgcttgcctgtggagggagggtgcagtcagaccgcccgtcgaagcaggaacccgccgaggtgattcagacatcagtctga

SEQ ID NO: 297872 - DNA, 1353 bp, Proteus mirabilis
atgctttcaacaaaagacatgctagtccttggaatgatggtttttgctcttttccttggcgctggtaatattattttccctccaatggcaggtttccaatctggaaaccaatggtttagtacgtcattaggatttttggttacgggtgtcttactcccttttttaaccttagtcaccgtagctattcgtggacgtggtgaacgcctttctatcgacttgccatcatggtttgcggtgttattttggattgcactttacctgattgtcggttctacctttgcaatgcctcgggtcacgaacaccgcctatgagatgggatttttacctcttggtcttattgaaaaaaatactacgacccatctgactttcgcattaatatttaacctattaagtatgttctttatgcttaaacaaggtacgatgatcagtgccatcggtaaattcatgaccccagcgctcttaatactcctggttgtcgttggtattgctgtggtggctaaaccgctttcccctattgaagagcctaccggcctttatgcggtaaatggcttcttctccggtattattgacggttatcaaaccatggatgtgctatctgctatggcttttggcgggatcgtcgctcgtgcgttatataccaaagggatcaccaatcctaaacaaattggttttatcaccataaaagcggggatgatttcggttttactcttagccgccctttatttatgtttattctatttaggtgccacaagtcacgcagtatctgtttttgctgatccggcactaaatgccactaacggtggtcaaatcttctcacgctacgtagacgctttatttggctctgtcggtacttggttgatgggcgggattgttttattagccagtatgacaaccttagtcggggttactagtgctgcggcagactactttgcgacattccatcatcgtttaggctatcgcttctgggttgtagtatttacactgttaacgacgttagtctctacttttggtcttgataccttattacgtgtcactattcctgcattattaatgatttatccaacatcggtgacactagtcttactacaatttgttcgccataaactaaaatcaccgcgttttacttaccgctttacaatctgtgtcattgttttaatgagcctacttgacacattaaaacagttaaaatggctaaatggagatttattacaactatttagttacattccactgtctgagtatgggctaggttggttattaccgggtattattgcattcgcaatttcattactaattagtctcagttttaaagaaaccgacacagaaattgctacacctaatacagtaaaataa

SEQ ID NO: 297873 - DNA, 1095 bp, Proteus mirabilis; identical to SEQ ID NO: 296340

SEQ ID NO: 297874 - DNA, 291 bp, Proteus mirabilis
atgcgccgtcagcttgagtacaagcagctctggcgaggtggtcaggtactggcaataccccctgcctacaccagtcagaagtgcgcttactgtggtcatacagcaaaggaaaaccgccagtcacaaagtcaattcgagtgccttgaatgtggatatacagcgaatgctgatatcaacggggcacgtaacattttagcggcaggacatgccgtgcttgcctgtggagggagggtgcagtcagaccgcccgtcgaatcaggaacccgccgaggtgattcagacatcagtctga

SEQ ID NO: 297875 - DNA, 492 bp, Proteus mirabilis
atgagtaataagtatttaattgataataaggtcattcttgatatcgatagaatgacactatcacacgatcatgaaagtattaaaatttctgaatctgagtgtaatttgttatgtgcttttcatgagggactctttaaaaaagaggatttaattgattgggtatggggacgtaaaggtgtcgttgtttctaatgccagttattataaattacttaatcaattacgaggttcatttgaaaaaataggtctttcggcatccgctattttaactcgccctaaagtaggtgtgacgctttctgtcactattgaaaaacttcctgatgaaattgaacccccttattcaacagaagctccgttgaatgatacacatgaaccaattatagaactacctgtggtaacaaaactcatacctcggcgagtttctctgcgtaaagaatggtttttttttagtttgtgctatcctgttccttgtgagcttactatttctatttaa

SEQ ID NO: 297876 - DNA, 273 bp, Proteus mirabilis
gtgagcttactatttctatttaacaagcagaataccgactatttttctccacttggaacctacaatggttatcaattttatggtgtcaccaaagataatcgtactttagaaaatgccgtagaagcttatacggaactcagtagccaagtgtataagcaaaatggtaattttatttattatattcgtgttcctaatacgaatatttttgttcagtgtcttaatcagctgaatgttgaggagcccaaatgcataactataaaagaaatatactga

SEQ ID NO: 297877 - DNA, 483 bp, Proteus mirabilis
atgcataactataaaagaaatatactgagaggaagcacattgcttattttagcggtggctattgtgttactgattttattaatacaacgccaacgccaacctaatcctgattcctttttatgcacagccaaaacagtaacgaatattcaacctaagaattttaatgtaagtggtagtatcgttcttgattttaaaaagaaaagaatcactttgcagtatgacatcatcacaaatgaacaggtgaaaaaagtactctatcgagatatctacattaataacctacatactccacaaccgggtgtttatactttcgatgttgactcagtgaaaatttttgccactgatacagcgggcgattttttatctcattttaggctactacactcaggtgcagcgaatgaaatacggatcacaaaagtagggaataatacttatttatattcattaaataagcaaatttataatgtttgtactgcacaatag

SEQ ID NO: 297878 - DNA, 606 bp, Proteus mirabilis
atgagcctaaaaacaatacgtctatatggtgttcttggcgcaaagtttgggcgtgaacacaaattagatatagattcacctcgcgaagcaattaaggcgctctccgtgctttatgatgggtttgagccgtttcttgctaatgcacacctgaaagggctggagtttgccgtatttaaaggtaagcgcaacattgctgaagatgaattatatcttgataccacagaagagatccgcatagcgccagtgataaaaggtagcaagcgtggtgggtttttccagactattttaggcgtagccatgattggtgctgccatgatgttaggtcctgcaggttgggctgcattcggtgcgggtggttttgctggtggtgctttagctatgggcggggcagcaatggcgctaggtggcgtagtgcaaatgctgtcacctcagccgcgtggcttatctgtgcgtcaagacgccgacaataaaccttcatacgcctttggtggtgttgtaaacacaaccgcacaaggaaatccagttcctttactttatggactagataggcgagaagtgggtggagcgataatctctgcagggatttacacagaagatcagcaataa

SEQ ID NO: 297879 - DNA, 711 bp, Proteus mirabilis
atgatcacaaaaaaattaagggaatcgatatttcaacatgtaaaagctgaatatccaaaagaagcttgcggagttatctgtcagaaaagtcgagttaaaaaatactttccttgtagcaatctttcagatagtccaacagagcattttgagctttctccagaggattacgcccttgctgaggactggggagagccaatagcaattgtgcacagccattgtggagatggtgtaacgactcaacctagcgaaatagataaactacagtgtgatgcgacaggattaccttgggtgatcgcatcatgcccagagggtgatattcgaattatttaccctcgaggtgaacgagaattagaaggacggccttttgtgttgggctatgctgattgctggtcgttaattatggactactaccaccaaaaacacggtattgagttacataactacagcgttgatcggtattggtgggaagaaggcgaaaacttgtatatggataattaccaaaaagcaggttttgttgatattgctggtgagccgaaagagggtgacatgatcatcatgcaagtgcaagccgatgtacctaatcacgctggtgtgattatgaatggcatgttacttcaccatctttatggtcaactcagcaggttggttccttacagtgattattggcgagatagaaccgtaaaaattgtgcggaggaaagagtttgtatga

SEQ ID NO: 297880 - DNA, 744 bp, Proteus mirabilis
atgaatatcacagcagatgtacaaaaattagagccgggtaataaggttcaattaattgaggtggatggcagtgagtttgatgggcccattcttcgcttccatgcttacaatctacctcatacaccagaagagatagagcaatctaatggtgatatcaagccaaaaccaatttggtggcaaggcaatgaatacggggcatggccttatgaagttgaaggaatggcaaaaaatagtgatggtagtccagcgagaccatctctaaaggttgccaatatagatggcttaatttcatctctatgtcttcagtttgacgacatggtgcaagccaaagtgactatttatgagacatttgctcactatcttgatgctaaaaactttcctgagggaaattcaacagctaatccagacgaatgctttaaacaagtttattacatcgatcgtaaaactaatgaggtggctggcgaatccgtagagttcgagctgtctagcccgtttgatttgcagggagtaatgatacccgttcgacaaattcataacctttgttattggtgcatgaaaggcgattatcgtagtggtaatgggtgctcatattcagggagtaaatattttgatgagagaggaaaccctgttgatgatcctgcgctagatagttgtggtggacttattagtgattgcaaaaaacgctttggtgagaatgagccattagatttcggagggtttcctgctgcggggttaacgagatga

SEQ ID NO: 297881 - DNA, 342 bp, Proteus mirabilis
atggaagagtttaaatggcgaacacaaatacaagattcgccaagcggtgagttcaagcatcgtattaaagaagttgaatttggagatggttacaaacaagttgctggtgatggtattaatccagaatctcaaacgtggccattctcttatatgggattgaaagatgaggtgatgcttatttttaaattcattcggcaacacacagtaaaatcatttatttggacacctccatttggtgaaaaagggctttatcgagttaaagctgattcaatatcgatgatccccatatctggtggagtaatgaaattgtcagctacgtttgaacaggcatttagcgcatga

SEQ ID NO: 297882 - DNA, 201 bp, Proteus mirabilis
atgttagttagtgaaatggctaaagacatagagacccttcaaacacgtactcttgctttagagtatataattcaagtaatgattaggaatatgtctgatattgaaaaagaaaaacttattagtgaattaaataaagtatcgcatgatagtcctgtaactatcgaggcgtttggtatcattcagtcacatttacataattag

SEQ ID NO: 297883 - DNA, 291 bp, Proteus mirabilis
atgaaaatcaaagtagagttcccattgttatcaaacaaattttcaggagtggaaattacaggggatgtaaaaagatatggcattggggccataaaaataagtgaaaaacctatattaacgtcagaaattacagtaatggagatagtgggaaataataccccagatgaagaaccaaagttacaatttaagtacacagaggattataacccaaatgaaacatttgcttcatttatggggagagcggaaaaatatgcaagaaccatgatagatcgcataaaggcggcacagtaa

SEQ ID NO: 297884 - DNA, 2931 bp, Proteus mirabilis
atggcagatatagcaacaatatcattaaaggctgatacgtcagatctggagcgtggcacacaaaagttaaaggaattcggcgatacggcagaaaaggtaagcggttcttcgcgaaatttaaatgaccagtttaatagaggggttgatcatcaaaagagagcagccgacgcgataaagaggcaaaagaaagaacttgatgacttattaaattcaataaatccaaccaataaagcatttgatgcgcttgataaagctactcaaaaattaatagaagcaaataaaaaagggatattaccaaaggatcagtttgcagactataacgccatacttgagcagactagggataaattaacacgtgttagcatgtctcttacagctgaagggcaggcgctgttagctcaagaggcggcaacaaatagagccaagcgagctgctgatgattttttaaattcactgaaaaatcaaactgaaatcataggaaaaacgaggacagagattttagagttaaaagcggctcaacttggcgtgtcgcaacaagctgcgccgatgatcaacaggctaaaagagcaagaaaaagcctttatgaatggctcaatcaccattgaccaatatcgaaacgctatgcggcaattgccagcccaaatgacagatattgttacgtcattagcatcaggaatgccagtctggatggtgatgatacaacaaggtggacagataaaggactcatttggtggtattggaaactcgttgaaggcgcttgcatcgataattactccaacaaagattgctattgcaacagcaacaactgcatcactagccctggcttactctgcttataaaggatctcaagaatttgctgagtttaataagcaattgataatgacgggacgttacgctggcaaaacagcctatgaattaaatcaattatctaaaactttagttgggaactggattactcagggtgacatggcctcagctctaactaaagtggtgggtagtgggcgttttcaaggagaccagattttgttggtggcaagggctgcagcacaaatggagcaatccaccggaaaatcaatagatgaaacaataaaccaatttaagaggctaaaggatgatcctgtaaatgctattttagaattagataaaacattgcatttgttgactgcgtctgaatacgagcacattaagtcattagaaatagcaggaaaaacacaagaagcttctgagttttcaattaaaaaactgtcagaggaaactgatagaagaactagatctatgaatcaaaatataggttcattagagagagcatggaatgatgttgcaaccgcaataaagaatgcaggaaatgctttaaaaaatattggtaaacctctttccgatgcggaggcgttagctgagataaacgacagaataaaagaatgggaaaatgctggattttggcatggaaccaaagaacaaagagaaaatatgattcgcaacttaaaggagcaacaaaagattttaagtttcgtcgtatcttctcatgaaggttatgaaaaagcacaaaacaaatccaaggaggcggatgaaaaaagaaaagaatcaattagagaatataataaattattagaagatactgcaactaacgctcaaaaaagaacagcggccctaaataagctatgggagcaagttagaagagaccctgaattttggactgaagataaaaggaagttagcagtacaaaatataaataataaatttaaagatagaacatctaaaaccccaacctaccgaccagattatggtactagagtagacgaatcagcaaatcaagccctactatccctgcaagcacaattgaaggtgctaaaagagcataaaacagtcagtgatgtgattagctctgagcgtaaaaagctgtgggatatggaggcgaaaatatcaatccttgaggaggctcagaaaacaagacagttaaccaaggacgaaaaggcgttgcttgctaaaaaggactacattcttgcttctcaagaagcattggccatagctggtgatgatgttgagcttcaaaagcaaaaaaatagagagctagaccaacagaacaaatggatggacaaccttaatgcaaaaataaaagcattgagggaaggagcagggctatctagccgattgcaacaaagagaaagcgcattaaatcaagctgacactcctgaaaaaaaggacaaattaaaggaatggtacgctgaagaagacgctattcgtgctaactgggagttaggcgttaagaaaggctttgctgaattccaagatcaggcaacaaacgtttacggtaacgtagctcaaattagtcaatcagcatttcagggcatgagtaacagtctctctgattttgtattgacgggcaaagctaattttgctgacttcactcgctcattcttagaaatgaccaccaagatgttaatgcagatggctatgctaaatgctatgaaagcggcatttggtggtagtgcggtaggtaatttctttggatttgcaagtggtggttatacaggcgatggtggaaaacatgatccagcgggtgtagtacataaaggcgagttcgtctttaccaaggaagcaacgcaacgattaggtattgccaacctttatcgactaatggatgcaggaaagcgaggttatgcttcaggtggtcatgtcggtggttcagcgccaatgtcggttacacagccaacagcatttatcgctcgcaatcctcaaattgctagtggtggaaacgtacagattaatttaggagatattaatattgaaaatggacaacagcaacagccgtcaagtaatcaagccaatgcttcatcattaaagcgtgaattccagcaaatggtggaaagtggggttaacaatttacttagaaacccagcatctgcattatcaagaacaatcaaaggcaattaa

SEQ ID NO: 297885 - DNA, 822 bp, Proteus mirabilis
atgaaaggtttcggatgggtattgcttgttataggtattttggcagcatttgccgcttttaacatggatgtcagtgtggcaactagctatggaggtagggtaaataatttcgggctgatggcgcaaaggcagaattatattctaattagctgttttgttattttttgcgggctaatgatggtcatatttggtggtagaagaacaattgagtcaggccaagttaaatgtccattctgtgcggaattcataagtaacgaagctattaagtgtaagcattgtggtagcgatttatcagaacataaaagattacagaaagaaaaagagactaacttaaaaataaaattcaatgccattaattatgatcaaacagaactgtacgatacttcatccggaaaagctgttctaaattatgaaaaattggctaaacttgttcagcggattaaatttgaggatgaagatatttccggtgaagcactgctagctagacagaagtttaatattgaaacaattcagtcacgtctacctaaagaaataaaaaaagagtttagagacaaagcgagtcaattaatattagattcatttataaaatcagacaaattaggggaattacattatagatttatttccatagataatggaaattatcgaataaataaggatgaaattaagaagtttgctgaacatttaatttctaagttgccttatggtcacgatgtattcactgattttaacgatgagatatctaaggcaatgaaatctatacctagcgatgttaggggagattttatgagcaatctgcatcattttgtttatggtaaataa

SEQ ID NO: 297886 - DNA, 234 bp, Proteus mirabilis
atgagacaactattattaattattgttattttaatagcaggatttttgatttatggcgcaattatgtcatcttcaccagaaagcaaagaaaaatcaaaagaccgaaatgcaataagttattgttggaaggagtatgataaaaaatctctttctgacgaacaaaaacgatttattgctagttcatgtgaaaagatggaatctgattttcgctctcgatatggcgtgaatccttag

SEQ ID NO: 297887 - DNA, 393 bp, Proteus mirabilis
atgaataatcaagccattgactctaagttaagtagaaataggttaagaatagtaaagcctaatgaaagggttgaggatttttgtactactatctatggtggcagtggtggaggtggagatatggaagctagaattgcaaaactagaagcaaatgtagaaagcattcaggccacattaactgatattaaatcagacatgaaaacgtctaagggtgatataagcaccttaaaatctgacactgcggtaattaagtctaattatgccacaaagcaagatattgaaggtgtaaaaacagaagttcaaaaggcaatatcaacacaaactaaatggcttatggctactatatttattgccttaggtgcgggaattaccatagctaaattacttttctaa

SEQ ID NO: 297888 - DNA, 402 bp, Proteus mirabilis
atgaatacagaaagaatagcttttttacacccatataatcctagtgatgatgagtctccgttactgtcttttgattgtgacgaaatacctgttgtgcttgatttccatttcaaggtgttcatgttagaccttaaggatgatgagccaatatctcttcaaaataggttgtttaggattgatggtgaaaaaataactccaatttgtgatccgaaatcgatattaattaaggtaaaggatacacaagggaagcctaatgaagtaatggcatccataaaactcacctttgaaaaatgtaaatttatagaagaaggaacctactttattgagtcatcatttataaaaaatgcagagatgataaacagcaatagagcttatttcaaagtgagtaaaacaaatgaataa

SEQ ID NO: 297889 - DNA, 390 bp, Proteus mirabilis
atgattaaaaataactctattgcaaaaagactaactgaactaagggcgcaaaaaggcttgtcacaaagtgagcttgccgaattgtcaggtgtggcaccggctcaaatatctagatatgaatcaggtattaatgtgccaagagcccacattattgccaaattagcgaaagctcttggtgttcagtattcatttctagagaacggattttctatggatggtgagaatcttttaacgcaaatgtccatgaataaagacaatactgcaacaatatcacttgaactggataatgagaccctagagattgctaaaaaatcggcagaaatcagaggaatatcattagaagattatttgaagtggcttctagtgtatgggataacaggccctaaataa

SEQ ID NO: 297890 - DNA, 837 bp, Proteus mirabilis
atgaatactatatcaactatcaatgtacctttccacggtaacaatttatatgttgtgaattataaaggtcagccatatgtaccgatgaaacctatcgtcgaaggtatgggattaacttggcaatctcaatttgagaagataaaacaacgatttaaatcaaccatcacggaaatcgtgatagttgccgcagacggcaaggagcgcaatatgatttgcctagctctccgtaaacttgcaggctggcttcacactatcagccctaacaaggtaaaaccagagatccgcgataaagtaatcaagtatcaagaagagtgtgacgacgtactttatgaatattggactactggtgaagttaagaaaaaacacaaatcaactgttcaagaacgcaacccattaaagaatgctgttaatctactggttagtaagaaaggcattatgtacccagaagcctattctcttgttcaccagaaatttaatgttagtagcattgaagagctaacagcagatcagatacccgatgcggttgagtatattcacaagttcgttcttgagggtgaatacattcctaaacaggaagaaaatatactttttgagccaaatcaaaactcaatcactgtaaccatacccaaagagggaagatggttggtttcttataaaaatgaaaagcaacaagtagttagcgttgatggtcataacgttgtcagtgttgaatacattcaaaaattacaacgtgactctaatgcgcttattgagttactgcaaaacttccgtctacgcacccaagttatgcaaggtgagaaaagcggagatattttaaacactccgttaattgcataa

SEQ ID NO: 297891 - DNA, 963 bp, Proteus mirabilis
atgtcaaataataaagaagatgattcaaaaaaagaagtaaaaggtaaagctaaggggggtattgctagatctaggtcactaacagcgtcgcagcgttcagcgcaagctaaatctggggcaattgctaggtggggatataaagccacacatatgggaaattttaaagatttgtttggtattgatgctgaatgttatgttctgaatgatgataagaaaactccagtggtaacaaagacaggtcttgccgagcttctaggccttggtcatcacgctagagatgtagatcaggttttgtcgtcaaagtatatgagtgatttccgtgatctggaattaatggaaaaaatgaaaaatccctttaaatttcaattcacttcgaagtctaaaacagtgcatcaagctcatggttatgacatatctgtaatagttgatattggtaaggccttgatagaagctagggaggccggatctctcccgacagctaggttgggagctgcaaatgcatctcaaaagttgattaatgcatcagcaaaatcaggaatcacaggcgttgcttatgctttggctggatacagaccagaagttcaggaagtaattgacgcattcaaagcctttgttagggaggaagctaggcagtatgagaaagagttccctgatgaactatatgaggcatggtacaaaatatatcaattaaacaggccagagagaggaagaccttttttattcagtaagctaacaaatgaacaaatttatatacccctggcaaaaagtaacggaaaaatccttgatttagccagaaagaataaagatgaaaatgggaaaaaaggggataaaattcatcagtttttagctgaagttggggtgaaagctctaaaacaacagattggtaaagttcttgctgtgtctgagttatttgatgataaagagtcttatgaggcggctttaatgaaagtaaataaagcataa

SEQ ID NO: 297892 - DNA, 276 bp, Proteus mirabilis
atgagttcaaaagaatcggctgagttcgagcgcgcttttggctttccgcctgatattgatgatgttgaggtgtggcctgatgtttgggattcgtatcaagtattttcagctatgaatacacagtggcgtgtaggcatgaatggtatcacaggcttggattacaacccattaaaccaaataatggacttactcaacatcaaagatagagcgaccgtttttagcgatctacgcattatggaagctaaggcgttagatgtgatgcataagagatcgtaa

SEQ ID NO: 297893 - DNA, 306 bp, Proteus mirabilis
atgcctaaatttacactcgtcccaaatccaaccttcaaagctaacgttaaaattcctgttgccggcaaagaaaagccagaagtagttacattcacatttaaacatcactcagtaagtgagcttgatggaatgcgagaaaaaccgatttctgagttctttgagcagattattgctgactgggcgatcgaagagccatataacaaagaaaatttaaacatattgttagataactacccttcagcctctcgtgctatttcatcaacgtattacaacgagctactaggtaaccgcgaaaaaaactcctaa

SEQ ID NO: 297894 - DNA, 657 bp, Proteus mirabilis
atggcctataacattcctaatgggtcgcgtgtttacgtcgcaagtaaatacgatgacgaaattaaaattaccgaggcaactaatgccgaagaagccgtactaacagttgatgatgtgggtgacattgctaaaggcgatattgttcatgttacatctggctggaaaaaagcttcgggtgctttccgtgttgcaagtgtcgctgaatctaaaatcaccttagaaggtgtcgatacaagtgataaaaatgtgtttcctgctggtggcggtacaggaacattaaagaaagtattgtcatgggaagtcatgccacaggtaatgacactttctacagaaggtggggaacagcaaactcaagaggttcaatttcttgaagatgagcaggcagaaactatcgatacctataaaaatggtgttgtacaggtttatacctttgctcacgatgctaagctgcctatccgtaaattgctaacaaaattggacgacagtaagcaagttactgcaatccgattcttcaataaacgcgcagaagaagatcgctattacacagcttcaatttcattccagcgtgtgccaaacactgctatcaacgaagttgaaaacgtaacagcgcgattctcacttaaatctgaaatgcagatttataccaacgcatcttaa

SEQ ID NO: 297895 - DNA, 402 bp, Proteus mirabilis
atgaatcagtcgacaattaatactgaaatacgaaagctggtggcgagcattggcaaggatttaaatcttaaaatcgcatggcccaatcttccttttaatgatattaacgatccctatcttcaactccatgtcatgccagcagaaacggataacatcgggttatctctggatatgcctgtttatcgtggtgttatccaaattaacgtagttgggaaagtagggggtggggacgctaagatatcaactattgctgatgacgttaaaaacagattagaaaatggattaacattaggggagggtatctacattaacggagagcctagccagttccctccaatttcagatgaaacaaattataccattcctattcgtgcatcctatcgatgtaatgcaatccgataa

SEQ ID NO: 297896 - DNA, 582 bp, Proteus mirabilis
atgtcagatcagttcatgaagtcgattaatatctttatcgacaaatctaacgcaaatattgaaacggttgtcaaaaatacagggtttaaaatattagcgaagcttgttgatatgtcacctgttggaaatcctgaattatgggaagttaatagggttgcctcaaactacaataaagcagtttttgaacataatgaatatctaaaacaagatcctaataatttaacaccaaagcgacgtcaattaaaaaagcgtgttcgtgttaatgactctatggatatttatgttcctcctggttatacaggggggcggtttagaggtaattggcaggtgtcatttgatgccccagcggaaggcgagacggggcgcatagataagtcaggcaatatgacaaaggcgttaggcaacgttgttattgaacaatttaaggtaggaatgaaagctatctatttcacaaacaatgtgccttatgcttaccgccttgaaatggggcattcgaaacaagcacctaacggtatggttgctgtgactgctgaggaatttagtcagtttttcaactctgccgtatcggaaactaaatcatga

SEQ ID NO: 297897 - DNA, 351 bp, Proteus mirabilis
atgaacatttatcaacgtgggcagagtacagcattaaggatgttgaaaaaatatggcgtttcctatcaggctaagcgtgatggtaagcattgggttgatgatgaggggcaggaacactttgagccagaaacgttattttctgttgtcggggtaaaaacgcaatataaaccttacgaaatcgatggcacgcttattctctctacggatattaaaatgatacttcctccagatattgatattcagaaaggggataaggtgcttgtcgatggcgtttggttgcgcgttcatgaaccgaaccctgttaaatccgctgatattattatctgctatcagtctcaactgagggcgtga

SEQ ID NO: 297898 - DNA, 480 bp, Proteus mirabilis
atgattgatcctgataagaactctccaatatttaatagctacgcaagtgtggatgatttgaagaaatacgctgaggatagaaatatcactttggcagatagtggattagaggcattactaattacggcgatggattatcttgaatcgcaaaaatggttaggtaaacgaactaacctaaatcaacctttatctttccctcgctcagggctatctcgcgacggtgttgccatcccaagcgatcagataccaaagcaattaatccaagctcaatgccgtttagcgattgaatcagtagaaaatgacctacagcccacgttaggcgctgaaatcacctcagagcgaattgagggcgctattactgtgcaatatgccgaaggcactaatactggcgcaccaaactttccttggttaaaaggtttattgtctggcttgattgatgtctcggatggatttgccattaatacatttgcaatgaggtag

SEQ ID NO: 297899 - DNA, 954 bp, Proteus mirabilis
atggctacgatgactaataatgatttagtaatttataacgatttagcacaaactgcgtttttagaacgccgtcaagataatttagcagtatttaatcaggcatcaaacggcgcaattgtgctggataacctttttattgagggggacttccgtaagcgtgcattttatcagatcggcggttcgattgagcatcgtgatgtaaactccacagcatctgtagagaacaaaaaaatcggcgcgggcgaatctgttgatgtaaaagcaccttggaaatatggtccttatgcaacgacagaagaagcatttaaacgccgtggccgtgatgtatcggagttctctgagttagtgggtaccgatgcggcagatgcttcactagagggttatatcaaatactctttagctgctttaggtgccgctattggcaataacaaagaaatggtggtgactgcggatattgcgacagatggcaagaaaacactgaccaaaggtttacgcagatatggtgataagttcaaccgcgtaaatctgtttgttatgcactcaaccacctacttcgatattgttgatcaggccattgacaacaaagtgtatgaagaagcgggtgtggttatctacggtggacagccaggcacattaggtaagcctgtgctggtaacggatacagcgccagtagatgccatctttggtttagtgccgggtgctgtgactatcactgaatcccaagagccgactttccgatcttatgaaatcaatgacaaggagaacttggaagttggttatcgtggtgaaggcgtggttaacgttggcgttctgggctatagctgggatgaatcaaaaggaaaaaaccctgatttaacacagttaggcaccgcaggtaactggaagaagcatttcactagcaacaaattaaccgctggcgtcatgattaaactgactgccgaagagggaaagtaa

SEQ ID NO: 297900 - DNA, 762 bp, Proteus mirabilis
atgttatttatgaatatcgaacgcaaatattattcacaggctgatgatggttcgcaaggtggaggtggtggaacaccggaaatcactccagaaattcaagctattatcgaccagcaggtttcagggctaaaggctaaaaacagtgagttgctaggcaagctcaaagagcaaggcgataacctgaaacgttttgaaggcattgacccagacactgtgaagggcatgcttaaacgctttgagaatgacgaagaagccaagctcattgctgatggcaagattgacgaggttctcaataagcgcactgagcgtttgcgtggtgatttcgacaagaagttaaaagaagcaagctctaaagctgaaaaggcagaggcgtttgcaaataaattccgtgctcgtgtgttaggcgatgaaattcgttttgcagcagggaaagcgggtgcattaaccagcgctcaagaagatttaattttacgtgccaaaggcatttttcagatcaacgatgaaggtcaggccgtagccgttgatgaagatggcaatccaatcatgggcaaagatggtcgcacgccattatcacctattgaatggattgaatccctaaaagaaagtgctcctcacttattccccgcagcctctggtacagatgcagggaaacataaacaaggtggtgcacattttaaacgttctcaaatgtccgccagtgacaaggctgattatattcgccgatacgggcgtgacgcatatttaaaacttccaaaagagtaa

SEQ ID NO: 297901 - DNA, 1122 bp, Proteus mirabilis
atgagatcagtgaatgagcggttaatggatgaattgattgctcactccctgttttctggtcgctattctacaggggtggctagacgcatgataaaggcacttaatgagtttgatgctgaattaactgcttcacttatagtgtctttagatgatacctccatcgatgttaatagtttcactgcaaggcgattggagtcgttgctgtccagcgttagaagtattaataagcgtgcagttgatagtgctttttcattgttaacagaagaaatgagagcgcatgcattatatgaggctggctactacccatcactgtttgatgctctactacctgatgttgttctacgcaaatatccactaatgagcattacagaggaaatgctattttcctcagtcatgtctcgcccatttcaagggaaattactttctgaatgggctgatggattagaatcagatcgcatgacacgcataaataacgctgttcggaatggttatttaaatggtgatagtgcggtagaaatcggacgtaaaatcagaggacatgcaaaccaaggttataaggatggcgtattgcaactaagccgagctaatgcgacgacaatagctaaaacggccattagccatttacaagcaacagcgcgagatcagtttgctgatgccaataaagacattcttgattgtaaacaatggttatctaccctcgataataaaacatctcacgattgcattattcgggataggttgagatacacgctggaaggtaagcctattggtcataaagttccttatctacaaggccccggaaaaatccacttcaattgccgctcaacagaaacgctggttaccaaatcgtggcgtgaattaggtatcgatttagatgagatggacgcaggaactcgtgcctcaatggacgggcaggtgccagcagataccaattttcttgattggatacaacggcaacctgaatggcgacagcgtcaagttttcggagaaacgcgattcagactaatgaaagagggcggtatgcatccttctgagttttataccgataagggagagtttatttcactagagcgacttagagagatagatgggcatgcatttagagaggctggatatagctaa

SEQ ID NO: 297902 - DNA, 1371 bp, Proteus mirabilis
atgagtacaacaaatgtagatttcactcgaccggagtataaaacggctgctcctcagtgggagttagtgcgctctgtttgtcgaggtggtgaagatataaaaagctatcttcctgagcttgaagagcaagatagtgagcgtaaaaagaagcgcaataaagattatcaagaccgtgcggtgttctatccaataacgggcaatactcgcaacggcatgatagggatggcatttaaaaaagatcccttagttgctgtcgtcgaaaagctgtcgtgtttaaaagacgatgctgacggggcgggttcaagtatctatcaattggctcagtcttcacttgagtcagtattggaagtcggtcggcatggtctgtatgttgattacaacagtgattcgaaactcccgtacatattccaatatcgtgctgaagacatcattaactggcgtacagctcgtattaatgggcgcacgatgttaacgctggtggtattgcgtgaaacggtggaagaagaggacgggtttggttttaaggatgaggttcaataccgtgtattgtcgatagaagaaggtaagtttgtctgtcgtgtctatcgcaagcccagtggaagtagcgtttttgaaatttcttctgagtatatacctgcgcgtgctggtaacggtgtgtggaatgaaattccatttacatttattggtgcacagaataatgatcacactattgatgaagccccacttctaggattggcaaaaatcaacctagggcattatcgaaactctgctgattatgaagattctgttttcttctgtgggcaaatacaaccttatctaggtgggctaggaacagaatggcgtgactatctagaaaagaaaggcgttatggttggttctcgctcgccaattatgttgccagaaaaaggtttctttggttacgctcaggctcaacctaacatgctggcaaaagaagcaatggacagtaaacgcgattatatggttgcgctcggtgctcaattggtttctgctgatagcaaagttaaaacggttattcagtctgtcggtgaacagaacgcacaaacctctatcctgagcatctgttgctctaatgtttccgatgcatgcagtaaatcgctaatatggtgtgctgaatacttaggtttagatactgcaggcatttcgtttgagattaacaaagacctcgttaatcacattgccgatagttcgatgatccgtgaaatcgtcgcagcatggcaatctggcgcaacgcgtaaatctgacttagtgagaagtttgcagaaatatgatgttatcgaccccgctgatgatgttgatgtggtggtggatgagcttaataatcaagagccgacaatggtaggtgagacatga

SEQ ID NO: 297903 - DNA, 1488 bp, Proteus mirabilis
atgaagccagaacatcttgcattattgagagataagctctggcgattaaatcacctctactggataaccaataaagaaggcaagccagttcgatttaaaatgacgcctgagcaactcgaatactttgaagggatgcacacgcgaaacattatccttaaagcccgtcagcttggcttcactactgaggtctgcattatccagctagacgcagcgttatttgaggcggctaaatgtgcattgatagcccacacacttaacgatgctaagcgactatttagggaaaaaataaagtatgcctatgacaagctacctgatgaaatcaaagcggctaacccagcgagtaatgatgcggctggtgagttggtgtttagcaaaggcggctcgctctatatcagcacgtcatttcgtggcggtacgctccgttatttgcacgtttctgagttcggtaagatatgtgctaagtatccagagaaagcccgtgagattgtcactggcgcatttgaggcggtatcaagcgattgttttacgacgattgaaagcacagcggagggtcgagcaggttatttcttcgattattgccagtctgctgagaaagcgcaaattcagaataagactctctctaacctagactggaagttctttttcttctcatggtggaagaatccagagtatgccattaaccctgttgagccattaccccagcggttagttgattactttgatgagatagccagcaaacatggtgttcaattaaacgagcgccagaaagcatggtattacgccaaagagaaaacgcttggcgacgatatgaaacgggaatacccgtcaataccgtctgaggcattccaacaatcggttgaaggcgcttactacgctaagcaattccgctacctgtacgaaaataaacgcattggcacacttcctgataactcacacttaccggttcacacgtactgggatattggcgtcggtgattcaacatcaatttggtttatccgtgaagtgggcgaagagttccatgtcattgatcactactcaaacagtggtgaaggtctacggcactacatgaaagtgttaaaagacaaaggctacacatatgcaagtcacaatggccctcatgatatcgataaccgtgagtttggttctgatgcgaaatcacgacgtgaattagcgcgtgaagggtacgaaatagacggacaaatttactcaatccgatttgaagtggtgccaaagctttcagtcgatgaaggtatcgaggcagtacgtgaaattctgccactttgcgtgttcgatgaacacaaatgcagtgaaggcattgctcatctagaagcttatcgcaaagagtgggatgacaagcggggctgttggaaagataaaccgcttcacgattacacgtcacatgatgctgatggatttagatattttgcggtgagcagaagaaataccaagcgcccagcattcgaaattaacctaggaacaaccttctga

SEQ ID NO: 297904 - DNA, 165 bp, Proteus mirabilis
atgtctaaaacaaccgatcagctgatcaacaatcttaagcataacttcaagttactggaaaccatttatcaatcaggcttgtcaatttactacaatactgacgtaatccatgatgctattgatgcaatcattgatgagttaaggcgacgaggagttgctatctaa

SEQ ID NO: 297905 - DNA, 429 bp, Proteus mirabilis
atgagacagtatctttttgctttacttataccgttcactgtgtgcgctaatgcaacagatgaaaccctgatatttgaaatggagtgctcttggattaattactcccaagacggcaccaccaaaaaaagtgaggatagccagatattttctgtttataaatcaaatgcaacacaaatcctcaagatagcgccagctaaaaagagtagtcatatgccatctccgacctatgctatgaaggtaaaaggagcatactcatctcaattcggagtaccttattacaaagaattctattggatgagccacgatacaaggcttacattacttcgtggaaatgacacaaaagtaataattgaatccatatcatccccagggatgcctgtgatggaagccacctgcaccaagcctatatatacagacgacaaaaagtaa

SEQ ID NO: 297906 - DNA, 213 bp, Proteus mirabilis
atgtctaatacaatgactggtacagttaaatggtttaacgacgataaaggctttggctttatcacacctaaagatggtagcaaagatgtatttgttcacttttcagcaattcaaagcgatagctttaaatcactgaaagaaggccaagaagtatcattttctattgaaaatggtgcaaaaggtccagcagctgctaatgttatcggtctgtaa

SEQ ID NO: 297907 - DNA, 858 bp, Proteus mirabilis
atgaaagttacaagtgccgaaaaacatgcattgttattaccagataatcgaacgttaacttggtatgaatctggcccatcagatggtcaaccggtattattctgcacaggtgcagggatgagtgggctattaagtatggatgctgagctgttaactaagttaaatattcgacttattacaccgactcgtcctggtttaggtgaatcaacctttgatcctaaaaagacattaaaatcgttttctagcgatgtattattcttattagcatatcttaatattaagaatatcagtgtgataggatcctctcaaggtgctgtttttgcaatggccatttgttactatggtaaagtggataagctggcaattgttgctggtcaagatcaactagattatcctgaaataaaaaaactgttgtccagtgatgtggttaatatgcaacaacaggcactattcgatcctgatggattaaagatctggatcattgaaaatatcaccactgactggttaatggattttattttgaattatagtgctgatgttgatttggctctttatcaagaaaataaattttttcctgtttatcaagcttgtatgaaagaagcatttaaatatggaaataagggctatgctcaagatttattaatcacgatgcaacattggggatttactccagaaatgattagcacacctacaacattatggtatggactaaaggatacgagtactgttcactcgcctgattttggcaagttattgtctcaacgttttccccatgcacaacgttatgtctatgataatgaaggtggctctttgttgtggactaaaacatcacagattttaactaatcttattagttaa

SEQ ID NO: 297908 - DNA, 1497 bp, Proteus mirabilis
atgtttttatttaaaaaagctgttatcgctttgtcaattaatatcgcattagtttcttcggctctggcctgcacaacgttattagcagggagtgaagcaactaatgacggctctttgattgtagctcgtagcgcagatagtgatgctttaaaagcacaacattttgttattcatccagctaaaagtaatcagactggcatttatagcactcaagcccatcatggcgctaatagctttacttatccactacctaaacactcattacgttataccactgtacctaattggaaaactcaattgcatggtgcaacgggttttaatgagctaggcgttggggtgagtggtacagaatccatttttgcctcacctaaagcattggcgttcgatccttatgttgaagatacggggatcactgaagatgatattccagatattttactctcaagggcaaaaactgcccgtgaagcaattgaattactgggaaacatcatcgaaacacaaggtgcgggagaagggtttggggttgccgtcgttgataaaaatgaggtgtggtacctagaaacaggtacaggtcatcaatggatggcgcaaaaactaccaaaagataaatattttgcgacgggtaatcaagggcgtttacaggcttaccatacagatagtaatgataatttaggttctaaaaacttagttgagtttgcaatagaaaaaggactttatgatcctgccactgatggcgaatttaatttttctaaagcctatacgcgtgatgatgaacgtgatctcacttataattacccgagggtttgggttatccagcaacaatttaacccttctctgaaacagaatgtggcagatggtcgtcaatttgcgcctatgctgacaccggagaaaaaagtatcagtagaagacgccaaagcgatgttacgcaaccattttgacggtacagaacatgatccttataccaatggattgaatggcaatgaaccatggcgaccaataagtgtgtttcgtacttatgaatctcatgtgatgcaagtaagacctgaattaccgcaagagattggtgaagtgacttatgttggtttgggaatggctgatctaaccgcttttgttccttattacagtggattaaaagcatatccgcaacactatgctattggaacagataaagcagataatgactctatctattggaaatatcgtaagttacaaacattagtaatgacagattactctcaatttgctcctattgttaaaaaagcataccaagaatgggaagctaaaacagcattagaacaaaaagaaatggaggctaactatttgtcaatgagtaaaaagaataaagcagcagcggataacatgctgaatgaatttaacttacgtgtaatggctgatgcagagcaactaactgaaaacttaactaatcaactctttactcttaaaactaaaaatatacaagatgagatcttttttgctaatcaatctaaaaaagattaa

SEQ ID NO: 297909 - DNA, 804 bp, Proteus mirabilis
atgagtgttcccgttttaggtcttggtacttttcgtttaaaagacgatgcggttataaattctgtaaaaactgcactagaactaggttatcgtgctattgatacagcacaaatttatgaaaatgaagctgctataggacaagctattgcagaaagtggtatatctcgcgatgcgctttacatcacaacaaaaatctgggtagaaaatttaagtaaagataaattaattcctagtttgaaacaaagcttaagtgatttacaaacagattatgttgacttaactctagtacactggccatcaccaaatgatgcagtttctgttaaagaatttatgcaagagttattagctgcgaaacagatgggattaacgcgagaaattggtatttcaaactttaccattccattaatggaacaagctattgctgccgttggtgttgaaaatatcgcaacaaaccaaatcgaattatcaccttatttacaaaatcataaagtggtaaattgggctaaacagcatggcattcatattacatcttatatgactctagcttacggcaaagcattaaaagatgaaacaatacaaaccattgctaaaaaacacaatgcaacaccagcacaaatcattttagcttgggctatgaatgaaggttattctgttattccatcttcaacaaaacgtgaaaatttagccagtaatttactcagcgtaaatatcaaattggatagtgaagataaacaagcgattgcaaagttagattgtcatgatcgtttagttagcccagaaggtttagcgcctcattgggattaa

SEQ ID NO: 297910 - DNA, 897 bp, Proteus mirabilis
atgaaagccacctcagaagaagtccaagtttttattgcagtggttgaaagtggtagttttacacgtgctgcagaaaaattagcattagccaattctgctgttagtcgtacagtaaaaaaacttgagtcaaagctaggcgttaatttattaaatcggactacgcgacaattgagtttaacggaagagggggagcattactttcatcgtatgcaagttatcttgcaagatatgaaattagctgaagatgaattaattaatacacaaaaaacaccacagggtctattacgtattgatgccgcaacgccggttgttttgcatctactggtgccttttattaaacaatttcagcaaaaatatcctcaaatcaccctctctttagtttcatctgaaacatttatcaatcttattgaacgtaaagtagatatcgcgattagagtcggtaatttaacggattccagtttacgggcaaaaccactattgaatagttatcggaaaatcgttgcgaccccggactatctcgcccgttatggacagcctaaaatcgcagaagatctgcttgaccatacttgtctaacttttactgaaccagtatcactaaacacatggcctattgagcgagataatggacaattattagaagctcctatgggaatatcgtcgaatagtggagaaacgataagacaattgtgtctcgaaggtaatggtattgcttgcctttccgattttatggtggttaatgatatcgaaaatggtcgatttatcgaattattccccgataagctgcaacccatcgcaatgccttttaatgccgtttattatagtgaaaaagtggttagccaacgcatccgtgtatttattgattctctgagtgagtatattgctaaaaaagtaggttaa

SEQ ID NO: 297911 - DNA, 717 bp, Proteus mirabilis
gtgtttgacccgtttaatgattttgagcaagtcggttatttacgtaactattatggtgaaaaagatccgataattattcgtcaacttgaacacacaatgtttcgtgctggtttagatgaagcattagcttacttagtaggaaaagaaatcttacattatgaagattttttgggtgttcatcggatattattcgaagcattctacccatgggcaggtcaagatcgtgccattaccgcacctaattgtgcggtatctaaagctggtacgatgttttgccatcctcatcatgctcgattagctattgaggaggggctacgcctcggacagaatgtaaagtatatgcgtcagcatcctggtgaggtaatggggttttttgcgtatgggcatccatttcttgatgggaatggacgtactatgttaattattcataatgagctttgccatcgagctggcttttcgattgattggcatagaacgaataaaatggattacttgagagccttaagcgctgaaataaaatccccatcaaaagggcttttggataactacttatttcagtttataggtgatacccgagatcgaaatctttggggggagtctataaatggtattcgtggtttagatggtcaaagtatagaaaattccgtagatggtgagtacacggacatagcagttgctcaaaagtatcaatcattcaagatgaatagaggtctgtga

SEQ ID NO: 297912 - DNA, 669 bp, Proteus mirabilis
atgaagctcgaaactcgtatgcgtcagtcgattcaacaccgtcgtggagttgtactgactcgttctgatctggctccattgggaagcaagacccaagttacacacgcattgagtgtgttagtgaataatggtgaacttcttcgtctttctcgaggaatttatgctaaagcccaaaggatggggaataatgtaaaagcgcaaggtagtcttgatattatcattcgtgaagtagccaccaaattaggcttccagcttcgccaaaaagacttgtgcttcgagaaagtaaatgcctcacaagatgaaattattgttgaagtggatgctccaagagttaagcgtaagcttaacatcaatgggaaaattatttgctttcgtagttatagccgtaagtctgctactaaaaatacagcattcaaattggcaaagacacctcctactaaaggggttgctcgttatgtagcagagctggctgactattacaaaatatcttattgctacaatacgatggatcagtgggctgatgctgtaactcgccttgcgggtgatgaggtggtaaatgatactgttgaagaccttcttgtagctctaaaacgagcagggaaaatcaccaagcaagaagttgcgatactgtcagttaattatctgcgggagcaaaaacaaagtgtttga

SEQ ID NO: 297913 - DNA, 258 bp, Proteus mirabilis
atgaatattaaattacctattaatcctattcgtatgcctgatgttttaaagctaactgggctttctcgttcaaccatttacacattagaaaagaaaggtgattttccaaaacgtatgtatttatcggtgcgttgcgtggcatgggaagcggaagaagttgatgagtgcttgaaaaaacgttctcaatcaagagaaacacctaagtgttataccgaacgtaagcgcaatgaagctgggcaatttgtgaatgattgctag

SEQ ID NO: 297914 - DNA, 411 bp, Proteus mirabilis
atgaatagcagagattgggttgattggattacgtttggtgctagtgtcttatcagcattaagtttaatagcaacgctaggtatttacttacaccaaaagaagtcagaaagaaaaaaacaacaagatattgataataaaatattaccatttattttattaaagtcagattcaattttatctatgctttcctctgtaagtagagatatgagtgaaatagaaaactattctcatatagaaattgaaggctgtaaattaactttatattttccaaaaaatatacaaggtaatttcattgatacagtaaatttaaaatgtgatctttatgatgatttcataaataaaaatagagtattattgagtaaaaaattatatctatttaccaccccaaaaaagggaaactatgtgtcataa

SEQ ID NO: 297915 - DNA, 765 bp, Proteus mirabilis
atgggtaataacatgaatagaaagcaatttattgaaagtcacggagcgacttgcagtaactggacatggagctggtcatttgttaatcacgaaaaaagaatgattatattcggagcctgggatgtcgagagtgaaaaggaacgtgctgtaattcttcgtgaacgttggataactaaaaatggcaaaaaacagaatggatatggtcaggccataaagcatattcgtttgattaatgagggatatgacctttatatattcaaaatgacacatgcaaggaactccgatgatccttcgcttgctgtaattaaagattttgaacgcaaactcaataagtgttatctacgaaaagaaggaaaggtttggtacgctgactttttacctaactcattcccgaacgaaattgcatctcctgaaagttatccagagggtgcaaaaactcaggtaactgttaacacttatgaaagagatccgaaagcaaagcaagtgtgtatcaaccatcacggtacgatttgcaagtgctgcggatttaattttgaattggtctatggagaacatggcaaagggttcatccacatccatcatattaagccacttcatttagtcggtgatgattatgaagtcgacccaataaatgacctcattcctttatgtcctaactgccatgcaatgatccatagggggagtaatgttctcgaacttgatgagctgaaagcaataatacgcatccatatgcataccaataacactcaacctgctattaattaa

SEQ ID NO: 297916 - DNA, 342 bp, Proteus mirabilis
atgagaaaaaaactaaaaattcatgacaagccatttgaatcgattgaagaggctaagtctttctttctggaaaatattagtaaaggtgatgagataaaaaaagataatgctaaattcccttttttctttgccttatttgtcgaatattgcaatgaatccagtgagaaaaaatggcatgttaaccctgaggaaatcagtcattttagatttggaccaaccatagttgatagtaataaagatatagttgcagagacaaattgtttttggtgtgtgtttttaacagaaaaagtagacagacagttctcagtagaaaaagctattcgttggaaagcaaaccaataa

SEQ ID NO: 297917 - DNA, 195 bp, Proteus mirabilis
atggacgagaaaaaacttaaagcgcttgcggctgagttcgcaaaaggaattaaaaccgaagctgatctcaatcagttcactcggatgttcactaaactcaccattgaaaccgcattaaatgcggagctaactgagtatttaggacaagatagcttatcacagaacctgacttttctactgttatcatattcttga

SEQ ID NO: 297918 - DNA, 297 bp, Proteus mirabilis
atggcaaaacgaataagatggcttttcagtgctgaattcaaacttgaagcggctcaaccggtgcttgaccaaaactattccatggtcgtcgccgccaacgcgatgggtgttggtaaatcaactatggacaaatgggttcggcaacttaaactagaacgcaaaggtatttctccgaaagcgtcacccatgacgcctgaacaggttgaaattcgtgaattgaaaaagaaaatcgcgcaacttgaagagcataatgagatattaaaaaaggctacagcgctggtggaggctgtaatttaa

SEQ ID NO: 297919 - DNA, 1578 bp, Proteus mirabilis
atgacagcaaatatccataatcatcgcattcttatccttgatttcggttcgcaatatacacagcttattgctcgccgtattcgcgaaatcggcgtttattgtgaactctgggcatgggatgttaccgaagaacaaattcgtgaatttaaccccaatggtattattctgtctggtggccctgaaagtactacagaagacaatagcccacgcgctccggaatacgtctttaatgcgggtgtgccggtattaggtatctgctatggcatgcaaactatgtctatgcaattaggcggtgatgttgaagtctcaggtgagcgtgaatttggttattcacaagttgagatccgcgaaacctgcgaactgttccgtgatattcaagactccgtaagtgaagatggcaaacctttattagatgtatggatgagccacggtgataaagttacggctattcccgctgattttatcactattgctagcactgaaacttgcccatttgcgattatggcaaatgaagagaagcgtttctatggtgtacagttccacccagaagttacccatacccatcaaggtttagccattttaaaacgctttgtgttagatatctgtggttgtgacgcattatggacatccgcggcgattattgaagatactgttgctcgtttaaaacaacaaattggcgacgatcacgttattctcgcgctatcgggtggtgtagactcttctgttaccgcattattattaaatcgtgccattggtaaacgcttaacctgtgtatttgttgataatggcttattacgccttaacgaagccgaacaagttatggcgatgtttaaaggcaaatttgacctcaacattatccatgttgaagccgaagatcgtttcttaactgcgctaaaaggtgaaaacgatccggagaaaaaacgcaaaattatcggtcataccttcattgaaatctttgatgaagaagcggttaaattaccgcaagtcaaatggctagcacaaggcacaatctatcctgatgtgattgaatcagccgcatctgcaacaggtaaagcgcatgtgatcaaatcacaccataacgtaggtggcttacctgaagatatgaagttaggtttagtggagccattaaaagaactatttaaagatgaagtgcgtaaaatcggacttgagttaggtttaccttacgacatgctataccgtcatccattcccaggaccaggtttaggggtgcgcgtattgggtgaaatcaagaaagagtattgtgatttactacgtcgtgctgacgctatctttattgaagagctacataaagccgatttatacaataaagtcagccaagcatttacagtattcctacctgtccgttcagtgggtgttatgggcgatggccgtaaatacgactgggtagtttcattacgtgctgtagaaaccgtagactttatgactgcacattgggcacacctaccttacgatttcttaggccgtgtttctaaccgcattatcaatgaagtaaatggtatttctcgcgtggtttatgatatcagcggaaaaccaccagcaacgattgagtgggaataa

SEQ ID NO: 297920 - DNA, 1467 bp, Proteus mirabilis
atgttacgaattaaaaaagaagcacttacatttgatgatgttttgttagttcctgcacactcgactgtccttcctaatactgctgatttatctactcaactgactgaaacaattcgcttaaatgtgcctatgctttctgctgcaatggatactgtgactgaagcatctttagctattgcattagctcaagaaggtggaattggttttatccacaaaaacatgcctatcgaacgccaagctgaagaagttcgtcgtgttaaaaaacatgaaagcggtgttgtgacggatcctatcacagtaacaccagaaacttctttacgcgaagtccaagcaatgacagagcgtaatggttttgctggctatccggtagtgactaaagacaatgaattagtgggtattattactggtcgtgatgttcgctttgtcactgatttagaccaacctgtcactgcggtaatgacgccaaaagagcgtttagttaccgttaaagaaggtgaagcgcgtgatgttgttatgcaaaaaatgcatgagaagcgcgtagaaaaagccttagtagtcgatgatcatttccacttaaaaggcatgatcaccgttaaagatttcaaaaaagcagaacgcaagcctaatgcatgtaaagatgagcatggtcgtttacgtgtaggtgctgcggttggcgctggtgcaggtaacgaagagcgtatcgccgcattagtggcagctggtgttgatgttcttcttatcgactcctcacatggtcattccgaaggggtattacagcgtattcgtgaaactcgcgctttatatccaaacttacctattattgggggtaatgtggcaaccgcagaaggggctttagcgctggcggatgcaggtgtgagtgctgttaaagtgggtattggccctggctctatttgtaccactcgtatcgtaacaggtgttggggttccacaaatcactgcgattgctgatgctgttgaagcactgaaagatcgcaacatcccggtgattgctgatggtggtattcgtttctctggtgatattgctaaagcattagccgctggagcagcatgtgtaatggttggctctatgtttgcaggtacagaagaatctccgggtgaaatcgagctattccaaggtcgctcttataaatcttaccgcggtatgggctctttaggcgcaatgtctaaaggttcatcagatcgttatttccaaactgataatgcagcagacaaattagtaccagaaggtattgaaggtcgtgtggcatataaaggcttattgaaaaatatcgttcaccaacaaatgggtggcttacgttcatgtatgggcttaacaggctgtgcaaccatcaaagaattaaataccaaagctgaatttgttcgcatcagtggtgcgggtattcaggaaagccatgttcatgatgtgactatcacgaaagaatcgcctaactatcgtttaggtatgtaa

SEQ ID NO: 297921 - DNA, 1389 bp, Proteus mirabilis
atgactctaccgataaacaataatatttttactgttagccgtctaaataagaccgttcgccagttattagaaatggaaatgggtcgcatttggatcagtgctgaaatttccaattttactcaacctgcttctggccattggtatttcacgttaaaagatacccatgctcaaattagagcggcgatgtttcgcggtcaaaacacaaaagtcacttttcgccctcaacatggtcagcaagtattagtacgtgcgactatcacactgtacgaaccccgtggtgattaccaactgattgtcgaaagtatgcaaccggcgggtgatggattattacagcagcaatttgagcttttaaaacaaaaactaagtgctgaaggtttatttgatgctcttcataaaaaaccactaccaacacctgctaaacaaattggggtgatcacctcctcaactggcgcagccttacacgatattttaaatattctacgtcgtcgtgatccctcattacctattattatttatcccacagccgttcaaggtgcggaagcaccaatgcagatagtccatgccattgaactggctaaccgtcgtaaagaatgtgatgtgctaattgtcggccgaggcggtggctcattggaagatctctgggcatttaacgatgagcgcgtagcccgtgctatttttgctagtgatattcctattgtcagtgccgtgggtcatgaaactgatgtgactattgctgattttattgccgatcttagagcgccaaccccttctgccgccgcagagttaattagccgcaacaaactcgagctattacgccaattgcagtcacagcaacaacgtcttgaaatggcgatggattattatctagcaaaaaaattacgcgcactaacacaacttcatcatcgcttacaacaacagcatccacacttacgccttgctcgccaacaaaatgtattggctgcaactaaacagcgtttagtgaccagttttcagcgcctcctacaaacaaaacagaatcaacatactcagctaaaaaaacgccttaactatcaagagccaagtccacaaatacaaacactactgcgccaacaacaacagttaatttatcgtatgagagaaagtatttcacaacagcttgctcgtcaacgtgaacaatttgcaattagctgttcacgtttagaaagtgtgagtcctctcgcaaccctttctcgtggttacagtattagtgaagttgcttcaggtgacgtactgaaaaatacgaaacaagttaaaaaaggtgatacgctaaaaacgcgtgttgaagatggctggatcaccagtgaagtgataaatacacaaaaaatacctgctaaacgtaaaccagcccccaagagtaagtcatccatttaa

SEQ ID NO: 297922 - DNA, 2250 bp, Proteus mirabilis
atgaaaactcaattaacaaggaaaatacttggctcttgtattctattttctggtattcattctctggtgtttgcggctgaaacggaaaaaacagttcaatttagtagtttaaaagtctcatcggcacaaaaacaaacaccagagcaaaaagcgttagctaagccgggggcttatagcgctattggtgaaatcaataatcttagctcggtagaacaagcattacgatctacaccgggaacttacacccaaatggatgccagtcagccgggggttggggttaatatccggggattaagtggttttggtcgagtcaatatgatgattgatggggtgactcaaacgatgtatagcacgtcacctagccaatatgcgcatggtggacaaccatacaaccagtttaatagcatgatcgatcctaactttattgtgcaaattgatatttctcgtggtcaacaagatggtgaaaatagtattaatgcgttagcggggagtgctaattttaaaacaataggtattgatgatgttttattttctaatcatcgttggggaataagaagtaaagcggctcgagggactaatggattaggttataacggtatggttgcgattgcaggaaaacagccgatatttaatcatgatggttatattggcgctatgtttgccataagtggacataatattgaatcttcttataaaaatggggcaggttttaatagtcatgagtttgcaaccactaaagactttaaccaaaagccacattctgaattagcaaaaatatcgtttaaacccaatgattctcatgaaatagaattaagtggtcggttttataataataaatttaatcgaagaaccatagagagccaagattattatgctaaatatcgttataccccgctaaacgatctttttgatagtgaaatattattgagtagaagccaagcttcacaaaaatttgccggtgactctttaatgtcattacgcaatggacatgcgaaaaatatttccaatgcacttgtcgctaaaaataccagtcgatttaattatcatgagctggatatggcactaacattaggtactaaactgatgtcgattgattataatcgagaagtgacagctccttcgagcgatccatggcaatcacaaaatatgattgaatacaatgtatttgctccgcaaggaaaaaacgacatcagcagtcttttttcacaaatgaaatttgaatacgatatttataccctcgcattaaatttaaactatacggattatcatattaaaggatataaacccgcttgtgatcccaaagcagcgtgtttccctgaaggtgcgatgaatgttaatcgccacgaaaaagcgtgggagccgggagcactcttttctgcacaaattatccctgaatttgaaccatttatcagttatgcccatacgacaagggcaccaaacccacaggaaattttctttgctaatgaaggtggggcatcgatgaacccctttttaagaagtgagaaagcggatactttccaaataggttttaatagttatcgccctgatttaattgttgccggagacagctttcgcttaaaagcactttggtatcatactaaagttaaaaactatatttccagtgattcttataatgtttgtaaagggggtaaacgttgtaaaatcgatggcacttttactgacgatgactacagtggcatggaatacgatggaaatatctatttatacacaaatagccttgatcctgtgacgatgagaggctatgaactacaagtaaactatgatgctgatgtattttataccacactttcttatagcaatgagcgcacctcacaacccacttctcttgcgatgggggattttgggcaaagtcctgcatcagaacttcccaaatactacgcaacgattgatgctggtgtgaggttattcgatgaccgatctctcgaattaggcaccatcattcaaattaccggtaaaagtcgtaaagcttcagctgaagggtttgattttgatacaggcactattcccatggtcgaacaagaaaaaatccctaccgtgatcaacgcgtacgctaactatcaaatgaataaaaatgtgtcattaaaatttgcggtacataatctcatgaataaaaattattcaaatgcacttgatagaagtaattcagcgccaattatggatgaacagggacaaaataaacaaacggctagaggcagaagtttcctgtttggtggagaaattcgtttttaa

SEQ ID NO: 297923 - DNA, 621 bp, Proteus mirabilis
atgaacaagcttcttgtactaaaatccagtattttagaaaattactcgcacagcaataaaatggctgactatctaatagaaaattggcaaaagcatcatcaaaatgatctcattaccctacgtgatctggcaaaagatcccattcctgttttagatcaagccacattatttgcttttggcaaagatacggctatgttatcggaacaacaaaaagccgctagagcactctctgatacattaattaatgaattaaaagcacatgatattattgtgatcacggcgcctatgtataatttctccatcccttctcaattaaaacactatatcgattttattgcgcgtgcaggcgaaacttttaaatatactgaaacagggtcagtcggattacttgaagataagcaagttattgtattaacgagtcgtggtgggatccataaaggacaaccctctgatttaattattccatatctaacacaatttttatcatttattggtattaataatgtacagtttattctcaccgagggtactgcgctaggcgaagaatatacccagcagtcacatgctcaagcacaaaaagaaatagatttaattattaataaagaaataatgataaaataa

SEQ ID NO: 297924 - DNA, 3897 bp, Proteus mirabilis
gtggcactatcatctgcgatgctctacaaagagatagagcaactctcgttgcgggatcagcaacgattgagaaaacgcttacgtggcgttgataaaataagtaaagaaacgtcgaaacacgcggtattaagcgagattgagcaggatattattgttgcaaaacagcgtatattaaatcgacaagctcactgtcctaaaattgtttatccagaaaacttgcctgttagccagaaaaaagaggctatctacaatgcaatcaaagataaccaagtggttattattgcaggggaaacgggatcgggtaaaacaactcagatcccgaaaatttgtctcgaattagggcgaggcgtaaaaggttatattgggcatacgcagcctcgacgtttagctgcacgctctgtcgcagagcgaattgctcatgaattaaacacaacattaggtgagtctgtcggttataaagttcgttttagtgatcatgttggtgataacacgctagttaagttaatgactgacgggattttattagctgaactacaacaagataagctgttattacaatatgatactattattatcgatgaagcccatgaacgtagcttaaatattgactttattcttggttatttaaagcagcttttacccaaacgcccagatttaaaagtgattattacttctgccactatcgatcctgagcgtttctctaagcattttaatcaagctcctattattgaggtatctggccgaacttatccggtcgaagtgcgctatcgtcctattggtggtgatgctttggatagtgataaggatatgactgagggcattattgatgcaattgacgagttaagtcgagaaagtgcgggtgatattcttatttttatgagcggtgagcgcgagataagggataccgcagaggcattaaataaattacaactacgtcataccgaagttttaccactatttgctcgtctttctaatagtgaacaaaaccggatatttcagcctcataccggaagacgcatcatattggcaaccaatgttgccgaaacttctcttacggtacctggcattaaatatgtgattgatacgggttatgcacgtattagtcgatacagttatcgaaccaaagttcagcgcttacccatagagcctatctctcaagcttctgcggatcagagaaaagggcgttgcggtcgtgtttctgatggtatttgtattcgtctttattctgaagatgattttatttcccgtgcgcaatttaccgatcctgaaatactaagaaccaatcttgcttcggttattttacaaatgacctcgataggattaggggatattagcggatttccttttgtacaagcgcccgataaacgcaatatacaagatggtgtacgcttattagaagagctgggtgccttacaagagggtactgataataaaggtgcttatcgtttgacgccgatggggaaacaattagctcagcttcctatcgatccaagattagcgagaatggttcttgaagcacgcaaatatggtgcagttagagaattaatggtgatcacatcggcgctttctattcaagatcctcgtgaaagaccgatggacaagcaacaagcatcagatgaaaaacatcgtcgtttccaagataaagattcagattttctttcattactcaatttatgggactatttaaaaactcagcagaaagagttgagtcactctcagtttcggaaacactgtcgccaagagtttttaaactttatgcgagttagggaatggcaagatgtctatacgcaactacgccaagttgtgaaggaattaggttttccaattaatagccaaccggccgattttaaaagtattcatgtggctttattaagtgggctattatcacatatcggacaaaaagatagcgataagcaagagtttactggcgcgagaaatgcgcgttttgctatttatcccggctctgggttatttaaaaaaccgccaaaatggaccatggtggcagaattagtcgaaacatcacggttatgggggcgcattgctgcacgcattgaagcggaatggattgaacctatcgcgacccacttagttaaatatcactatagtgagcctcattggtcaaaagcacagggtgcggtaatggctaatgaaaaagtcaccttatatggtttacctattgtggcctcacgattagtaaattatggcaaaattgatccactattatgtcgagagttatttattcgccatgcgttggtagagggcgattggcaaactcggcatgcttttttccgtgaaaatttaaaattacgtaccgaggttgaagagctagagcataaatcacgtcgtcgcgatattttagtagatgatgaaacgctgtttacattctacgatcaacgaataccacaagatgttatctctacccgccattttgataaatggtggaaaatagcgcaaaagaattcacctgatttgctgagctttgaaaaaagcatgcttatcaaagaagatgctaaacgtgttagtgcattagattatccaaattattggcatcaagataatttaaaattacgcttaacttatcagtttgagccaggtacagcagcagatggcgtcactgtccatattccattaccgattttaaatcaggttaaagatgaaggttttgattggcaaattccgggtattcgtcatgaattagtcgttgccttaataaaatcattacctaaacctatacgtcgtaattttgttcctgcgcctaactacgcttcagcttttttagaacgagtggttacccctgaaggtgaattactcgataaattagaaaaagagctacgtagaatgaccggcgttacggtcgaacgtgatagttggcaacttgagcaagtggccgatcacttaaaaatgacttttcgagttgttggtgacaacaataaaacccttgcggaaggaaaagatcttaatcagttaaaagcacgtttaaaggacaaagttcaagaaacattatcagcggtagcagatgatggtattgagcagcaagatttacatatttggagttttggtgacttgccacaacgctacgaacaaaagcgtggtagctattcagttaaagcctatccggcattagtggatgaaaagaatagtgttggtatcaagctatttgaaacagaaacagagcaacaagcggcaatgtggcaggggataagacggttattactacttaatattccttcacccattaaatacttgcatgaaaaattgcctaataaagcaaaattaggtctttattttaatccttatggcaaggtgctagatctgattgatgactgtatcgcttgtggggttgataaactcattgcttcttatgggggattaatatggcaagaagagcaataccaaaaactccaagattatgtccgtgctgaattaaacgatgttgttgtcgaaattgctaaacaagttgagtctattttaactcaagtatttgcgattaataaacgcttaaaagggcgggttgatattagtgtcgcttttgcattatctgatattaaagcacaacttaatcaattagttttccccggatttgtcacatcccatggctggaaacgtcttgcggatattcctcgctatctcagtgccattgaaaaacgtatggagaaattagcgattgatcctaaccgtgatagagcacaaatgagccgagttgaaaatgtcattttgcagtggcaacagtggttagctaagttaaccgagaagcaaaaacaacaagaagaggtacaaaatattcgttggatgatagaggaattaagagtgagtttatttgctcaacagataggaacgccttatcccatctctgataaacgcatcttacaagctattgagtctatctcattaagttaa

SEQ ID NO: 297925 - DNA, 1005 bp, Proteus mirabilis
atgaaatacattattattttaatttatttactctcattccattgttattctgatgaaccatataaaagctttagtaacaattgcgtttatgacgatataacagacaatgggtttattccagtacataatattagatttaaagctagtgatattgatttaggtgtcgatattggccaacctatcgcagaaatgagttttactgatgccgctctatctacgtcaattcttcattgtaaagataaagttgatctaaaattaattattaatgcaaggcattataaagatgctatttttaaaacaaatattccaggagttggctttaagatatcagcgaataaaacaccttttaacttagtaggcgatgaatttaatgtaacacctgaatatgcaaatgtctgtaatgctcaaactagaaaagaaggatataaaaatatatattgtactgatagttggccaagactatatattcaattaataaaaataagcgaaatcgttctagaacctctgagcgacatatttgttatggatgattttcttgtttatacattagataataaaaaatttacttataataatttgattattgagaagcctcagaataaagtttgcgaacttaatattgaacagcctaatattgaattagcgcctgtagaaaaaaacagtttaagtgattcaatacccgctaatgaaacacatttttctattggtgttatttgtaaccaagatacattagtttcattaaagcttgatgcacctgctatttataaaagtagaaatactaatttattaacacttcttaataatggcaccccttctggggtaggtttatcaattaaatataatgataataaatattatttaggtaatgttatttataatagcgttcatagaacaccttcgacggaatatacttttcctttttcagtaggttatgtgaaaatgagtgaaaacatcttgcctggcaaggtaacatcacaaattaatgtaaacttagaatataaataa

SEQ ID NO: 297926 - DNA, 2235 bp, Proteus mirabilis
  misc_feature (2217)..(2226): n is a, c, g, or t
atgataaagttatctcctatttctttactcttattatttacgccctatgtatatgcaaatgcactttacttacaagcaattgaaaaccacaatggaaatattgatttttcactcttgcttaatgaaaattttctcgaaggaacctataacataacaatttatataaataacaataaaaaacaaaatgctgagatatcatttaaaaacaaaaacaataacttaactccaataataactctatttgatttaaaacaatggggaataaacaccaattattacgagcctttaaaaaataagttagacaacgatatcgttgactatgatttattaaaaaaattatttaatataaaattagaaattaacaaacagtcgatttactttaaagtaccattaattgcgatagaaaaaaacacttcatattccaaagaaaaattggatgatggtgataatgctgctttcattaaatacaactatcaaggccattattataaacaaaatagtttaaatggacaacacatacataacctacagctatataatggaattaatttatttgcatggcgttatcgtcaagatctaaactataataataataattctttttctataaaccagcaatatgtatataggacacttagaaatattaattccattttaactatgggtgatttctatgcttattctcctaacttaaacacttataaaatactaggcgtgcaaatcaatagcgataatgcaatgaaagatggctccctagtaggttatgcacccattataagtgaaaccgcctatacctatgcagaagttagcattgagcaaaatggagaaacactatatagcacatctgtaccacctgggccatttactcttaataaccttccctctttaggtacaaatggtgaattagtattaattataaaagaagaaaatggcgaagtaagaaagaagaaaatctggaattattcttcacagtatttattaagaaagaaccaatggaattattactatactatgggtttagtaaataatcctcaaaaaagacagtttccttctaataagaaaaaagaactattaactcaattgaatttaagctatggagtgagcaattatttaacgacaatgataggagctgaaaaaaaaggagatgatattaaagcacttattggaaataccctaggattaaatatcctgggtatagtctcattagaaaacgcttggataagagagaaatatcatcaacaatatcagtccaataagattaattaccaaaaagtattttctatggaaaatacaactatttcattaaactcatcattctactttagatttaaagagaattatgctgtaaataaagaatataagaaatatgatttaggatttcacttttcacaatcattaaataataatattgctttaacgttggggtataatattgcaacctattatcactcaaaagaaaaaagccaacgactttttattaatactagttcaaattataaaaaactttcctattcattagagctagagaatagcaaagatcagtacagcaataataatcaattatcaatttttttaaattatcctattggtcaagatctctctcattgggcaacagcaaggatcaattatgataatagagaaaaatattttcatgagaatatttcatttagtggaaatacattagaaaataatcggttaaattataaccttgatttttctaaaaataataaagaacgcttagattcatcaatgaaaattaattatttaagtaggatagccaaactaaatataaactctcgatttaataaagatagttattctttaggctatggactcaatggcggcattgtgtttcataatggaggaataacgttagcccaagatctaaatgatagttttgctatcctaaattttgcaggtgctaagaaagtaaaaataataggaaagccaacaatagaatcagaccgaagaggttatttaatcattcctaatttaactagttatcataacaataagttccacattgatgcaaaatcattagattataattataatattgataattatagctatcatttaattcctactaaaggagctattattgcaaaaaatattaaggtaactaaaggagaaagtgctttatttacatttcaccaaaacattccttttggtgcaacagcctatgtgaaaaattctgatggcaccctatccgatatnnnnnnnnnntgtaaatga

SEQ ID NO: 297927 - DNA, 675 bp, Proteus mirabilis
atgaagtataatgtttatattttatttatcataattctgtgttctactttttttacacaagcaaatgtaatttatagtggaacacggtttatctataatgaagacgataatgatattattattaatataaaaaataaaaactccgctactgattatttaatacaaagctggatcacaaaggatgaaaatgataaaaatacaccttttatgattaccccacctttatttaaattaaataaagaacaatctgcaattttgcgaattgccaaaatcacatcaatagctcaaacagatcgtgaaagtcttttttatataaatagcaaagcgatccctatagctgaatcaaaacataatagtattcatatatcaattaagtcagtgtttaaattattttaccgaccacatggcttaacagaaacagttgaagaagcgacaaaaaaaattattttttctataaataataaaaaagaaatgataataaaaaacaactctgaatactacttcactattataaatattttttctaatggggaaaaaaaagagatctcagtcatgctatccccttttagtgaaattaatataggaaaaaatcattttggtacggctaaagtaggctggagctatataaatgattttggtaatgaagttaatatcaacataaaaaatagcgaatag

SEQ ID NO: 297928 - DNA, 231 bp, Proteus mirabilis
atgacgggggctgagttaggaaaattattgaatatctctcaacaacaaatttctcgttatgaacgaggaataaataaaatacctattgatatactttttcacatactaaatatatttgatatttcaataagtgatttctttgaaaaggtttccaaaagagttatcacattaaaatataaaataaaatatgattctgataataatattccattctttgagaatattatttaa

SEQ ID NO: 297929 - DNA, 438 bp, Proteus mirabilis
atggaaatacgtgtattccgtcaagatgattttgaggcaatcattacactttgggaacgttgcgacttgatctcaccagaaaatgatcctgaaattgatattgaacgaaagattaaccactcccccgatctctttttaatcgcagaggttgctggcgaaatagtcggtagtgtaatgggaggctatgatggtcatcgtggttcgctttactatttgggcgttcatcctgagtttcgcggtagaggaattgccaatgcactaatctctcggctagagaaaaaactcattgcaaaagggtgtccacaaattactttaatgatccccgaagagaacgatgccactatttgtatgtttgaaaagcttctctatgaagatcaaaatcaagagaatacggcttacactaaacgcctaattatcgatcaggacttcgatctttaa

SEQ ID NO: 297930 - DNA, 1665 bp, Proteus mirabilis
atgagcttatcgtttaaattatctgcatgcgcactgacagtgactttagcaatggcgcctgtgatgtctcaggcatgggaaaaagataaaacttaccaaattaccatcctacatactaatgatcaccacggtcacttttggcacaatgatcatggtgagtacggtttagctgctcaaaaaaccgtcgttgacaatattcgtgatgaagtcgctaaaaatggcggtagcgtattgcttctgtctggaggtgatattaatacgggggttcctgaatctgatttacaagatgcagagcctgattttaaagggatgaatcttgtcggttatgacgctatggcgctgggtaatcatgagtttgataatccactcgaagtgctgcgccaacaagaaaaatgggctactttccctttcctttctgcgaatatttatcaaaaaagtaccggtgaacgtttatttaaaccttatactatttttgataaacaaggagtgaaaatcgcggtattaggtttaactaccgatgatactgtgcgtattggtaatcctgctaacttccctgatactgagttccgtaaaccggcagatgaagcgaaaaaagtcgttgaagaattacgtatcacagaaaaacccgatattattatcgctgctacccatatggggcattatgacgatggtaatcatggctctaatgcaccgggtgatgttgaaatggcgcgtgctttgccgaaaggctatttagatatgattgttggtggacactcacaagatccggtgtgtatgtctcaagagaataaaaactacaaacaagcagattatgttcccggcacgccttgcgctccagataatcaaaatggcacatggattgttcaagcccatgaatggggtaaatatgtaggtcgcgctgattttgagttccgtaatggtgagttcacattaaaacactatcagttaattccaattaacttaaataagaaagtgaaaaaagaagatggaaccactgagcgagtttactacacagaggagatccctcataaccctgaaatgatgaaattactgaccccttatcaagagaaaggtggtgagcaattgaatgtgaaagtcggggaagttgttggtaaattagaaggcgatcgtagcaaagttcgttttgaacaaacgaatatggcgcgtttactgttatccgctcaggcggagcgtgcaaatgctgattttgccattatgagtggtggtggtgtacgtgattcgattgaatctggcgatattacttataaagatgtattaaaagtacaaccctttgctaacgaactcgtctatgttgatttcaaaggtgaagaagttgaaccttacctatccgcagttgcttgcatgaaagtagattcaggcgcttatgcacaattttacaatgtaagtttaaccgtagatgcagattgtaaagtgagtgatgtaaaaattgcgggcaaaccattagataaaactaaaaattatcgtatggcgacattaaactttaacggtattggtggtgatggttatcctaagattgattcacacccaggatatgtaaataccggctttgttgatgcagaagtgttaaaaggttatatcgaaaaacattcaccactaaaagcggctgattttgaaccgcaaggcgagattgtgtataaaaaatag

SEQ ID NO: 297931 - DNA, 1521 bp, Proteus mirabilis
atgaattataataaattatttcttatttctttatctttaatttattctgcaaatgttttttctaatacggatagcctatcaccaatggataatctatctccatctatgacttttagcccaccagtaattagcccaagcccattaccaacaggtaacccttcacaattaggaaatggttctatggtagaatcaagtgtaggtattcccccaacatcaacaactcatctaccacaaccaccattaataggttatggcgcaccaacaataggtaatacatcaggatataggacacaatttccaaatacagatgctaatccaattaaaacaattaaagcaattaaaacataccttgacatgactgatcatgcaaccgatgatcataataatttgataggtggatacatttcagcctttatttctatttctagaccttctacatctacatcatctgaaaatactgtagtcagcctttctaaacctttttttgatcgtatgtctaaagcaatagatgttgattctgatgaagatggaagtatgttagtggataaaagtaaaaaggatatcgctcgtactatgtcttcttatttagaaaatctagaagcagactttttagaaacaatgaacgatgaaaatactagtgaggatgaaaatactagtgagataagactaacacagatggcattattacatcagatacaagattttaaaaatattgttgacgaaagtatagaaaaaggtacctcttttactattgttgcaaatcaagatctagaaacagcagaaccattaactgaaatccaaatgattactaagcgattatcgcaaccagtaacacgagttgatattgctaatgcatatgttttattatcaggaaaaatagataatgaagttggagctatagcgaatcaacaacaaataactactgaaacgttaactttacaggataataaaattactaaagtagaaagtgatgtgaaaaaaaatgaaggtaatatagctgttaatagagaaggtattactaaagtagaaagtattgtagaaaaaaataaagaagatatacaaacaaatagagaagatattaataaagttaaagaaactgctggcaaaaacaaaatatacgtagataaatacctagctaatgatttcgatgttaatgagcaatctaaaagtttagtaggtcatcttggctctttatatgtaggaaataagtcaaacacagataatattaatgccattaaaaatgatcttagccattttaaaaatgaaaccaataatcgtttctataaagttgaaaagcgcgctaatcaagggattgcctctgttgcagcgatgagtaatttaccttttaatgatgcagcaacctttagcaccgcaatgggtatcggtaattatcgtaatgccacagcatttgcatggggaatgcaataccgtatcaacgaaaatgttaaagttaaagcctcaaccgcttggaatgacgctaacaattgggtctctgcgggggggatcggtattagttggtaa

SEQ ID NO: 297932 - DNA, 294 bp, Proteus mirabilis
gtgaatcgctcttatccagcatcaaagatggtaggaaaaaaaatcgcttattaccgtagggttaatggcctcacattaagtgaattggctaagaaaataggtataagtcaacagcagcaatcaagatatgaacggggaattaatcgagtgagtctagataggctttatcaatatgcttgctttttcggtattagtttaagtgatctttttcaattagatgatgaagagaaagtagaaatagaaaataaaatatcaaatatggtaggtaataaaaatgaaccatttgatgggtaa

SEQ ID NO: 297933 - DNA, 2157 bp, Proteus mirabilis
ttgtctgcgataccagaagctaaaagtgaattagattttgattcacaaaggttatatttaagtattccgcaaattgcattatctaaaaacccaagaggatatatagagttagataatattgataatggcataaatgccttattactaaactatagttatagtggttctaaaaactatgatcgtaagaatggcagttcaaatacaacttcaaattatataaatttaagaccaggtttaaatttaggaccatggcgtttaagaaactacacaacatggtcgagtacaagtaatcaatcagggaagtggaacaccctttatacctatttatctagaaatataaataaaataaaaagtcagttaatactaggggatgggatatcttcatctgatgtttttgatagtgttccgtttcgaggcatgcaattatcaacagatgatgagatgtatccagaaagtttaagaggctatgcgcctatcattagagggattgcaaaaagtaactcgcaaataactatcaaacaaaatggatatactatttatcaaactgaagtggcagctggcccttttgaaattaatgatttatatccatcaggtagtagtggggatttatacgttacgattaagggtgctaatggtagtgagcaacatcaaatcgtacctttcgcctctttacctgtattacagcgtgaaggtcatttcacttatagcgtaacgggcggtgaatatcgtgcttatgataataatgtagataaaacgaagtttggtcagtttacattagtttatggtttaccttatggcactactgcttatgggggaagtcagttgagtcaaaattatcaatcttactccctaggtgttgggaaaaatttaggctcatttggtgctgtttctgttgatgttacacaggctaagtcaacttttaatgatggaaggaagcaacaaggtcagtcttatcggtttagatataataagaatttgaacaatataggaaccaatattgctttagcaggttatcgctattcaacgagtggcttttatagtttatctgaagtgtttgatagttttcgtcgtactcattatagccctgaaattgagcaacgccgtcatcgtgcggagataacacttaatcaaaatttaggtgataaatatggctctttagctatcggatatatacaagaggattattggaacagcaaaagcaaaaaacaatcagcaacacttggttataataatagctggcaaggtatcagctatggaataaattatacctacaataaaaatacagttaatcattcttatatttctgatcagaaaagacaaaatgatgatgaacatttgttggctttttcggtgaatgtgccctttagcgtatttgataatactttttattataattttaatgcgaatagtaacaataatagttcaagtacaggaagtgtaggtatatcggcatctcagttaaataatcgactaaattggagtgtgcaacaagcatttaccaatcaagatcaaggatcttctggaaatatcaatgcatcctacaaaggccaactaggtgatattacgggggggtacagttatagcaaagataatcataatctttactatggtgtgagcggtagcgtcgttgctcattctcagggagttgtttttggacagcaactgggagaaaccgcggcaatcgtagatattcctaatgcgggtgatattacgatattaaatcaagcgggagttaggactaataactcagggtatgcattagttccttatgtcacaccatatcgtaaaaatactgtcgagatcgatacattaagattgccagagaaggctgaaatggaacttaccagtcagacggttttaccgagtcgaggggctttagtaaaagcgaatttttcagcaaatgtaggctatcgtgtattaatgacgataaatttggaaaacaaaaagccagtaccatttggcgctcaagctatttttaaagacaatagtcagttaaatagtattgtaggtaatgatggagaagtttatttatcagggctaaaacagaaaggaaactttactattaaatacaacaatgaaagctgtcaggtaaattatgatctatctgatattccagattatttagggctctataaaactactgtaacttgctattaa

SEQ ID NO: 297934 - DNA, 480 bp, Proteus mirabilis
atgaataaagtaattttatctttggttgcagcgatgtctttgtctgcttgcgcacaagcggttgatagtttagaaaaagtcgctccttatcctaaagcaaaggaaaatcaaattcgtcatgttattgagttagaacaaaaagaaaacgaaggcaattaccaagttgagttgatcgtgggtaaagagatgatggttgattgtaatcgtcaatggtttggtgctgagttagataaaaaagatctcgaaggttggggttatgattactatatcgtaagcgacttaaatggcccaatgtctacgatgatgggttgtcttgataacactaaaaaacccgcctttgttcaagctaatatggggcaagcggcatttatccgctataacagcaaattacctattgttgtctatgcaccaaaagatgtagatgtgaaatatcgtgtgtggtctacttctgacgaggttaaagattcaacaaagaaataa

SEQ ID NO: 297935 - DNA, 438 bp, Proteus mirabilis
atgtacaaaaaaattctagttcctatcgatattctagaagatgagctttctcaggaactgatcactcacattgaacaaattgctcaagttggcaaacccgagatccacttcctcaccgttattccaaatgcagaacttttcttcggtattgagtttgccgctattcctgaaaaatttaaagactcttcagagcgcactcgcctcgcttttattgctctgcaagatatgatcaaagatacgaaaattcccgatgagcaaattgtttgcaatgtcggtgttggtaatgcaaaagatgaaattttagagtatgcacgtcaaatcgatgcagatttaattgctattgcttcacatcgtcctaatgtttcttcctacttattaggctcaacagcatcatctattgttcgccatgcaaaaatgtcggtattagtgatccgttag

SEQ ID NO: 297936 - DNA, 882 bp, Proteus mirabilis
atggctgagaaaacacaatctgacaaattcaaagcggccaagaaaagcacattggtcagtgtttttgttaatatctttttatccatatttcaaatcacaattggtttcttctcacattcccaaggcttaattgctgatggtattcattcactgtctgatttaattgctgacttcgtggtgttaattgcgaataaaggcagtcaaaagcaacccgatgccgatcatccttatggacattttcgctatgagaatgccgcttcattagtgttagggacgattttattgattgttggtttgggaatgatattttctgctatccataaaatgttagatccttcaatcattcctgatgttcatagcatcgcgctttatgtggctttattggcattagcggctaaagaagggttatttcgttatatgttagctgtagccaaaaaagtcgattctagtatgttagtggccaatgcttggcatgcgcgctcagatgccgcctcttctttagtggttgcaatagggatcattggtagccttgctggatttaaattctttgacccactagcagcacttattgtcgggctatttgttggccgtatgggatggcgttttacctatcaagctttgcaagatctcatggatagaggcgctgatgaagaaacacttgaacagatcaccaatacattaatcaccacaccaggagtacaaggggtacatgatttaaaaacccgtcgtgcaggtgattatttattagttgatgtccatttagaaattaaaggcgaattaacggtcaatcaaagtcatgatattgtggtcaatgcccatgatagagtacttaaacagcatgcacagattttaagtgtgatgatacacgtcgatcctgcttaa

SEQ ID NO: 297937 - DNA, 960 bp, Proteus mirabilis
atgaaacccgttgtaatactttatcaaccgcttccagaaaaactgcaacaaaaattatctgccgttgctgaggtaaaacagtttaacgcgctctctctcgattgtgccgattttaaagccaccctcgctcatgctgaaggattgttaggtgcaggcggtaatatcgataaacactttattgaaaaagcgccaaaactaaaagccgtatcaacgatttctgtcggttatgataatgtggatgttgccgcgctcactgaacgtcatatcaaattgatgcatacacctacggtattaactgatactgtcgctgatacaatgatggcgcttgttcttgccgtctctcgtcgtattcctgaactagccgataatataaaacaaggtttatgggtaaaaagtattacgccggattggtatggtactgatgttcaccataaaaccatggggattattggtatggggcgtatcggtaaagcattagcacaacgcgcccacttcggttttgatatggatattatttaccattctcgtactgaatataacgatgttaaccagcattttaatgctaaattttgttccctagagatgcttttacaacaagccgattttgtctgcattactttaccgctaacgccagaaactcatcatctgttaagcgcaaaacagtttgcattaatgaaagctgacgcctatttaattaatgccggacgcggtgccgtggttgatgaaaaagcattaattaacgcattagagcagcaacaaatagctggagccggattagatgtgtttgagcaagagccactgccaacctcttcaccacttttaaccatgaaaaatgttgtcgccttaccccatattggctctgcgactaaagagactcgctatgcaatggctgaatgtgccgttgacaatctgattgctgcattaaccgataatgtaaaagaaaactgtgttaatttttaa

SEQ ID NO: 297938 - DNA, 291 bp, Proteus mirabilis
atgcgccgtcaacttgagtacaagcagctctggcgaggaggtcaggtactggcaataccccctgcctacaccagtcagaagtgcgcttgctgtggtcatacagcaaaggaaaaccggcagtcacaaagtcaattcgagtgccttgaatgtggatatacagcgaatgctgatatcaacggggcacgtaacattttagcggtaggacatgccgtgcttgcctgtggagggagggtgcagtcagaccgcccgtcgaagcaggaacccgccgaggtgattcagacatcagtctga

SEQ ID NO: 297939 - DNA, 624 bp, Proteus mirabilis
atggctcttactgatgctaaagtcagggctgccaagcctctggataaatcgtataaattgaccgatggtgatggtatgcacttgatggtacatatcaacggctcaaaatattggcgtttacagtatcgctttggcggtaagcaaaaaatgttagcgctgggtgtttaccctgatatttcactcgcagaagccagagagaaaagagatgccgctagaaagttaattgctaacggatttgatccaagcgaaaaacgcaaagaagtgaaagaagagcaacaaaaagaatttaatacattcgagaaggttgcacgtgattggcatgcaaccaataagaagtggtctgaagggcatagccatcgagtattaaaaagttttgaagacaatatctttgcggctattccacaatggttaaaaatagaatcggttatctttcacaccctcgaccaattatgtcctgactatcacgggggtttttggtcgttttgtaccttatcgaatcaaggggcttatctttaccctgatttatcggaagagcacatgcttttgtgcgaacgtttttatcaactacgggattttgcttcacagcaccctgaagcagaggccatcttctacctaattgattaa

SEQ ID NO: 297940 - DNA, 828 bp, Proteus mirabilis
atgagtcgattagcctcacgctttgggcgtgccaatagtattcgtcgtgaacggccattaacgatggaagaattattttgtaccgtacccagtgttttctctgaagaaaaacatgagtcgagaagtgaccgttatacctatatccctaccattacattactcgatagccttcaaaaagaaggattctatccgttctttgcttgccaaactcgtgtacgtgataccagtcggcgagagcataccaagcatatgttacgcctacgtcgtcatgaccaaatcacaggaatccaagtgcctgaaattatcttacttaatagtcatgatggctcaagcagttatcaaatgttgccgggcttatttagagctgtgtgtcaaaatgggctagtgtgcggtgataccttcggtgaagtgcgtgtaccccacaaaggtgatgttgtagaaaaagtaattgaaggagcctatgagatattggaaacctttgattcagttgctgaaaagcgtgaacagatgcaatcgttattgttaccaccaccagcacaacaagctttggcacaagcggctctgacctatcgatttggtgaggaacatcaaccgattaccgaggaacaagttttacagcctcgtcgctgggaagataagaaagatgatctctggacagtatatcaacgtttgcaggagaatttaatcaaaggtggattatctggcagaaatgcgaaaggtaagcgatctcgcactcgttcggtgaatggtattgatggggatatcaaattgaataaggcactgtgggtgatgactgaaaagatgtatgagtgtttttcaattaattaa

SEQ ID NO: 297941 - DNA, 891 bp, Proteus mirabilis
atgtcactaaactcatttattgatattttaaaaaatgaccaagccttagctattagattagcatttatagatttcaaaattttttatactggtgtattgtcaagaacagatattacaagtgaatttgatatctctgaaataactgcaactagaataatatctaaatataaagaattaagagagaaaaatctctattatgataataaaagcaaaaagtttgaattaaatgaattagagtatcaatctcttgttgattttagctctgaagatgcactaaagatgctatcagaaggttttgataaaaataagttcgttagaagtcgaaatattatacgatatgaaaatatagacttcattcagtctcctttagaaaaaaacaaggtagccataataacaagagctatatttaataaaaataaaattaaaattaaatataactcaacaactagtaataataaagaaaatcgaattttatcacctctagtcattttatttgatggtagaaattggatattcagggcttaccatgaggattctgacacggaaataaaatataaaaactttaatttttctcgtataatcgaggcagaaaaaaccaatgaatcaatagattataatcaaaccttagattatgatgatttgtggaacatgaatctccctattgagttagaaattaaccctaaccttaaaaaacaaaaaaaagatgaaataaaaagagatttcggtattaatagtttagataataaagtactaatgacttcgagagcagcatttgtctggataatattaaatcaatggttggtttgttatgaaaaggatatagagtctgacaatcattataatttcattttaaaaaatacagacatgttaaagtcttacaaagctatctaa

SEQ ID NO: 297942 - DNA, 171 bp, Proteus mirabilis
atggctacaaatccaccaaatgataatcgtcgtattggaatggttcgtgaacgttctcaggtattgaaccctgtgacaggtacatgggttaaacgggatacaaacacaggtcgttttatggatgtaaaatcagatggtacaccattcaaaggtgtcagaaaggaaaaatag

SEQ ID NO: 297943 - DNA, 264 bp, Proteus mirabilis
atgcaatatcaatattataatttaagatctttaaatgcagggcaagttgtcgaaattagtctttcaggtaatgcggctaatgttaaattaatggatgctaataatttccatagttataagtctggccgtcaacatcgttattatggggggtatgttacttcatcattaacaaggctagatgttccatttagtggtagttggcatttagctattgatttagggggacgctcagggtctgtgagatcaagcgttagagtgtattaa

SEQ ID NO: 297944 - DNA, 663 bp, Proteus mirabilis
atgaaagcattagcgatatttggtagtacagctaggaatgagagagagtttgattcagatatagacatgataggaatttatgagggcagtatcataaaatcagttaatcatgctaatgtcagcttgttcttatacccagaaaaagtactaaatgaaaaaatgctttcaggggatttgtttgctttacacttggtaaaggagtcaataccaatatttggtgaagaaacccttaataagatatactcaaggtttaagtataaagatagctacagggaagaaatggatacttccctgatgcttgcctttaaaatacttaatctatatgaagagctgactgtttttaatgaagcaaacaaaaaactagtatggagccttcgtacttttataatttcggtatccgcacaagatcaaactcctgttttttcaaaaaaactaatagcaggatatttaaagcttttatcaataaattctgaatcaatacttagactaataaacatgaaaagtatgaaaagtaaattaccgaaatgtattcttaatgaattcaaatcattattcgatgaactatatgttaagtttggaagtaaacacctattagcaaatgagtcattaattaatgatataattgatgggattaagggcttagataaagtcagtgactattaa

SEQ ID NO: 297945 - DNA, 1233 bp, Proteus mirabilis
atgcggattattcacacctcagattggcatttaggacaatatttttttacaaaaactcgcgcccaagagcaccaacaatttctcgattggctattagcgcaaatccgtgaacaacaagttgatgcagttattgttgcaggggatatctttgatactggctccccccccagttatgcccgagagctttataatcgatttgtcgtcgcaataagagatactcagtgccaactgattattttagggggtaatcatgattctgtggcaacgctaaatgaatctaaatcactgttagcgtgtttaaataccaccgtcattgctaatgttcacactgaaaccccacaagcccctattattctttatcaaaaaaatcacacacctggagcattactttgtgcaatcccctatttacgccctagagatatgataaatagcaaaagtgggcaatcgggagcagacaaacagggcgctttaaaagaagcgatcgcagattattatcaacgccaatatcaagccgcgctcgacttacgaaaacaactcaatgttaacatcccaatcattgccacagggcatctgacaacgattggcgccagtgttagcgattcggtacgtgaaatttatatcggcacattagaagcctttaacgcaaccctatttcctccatttgactatatcgcccttggtcatattcatcgcccacagcgcgtcaataaatcgggtcatattcgctacagtggttcacctattccattaagttttgatgaaagtgcacaacagaaaagtgtttgtcttatcgattttgagcaagataagttagcggaaatgacactattacccatccctgagtttcagctattacgcactctttcaggctcgttacaagaaattgccacacaactcgaaaagttagcaacacaatataatgaaatggataccacgatttggctagatattgaagtttcaactcaagattatctcagtgatattcaaacccgtattcaagagctaactcaatcgccactctttgaagtgatcgtattaagaagagcgagaaaacaacgtcaagcactgatgcaaaatgagaaagaaaccctaactgaactgactgtatatgatgtatttgaaaggcgcttagctcaacaccagtttgaaaccgaggaagacaaaatacggttaaccacactctttaagcaagcggttgaaatggcagagcaagaggataacaacgcacgatga

SEQ ID NO: 297946 - DNA, 474 bp, Proteus mirabilis
atggctaataatatttacttacgtttaaatggaaataaacagggcttaatttcagcagggtgctctacttgggactcaataggaaataaatatcaagaaaaccatactgatgagatattagtaatagcttcttcattcaatataaacagagcccaaaatctgagccaccatccaatgtcaattaccaaacatgtcgataaatcaacgcctttactcattgtcgccatcacaaataatgaaatattaagatgtgaacttgattactatcgaacctccgctactggttcacaagaaaaatatatgactgttgttttaactaatgcatcaattgttaattattcccaggtgaatgccagcacaataactcaaagtgattcattacccagtgaaataattacaatacactatgaaagtattacatgtaatcacatcatggctggtacgtcgggatatagtatctcaagtacaatttaa

SEQ ID NO: 297947 - DNA, 417 bp, Proteus mirabilis
atgaaaaatgaaacgaatattcgccttggcagacattgtgtattcctgatgcacgtccatttggtctttgtcacaaaataccggcgaaaaatatttgatcaggatgcaattgaaaaattgcgaggctactttgccagtgtttgtgctgattttgatgttgaactggttgaaatggatggggaacgggatcacgttcatttactgattaattacccgccaaaactggcgatatctaatctggttaacagccttaaaggggtatcgagtcgattacttcgacgtgatcgtcctgatattgcccaacgtgattactacaagggggttctttggtcgccgagttatttcgcggggagttgtggtggcgcaccaatatccattatccgccagtacattgagcaacaggaaacatctagttag

SEQ ID NO: 297948 - DNA, 738 bp, Proteus mirabilis
atgaaatattctactttagcaatgctaattattaaaatggttattacaacttgcttgacaatatcttttttttcatatggagcagttactttagatcgtactcgaataatatttccagggaatgaaaatgctgtaaatattactattattaatgataacccagaagaggcttatttagcacaaagttggattgaagatattaatggcaataaattaactaaaggagcaatattggcaacgccaccattacaacgggttgagcctaaaagaaatagcctcgttagattaagtaaaacgccggaaattgctaatctgcctaaagatagagaatctattttctattttaatttacgtgaagttccacctaaatcaaaaagtgctaataccttacaaattgcactacaatctcgtgtcaagctattttataggcctgagggtattttaaacgaagctgagactaaatggccacataaaattactttaacaagaattagtaaaggctatatcattaataatgaaacaccattttatttaaccgtaataggtattggtgatgataaaggtagtgctgaaaatagtgattttaaagtgattatggtagagccaaagtcgcaagaggaaattatcgctaaatttataaaaaaaccacatctaacttatattaatgattatggtggaaaaccaactttagtatttaattgtcaagatgatacttgtaaagttattgatgaaaaatag

SEQ ID NO: 297949 - DNA, 465 bp, Proteus mirabilis
atgaataaattatattgcattaaaaataatttaattatgtttttattaatggttatattttattattcatttaatttatctgcttatgcatggactattgatgcagcaacaaagtcagattatcaacatgagcataaggggatcatattagtaaaattagctatcaatgcttcaccttgtcaatctgaatatagttttataaaagaaaaaaacactagttttttatttagtgaacaaaaatatacagttaaatataacttttttaattgtggtgctggagataattttgaaaaaataaacattagccagttttctaaaaaaacacctgtagatttgattttatataatactaaactaaagagagtgatttttaataaaaatctaagattagataatgggaaaaatgatgtttatttttcttcactaaatgcaagtaattatcttttggagatgcactatgagtaa

SEQ ID NO: 297950 - DNA, 858 bp, Proteus mirabilis
atgcatgataaaataattaacgatatccttgattggatagaagataatctgactaaaccaatttcaacaatagatgtaataaaaaaatctggttatagtcaaagatattttcaagatctatttctgcataaaacaaaatcaactattgctaaatatattttgtctagaaagttatctatgtcagcaattttgcttaaattaactcggtattctatatcagaaatatctaatgattactcttttacttctcagcagaatttttcaagagcttttaaacgatattttaaggtaacgcctgaattttatagaaagagtaaattttgggattttagatattatcgacctcaacataaagtatttgattttaaaaaaataaattgtcagttaatttatttatcaaaagatagattgcttgataataattctgatgattttaagttttttgatatttctattccttttgactttaagtcaaatattgcaatagaggggctaggctataaaaataaaaaacagattgaaataataaaaagtcttgttgattcatcaaatgataatttgtgtgtatcttataattatttccttagtagtaaagttaaaaataaaatcactgtaaaatataatataaaatatattcatgattataatttttcctttaataaggaaggcctaaagtattatctattttcatttttaggctcttgggaagattatatgattttatccaatattatctatatgagagaattaccgctattgcaagccaagagaagagatggctatgatatagaaatatttaattcaggtaaattagataaaaacatttgttctttaaattatcttatccctataatttag

SEQ ID NO: 297951 - DNA, 1254 bp, Proteus mirabilis
gtgttttctataaataaactcaaaataataacgtttgttattttaggaggtgtattatttaattcacatgcaaactctttaaagtatatattaaataattcattaaataatgcgcctgagttattagaagctaaagctgatatagatatagccgttgcaaaagttaatcagactagagctcaacattttcccgtaataagcgtaactggaaataaattattaggacaatatcatagagataaaagcgactatgataataatagttttattccaggattaagaggtgaattaaatatctattctttcggtggaatagaaaatgatgttgaacgtaatgaaaaagaacaactctattatcaatttaaatatagcgaaacgaaagaaaatgtcgcttacaccatatcagatctctatttaaaagcattgctagctaaagaatctattgcggtaaagaaaaaaagtttagatagacataataagattatatctgaattaaatgtgatagcccgtaatgatgaagggcgtgtttctgaatatgttcaggcagaagcaagaaaaatattagtagaacaagatattaactattatgaaaaagaattaatgacaacgttaagtacgttatcaaaatatacgggtttccccgttggtgaaagtgatcttgtcaatccttttgatggaatgacggtcagtgatatgtatagcgaattcactgcggaaaataataatcaaaatccggcttatctagtgagtcaggctgatatcgatgctaaaaaaatgggcgttaaagtagaaaataaaaaacaattaccaagagttaatttaactggaaatataactaaagatgatcgtcagataggcattgatgtgacatgggacattattaatttttcatcattatattctattgatgaaaaagtaagtcagttaaacgcggcacaacagagaatggagagagtgattagagatattgaagaagcaagacgtttatcagtaattaatatccaaaaaagtactcaaaaattgaagatattagatgcacaaattttatcatcgacaaaagtagtcgatttttatcaattgcaatttaatgttgcacgccgttctttgttagatgttttgaatgcagaaaaagagttatctgatgttgaattatcttatgccacgacattgagtgatcttaggtacgggatgcttgattatttgtatgcacaaggaaaactttcgcactgggcacttaattcacacactcactaa

SEQ ID NO: 297952 - DNA, 2163 bp, Proteus mirabilis
atgaaattgatcatagaaggtctttctcttacaacccagttattaggcacacatttatctgtggctacactgactgcacatacaatccgtactacaaagatgggaattgatttttcatcactggttgaatatctgaaaagtgaaggatttgaaaatacattatcacaacgattattagatgatattccctctctagctatgccagtattattattattaaaaaatgaagagagtgctgttttaaccgaagtttcatttgatgaaactggacaacgtaaatataaaattcagcaagtagatggtttatctatatggttaacacaatctgaattaagtgaaaaatatttaggttattgctggttcattaagccacgtattacagaagatgttcgttcagaattgcctgaatatacgatgcctaaagcatggttttttaaagttatatggcgctttaaaaagtattactatcaaatcattcttgctacttttgttattaattttttggcacttgttagttcattatatgtcatgaatgtttatgacagagtaatacctaataagtcatatcaaacactctgggttttaagtatcggggtaattattgcaatattatttgaatttacagctaaaatgctccgaggccggttaactgatattgctggtaagaaagctgatttaattatcagttctgctttatttagaaaggtcacaaatcttaagttacaggaaaaacctatatcatctggctcctatgttaataatttacgagattttgaatctgtccgtgattttatgacgagcgcgagtttattaacattagttgatatgccttttttaattttatttgtatctgtaattgcgcttgttggaggctatttagcttttgtgccacttacgataattccattggttattattgtcggatttttagctcagatccctttatccaaatatattaatgaatcgatgaaggaatcatctcaaaggcaaggattagctgtagaagcgattgaaggtatagaaacattaaaaacgaataatgccatgaattgggcgcaaaagcgttgggattattacacagcaaaaacagcatcttcatcaatgaaagttaaaaacatcagtaattttgttatttattttgcagtaatgatgcaacagttaaatacgatatttttagttattattggtacttatttgattcatagcgatgatcctgcaagtaaaattacaatgggggcgttaatcgcaacggttattttatctggtagagcgttatcaccattaggacagattgcgggtttagctgtgcgctttcaacaggcttgggtcgcattaaaaggtgttaatggcattgttgagcgaccatcagaacgtgaaccatctaggaaatatattacgttaaaacaaataaatggaaatataaaattccaaaatgtttcatttgcttataaccaagatagtagcagtgtagtgaaaaatttatcatttgaaataaagccaggtgaaaaagttggaatacttgggcgtattggcagtggtaaatcaacgactttaaaattagcagctgggttatatcctgcagagcaagggagtatcacactagatgatgtcgatattcgccaaatagatcctcattatttgcgtaatcagattttgttattagaacaagagccaaggttatttttaggtagtttaagagaaaatcttgatttagcccgtatggatggcttctctagtgatcaagatttgattgtggcactgaagcggtttggtttggataaagttattaaaaaacatcctaggggattagatatgtccttgggagaaaatgggttaggtctttctggtggacaaaaacaaattgttgctttggctagaatgacgttgagaaatcccaaaattgttttacttgatgaaccaacaacggggcttgatcaatattcagaaattcaggcattaaatgccatttcagcatggtgtcgctcaaagacattattggttgttactcatcgacctcaggtactgagtattgtcaatcgaataattgttgttgataacggcaaagttgtgatggatggtcccagagatgcggttttacagcagttagctaaaaatgaaacagaaaaacaaataactgctcactcaaaaaaccaaaatagataa

SEQ ID NO: 297953 - DNA, 1647 bp, Proteus mirabilis
atgaatatagcgatgacagaaagatataaatggttattgtttttcctatttatcttattaacttattttattcctttagaaacgcgactgttatggcaaccagatgaaattcgttatgctgaaattagccgtgaaatgttagtttctggcaattggtcagtgccttatcttcttgatattcgttattttgaaaaacctgttttaggatattggatcaattgtattgctcagtggctatttggtgaaagccattttgcggtgcgtattgttgtagtaacatcaaccttattaacaggatggcttatttataaagcggcaatggtagtttggcgcaatagcgctcttgcttttaatgctatgaccgtttttttatcttcttttctggtattagcaataggtacttataatatattagatcctattgtgacgctgtttgtgaccgctgcaatgtactcatttttagttgcgttatcgaccccgaataaaaagggcaaaataattgcttatatgggtattggctttttttgcgcacttggttttttaacaaaaggctttattgcggttgttttacctgcattagtttttttagtcatggcaattagtcaagctcgctttaaagaagtggtttgctattcctctattgcattgttagctctcgctattacagctggaccttgggtgattactgttgcattacaagcaccggattattggaattattttttctgggttgaacatgtacagcgttttattgctaaagagtctgctcgctcacaaccaacgtggttctatatcccgatagttatattgggtgtattgccttggctaggttttttatttggtgcattaaaatcagctttctctttaaaaaaaggtacactctattttctgctgtggtttgctctcttttttgcttttttctcagcctcaaaaggaaaactattaacctatatgctaccgtgctttgtgccattatctattttaattgcacactatatcgaagagttaaaagatagacctgatgagaaaattagcaaagtgaatgcatctattaatattgcttttgggctaatgggtatatcagccgttatctattctttatacagtgccaaatttgcgctttatgatacgaatgaaacgttaaaaatagtgttagcaataagtgggtttttattttggagtgtgattggtgcgggggcgctgtttagacaaacacagtttttaacgatgttttgctctatcggactaagtttagttattggatatgcaatcccagaaaagatagaaagtaggagtacaccagaaaatattatccaacgttattatgagcctttgagtaataaatcgtatcttttaacggacgaagttggtattggtacatcacttgcttggggactaaaacggactgatattcgtttaacagagacgaaaggtgagttggcttatggtttaaattacccagatgtaaaaaataaatactatagccttgaacagctattagcattaattgaagcaaaccaatataaaggggtagcgattgttttagtcagacctgatagaaagcagattttgactaaattgactacattaaaggaaaagccgatagtagaaaaagagggcgatttaacgctggtgttctttaattag

SEQ ID NO: 297954 - DNA, 1326 bp, Proteus mirabilis
atgactatagaaaaaaatgttataccactgtcagaaaaaatttcagatgatccaaagaaatttctcgttattggatggactgtggttttattaggcttagcaatttttattttttgggctgctttcgcgccccttgataaaggcgttcctgcaataggaaacgtagccatatcggggaataaaaaaagtgtacagtcatctgttgaaggtattattactcatatttttgtaaaaaatggtgatccggtatctgccggacaaacactgatacaattaagccctattcaatctcaagccttagtaaaatcgttatcagagcaatatgataatttactgatcactcaacaaagattatatgctgaacttaatcaacaaacttcatttaaattaaataatagcgataaatactattcatctactgaaaatagagagaagttattactacaacaaaatcgtttattaaatgaaaaaagtgcagaattaataagtgaaataaatggttataaagcagctatcgatggcattactagtcgcctaacccatctaaagcgctcaattcagaataaaaagagtcaaattagtaatctacaaaaccagcttaatgatttacaaattttagctaatgaaggatatattcctcgtcaccgatatcaagaaatgataagagaattagctgaaaataataatcaacttaacgagacttttgggcaaataagcgcattagaaaagcaaaaattagaatatgagcaaagaatattgcaacgtaatgctaattactaccaattagctagaactgagctaaataaaatacaattacaaatcagtgaaacagaaaaacaacttattatagaaacagataaattagctaaaatggcaattatcgcaccgatatcgggtactgtgatggatctttctgtttttacccaaggtggctttgtaaaaacaggtcagacattgatggatatagtgcctgaagatcatcaacttgttattgaagcgcgtcttgctccgcatcttattgataaggtaactcctggccttcccgttgatttgatctttagtgcctttaatcaaaataccacgccaaaaattcctggtgaagtaacgattatttctgccgatagattaattgatgaacgaacaactgagccatattatcaagttcttattaacataaaagattatacattattagcagataataaaaataaattgaaagcaggtatgcccgttgatgtatttattaaaactggcgatcgctcattattaaattatcttttcaaaccagtattggataggctccatacttcattaacggaagaataa

SEQ ID NO: 297955 - DNA, 1158 bp, Proteus mirabilis
atgatgacaattaacaacagcaacaatcttacgggcaatgagccggctaatgatgaaacctatatgcgtcgagcgatagagttagctgcattaggacgttttacaacatcacctaacccaaatgtgggatgcgtgattgtgaaagaagggaagattataggtgaaggttatcaccatcatgcaggtggtccacatgccgaagtgaatgcattaaatatggcgggtgaaaatgccaaaggtgctactgtctatgttacgcttgagccatgtagccactttggtaaaacgcctccttgtgctgatgctttaatcaacgccggggtaaaacgtgttgttgctgcaatgcaagatcccaatcctcaagtggcaggacgtggtttacataaattagtcgctgcaggtattgatgtttctcatggcgtattaatgcaagaagctgaaaaattgaatatcggcttttttaaacgtatgagaacagggtttccttatatccaattaaaactggccgcctctttagacggtaaaacggcattagcatcaggggaaagtcaatggataacctctaacgcttcgcgacaagatgtgcaaaactttcgcgcgcaagctagtgctattttaacaacgagtgccactgttttagccgatgatcctgcaatgaatgtgcgttgggaagcattatccgatgagataaaagcgatttatccactagagtcattgcgccagcctattcgcattattaccgatagccaaaatagggtaactcccgactataaaattacacaacttgcaggtgagtgcttgcttgctcggactcactctcagcaagaagcttggcaaggtgatgtctcagaaattttgcttcctactaatggcaaaaatagtagtgtcgatttagtgttattaatgatgcagttaggtaaacgcaatattaatagtgtatgggttgagagtggcgcacattttgctggcgcactattagagcttggtcttgttgatgagcttatcatttatattgctccgaaaattttaggcaatgatgctcgaggtttattatccatttcaccactgtcgtcattatctgaagcccctgaatttacaatagattctcttcaacaaatcggccctgatatccgcgtttgtttaaaacctcgttattaa

SEQ ID NO: 297956 - DNA, 369 bp, Proteus mirabilis
atgcacgtccatttggtctttgtcacaaaataccggcgaaaaatatttgatcaggatgcaattgaaaaattgcgaggctactttgccagtgtttgtgctgactttgatgttgaactggttgaaatggatggggaacgggatcacgttcatttactgattaattacccgccaaaactggcgatatctaatctggttaacagccttaaaggggtatcgagtcgattacttcgacgtgatcgtcctgatattgcccaacgtgattactacaagggggttctttggtcgccgagttatttcgcggggagttgtggtggcgcaccaatatccattatccgccagtacattgagcaacaggaaacacctagttag

SEQ ID NO: 297957 - DNA, 3084 bp, Proteus mirabilis
atggctaagtttacaagacgtcaatggcttaaaggtggattggttatcggtggtattgccgcatttgctgccagttatcgcgatgttgctaagcgtgctgtcgacggtctcgttgatgggacatctggtaaggttactttggataggatcaacggtaactctttattaccagaaggtaaaatcacggcgaaagcgaattggcaacctaataccaatcaagctgtttgtatgactcagtgctttggctgctggactcagtgcggtgtgcgtgcgagagtcgatcgtaacaataatcaagtattacgtattgcaggaaatccttatcacccattatctcaggatatccattttggttataacatgccaataaaagaagcctttgaaaaaatggggggcgaaagtggtttagctaaccgctctacggcttgtgctcgtggtgcgacgatgatggaaagcctcgatagtcctactcgtattcttgaacccatgaaacgagtgggtaaacgaggtgaggggaaatggcaacgaattagctttgagcaactgatcaaagaagtggttgaggggggcgatttatttggtgaagggcatgttgatggcttacgtgctatccgcgatttagcaacacccattgatcctaaacagccagccctaggacctaaagcaaatcagttattagttactaatgctggggatgatggccgagatagttttattcgtcgttttgcacaaaatgcctttggtagtaaaaattttggggctcatggctcttattgtggattagcgtatcgtgccggctccggtgcattaatgaatgatctggataaaaacgctcatgtgaagcctgattgggatcatgttgaatttgcactatttttaggtacttcacctgcgcaatcaggtaatccatttaaacgccaaggtcgccaattagcgaatgcgcgtattcgtggttcgtttaactatgtagttgtggcacctgctttgccattaaccaccacgttagcgaatgatcatggtcattgggtacccgtacaaccgggaacagatgctgctttagtgatgggtatgatccgctggatcattgaaaacaaacgctataatgctgagtatttatcggtgcccagtgaagtgtcgatgaataatgttggagagcgaagctggactaatgcgacacatttagtcattagtgatgaaaatcatccactgtcagggcagatgttaaccgccgcgcatcttgaggatattgccgatgatggcgaagcgcaaaatatggttatagcccttaatggacagcttacagcagcgacgcaagtagacagagcacagctttttgttactcaaaaagtgacattaaaaacaggtattgaggttacagtaaaatcaagtttccaattattaactgaagctgcaagtcgcatgtcattggcggagtatagtgaacgttgtaaagtacctgaaagcactattgttgccttagcgcgtgaatttactgactatggacgaaaagctgcggttatctcacatggtggcatgatggggggaaatggtttctatacggcgtggagtgtcatcatgctaaacgctttaattggaaatctaaacctgaaagggggagtatctgtcggtggaggtaaatttaatggtgcgatagatggccctcgttacaacatggatagttttaaaggcaaaattaagcctaaaggaatggtgctatcgcgcagtaaagcggcttatgaacaatctgatgaataccgtgaacggatcgcgaaaggggagtctccttatcctgctaaagcgccgtggtatccgtttgccgcagggcaattaacagagcaactggggtcggcattagcgggttatccttattcattaaaagcatggataaccaatatgacgaacccgctatacggtattgcaggtattcgccaagttatggaagcgcgtcttaaagatccacagcatctaccattgattattggtatcgatgcttttatgaatgagaccactgcactggcggactatattgtgcctgatacgcataactttgaaagttggggatttagtgcgccgtggtctggtgtacaagtcaaagccagtacggcacgttggccgattgtagagcctcgtgtggcgaaaacagccgatggtcaacctatatcaatggaaactttctgcattgcggttgctaaagcattagacttacccggctttggtgaaaatgcgctagaagataaagatgggcatttccacgcaattaatagtgctgaagattattatctgcgtgtagcggctaatattgcctttatgggcgagcagcctgtagcacctgccagccatgaagatattttattaagtggtgtcgatcgtattcttcctgctattactgccactttaaaagaagaagaagtcctaagggtggcgaatatttatactcgtggtgggcgttttgccccttatgataaagcatggaatggtgatgcgacaggcccgcaatggaagaaaccattacagatctggaatgaaaatgtagcgaagaatcatcatgctattaccggtgagcgatatagtggttgcccaacttattatccaccgcgtttatctgacggtagcgatatacatcaacattttccacaagagcaatggccattaaaactgatgtcctttaaatctcatgtggtaagtagctcaacgggcatgatccaacgtttaagaatggtaaaaccaagcaatttagttgcgattaatccgctagatggtaaaaaatgggggatcaagcatggtgataaagtgcgcatagtgacccctggtggagaggttgaggctgaaattagtttattagagggggttatgcctggagtgttagcgattgaacatggttatgggcataaagagctaggctcacgtcaacactatttagatgggcaaccattagctatggataaagcaataggtagtggtattaacttaaacgacttaggctttgctgatccaacacgagaaataacgaatacttggttagattgggtttctggtgcctctgtacgtcaaggattaccggcaaagattgagcgtatcgcctaa

SEQ ID NO: 297958 - DNA, 984 bp, Proteus mirabilis
atggataataattcgctaaaaaatgcgagtttatttgataatgatcccgttctttatgctgcatggctttactatcaggacggactcagtcaaagtgaagttgcaaatattatgagcgtttctcgagtgactgttgtgaagtatttacatctcgcgagagaaaaaggtttcgttaatataagcttggattcatcagtattttctacgattgattattcaatcagaataaaagcaaaatttaatcttaataatgtgcttattttacctgatgaagaaaagaataaatcgcaacaaacatcaaatatgaatcgagaaagattagctaaagcaggggctatgtatctttctcagataatcagcaatgatgatattttaggcgtagcttggggaagaacaatccataaactagggcactatctccccactaaaacactagaaaatgtcactgtgttacaaatgattggggctgtagctccacaacctgattttactactgcggaatctgccgctttgatcgccaataagttttcaggttgcagtattaatttgcatgtaccggctgtagtgtcaaatgcacgtttggcaatggagctacaagcagaacccataatacggcgtaatttctctgctttaaatcaatgtaataaagctttgtttgtagtgggtaatactcaagatgacaatcctttgattacaacaggcgtactcaccacaaatgagatggcacaatatcgcgatttaggtgctgttggtgtcatttgtggtcgattctatgatgcacaaggtaatcctctgctttctgatatcgaccttagaattatgggaattagtcttgcacagttaagacagatcccacagcgtatttttattgctggaggcgttgaaaatgttgctgcaaccataggcgcaataaaagggggatatgctacagatattgtcatcgatgaagtgacggcattagcattattggagttgagtatttaa

SEQ ID NO: 297959 - DNA, 1254 bp, Proteus mirabilis
atggaaagcaaagtagttgttccggctaatggtgctaaaattacattagatgctaaaggtaagcttgttgttccaaataatccggttatcccttatatcgaaggggatggtatcggtatcgatgtcacgccagcaatgttaaaagttgttgatgcagcggttgaaaaagcttacggcaatgaacgtaagattgagtggatggaagtctacaccggtgaaaaatcaacacaaatttatggtaaagatgtttggctgccagaagaaaccttagatcttattcgtgaatatcgtgtttctattaaaggtcctcttactacaccagtaggtggtggtatccgttcattaaatgtggcactacgccaacaactcgacctttacgtttgcctgcgcccagtgcgttattacaaaggcactccaagcccagtaaaacacccagaactgacggatatggttatcttccgtgaaaactcagaagatatctatgccggtattgagtggaaagccggttcagcagaagctgataaagtgattaagttcctgcaagatgaaatgggtgtaaccaaaattcgcttcccacaagattgtggtatcggtattaagccatgttcagaagaggggactaaacgtttagttcgcgcagcgattgaatatgcaattgataacgatcgcgactccgttacattggtgcataaaggtaatattatgaaatttaccgaaggtgcctttaaagattggggttacgaattagcccgtgaagaatttggtggtgagctgttagatggtggtccttgggttaaaattaagaaccctaaatcaggtaaagatattattgttaaagatgttatcgcagatgcattcttacaacaaatcctgttacgcccagccgagtatgatgttatcgcttgtatgaacctaaatggcgactatatttctgatgcattagcagcacaagttggtggtattgggattgctcctggcgctaatattggtgatgagtgtgcattatttgaagcgactcacggaacagcaccaaaatatgccggacaagataaagttaacccaggctctattattctctccgcggagatgatgctacgccacatgggttggacagaagccgctgacttaatcattaaaggtatggaaggcgcaattgaagcgaagaccgttacttatgatttcgagcgtctaatggacggtgctaaattgctgaaatgtagcgagttcggtgacgcgattatcaaacatatgtaa

SEQ ID NO: 297960 - DNA, 453 bp, Proteus mirabilis
ttgtttaaaccacatgtcactgttgcttgtattgttcatgcaaacaataaatttttagttgttgaagaaacggtaaatggcaaagccacatggaatcaacccgcaggacatttagaagcaaatgaaaccctgatccaagcggcacaacgagagttatgggaagaaaccggtttaaccttgccggtacaatattttttgaaattacatcagtgggtggcaccggacaatacgccatttttgcgttttttatttttgatagaagcaccagaacaattagccacacaaccacatgacgatgatattaatggctgctactgggtgaccgcgcaagagataatcaatagccaacaattacgttcaccgctggtaaaagaaagtattctttgttatcaacaaaatgaacgttatccactctctttactggatagctttggttcaacatttgcctcttaa

SEQ ID NO: 297961 - DNA, 1371 bp, Proteus mirabilis
atggaattatcttcgctgacagcgatttcaccgattgacggtcgttacggtagtaaaacctcgtcgttacggactatttttagtgaattcggtcttttgaaattccgtgtacaggtagaagttcgctggctacaaaagctagcatcttgcaccgacattaaagaagttcccgcctttgaacaaaacgcaatcgattaccttgatgcaattgttgctaacttcaatgaagatgatgctgctcgtatcaaaactatcgagcgcaccaccaatcatgatgtgaaagcggttgaatatttcttaaaagaaaaagtggcagctatccctgcactacagcaagtttctgagtttattcacttcgcttgtacttctgaagatattaataatttatcccatgccatcatgttagaaacagcacgccaagaagtgctactaccagcatggcgcgagcttattgatactatcagtaaaatggcgcaagcatatcgtgatttacccctgctctctcgtactcacggacaaccggcaacaccttcaacggtaggaaaagagtttgcaaacgttgcataccgtatggagcgtcaatatcgccaacttactcaagtagaaattttaggtaaaattaatggtgcagtaggtaactataatgctcacctagctgcctatcctgaagttgattggcaccaatttagtgaagaatttgttacttcattggggatcacatggaacccatatactactcaaattgagccacacgactatattgccgagctttttgattgcatcagccgctttaatacaattttaattgattttgaccgtgatatttggggttatatcgctcttaatcacttcaaacagaagaccattgccggtgagattggctcatcaacaatgcctcataaagtgaatcctatcgattttgaaaattctgaaggtaatttaggtttagctaatgccgttatgggtcacctttccagcaaattaccggtttcgcgttggcaacgtgatttaactgactcaaccgtactacgtaacctaggtgtcggtatcggttatgcattaatcgcttaccaatcaaccatgaaaggcttaaataaattagaagttaatgaaagtcatcttcgtgaagagttagatagcaactgggaagttcttgctgaaccaatccaaacggttatgcgtcgctatggtattgaaaagccttatgaaaaacttaaagagttaactcgtggtaaacggatcacggcacaagatatgattgtgtttattgacggtttagcgctaccagaacaagaaaaagcacgcttaaaagcgatgacacctgaaagctatattggttttgccagtcaacttgttgataaattagattaa

SEQ ID NO: 297962 - DNA, 1464 bp, Proteus mirabilis
atgcgtaaaaaacaacgttcgcccttctctttacgaacaagatttttacttgccaccagcgccattattttagcactgacactctcttatggtttggttgccatagtcggttctattgtcagttttgataaaacgacttttatgctaatgcgtagccaaagtaatctctactatagcttagcgcaatggaaagatgggcaattgcagattgaatttccgactaacctcaataacaacaacacatcgctggtggttattttcgacgagaaaggcaatgtgctatggacgccaacggatttacctcaggtgatcccaaacagtatcgcgccaaaatggcgcaataaagaaggcttatttgaaattagtgtgaatgttaaaacgacacgttttatgttacagcaactgcctcaatatcgtgcctatctaaaaaaactcaacgaatattcaagtaatgataccttaacgcattccgtggttattaatcactatcctgcggcggataatatgccttatctatccattgcggttatcgatcctattcctcaaagtctgcaaaatgtaagtagagtctgggattggtttctctatatattactagctaattttcttttggtgatcccattaatttggttagcagcccattggagtttaaggccgattaaatccattattgagcagatcagcgcgttggaaaaaggcactcgcgataatttagatgaaaatcctcctaaagagctcaaaggattagtttataatctcaacattttattgcgtaatgaacgcaaccgttatagtaaataccgtaccagtttatctgatctgacccatagcttaaaaaccccccttgctgttttacaatcaacattacgtgctctacgtgctggcaaacaaatgtctatagaacaagctgagccaattatgcaaagtcaaattgaacgaatttcacagcaagttggttattatttacatcgagcttctcttcacggcgatcacgatataacaacacgtaagctccactctttatcaggcttacttgacaatctttgtagtgcacttaataaggtctatcaatccaaaggcgttgatataacgttaaatgtttcccctgaaatgatgtggttaggtgaaaagaatgattttatggaagtcatggggaatgtacttgataatgcttgtaagtactgcttagagtttgtcgagatcaatgtaagtcatgatgacaattgtgtgattatcaccgtagatgatgatggcccaggagtcagcccagaaaaaagggagcttatttttcagcgtggtacacgtgcagatacattgcgcccaggacaaggcttaggattatcaattgctgttgatattattgagcaatataacggtgatatcaccattactgatagtccattagggggggcgagactcatcgtcacctttgctgagcaacaactcactactgaaatagagtaa

SEQ ID NO: 297963 - DNA, 1131 bp, Proteus mirabilis; identical to SEQ ID NO: 295142

SEQ ID NO: 297964 - DNA, 3078 bp, Proteus mirabilis
atgaaattcactgatatttttgtgcgacgacctgttttagcgttagtagttagcaccttgatttttttactgggcgcatttgcgttcagtaaactacctattcgccaataccccatgttacaaaactcaacgattaccattgcaacagactaccctggcgcatcgtctgaactgatgcaaggttttgtgactcagcctattacacaagccgtttcctcggtggaaggcgttgattatatttcttcatcttcagtacaaggaaaaagttttgtcacggtaagaatggagttaaatcgcgatccgacacaagcattaacgcaagtgatggccaaggtcaatcaagtacgttataaattgccagaacaagcttatgatcctgtgattgaactttcttctggtgaatcaaccgcagtcgcttatgttggcttttccagtgagcaaatttctattccagaattaactgactatctatctcgtgtggttgaaccgatgttttcctccattaatggggtcgccaaagtacaagtctttggcggacaacaactggccatgcgcgtatggctagatactgataaattagcggggcgaaacttaactgctagtgatgtcgctgatgccattcgccgtaataattaccaagcggctcctggaaaggtcgaaggtgagtttgttattgcgaatgtttatgtcaataccgatttaaccaatgtggaagaatttaaagatatggtgatccacaatgatggccataatcttatacgtctacgtgatattggcaccgtcgagctaggtgcggctgctactgaaaccagtggcatcatgaatggcaaaaaagccgtcttcttaggcctatttccaacaccaacaggtaacccgttaatcattgttgatggtattcgcgaaaaccttactgatatagaaaaaacactcccaccaggtgtaaatgtggagctggcctttgaaacttcacgttttattaaagcttctattgatcaggtggtgcaaacattaattgaagccattttaattgttattgctgttatttatctctgcttaggctcattacgttctgtaattattcctgtgcttgctatccctttatctatgttgggggcagccggattaatgttggcatttggttttagtattaatttgcttactttactagcaatggttttagccattagattagttgtcgatgatgcgatagtggtggttgaaaacgtacatcgtcatattgaagagggattatcaccagtgcaggccgcattagtgggggcacgagaggtcgcggggccggttattgccatgaccatcactttagccgccgtttacgcgccaatcggtctcatgtcaggattaacaggtgcactgtttaaagaatttgccataacgcttgctggtagcgtcattgtatcgggtattgtggcattaaccttatctccggtcatgagctcattaatgctcaaaccgaaagaaaatgaaggcaggatggctaaaatagccgaatatacctttgataaattggcatattactatagctatttgcttaatttttctttaactcatcgctggttaaccgtcgttttcgccttcgccgtgtttgttagcttgccgtttttatatagccagacaaaacaagagttagcacctttagaagatcaagcgagcgttttaaccgcggtaaaagcaccacaacatgcaaatcttgcctatgcggaacatttcaatcagaaacttgatgatatttatatgagcctaccagaaacagacagcacatggatcatcaatggtactgatggcccttcagcaagctttggtgggattaattttgatggttggaaaggtcgtgatcgtaatgccaatcaaattcaggcagacctacaaaatcgtgttgcggatgttgaaggaagcagtatttttgcttttcaattagcatcattacctggctctgtcggcggattacctgtccaaatggtgttacgtagcccattaggttatcccgttttatttgacacgatggaagagatcaaacagcaagcacgagaaagtggtctatttgtcgtagtggatagtgatcttgattacaacaaccctgttgtacagatcactattgatcgtgccaaagccaatacccttggtattcgcatgcaagatattggcgaatcactatccttattagtgggtgaacactatatcaatcgctttggtatggatggtcgctcttatgatgtgatcccccaaagtatacgtcaacaacgtttaactccggcagcacttgcagggcactatattcgtactcaagataacctgttaattccattatcaaccgtagtcaatattaccactcaagttgaacccaataaattaacgcaatttaatcaacaaaatgccgctatatttcaagctattccggcaccgggtgtcaccatggggcaagctgttgcgtttcttgaaaatgtggcaaattccttacccgctggctttagccatgattggcaatctgatgctcgccaatttacccaagaaggaaataccttagtctttgcgtttattgccgcccttatcattatttatttggtattagccgcacaatatgaaagcttggttgatccattgattattttgattacggtaccactctcaatttgtggtgcattagtgccattagctttaggtatggtgacattaaatatctacactcaaattggtttagtcaccttgataggacttatcagtaaacacggtattttaatggtggagttcgctaatgaattgcaagttcataaaaatctaaatcgacgtgaggcgattgttgaagcagcaaaaatccgcttacgccctgtcttaatgactacggcagcaatggttatcgggcttattcctctgctatttgccagtggtgctggagcgaatagtcgctatggattagggttgattattgtatcaggtatgttagttggcacgctatttacgctatttgtattacccacaatgtacagcttcttagcacgaaaccatcaagtcagcgctcagactgagcgtcaaaaacaattacagcaaatcagtgagcaataa

SEQ ID NO: 297965 - DNA, 3456 bp, Proteus mirabilis
atgtcctcagaatatcgttatcaacttcctgtaaaacaaggggatactcgccagctgggtcagctgacaggtgccgcttgcgccctagaatgtgcagaaatcatcaaacgtcatgctggattagtcgttcttgtcactcgtgatatgcaaaatgcactgcgtttacaagatgaaatccgtcagttttgtgattatcctgtagagacattatctgattgggaaacattgccttacgacagtttttctccccatcaagaaataatctctaaccgcctttctacgctataccgtattccatcacttctcaagggaattttaatcttacccgtcaatacgttaatgcaaaaagtctgcccaacagattatctcgcaagtcatgcattaataatgagtaaaggagagcaactttctcgcgacaatttacgcaaaacatttgatgaggcgggttatcgtcatgtagaacaagtgttagagcatggcgagtatgcaacacgcggcgcattacttgacctattcccgatgggcagtgaatttccttatcgaattgacttttttgatgatgagatagatagcctaagaacttttgatgttgatacgcaacgcaccttaacagaagtcgagcagatcaaactattaccggctcatgagtttccaactgatcctaatgcgattgaactctttcgtagccaatggcgtgaacgttttgaagtaagacgtgatcctgaacatatctatcaacaagtaagtaagcaagtattacccgcaggaattgaatactggcaaccgctcttttttagtcagccattatccaatttatttgcttatttcccacaaaacaccttaattgtgacgcaagatctgcaagattgcgctgataaattttggcaagatatcaaccaacgttatgaaagccgtcgtgttgatcccatgcggccattactgccaccagatgatatttggcttaatgtcgaaacgctcaatcaacagttaaaacagtggccacgtattcaacttaaaacgcaagcactgccggaaaaagcgggttataccaatttaggttatcaaccactgcctgatttatcagtcaatgcacaaagtaaatcaccgcttgataatctacgccgtttccaagagcaattttctggcagtattgttttttcggttgaaagtgaaggccggcgggaaaccgttcaagagctcttatctagaattaaaattgcccccaaacaaattattgaattagcggatgctaaagagaaagggtgttattttattattggctctgcagagcatggctttattgacaattatcgtcagttagcgctgatctgcgaaagtgatatgttaggtgagcgagtccaccgtcgccgtcaagataatcgtcgcaccatcaataccgatacactgatccgcaatctggcagaattaagtcccggacaacctgttgtccatcttcagcatggggttggtcgttatcaaggtatgaccaccttagaagcgggtggcgtaaaagcagagtacttgatcctctcgtatgcgggagatgacaaactctatgttcctgtttcgtcactgcatttgatcagtcgctactctggtggggcggatgaaaatgcgcctcttcataaattagggggtgatgcttggactcgtgcgcgccaaaaagcagctgaaaaagtgcgtgatgtggcggcggaattattagatgtctacgctcaacgagccgttaaatctggttttgcgtttaaattagataaagaacaatatcacactttccgccaaagcttcccctttgaaaccacacccgatcaagagatggcgattaatgccgtattaagtgatatgtgccaagccattgccatggataggctagtatgtggtgatgttggttttggtaagacagaagttgctatgcgtgcggcatttcttgcaataagcaacaataagcaagtggctattttggtgcctactaccctactggctcaacaacactttgaaaactttcgtgatcgctttgctaattggccggtcaatattgagatgatctcacgttttcgtagtgccaaagagcaacagcagatcaccgaaaaattagcagaaggcaccattgatatcgttattggtacacataaattattacaaccgggcattcaatggaaagacttagggttattaattgttgatgaggagcatcgcttcggtgtacgtcataaagagcgtattaaagcaatgcgtgccaatgtcgatatattaaccttaacggccacccctattcctcgtacgctaaatatggcgatgagtggtatgcgtgatctgtcaattattgccaccccacccgctcgccgtttatccgttaaaacatttgtccgagaatatgatgatctggttgttagagaggctatcttgcgtgaaacattacgtggcgggcaagtgtactatttatataacgatgttgaaaatatagagaaagcgcgtgataggctagcacagttagtacctgaagctcgtattggtattggccatgggcaaatgcgtgaacgtgagcttgaacgtgtgatgaacgattttcaccatcaacgatttaatgtattgctctgcaccaccattatagaaacgggtattgatattccgagtgccaataccattattattgaacgtgctgatcactttggtttagcgcaactacaccaattacgtggacgcgttggtcgctctcaccatcaagcctatgcttatctattaacccctcatcccaaagcaatgactaaagatgcccataaacgcttagaagcgattgcctccctagaagatctcggcgcaggttttgctttagccacacatgatctagaaattcgtggtgcgggagagttattaggtgaagagcaaagcggtcaaatgaataccgttggcttctctttatatatggagttactagaaagtgcagttgaagcattaaaagagggtcgagagccatcattagaagatctgaccaatcagcaaaccgaaattgaattaagaatgccggtgctattgcccgatgactatattcctgatgtcaatgtaagactttctttctataaacgtattgccagtgccaaagacttaaatgaacttaatgatctaagggcagagcttattgatagattcggcaccttacctgatgcaggacgcaacttattacgtaatgcggctattcgattaagcgccatgagtttaggtatatctcgcattgaagcccatgacaaaggtggctttattgagtttggtgaaaaaaataatgtcgacccgacttatttaatcggtttattgcaagagcaaccgagtgtcttccgtttagatggccctaccaaattgaaatttatgatcaccctaaccgatcgagaaaaacgactcacttttatcgacgatatgctcaccgcttttagtgaacacaaaataaacgcattatctgtttag

SEQ ID NO: 297966 - DNA, 1245 bp, Proteus mirabilis
atggataaattattagaacggttttttgaatacattagttttgatacacaatcgaaaccatcatcgaaaatgtcaccaagtagcgatggtcagctaaaattagcgaaggcactggtacaagaattaaaaaaactgggtttttctgatgtgacactcagtgataaaggatgcgttatggcgagtttgccctctaacgtatcttggcctgtacctgttattggctttatttcccatcttgatacttcacctgatttttcaggtaaacatgtaaaacctcaagtgcttgaagattaccgtggtggtgatatcgcgctaggtattggtgatgaagtattatcaccggttatgtttccaattttacactcaatgattggtaaaacattaattacaacggatggtaaaactctattaggtgctgatgataaagccggtatcgcagagatagtcactgcgatggtacgtttaaaagcacaaaatcgacctcatggtgatatccgtattgcatttacgccggatgaagagatagggcgtggtgcacattatgtcgacctaaaagcatttggtgctaactgggcatataccgttgatggtggtggtgtgggcgaattggaatatgaaaatttcaatgccgcttctgtgagtattaaaatcgttggtaataatgttcatcccggtagtgccaaaggcgtgatggtaaatgcgttaggactcgcttcgcgtattcaccaagaattacctgttgaagagacccctgaaaacacagaaggctatgaaggtttttatcacctacaaagtattaaaggtacggtggaaagagccgaaatgcactatattattcgtgattttgatcgcaatcagtttgaaaagcgtaaacaaaacatgatcacgattgctgaaaaagtaggtaaaggtctacatcctgattgctatattgaactaactattgatgatagctactacaatatgcatgataaagtggttcagtatccacatgttattgatattgcaaaacaagcaatgattgattgtgatattgaacctgatattaagcctattcgtggtggtacagacggtgctcagctctcttaccgtggattaccttgcccaaatatctttacgggtggttataattttcatggcaaacatgaatttatctctttagaaggtatggaagccgcagtaagtgttattatgcgaattgctgaaattactgccgaaagagaaaaagcaaaagttatttgttaa

SEQ ID NO: 297967 - DNA, 375 bp, Proteus mirabilis
atgagaatgacctcccgcaaaaaagagataatggaattatttaaacccgacaatcttgaatgggtaacaggtgaaataggtgcaccacctttcgacgtttcaggagtggcttatatgcttaaaggaatggattcttttaacaagaaaagtattctcgaatctacccgcagaacattagatagcatggttaaagatggcttgttagaaaaaatatccagctatgagagacgacaaaacaaacaccaaggctcaagttcatcacctggtgttcgctgtgtcgttagtcggtatggcttgcgtggaaagtgtcgtcttatgaaatacgaaaataacggggaggactttattgaaggtgaatgcgctcaagttgattaa

SEQ ID NO: 297968 - DNA, 159 bp, Proteus mirabilis
atgtatataaatactatacctcttttagtgacgatagcttttcacaccatgtatcaagcgtttctcgtttttctcttaaataatcatatctatcataatgtttttgggaaactcctggccttttatggttttgtaccatatcccttaactcagaactaa

SEQ ID NO: 297969 - DNA, 153 bp, Proteus mirabilis
atgggttggacagaagtcgctgacttaatcattaaaggtatggaaggcgcgatcgaagctaagaccgttacttatgatttcgaacgtctaatggacggtgctaaactgctgaaatgtagcgagttcggtgacgcgattattaaacatatgtaa

SEQ ID NO: 297970 - DNA, 213 bp, Proteus mirabilis
atgtctaattcaatgactggtacagtaaaatggttcgatgaaggtaaaggttttggttttattactccagcagatggcagcaaagatgtattcgtgcatttctctgcaatccaaagtgataacttcaaaacattagctgaaggccaacaagtttcatttaccatggaaaatggtatgaaaggcccagcagcaggcaacgtggtggctctctaa

SEQ ID NO: 297971 - DNA, 459 bp, Proteus mirabilis; identical to SEQ ID NO: 296276

SEQ ID NO: 297972 - DNA, 462 bp, Proteus mirabilis
atgaaaaagccactttctttatggataactcaatttttgattgtctgctgtattatactgatattatatttttttataaccaatgcatcactgttattaaatttgtatagttttgatatgcccgctgagataaagatagaaatttatttatggagttttattcgtttgttagttttaattatacaaatatcagcgctttacttttcctttaggtgcgataaaagggcgcgggtattgactatcttagcttggctaccaatcattatcgtcatgttatggagcaatttccatgaagggttaacttctttgaacgaaagtggtataagctatgataatgatgctcaaagatctggagggattataggtaaacttattctggctggattatccctttggttgacatctattatattattttcaaaaaaattaaagcgttattttctatttgagaaaagtgaatga

SEQ ID NO: 297973 - DNA, 375 bp, Proteus mirabilis; identical to SEQ ID NO: 296463

SEQ ID NO: 297974 - DNA, 849 bp, Proteus mirabilis
atgattgcaattactggtgcaacaggcctattaggtcaacatgtgattgaaaaccttcttcaaaccgttcctgctaatcaaattgtggcatttgctcgtgatgtaaaaaaaggatcgtctttaagtcagaaaggcgttttagtacgtcaggcggattacaatgataaagcttcattaataacagctttacagggtgtcgataaattacttttaatttcctcaagtgaagttggcaaacgtaccattcaacatcgtaatgtcattgaggcagcaaaatcagcagatgtacaatttattgcttacactagcatattacatgctgatcgctctccattaagcttgcatgtggaacatgtagaaacagaaaaaatgctagctgattctgggatatcttacactttattacgaaatggctggtatacagaaaattatctggcaagtgtccctgcagcaattgagcatggcgtttttctgggggcggctggtgatggcaaaatagcttcagccactcgggccgattatgcattggctgctgctcgggtaattagtgaagaaggacatataggtaaagtgtatgagcttgcgggtgatgaagcttggacattagagcaattggctaaggaattgactaaacaaagcgggaagcaagtgatatataacaatttaagtcaggccgattttgtcgctgcgttaaaaacggcaggcttacccgataaattatcaaatatgctggctgattctgatatcggcgcatccaaaggtggattatttgatgatagtcataccctaagtaaattaattggccgacgtacaacaacacttgcggagagtatcaaagcaatattgtaa

SEQ ID NO: 297975 - DNA, 543 bp, Proteus mirabilis
atgagttctataaaatcacctataattatctctatcacctcaattgcaggtggcggcaaaacagcactttctcattatataagagaaaagcttccatcaagcaaatgccttcattttgatgatttcgactgccctacagcacctgaagatctcgatgagtggatagaacaaggtggtaattatagcgaatgggatataaagccatttgttgaacaagttaatcagacgatagaagagtctcaatatactcatatcattttggattatccttttgccagatctcacccagcgctacaacagatgatcgactatgctttttttattgatacaccactagatatcgcattagcaagaagaatattgcgtgattataaagagaaaagtggaaatgatattattcattatttagaagagtacttaatctactcacggccctcatatacggcaatgacagaaagagaaaagctgagtgctgacattattattgatggtaacgcatctgtgtctttaattgcacagaatatcctaaagtatattgtttaa

SEQ ID NO: 297976 - DNA, 240 bp, Proteus mirabilis
atgggaaatcgcttagggataagccagcaacattattctcgaatagaaaatggtaacataaaaatcacggtagaacttttgttttctattgcatttattctcaatatgacgccacaaagtttattacctaattataatttattggataaaaaaatcattaatctttcagatgagaaaaatatcatcaaagcaaaacaggctttatctgcagaatttattataccaataaaagaaaaataa

SEQ ID NO: 297977 - DNA, 597 bp, Proteus mirabilis; identical to SEQ ID NO: 296287

SEQ ID NO: 297978 - DNA, 1284 bp, Proteus mirabilis
atgaatgggaatgtttcagcgattaataaatcattaggaaccctcacctcgaaacagcaagcacaaacgcaagagatttcaacgctcaattcaaatcttaaggggaaagctgatagcagtgtggtgaatgcgttaaatacgcgagtatctaatattgatggcaaagtgacgtctgcaacctctcaggtacaaacgttatccagcaaattagatacagtgaaagccgatttaacggagtctgtggtggtggatttagatttatctaaactcaatgaaaacacctattatccgattattttgccattagtaacttctcgacgttatgcctttaaggtttttaggacattagggcaatatagagacaataaaccgagctatgcgactcacaataccaaaggttttgccatgattgtggaatggcaagtgagtggttctggatggggaacccagtctgaaaaccgcatcattgataattttgattggcgatggacaaatcaatcccctgtgatggggccagctcaattaacgaatggttctgtggaatatatctatttgcgaggaggggctaaatatcagctcactaagcataaaagtgttaaccatcaaattatcacccgcacttataccaataacaaacaatcggtggcaccaaaaggatttgtggcgaatgaagtacctaagtccagcgaacagaaagccaatgcaacggcgaatgcggtaaaccaacttgaaactaaggtgactgaggtctcaggtaaagtgacctctaccgcccagcaagtcactcgccttgaaagccaagtgggtacaagttcagccaaaatcgaacaaacgtcgaaagtggtcaccgacataaatggcaaaatttccgcatcatggacaatgaaagttcagcaagatagcaaagggaataaagtcattacgggcattggcttagggtttaatgcacaaggaaatagccaatttctggtcaatgcccaaaactttgcagtgatatcgtcattaaatggcaaagtggtgacaccgtttatcgtgaagaatggacaggtggttgttaatgaagcttttattggtgatgcaactattaccagtgcaaaaatagctaatgtattgcaatcaaccaatttcagccatgcaaacaaggtgggctatcaacttaatatgcgcactggtgaagaaattaaatatgggaataacgctcaggggtactggattgaaacaaacatattaaaacgtttgtttgataaaaaaggcacaatgcgtatcagaatggggatatggtaa

SEQ ID NO: 297979 - DNA, 708 bp, Proteus mirabilis
atggtaaaaccaaaatgctacccatgcatctatatgaataagatgatagataagataaataagatgacagataagataaacagtacctatatgccttacaaacattataaaaatagcatagcaatattattcctcgcctctgccttgctacctagattttctgtggctgaaccactcactcatttacctcaaaaagatcgtatttcttattttgctcaagcggagaaaatggccatcactggtgtggcaattaaaaccaaacccgttttagccagacctgcaaaagaaggggaagtgatcaccacttacataaaaggtgaaggggttgaaactatttcggagccagccaaagcgggtgattgggttgtacaaaatatttgtccagcaacaggtaatgaagaaattctggtcagaaaagataaatttgctcagcgctataatctggctgatgcagacaaagcgaaaagcatcacaccgataaggcaaggctatcaagtttttatccctaaagggattgaaatgaattattttattgttccaaaacaaaccgctgagtttgcaatggaagcgccttggggagagctacaacgttttcaagccggtgatgcagttgtgcaatctaccaccgataaacaagatatttatcggatccaacaggccgcttttaaatgcacttatactattttaaaaaccgccaaagagatttga

SEQ ID NO: 297980 - DNA, 1566 bp, Proteus mirabilis
atgttagacaataatttaaaagctcaactgaaagcttacctagaacgattaacccagccagttgagttagttgcaacattagacgacagcaaacattctgctgatatccaagccttattaaaagaaattgaaccgttatctgataaagtcacataccgtgaagataacagtgctaatgtgcgcaaaccatcttttcttattaccaacccagggaaaacaactggcgttcgttttgccggctcgccattaggtcatgagtttacttctttagtattagcattattacaaactggtggtcatccatctaaagaagccccagaattacttgaacaaattcgtcagttagacggtgagtttcatttcgaaacctattattcgctctcttgtcataactgccctgatgttgttcaggcattaaacttaatggcgattttaaatccgaacatcacccatacggcgattgacggaggcatgttccaaaatgaaattcaggaacgtaatatcatgggcgttcctgcggtattcttaaatggcaacgagtttggccaaggtcgtatgactttagctgaaattgttagcaaagtagatagcaatgcagaaaaacgcactgcagagttactaaataaaaaagatgcctttgatgttctgattgtcggaagcggccctgcaggggcgtcagcggcagtatatgctgcacgtaaaggcttaaatacaggtcttatcggtgaacgttttggtggacaagttcttgatactgttgatattgaaaactatatctctgtacctaaaacagaaggtgcaaaattagctggggctttaaaagctcatgttgatgattatcaagttgatgttattgacagccaaactgtcagccgtttaattccgggagcagcggaaggtgatctacaccaaattgaaaccgcatctggtgcgattttaaaaacccgtagcttaattattgccacgggtgctcgctggagaaatatgaacgtaccgggtgaaaacgagtaccgtactcgcggtgtaacatactgcccacattgtgatggtcctctatttaaaggtaaaagagtggctgttattggtggtggtaactccggtgttgaagctgctattgacttagctggtttagtggagcacgtgaccgtactagaatttgcctcagaaatgagagccgatgctgttttacaaaagaaactgcgtagcttaagtaatgtcgatgttatcttaaatgcccaaacaacagaagtatatggagatggtactaagttaacaggactgaaatataaagatcgcactaacgattcaatgcatgatattgccttagcgggtattttcgtccaaattggtttactaccaaatacacaatggttagacggaactgttgagcgtaataaaattggtgagatcgtggttgattcacgtggtgaaaccaatattaaaggggtatttgctgcgggtgactgtacaactgttccttataaacaaattattatcgccgcaggtgaaggcgcaaaagcctcattaagcgcctttgattacttgattcgcacgactgcaaaataa

SEQ ID NO: 297981 - DNA, 648 bp, Proteus mirabilis
atgttagaaagtattggtatttcaaatatttggacataccttttaggcgttatttttattacactagtaccaggtccaaattcaattttcgtcctaacttcgagtgcgaagcatggcgtaaaaggggggtataaagccgctcttggtgtttttacgggtgatgcattattaatctttttggcatttttgggggttgcttcattagtcaagacttcacccgttttctttattgtgatcaagtatgccggtgcactttatttaacctatttaggtttaaaaacactctatgcgacattccataagaaaaaagagcagccggaacaggttgcagtagaggttgtaaaagcgaaaaacggcttatatatcaaagcgcttttcttaagtttgttaaatccaaaaatgatcatcttttatgtgtcattttttattcaatttattgatcctaaatatgaaaatgcaggggttcccttttttgtattaggtgtaatattagaaatatgtagtatgctttacttatctgtacttatttttggtggcgttgctattactaataaggttaagcataacaaacgattagcatcattatcgaatagttgcattggtgctgtattcttattatttggtgctaaactcgctttaacggcttaa

SEQ ID NO: 297982 - DNA, 330 bp, Proteus mirabilis
atggcatcaacagcgattgtaccaacagatattacattttttgagcgtttaatcccttcaattttagccggtattaaagtgatcacaattagggatgaagcagaaagccactataaaccaaacactattgttgatttattatctaatgaacatggcacttattatggaaagttacaaattatttctgtatcacccttaaattttaatgagataaatgaatttcatgctcaacaagagggtatgagtttgcctgctttaaaggccttaattaaagacatttatcctacaacggaaaatctttatttaatagaatataaattaatacaataa

SEQ ID NO: 297983 - DNA, 1743 bp, Proteus mirabilis
atgagcacattattatctacacaaaacctctcttttcataataatcacggtatattgctgagtaatatttctttggccctcactaaaggtgagaaaattggtttaattggctacaacggttgtggaaaaagtacactattaaaacttttatcacaccaattaataccaacagatggctctattactatcgccaatcaagtcattatggcttatgtcgaacaacagttaccaagtgagctacagtcaatgcgtctcattgatgcggttcttcataaattacctgaagagctacgcatatctgaaagttggcgcagtgaattattattaagtgaaatgggatttaaaaccaatgaaatcaatctattagtctcacaattaagtggtggtcaacatactcgtttattacttgcgagagcattgattttgcaaccagacttactgctattagatgagccaagtaaccacttagatctaccgactatcttgtggttagaaacatttttaacacagtggcgaggaagttttattcttgtttcacatgacaataggttgttagataaagtgaccaattgtacgtggatcattcgtgataaaaccctatctgtttttcgcttgccctgctctcaggcaagacaagagcaagaagtacaagatatcagtgcgcaacatcgttgtgatacacaacaaaaagagatagatcgtattgcacaaagtgcgaagcaattggccatctggggaaaagtgtatgataacgaaagtttgtcacgtaaagccaaacaaatggaaaaacaaattgttcgtttaaaagacgaacaagtcgatgtaacagaaggcaatcaatggacgttacagttatcaggaacaatattacgggcagatagattgcttgagctgcatcagctttcagtgatccctgcgccagatgcaccgattttatataccatcgataatcaacggatcaaaagtggtgatcgagtcgctattgttggtgctaatgggacaggtaagtcatcattattaaaaatgatttggtcatcatttcatggttcaaccacatcaacagaaaatgtgatcaggctgcatcccagagttgagttaggttattacgatcaaagtctcgcacaacttaatgataatgatacccttgccgatgcactaaagccctttgcaccgctattagatgagcaaaggaaaatggcattaataaatgcaggttttgtttattctcgccataatcagcaagtaaagtcattaagtggtggtgaacgagctcgtttactttttattggtctcagtttggcaaaatattcattattaatgctagatgaaccaacaaaccatcttgatatggaaggtaaacaggcattagctgagcaaattcaacaattttcagggggaattttactcgtcagccatgatagagaattgatagagaaaagctgtaatcgtttttggtatattcacaatggtgttcttagcgaacatcatgatattgaaacaatttatcagcttatttctcaacaagatatgtcatcggtctctaatgagcaaaatggccatcatgctccatctgttgaaatagtaaaacatcataatgaagatgaattgctaatgaaattgatagcacttgaagataaattgaatgctgatttagcaagaaaatctgctcatcaaaagcctatgttacaggctcaatggcaagcagaaatagagatcttaaagcagcaacttgatttagcttaa

SEQ ID NO: 297984 - DNA, 1101 bp, Proteus mirabilis
atgagtaaattaagagtcgctattatttttggtggaaaatcaaccgagcaccaagtttcattacaatcagcaaaaaatattatcaatgaattagatcgaacgaaattcgacctttgtttaattgggattaatgaacaagggcaatggcatgaatatgccgaagacaattatttaattaatagcgataacccctcaactatctcattaagccaacctttgcgtccagtggctattattcctggtagtacccgtcagcaatttatctctttaactgatgggcaacctcttgcacaaatagatgttgtatttcctattgtgcatggtgcttatggtgaagatggcaccctacaaggactattacatatgattgatatgccatatgtaggccctaatatcatgagttctgcagcatgtatggataaagatatcactaagcgcttactggatgatgcaggattagcggttgcaccatttattacactgatggctcaccaattaaatgatatttcctataatgaagttgttgaacaattagggctccctttatttattaaaccagcaaatttaggttcttctgttggtatcagcaaagtcaataatgaagccgagtttaatgctgcattatccatggcatttgaatatgatcttaaagtaattatcgaaagtgctattgttggccgtgaaatagagtgtgccgttttaggtaatgaagagcctgaagttagcccttgtggtgaaattgtgttaaatgatgctttttatgcttataacacaaaatacattgatgacgatggtgcaaaagtagtagtacctgctgatttagataatgcgattagcttacatattcgccaaacggcattgaaagcttaccaagttttaaactgtttaggtatgtcgcgcgttgatgtgtttttaactgaagataatcaagtcattatcaacgaaattaataccttaccaggtttcactaatatcagtatgtatcctaaactgtggcaaagtacgggattagattatcaatcactcatcacgaaattaattgaattagcgctagaacatcataaaaaaacagccgtattaaaaactaagtgtgagctttaa

SEQ ID NO: 297985 - DNA, 891 bp, Proteus mirabilis; identical to SEQ ID NO: 297130

SEQ ID NO: 297986 - DNA, 774 bp, Proteus mirabilis
atgctagtactgttgcaatatatacaatcttatttaatcgatatttttttgctcattgctagattatttcctatttttatgtttattccattcctcaatagtcgagttctcaatagtcaattattaaaatatattattattttttatatagcattaggaataaaacctagcatcacgataacaggggttttaagagagacttgggctattgttctaattagtgagttaattataggtctagttatcggcttgctacttgccacgccattttggatagcttctgcgtttggagaattcgttgataatcaaagaggagcaagcataggagatacaattaatcctactacaggtattgaatcgtcagaatttgcgtcattaaccggattgttttgtatggcctattttttagctacaggtgggctcgttgttttaatgagtaccataaaagagagttacgatgtttttcctattgggtatgttaataaaaatatcggttacgattttatcggtcattggctaaatgatatggttaaagtggcgattattttggtttctcctgtattaattaccatgttcttaagtgaagttgcattaggggtttattcattattttgtcctcaattaaatgcattttctctctctctttgtatcaaaggtattatcgcttttttagtattactgctcttttttacctcagcaatgacgaatgaattatatcatttttttaacagtagatatttttattctatttttatgagtatttatcatggctga

SEQ ID NO: 297987 - DNA, 1050 bp, Proteus mirabilis
atgttgtattttcaccgaatgttactattagtcatttgttttattagtctgctctttagcgttggaagcaaagcggtatgtattaaggtaacagataatagttttctatccgatagtgcaattaaggcaggctatactgctcgtaactggtatggtgcctttgatgataatattgggcatttaggcttaccatctgttattagtgtgagtaccagtaataagtttcaacctgctggtactgtactagcgagctctattgctaattttcttacatcagcaactcgaacaccatatagtgcgaaacagatcctttttcgttgtgagctaaaggatgcagggcaactttatgaattgtattccaccaatggtgataacatatttgtgggagggcgtccggcgaaagaattggaaggagcctattatgatgtagaacgtaatgtcgctgtacgtatgactaatcttagtacaggagagtattatagtcgttattggaaacagcgccaacttacggcagatagttggtttcaagatgatcacgcgatttatattcctgctagcgcatttagcaatatattgtatgagatgataaaaatctcagcctcagatcagtttatttatgcgggtagaattaataaagatacttataaccaacctcgaggttatattgcttttaaagggcctggcttagatacttttgctatccaagaaggagatgatcatgccaataaatatttgggatggccatatgtatggccgggcgcatggggaacttataatcaagttacttatattcgaggtgcaacttgtacaatagaggattatccctcaatagttatcttgcctcaaattactgttagggcactctcttcagggcaaagcagtcaagcaacatttagtcttacacttaattgcgaatcaggagcaatgtcttcaactcaccctacaactaatattgcgaatgtagcaatgggctttttagttaatcaacctacggcggttgcggccgcccgtcgtttaggtctaacaacatctggtggtggattaacatga

SEQ ID NO: 297988 - DNA, 2565 bp, Proteus mirabilis
atgttaacgaaggttaaatttcactataaaaatatggcctttatgatagcgatttgctttacctgtcaggcggcggaggaagagtactattttgatcccactcttttacaaggttctgcttatagcaaaagcattgccagtattaatggaggtgaaatattggcaggtgagtacattgtggatgtttttgtgaatgatactctcataaaatcaagcctgaaaattattttcaaatccattaataatggaaaacaagtggaaccgtgtttacctttatctttaatgcaagaagcacaagttaaatcgctatcagataaggcggtagatcatggtaaaagttgtcgttctcttaggcaatgggtatcacaaggggaatggcattttgatcgagctactttacaattacgacttagcatcccaatgaatgaattaattcatcggccacggggctatatatctccctcacaatgggatagtggtgtactagctctttttttacgtcacaataccaattggacttatactgaaaatacagaccagcacttgcactcacaatatttatggagtggcatcaatgttggtagcaattttggattatggcaggtgcggcatcaaggaaatctacgccataccgatagtcataatcagggtagcgactggtattacacgagtgttcgtacatggttgcaacggccaatttctgcgattaacagtatcatgacactaggagataattacacagatcctagtctatttggtagcttattgtttagtggcataaagttcgcaactgatgaacgtatgtggccacaaggtaaacgtggctatgcaccagaggtgcatggtgtagcggctagcagtgctcaagtcgtgattaagcagttgggaaaagtaatttatgaaactcacgttccaccaggtccattctatattgatgatctttataacacaaagaatcaaggggatttacaggttgaggtaattgaagctaacggaaaaatttcacattttattgttccttattcatcggttcctgattcggtacgtcctggtaattggcactactctttttctttggggaaggtgaagcaatataagcatgttgataaccgtttttttgaaggtactgctcagtttggtattaataacaacctcaccattaatcttggatcgcgattagccaaagattattacgcctggttggggggcgcagtatgggcaactcgccttggcgctattggcatgaatgcaactttgtctcatgcgcgtatacagcataatgatcgcaaacaaggttggcgtgcagagttaagttatagtaaaacgttttcttcagggactaacttagttttagccgcttaccgctattcaacggatggttttcgtgatttacaagatgtacttggtgtacgtcgccaactgaaaacgggtattgattactattccgatattcttcaccaaaaaaatcgtctttctgcaacaatcagccagccattaggccagttcggtactgttaatcttagtgccagtaccgctgattattaccataatcaatcgcggatcactcagttacaaataggttatagcaaccagtggcgaaagttaagctacggtcttaaccttgcaagacagcgtactactcaggattatggtgatcatttttatcaccatattgatgaattgcaagatcaaagccaaaagcaaaaatatactgaaacaatactatcattgactctttctattccatttgattggaaagacaaccgtacttcggcagcaataaattatagtcaatcacgaaacagtcaatcttcaacgctatctattaccggctctagtggagagcaaagtgatttttcttggtcattatatggtggttatgatcatcatcgttatggtaaggaacatttatcaacaaactttggtgctggctttcaacaaaatactcgcttgggaacactgagagcaggttttgatcagggtaaaaattatcgtcaattatccctaggtacgtcaggaaccttagttttgcattctggtgggataactttaggcccttacactagtgatacctttgccttaattcatgctgatggggcgcaaggtgctgttgtacaaaatgggcaaggagccgtcatcgatcattttggttatgccattttgcccactttatcaccataccgtcgcaataatatctcccttgatacccgccatatgaaccgtgataccgaattgtcagggggaagccagcaagttgttccatattccggtgcaatagctaaagtcaattttgcaacaattacaggtaaggcggtactaatagccgtgaaaaagaaagatggcagtataccgccaatgggcgctgaagtgctcagtgatgaaggggcggtaataggaatggtcggacaaggagggcaagtttatgcccgaattaaccataattcaggaagactacttattcgttggggaaaaagtgttaatcaatattgtcgagttccttaccagattgatttacattcatctaaaaaggtgatttatctaacgacaatttgtgaggataaataa

SEQ ID NO: 297989 - DNA, 438 bp, Proteus mirabilis
atgattacctgtgatccactggttaaatgcaggggtaaaatcttcaaaaagcatatttgggtgataaaaagggaaaaagtgagggtcagttatcgcatcttctggcggttgtcttacccattttttaccagactcccatgctgtccatgtaggttcatattgagaaatgccactttcagtggtgatagggagtgctatccagtaaaactgttcaatacaatcttggtagatagatttcatttttataatatgatctatagtcgcagaatattgaacttcccaatcaagaaacatcacattaaattttctatgttgttttcgcgcttgtgcggcaacaagatgaaaaagcgcagtagaatctttccctcccgaaaaggagagagtgatttgttcaaaagtatcaaatatccactggactctctcttgagcagcttctaa

SEQ ID NO: 297990 - DNA, 996 bp, Proteus mirabilis
atgcccaaaactcttatgagtcttaaacaaaatgattttacgcataaaaaaattatcgtaggtattagttcatgcttattaggggataaagtgaggtttgatggtgggcataaatgttgtcatcttgctgctgatgaattatctgagttctttgaatatcaatctacttgcccagaaatggctattggtttaccgacacccagaccagcattacgattagttcagtctaagactggtgaagttaggttaaaatttagtaatggaagtgaaggtgacttaacccaattgatgaatgattactctatcgaatatttgaggaggtttaatcaatttagcggttatatcgtgtgtgcgaaatcacccagttgtggattagaacgtgtccgggtttatgatccaataggcaacggcaataaaaaatcgggtacaggcatttttactgaaaatctgaaaagaataatgccgtggttacctatagaagaagatgggcggttaaacgatccctatattagagaaaattttattacacgggtgtttgcgcttaatgagctaaatcaattgaaaataaataactttactcgccaggcattaattgattttcatacaagatacaaactattgttattagctcattcacaaccgctttatcggcaactagggcgctttgttgctaacaataaagattgggattcattagagactttctttgttgaataccgtaatcgatttatggctctattacaacatcaagccactcgtcgtaatcacactaatgttcttatgcatgtgcaaggatattttaagcaagatttaacttctaagcagcgacaagcattaagtcaattgatcttagagtatcgtcaaggaatacaacctttattggcaccattaacattaattaatcattacttatcagaatacccagataattatctgagtaaacaaaaatacttttatccttatcctcaatctttaagattacgttatggtttgtaa

SEQ ID NO: 297991 - DNA, 243 bp, Proteus mirabilis
atgcgcccaatttttttgttaataccatttatgtttttaattggctgtaccgagcaaatgagtgtcggaattggcacttctagaacgcataatataggatatccggtttgttcaacattagtttgtggaaagaatacgcgaacagttgaagaacaaaaggcaattaatgaagcggtgcatgaacagcaaagagctattatgcgaggagaaaaaccagatttaaaaattattgcctcatattaa

SEQ ID NO: 297992 - DNA, 396 bp, Proteus mirabilis
atgagtaatgttgttaagcaagaacaaatttatagtataaagactctttctgatgatttaattgaattaaaaataaaattttttaaaaaaagtagcgataaaataaatctagatattcccttagctcaaccatttgaaagtaagttatataattttatctatgatatggttgctattaataataatatcgaaataacttatgataaaattttaaatgaaaagatgaaagagataataaaacaactaaataataaaaaaccaaggctaggagagctattctcccatctattgagtcgaaataaaatcattaaagaagacagcgttgatattacgttaaaactaaataaaggacaactagtctcattaggtggagaatgctcatataatttttattaa

SEQ ID NO: 297993 - DNA, 993 bp, Proteus mirabilis
gtggattttcaccacgacgatcaagaaataacaccagaaacatcacttgtattggcggaaaaacaaccattattagatctcaatgcaactttcacctctccgacacaaactaaccctgcactggcttatttacgcagtttaggctctaaacgtagtcgccaaacgatgggatcgtttttaacaatcgtggcaaaaatgattggcttctcttcaataaagcattgccaatggggagcacttcgccgccaccatattcaagcaattatcgacatgttatctgatgcggataaagcacccgccacgattaacacttatctagctgcactaaaaggtgtcgctttagaagcatgggcgatgaaattgatggatacagaaagctatcaacatattcgccaagttaaatcggtaagaggcagtcgattacctaaaggtcgagcgcttactggacatgaaattcgcgcactttttcgctgttgtgaaaaagaccactcctcaaaaggtttaagagatgcggccatattaagtgtactacttggctgtggattacgccgttcagaaattgttgcgcttaattacgagcatattcaatttcgtgatcaagcttttattgttagaggaaaaggtaataaagaaagaatatcctatatgccagaagatacttgggagcgtgttcaattatggatcgatgaaataaggggatcacaagatggcgcccttttcacacgtattcgccgctttgatgatgtaacggatgaacgaataacagaccaagccatttattatattttagagacacgccaacaagaaagtggcattgataaatttgctcctcacgatctgcgacgcacttttgcctctgcaatgttagataatggcgaagatattgtaaccgtaaaagatgccatgggtcatgccagtattatgactacacagcgctatgatagacgtggtgatgatcgtcttagaaaagcggctcgacatttacgtttttag

SEQ ID NO: 297994 - DNA, 2562 bp, Proteus mirabilis
atgaatagtagacgccgtcgggttgtaataaccggaatggggattttatcatctttagctaaagatgtgcctcaatttaaacaggttctttttaatagacaatgtaatattaagcccagccaacgttatttaaaatggtttaaaaatgccaatgcatctgagattgagatggcattagattattcagatataccgcagcatatcgctcgatcactagacaatgcggcattatgggcatatcgagtctgcaatgaggcattacaacaagcaaacttaatagataatcagtctattttagataataccgcgatgatcgtgggcgtctcttcagcaggaacggaagcctttctgccattatttgaacaacatattgatgatttttcgataaaaaaagccattttatccggtggattttcatcatgttgttcgagtgtatcaagtctacttggcttacgtggtggtcttgaattagtggcgacggcctgtaccgcaagccctaacgcgataggtatggggtatgattatatccaaaatggcaaaaatcctgttgtgctagcggtcggaacagaacccatttatcttcctacctttgcgggtttttatgcccttaatgtgatgaaaacaacaccaacttccccattttcaggtactcctggtatgtctattggtgaaggtgctggggcgttagtattagaagattatcaacatgcggttgaacgtggtgcgacaatatatggtgaaattgtctcttatgcgacatcttgtgatgcttaccatgaaactagccctgatcctcgaggaaatggtgcagtgcaagttatgtataaagcactggataatgcgggtattactcctaatgatattgattatataaatgtgcatggtacaggtactgaagcaaatgatcgcattgaaaccatgtcgatgaaaaaagtatttcctaatatttatcatatcccattaagttcaacaaaatcttatgttggtcataatattggtgctgcaggtattgttgaaatcatcgcgtgttttatttgtttagcagaagacaaacttccccccacattaaatttcactcagccaaggcatagctgtgatttaaattatgtaccgaatttctttcaagataaaaaagtaaaattttttatgaagaataattatgcttttggaggaaataactgctctattatcgcaagcccttatattacagataaaacaccgacggaatataaagctaaaaaagtggttattaccggggtgggggcgattacatctattggcaataatgtaatggagataataacagcgatttcggcaggagataaaacaggtacattaaaacctatcgtatttgcgagtgatgtgcagaaagatatcgacaacttgatgtctgttgtcataaaagataatgattttgagcaatcgttaggacatccttattttgatctcgacattgatcatcgcttaaaaaataacgcctgttatcatgctatcactgacgttaatccgaaaaaaacattacgttattatgatccaagaaaagctattcctagcgggacttatgccttattcgctttaaatgaagcacttgctaatgctggacgcaaaattaaacgtgatggtgataacttaggttttattgttggaatgtcaaaagggccacaaagtaccgttaatcgttatttacaaagtttaattcctgatccgcaaaaagtaagaacatcagaatttcctggtactttaatgaatgcagtaccgacattttgtgccatcacagagggaataaaaggttataccacgacattggcaacaggggttaatgctgcattaggagcgttaacttatggttatgaaattatcaggcaagatctacaacctcaggtaattgtcggaggggcagatgagcacttcagttctatttcactctattttcaagcgatgagtaagaaagttaatctgaccaagaatgcgacagattatcaggtttattctaatgcaagtgccggctatatccccggagaaggggcagggatgttatttcttgaagataaagagtatgccaagcaacgaggcgctaaaatttatgctgaaattattggctacggtaaagcgaatgataatacttttttagtagacgaaaatattactgatagagtggccgccttatgtaaggctatccaacaagcattatctgaggcgcaactcagttgccaagatattgatattatctgtggtaccagtgatggtaataaagagaatgatgaagttgaaatccgtgcgattcggcaactattttatcaagcggcaaatcatgtaccagtagttaattacaatgccttttttggtttagttgaatcatgcgctgggatattggcgatctctttagtgattcatatgatgcaaagcaacacgataatacctattccttatacaaaaagttttatagctgatgatattcattttgttacccaaccgattaataagcagatagaaactgctttagttcttggttcatcagaaggatgtaaccactatgcaattatcatcaggaaaccgttatga

SEQ ID NO: 297995 - DNA, 528 bp, Proteus mirabilis
atgaaattaaaaaaactgcatttagttttagggttaggcttatctatcattgcgggctctgcattagcggcagatcaagggcatggtactgttgaattctatggttcaattattgatgctccttgttctatcgatcctgattcaggtgctcaacgtattccattaggtcaagtgtcatctagcgcactgaaagacggtggccgtagtgcatcaaaaatgtttaaaatcaaattattacagtgttctactgagacatataaaacagtcaaaacaacctttaccggtgctgaagctcctgatgttttagagggggctttaggtattgaagggatcgccaaaaatgcagctgttgttatcaccaatgcagatggtgaacaaatcaaattaggtcaagcaagtgccgcccaaacattgaatgacggtaacaatgacttaaattttgccgcttatttacaaggatcttcctcaaaagctgctattcctggtgattttacagcaatagccacttttgctttatcttatcaataa

SEQ ID NO: 297996 - DNA, 1215 bp, Proteus mirabilis
atggatgttgatatctactataaattattaattgataagctttcattaaaagctaaatctaaagatgatataaaatctgacgcgaaaaagaatatgggatcctggcaaaagctgattgccaatttagccgaaatttttgttccattattacctatcttaatttgcggcggtttattattaggattaagaaatgttattggcgaaatgcctatatcagataataaacccctcacttatttttatccttggttaacgccaatatatgattttctctggttaccttgtgaagccatcttccattttctacctgtgagtatttgctggtcgagtgtaaaaaagatgggtggtacacctgcactaggtatcgtactaggtataactttagtttctccacaactaatgaatgcttacaatttaggttcacaaattcctgaggtttggaattttggtttatttactattgagaaagtaggttatcaagcccaagtgatcccttcgattttagcgggactatttctgggatggtttgagactaaattacgtcgttttatccctgattacctaaaattagttattgtgccgattgtaactcttattgtcgccgtttttgttgcccatgttattttaggccctatcggtagaagcataggtgatggtctcgcccaactgatcaaatttttaatgttaggtgattttgcccctattggttcaactatttttgcctttttctattcccccatggtgatcaccggcttacatcacacaacgttagcgatagatttacaaatgactcaaagttatggcggtacacctatttggccgattatcgctctgtctaatattgctcaagcatctgccgttgtaggcattattatcgttagtcgcaaattaaatgaacaagaaattactattccggcagctatctctgcttatttaggtgtgacagagccagccatgtatggcgtcaacttaaaatatggctttcctatgctgtgcgcaatgattggcgctgcgctagcgggtttgatttgtggattaaataatgtgctatctaatggtattggtgtcggcggattacccggtattttatctatccaacctacttattggttagtttatttattagcaatgattgtggctattgtcgtccctattggattaaccattctggtctatcgctataaagaaaaagcaggcaccttgcaagtcgattaa

SEQ ID NO: 297997 - DNA, 2718 bp, Proteus mirabilis
atgaattatatctctgttattctttctgatactgatatcaccattaaatatctttcagaaaaaagccattattcatttaataccacaaatagccattaccttgattggctaaatatggctaaagctattaatcataaatttaactctgctcaaggtggtttgatatattcgacaagtaataaatcggatagcgctattattaaaaccattgataataaagtaataaatttatcaaatttctttactgaaatatttaataaaccttttatttatatcaataaagcgcagcttgaacatcatcatgatttagaagaaaaaatggttacagttgccaataactttgcttggtcaattgaatattcaggcttagaaacaggaaaagatgaatattgccaagagtctctcttaactacggccaatggttatattgggttaagaggaactttgcccgaaatgactataagtgatgagcactaccccgctacctatattgctggcctatataatcaagcaagttcacaaatagaaaaccatcaggtgattaatgaagattttgttaatgcacctaatggacaatttatttctcttaaaattggtaagggagaatatcttcatccaaatcaactgataacacaccatttaacacgtcaattagatttaaaaacgggtgtattcactagccaatggcgtgtagaaacccctgaaggacagcaacttgatattcattgtacaaaatttgccaatatggctgatatgtcacattacgccattttatatacctttaaaccattaaatttctcaggtgaaataacagttataactcgcctagaaggaaatacttataattacggtgtacaacgctaccgtagccttaatccccatcattatcatgtgttacaaactggagcgaataagcaacacgcatttatattagctcaaacagatcagtcaaaaatagggatcggattatcgtcaacaatcaggggggatttctttgcaaatgaagatattgtttgtcatgtttcagatacgcttgttgaacaaaccatcaccttcaacgctcaacaaaataccacctatcaacttgaaaaatgtgttgctgtaacaacctctacggcttacccagactcatggcaagatgtggttaattgggaacaacaacctttacacagccaattgataaatagccacaaagcgtggaaaacgttatgggatagtgccgatatctcgatttctggcgatctgatgacccaaaaattactacgcttacataccttccatttactgtcatccgcatcaccatttagcaatcagcaacatcaattagatgtttcagtcaccgcccgagggttacacggggaagcctatcgaggccatattttctgggatgagatctttattctgccattttatattatgcacttccctgaaaccgcacgccaactattactatatcgttaccacaggctacctgctgcgcgtcttgctgcacgagcagaaggatttcaaggtgctatgttcccttggcaatcagggcatgatggtagtgagcaaacccagacactgcatttaaaccccttatcagggcaatgggatgccgaccatagttgtcgtcaacgtcatgtctcattagcgattgcctataatgtgtggctatattggctaaatactcatgatcaccaatttatggaacagtatggacttgaactactcaatgacattaccttgttctggttagaccaatgtcagtgggatgaaggcgatcaacgttttcatattgatggagttatggggccggatgaatttcatgagaaatacgcagactcacttgaaggtggcttaaaagataacgcatacactaatttaatggtggtttggttgtttaatcaaatagagatgttcataaacaatgatcgtttttctaaaaaattacaacagctaaacagccaatctagcgttttcaataaaatacaagaagttaaaaatcgtattgctatcaatattgatgctcatgaaattattgaacagttctcaggttattttcaattaaaagatctggattgggaaagctatcgaaaaaaatacggcaatatctatcgtatggatagaattttgcgtaaagaaaataaatctgccgatgattacaaagtagctaaacaagcagataccctgatgttatttaataacttagataagcaaaccgtacattccctaattacctctcttggttattcagtttctaagcactttgctgaaaaaaatctacattactatttagaaagaacctctcatggttccacactgtcacgcattgtccatgcttatctcgcagaacaaatacagttacatgatttgtcatggcaactttatcaagatgctctttattcagattataatgatattcaaggtggaacaactgccgaaggtattcatactggtgtcatggcggcaacattaaatacctccatcatggcttatgccggtgttgatattcgtcaggatatgttgaccatcaccccttcactccctcaacaatggcaaaaactaagctttaaattattgcatcgctctactttatatcaaattaatctcactcataaagaaattagttttttaagtgataagcccagtactattttaattaaccatcaaacgcataagctaaccgccaacacgttattagtattaaatttaaatggagacacgcaaaatgactaa

SEQ ID NO: 297998 - DNA, 435 bp, Proteus mirabilis
atggtgattgaaaatagtaacctaaataaggaaactatatctagtgatagtatttttgaatatttgcaaattttatttgatgaattaccgtatgagttagtttctgtagatgatttagcgaatatagtttttgaagaactagatattaataggtttgatcttttacaaaatgaggatctttctggtgttatggccgaaacagatacaatatttgaagatatagatatttataaatcagaactgacccagataaatgatcaagaggtgttggtgacagtatatggtaagatgagcggttatcatcggaatgaatcaagtgtacctggtcagtccattaattttcaagtaattatgtctgcacctataattttaggaagatatgggctcagagaatttcaggttcaatcagcaactggctcagttaattatgattag

SEQ ID NO: 297999 - DNA, 828 bp, Proteus mirabilis
atgtctcaattagacggtaatgctatttcgcaaattcaagatatgaccgcggcttcattaagcctcgaagcaatagaaaaatctctttgtccagcgattgtgcttccgaatgactttaaagtaagtagtttagaaaatttacaagaaggccgtttccgttttcgcggggaaatgaaaacaaccagtataagcgactttgttaaatactcaatcaagaatgcaattgatgaaggtgttagctgctttattgatgccgatgaaatgagtgccgaaactatttttaatctcggcacaataggtaaagcaggtcatgctgataacactgctattgtgaaattaaaacaaaccgccccattcacagcattattaaaaatggatggtgttaaatatcgtcaaaaacaattagccgagtggttagaagattggcacgattatttaatggcatttgatgctgacggtaatgttttagatatcaaacaagctatttctgctgttcgtcgtattacgattgaatcaacacgctctgctgaacatgaagatgctgattttagtgctaaacgctcagtgttagaaaatgttgaagcaagaagcaaagacattatgcctgctacattccagtttacttgtactccttatgacgaattaaaagaacgtagcattaaattacgttatagcgtactcactggtgatgatattccggttttagttcttcgaatcattcaacttgaaaaacttgaagaacaaatcgctcaagagtttcgagatatgctttgcaatgaattcgatgaaagcaaaatcgaaacattcattggtaaattttcagcgtaa

SEQ ID NO: 298000 - DNA, 498 bp, Proteus mirabilis
ttggataaatatatcccatcagataaagtttggtggcaaggaacagcaaagtttttaggaaaagtaatttcgcctgcttgcacattagatatggatagtaaatatcaattggttgatctaggtactatacctgttaataaaatgaacaataatgatgatttattagcgagtaaaaaaataaaaataaaattatctgattgccaatttattaataagactaaaaatatcgataaagtgaaaggcgttacgttaacattttattcagatgttagtggatctaaagctgatttattttcatttaataacagtgatgaagtctattttaaaataatagatgaatatggatatagcgctaattctggagagtcattaccattaatatatgttgatggggataatacatatctatattacaaaatagacgttgtaaaaaagttggatgtaattactcctggtgattattatgcaagcgttttattcaaaataaattatgaatga

SEQ ID NO: 298001 - DNA, 552 bp, Proteus mirabilis
atgaaattgaataaattagcgatgttcgctattgcatcaatggctttttctgcgactgttgctcaagcggcttcaggtgatggtactattactttcactggtaaagttattgatgcaccttgtggtattgctaccgaaagtgctaaccaagctatcgattttggtcaaatcagcaaaagcctattagagaaagatggtatttctcaagttaaacaaatcccaattaaattggttaattgtgatttaactaaagccggttctgatactggtgctgcaggttcttataaaggcgtaaaagtaacctttaatggaaatactattactggtgcaacagaagagttagcaacaactggtaatacagggactgctattgttatttcaggaacaacaactggttcaatggttaaattcaatgaagcaggtgaattacaagcactgggtaataatgataatacgctgatgtatacagcttgggctaagaaagcaacaaacggaacaattgctgaaggtgagtttaacgctacaacaaacttcacattagcctatgaataa

SEQ ID NO: 298002 - DNA, 2556 bp, Proteus mirabilis
atgtctagagatattattctgcaattaaaaactaatgaatatgaagatgaatttttttcttctgaaggtaaaagtacagatgaaagtgaactctggcaacttgaagcatgtgaagaaattatttcttttttacaaaaagcaggtaatgaggcaaaagaatattcgaaacagcattcgtctgataagaaaaataaaagctatcaccattctatatatatcaatggtgatagaggtacaggaaaaacagtctttttacgtaatgtcgaaaatatttggcgttccagcttaaaatctcaacgctcagaaaaaacagtatcgctttttttctgtgatattattgatccaacacttcttgaaatggaagatcgtttttcagatgttattattgcgaccatttatgcagcagttgatgaaaaactaaaagaacctaataataatgaaataaactcgtgtcttaaaaaagatttttttcaatcattaaaattacttgcagattctttagggaataaagaagaatttaatgatttaataagcttagatagaataattaaatatcgctcaggaatacaaatcgaaaaatattttcatgattttctaaaagtcagtacaagaattctacaatctgatgctattgttatttcaattgatgatattgatatgaaatcacgcaatgcttttgatgttcttgatgatattcgccgtttaatggggtgcccgtatattattcctttaattacaggagatattgaattatatgggtatttatgcgatcttgaatttgagagcaatctattaaaccttcactattcttctcttcaagaagatagagttaaaaaatcaaatgatttgtcaaaagcatacttaacaaaagtttttccaactaatagaagaatagagcttgtttcagctaataatattttagctaggttgataattaaagaaaatgatgatattaaattaaaatatagtgaatacaaaaatttaataaagaaatatttttattttctctgtaattcagaagagaaaatatttagttttaaagaccctcaaagcgcaagggagataactcagcttataagactattccaaccaacaatgttacaagaaaaaaatgattatccattaatgtgggataaatttaaaatatgggcggaagaacaccaagatggcgatggtatttgtaatgcattatcttatcttcaattaaaaagtattatagatataaataaattctcattaaaaaatttaatttcatttaatattaatcaacaagttaaaagtaagtataagtggaaagataaaaatttttctgaacaaaatatagagcttatacgaaagtataaaaactcagaatcagaaagtgataactataatttaaaattatttaattctaaatttcaacctaaaacaaaagacggcaataaagataaaaaatactattcactaagaagcatgcctgttttagagctagtacataaagaattatacatatcaaaaaataaaacaaaaaatgaaaacttattattagaattatatacgtataataattattattcagtttcacaaaataaaaggaaccatatattctttagtcgagcatatgagatattagctatttctattattttactctttgaagaaaacataatgaatgatgtagttaaaaatattattataaatatatttaacactccaccattttattctatattttctttaaacccaacaaaaatgatcgatgaaagtgaaagtgaaaatgaaaatgaaaatgtagttttaactggtgatattaatgatgacatagataaattatcagacgatataataacctggataaataattacaatgattttagagagaagaataaaaataaaaatataataccattattatcatcagtatttaataaaatattcacacaattaaacatactgaaaaatgaaaaaattaaagattcagagagtctattcagtttaataaaaagatttgagtatataactattaatgcctttgcttcctttattaaaaaagataatgttataaatgcaaatctagctattacggcacaacctgaaactattttaaattttgattcatttataaagcatgataatacactttctcctaatttaagtgatttaatatctaagccactacaaaataaaaaagcattaaatgatgacaaagagagtatttttattgagctagtttggaatcacccaatattcaagctaaatgataacctacagttatccaataattacatcattggcaaaagagatactgatgctcaaggggataataatgaccttattaataaattattagagagaaaaaaagaatatcaaatagctaatagtttcaaaaatatagttaatgtaaaacgactctcacataaaatagttaaagattgggctaaaaataataaagaaaatgcaaaaaaaatattctatcatataatagatgttttgtccgaagatacttactcaacagctcaaaatgatattggaaaaatatattggggtataaaatcaactttaaataatgaggaataa

SEQ ID NO: 298003 - DNA, 501 bp, Proteus mirabilis
atgaaaatacccactttattaaagcatggcttaatagctactttgacctttatggtttctttgaattccttcgccgatcctggaaatggtaaaggtaatggaaacggaaacggtaatcctcatagtcatcaaaatcaaagaggtaacaacggttttaataaaggacatcagaacgtaaaccaacaagatggattttcttcacaactgcgtattgatagtcgaggagggctctctgtctcaatcacttatgatgatgcaagagcattagcaataaagaacaatctaactggatataaaggccttcctccgggaatagcaaagaatttaacaagaggtaagccattacctccaggtattgcgaaaaaagccgtacccagcattatgctaagtcagttaccgcattacgatggatatgaatggcagatagtgggtaatgatttggtgttaatcgcaataaccacatcaattattacctctgttattaataatgtttttgattaa

SEQ ID NO: 298004 - DNA, 756 bp, Proteus mirabilis
atgcagagttatcactctctatcggctcaagtttatcaattggataaaccgataggatgcagtttcggcgatgttgaatactatcaacagcgattaaaagatgttaaaggtaaaattttagagccggcagtaggaacaggacgtatccttatccctttattgcaatcaggttttaatattgagggatttgatctttccgaagagatgcttgaattttgtaagaaaaatctaatcgagcatgggtttacaaccaactacgtaactcaaaataatttagtcacttttgaagtcaatacccctgtcgaggctattattattcctacagggacattcctcttattaaatacccaacagcaggcgatccaagccttaaaacagtgttatcaagcgcttgagtttggtgggcgcttattggttgatattagtcttgcccatcattttgttaaaggtgaatgtactagtcgccaatttaatacaccagaaggcgatctaattaccttacagataattaatgctgaaattgattatataaatcagttaactacttcacaccatcgttatgataaatggcgagatggcaagatcattgaaagtgaatgggaagttttcagcttaaaatggtttggtgtgtctgaatttgaacaaatactacgcttgattggttttaaacagatcacaatatcagccgattaccagtatctgcaaacccccagtaatacgacagaaattatgacttttgaagcgtataaaaaatag

SEQ ID NO: 298005 - DNA, 690 bp, Proteus mirabilis
atggaaaatttatcagcattaggtattgctctattcgaaactggcatggcatggttttggagcgataacagactgaaaaatatctatcaagtcgatggaataacaaattttactgaggctaatcgaaagcataccggtattttgttgattggtattcactccatgtcgttggagcttggagggcgtattatggggttgtgcttccctgtaaacgcaatgtatcggcctcataataataaagcgatggagtttattcaaactagggcaagatgccgttctaataaaggtatgattgatagacgtaatttaaagtttatggtcactgaattaaaaaaagggaaggccatttggtttgcaccagatcaagattttggtttaaaaggaaccaccttttcaccatttttttcggttaaggaaacgtctacttcaaaaggtgctgttatattagcaaagttatcaggagctccttctttaacggtaacattggtacgtaaccatggtcatgatgataaaaaatatagcttaattataggtaaagagcttcataattatccaacagaaaatattcaaaatgatacagatagaatgaatcatctgattgaaattgagattatgcgagcgccagagcaatacttatgggctcatagacgttttaagaccagacccaaaggtgaagccagtttttattaa

SEQ ID NO: 298006 - DNA, 321 bp, Proteus mirabilis
atggtgaaatatcgtcgtgcaaatattgatgtcaatgcactggtaggtaagcgcatacaaaaaaggcgtaaagagttaggttacacaggtagccaattggcggcaaaactaggggttagccaacaacaattctcacgctatgagcgggggttaaacaaaatagatcttacttatctagtgctattagctaagttcttaaacacacccatttactggttttttgaggactgtattacttcaacgtcggtcaaaagtggcaaaccgctaagtcgacgaagcaatcttttagccaaaaaagcactagacgcatttctgtattaa

SEQ ID NO: 298007 - DNA, 1284 bp, Proteus mirabilis; identical to SEQ ID NO: 297978

SEQ ID NO: 298008 - DNA, 261 bp, Proteus mirabilis; identical to SEQ ID NO: 296448

SEQ ID NO: 298009 - DNA, 519 bp, Proteus mirabilis
atgtcagcatatgaaaaaatgtcagaaaaagaattagatcagctcgcaaactacattgtttctattgtacaaaatggcgcatctatcaaagatgaaagtgaaattccagatggatttatggaagggatttattcatttgcgtatgatttttatcagaaagggaagttagatgaagctgaggcgatttttaagtttttatgtctctatgatttttataatgttgattacattatgggacttgctgcagttaatcaattaaaaaagcaatatcaagcagctatcgatctttatgctttagcttatctaaatgctaaaaatgattatcgacctgttttttatgctggacaatgtaatttatcaattggtgaaaaagaaaaagctaaatattgttttcatcaggtggctcaaaatattaatgatcaaacgataaaagagaaggctaatagctatttagagctattaaaagatattcctcttgttgtccttaataaagaggaagaaaaggaagaaaaggaataa

SEQ ID NO: 298010 - DNA, 2082 bp, Proteus mirabilis
atgaataagattaatcaaagtaatgaacatagtagattagcttcgccttttgtttctgaagaagtaaaaaatgttattaaaaatactactaagcaagcaaatgcaattaataatataagtaattatgtgactactcaacaacagaaggagaatcaaagtaagtttgatataccacttcttagagtacctcatgaacaggagaggaatgcgaaaagaattaatattcaagatgatccacaatataaaatgacgacattttcactagaaaatgatgaagacaatactaagccttccttagcagaagaagaaccgaagaataataaaaaaaaagatgatcatcttgacgtatctgcacaacaaaattcatcattacctacttccagtcctgatcatttagaaaataaaaaatccaacaaagattatgattttttatttttacaattatcttaccagcatgttatacatgaagatattttgaataaaattaaagatccagagaaatttgattattacagagataaattacaaaagctatctaatggcatagatgatttaaaagaactttttaaatctggcttcaatgagcttgataaaaccaaaggtgcttttgttgattactggatggaagtttataaccaaataaaagaaaagaatttcaaaaaagagtctgaagttaaaagttttttaaataattgcaatattcctgattcattaattcaacagttattattaggaaatattcactctaaagtggatatggaaaaagcccttgaagatgttttccctttcttaaactttcctagtgatttttctaagctttcattagatgaacttaaaatcaataaaattacttcacatactgatgaattaaaggcattgatcaacaaaaaagaaagtgaatcaataaaaaaacaattagcagaaataagaggtctatttaaagaactgactatttcacaaagttccttggagcttgaaattgcatctaactctttatccggtatgtcattactgacatttctgttatctaagacacgtgagttgacgttaaaggtcatgttacatcgttcggaaagtgaacagaaactttttaatgaaatgcaagaggtgactgaaaaatcacttaaagataaagttgaagagcaaaaatcattaatcaaaaaacaagaagaaattcagttttgggctggtattggtttaaaaatattaggcggattattaacgcttgttgcaggtgtttcttctatttttaccgctggctcttcaatggtattaataggagtcgcaacaaccttatttgttgctgatgctgggttaactattgctgatgaagtgtatcaatctattcataataaatcttttatggatgagattatgcaacccatatcagatgcggttatggaagctatcgataaggttagtgattttctagtgagtttagttaatagttctttggatggactcaaagaattagggctagataaaaaaatcatcgaagagatgaaaaattcaatacaagacaaattgaaaatggcaactaaaatacttgtcacagtcgttttatttgttgccgctacggcattgagttttgttattggacctgccatgaaaggtatttcagatgcggttaataaaatatcgaatcagcaaattagacaaatactaaaaaaagtgctcaatgatggacttgaagcggtattggggaaaatgatcaaagatatcattattaaagcgcttgaagaagcactggaaaaaattgataagcagttagctaaagagatttctaaaaaagcaagtattatgttgaatagaacggtggttgcttctaagttaaccaattcagcagcaacaaatactgttaatatttatggttctgttatcgcgtcaaaaataatccagtctattgccggtagtaaaaaattaactgcggttttagatattattcaaaaattaatggataagataatggaaacttatcatgagaatattgattctataacagatattttaaaaaacctcagcgataaatcttcagtaagtaataaattaaaatcagacatgataagaaatatatctatttaa

SEQ ID NO: 298011 - DNA, 1914 bp, Proteus mirabilis
atgaagttaaatggctctaataataggaatttttatcaaggtgattttaaaacaggtataaatttttataattggattttacgtaataacagtagcttttcttcaggtgatgggaaaacttactatagatttaatgaaacaacgctttcacgtacaatagaacgcatcaaagccattttacaattaggccaaattacatctaatagtgagttattagatagtgctgatgtgaatggttttcaattatattcagatagtagctatcaaaacagtaagttgacagttcctattactgggatgtctgaaaaaccggctaccgttgaagtcacacaaaataatcgattgttatatagaacgataatacctgcaggccctttccaattaaataacattagtggtgtatcatcaagtcaaccattacatgtcaaagttattcaagatgatggtactattcaagaatttgatgttattacatcaaataaagacttaaaaaatccacagagtagtaccagctttaacttttttatggggaaatatagaaaaaactcaagtgatgaacgcatacatactccttttattaccggttttgaaggtggcattaattatttaaatcataattttctagggggtatggaaatatcatcaaaatataagtccattgtaggtagcgtaaatagcgtttttggtgaacatcgtcctttatctactggctttggtattaaatatgcatcttcttctaataaaggtgatggcttccaagcaaatgctaatttaagtttacctgtatcagtattctctctaggcttatcaacaatatatcgttcacgcaactattccacactctatgaatctctacaaatagataatatagaagacccattagatgataatcttgctaataatcagacaaaaacatcaagctcattatctctaagcttaggaaatcaacgttatggatcactgagttatagccttagctatagccaatattatggtgataaaaaagacaattattcaaataccatttcttatggaaaaagatttccatttatgtcttttaatattagctatcaaaaaagtagtaattttgaagatcgtacatttgtaaacatcaacgtacctattaataattcatcatcatttagtactcaataccaacattataaaacctcatctttaacaacaaattatagtaattatcataatgatttatttagatattctatcggggcaactgctgataaagacagtaaagataagaatattagcggtaatatcaatgcaacaaccgcttacagccaaattagtgcgacaggctcctttagtaatagtaatcaaaaatcagcgatgctgacagcatctggtgctattgcttatagtgatgggttatttgctacttctcctgtggagctaggagatactttcggtattttacgtgttccaggacaatctggtattttagttaactctatgggtggtggtacgacaataactaatcactttggtaccgccgttattcctaacttacctgtaaataaaaaaacaactgttctattaaatactaaaaatttaccactcaatgttatgttaggcacaacatcctttgatattgcattggcaaaaggtactgttttttctcgtgagatccccgtcaatacaatgaagcaagttttattagaaataaaaaaaccagatggtaaacctgttaatacagcaaatagtgttattgatgataagggaaatctaataggtgttattatgggggacggtaatgttataataagtaatgagcaaatcggtaagccactaaaagtaaaatcagataatggtgacatctgttctgttgattattcagttccagaagaatttaatccagactttttatatgaaaaagttgatgcaatttgtaagtaa

SEQ ID NO: 298012 - DNA, 282 bp, Proteus mirabilis
atgatatttttattattagcttatctaattaacaataatttagcattagctgataataaaaatatcgagtttgatattgactcacttaaatctcttggttatggcagtgaaatcgctgattattttaaagaaggaagtcattttcttcctggttatcatgatgtaacaattatagtaaatagtagccttaactattctgataatattcttattaatgaatcaggtaatctttgcttaaataatcaattaatagataagctgaaattaaaaaaaaagagataa

SEQ ID NO: 298013 - DNA, 747 bp, Proteus mirabilis
atggatattcctcgtattttcactattagcgaaagtgagcatcgtattcataaccctttcacaccagagaaatatgccaccttaggtcgagtattacgaatgaaagaaaactggcaaattcttgatctcggaagtggctctggtgaaatgctatgtacttgggctcacgattacaatattacaggtattggcatcgatataagcccgttgtttactctacaagcaaaatctagagcagaagagttaggcgtcagccatcgagtacattttatccatcatgatgcctcagattatattagtgataaaaaatgtgatatagcagcatgtataggagcaacttggattgctggtggtgtaattgaaactatcgagctactagcaaaaagtattaaaacaggtgggcttattcttatcggagaaccatattggcggcaaattccaacaacacaagagatagcacaagcttgtggtgcttcatccatatcagattttttaactttatctgagcttgttatctctttcgacaatcaaggatacgatctagtcgaaatggtactggcagatcaagagggttgggatagatatgaagctgctaaatggatgactatgcgccgttggcttgacaaaaatagtgccgataattttgctcaagaaattcgaacagaattgactatagcccctaaacgtcatgttagttttacacgagaatacttaggctggggggtatttgtattaattgctcgatag

SEQ ID NO: 298014 - DNA, 579 bp, Proteus mirabilis
gtgaaaggcaaaagagttgttattgttcatggctatactgcatctcccaaggataattggtttccatggttgaaagaagagcttggatcattaggatatgatgtcagtatacctatgatgcctgagcctaatcatcctaaccctaatgagtggcaacaaaaacttgccgatgaaaacataatacttgataaagatactattcttattgggcatagtctgggatgtataactttattacgttttctttctgaacaggcttgtgaagatataacaataggcgggtatattttagtcgctggttttaatagtgaacaaaaaactttacctgagttgaactctcatatttataataacctgaattatagtaagttaattaaaatatcggataaaagggtatcattaatatcatccaatgattggattgtgagtcctgattcatccaaaaaattagctagtcaattacaaactcaaattgttattgaagaagatgcgggacattttcttgataaagaaggctatattaaattgccagtcatgcttgatatttttaaatatatgctgaatcaatataagctataa

SEQ ID NO: 298015 - DNA, 234 bp, Proteus mirabilis
gtgaaaacaaacagagtcgcaagacgtattttaggtttaccttataatttaagtcggtctaaaaagaaagtgcgtttttccattattacgcctacagaaagtgataatcttcccgcagagttaaaaaatgcaactcggatctgtttaaaacaagatttcagaaaaaatgcgcaaaataagcgtatttatatgaaattaaccgatgcttatccagattatcttctagtaagttaa

SEQ ID NO: 298016 - DNA, 915 bp, Proteus mirabilis
atgaaactgaccattgacaatataaagccttaccttttatttgaaacaatttcaggtagtcgttcacaaaatttggcaacagatagttcagatactgatattaaaggtgttttttatctacctaaagagatgttttattgctctgattatgtgccacaagtaagtaataaaactaatgatattgtttattatgaattagggcgatttgttgaattactgtgtgcgtctaatcctaatattttagaattattaaatgcaccagagcatgttgttatttatcgtcatccattatttatgcaatttaacccagaatggtttttatcaaaggaatgcgtacagacttttgtgcattatgctcaagggcaaataaaaaaagcacaagggttaaataagaagatcatggatcctatagataaagagttaaaaacaatccttgatttctgttatatcattgaagatggaaaaagcctattactgaataattggcttaaaaaacgttgttgggagcagcaaaatattgggttggttaaaatcaatcatgcacaaaatctttatgcagttttttatgatccaaatagtgattatcaaggcgtaataaaaaaagataatgccaccgatgttttactaagcagtgtctctgaaacagccatattacaagcctatcttagttttaataaagacggctacagtacctattgcaagcagtatcatgcttattggcaatgggttgaggagcgtaatgaagcccgctatcagcaaaatattgaacatggacgaagttacgatagtaaaaatatgatgcacacttttaggttgctttatattgcattaggaattgccactgaaaaaaaagtcaaagtttggtgtgataacagggatgaattgttagaaattaaatctggggctttaagttag

SEQ ID NO: 298017 - DNA, 609 bp, Proteus mirabilis
atggataacttaataaaattaacaatagaaaattatggaatagtagctggaacaatagctattgcattactttctttaggcggatttgtagcaagcgttttaagagatagtattaatttaaaaaataaacataaaaatgatgaaaacttaaaagcatttgatatacaaaatagccacgcaaatcttattgaaaggcgagctgacgtaattgataatatatataaattaatggttgaactacatgaagtagtttatactaccattcgtcctgattattttggtagaccaactccatctatacatatagcatatgaattagccttacctaaacttgataaattcatagaacaatatgaaaaaaataaaatttatttctcttatgaaacatcaaaaatactctcaaaatttcattattcagctatgaaagcattaaatcaagctcgtatagctagtagtactaatgaaaataaatcagcaagtattaatcctgaattacaaaaattatttgaagaaataaatggtaatatgacaaaagctcgtgaggctgtagaaaatgaatttagaaatattctatatacagcaaacataccaaaaccatcaaccaattaa

SEQ ID NO: 298018 - DNA, 519 bp, Proteus mirabilis
atgagtgtgccacaaacaaaagccgaactacttttagctattgataaaaattttagtaaattaattagttacctcaacgcaatcccaccggagatgacttcagatccctcaatggctggacacaccaaaggaacgaagatgagtgttcgtgaccttgtttcgtatctaattggatggaatactcttgttgtaaaatggatcacttctgatgctaaaggtctacctgttgattttccggaaactggctataaatggaatcagcttggccttcttgctcaaaagttttattcggattatagtgagttaagttataaattgttagtaattgaacttcagactgtaaaaaatgagcttgtaaagcttattaatgatcgtaccgatgatattttgtatggaaagtcatggtacacaaaatggacgatgggacgaatgatctcatttaacacatcttcgccttacgctaacgctaatggaagattaagaaaatgggcaaaaaataataatatcagtttaaaataa

SEQ ID NO: 298019 - DNA, 231 bp, Proteus mirabilis
atggctgaccaaatggcagcgactattcgccataatcgggctagagggcaacatcaagtggcagcaatgtcggatatagttagagatttatcaagattaggttggaatgaccaaaagattggtgatgaattaggtatgtcacaagatgaagtactacgtttaaaacagattagtggcttagctgaattattttcagagcacgatttttcagaagcttggactattaaataa

SEQ ID NO: 298020 - DNA, 1092 bp, Proteus mirabilis
atgagtttgttatttacgcctaataaattaggacctcatcaattagacaaccgtattattgttgcaccaatgtgccaatattctgcgcaagatggaatacccacatcttggcatacaatgcactatgggcaattagcattatcaggtgccgctttagtgattatagaagcgacggcggtagagcctcgaggtagaattagctataaagatctcggattatggtctgaggaacatggtcgcgcattaaaacagcttattagcgatataaaacagcatactaatgctaaaataggtatacagttggctcatgcggggcgaaaagcatcaacatcgttgccatgggaaggtggaaaatcattggctcctgatgatgagaatggctggcaaaaagtagcaccttctagtattgcttttggtcaatatcatcagcctcaagcattaacaattgatgagattgaaaagataaaaaacgcatttgttgaagcagctaaaagagctgagtcagcaggcattgatgttattgagatacatggtgctcatggttatttactgcatgaattcttatcaccattatcaaaccatcgcaccgatcagtatggcggtgattttaataatcgtagccgcttgttaattgatgtttttactgcagtcaaaaaagcagtctctgacaaaatgtgtgtgggagtaagaatatcagcgactgattgggttgaaggaggatgggatctggaaagttctatcgcattaactcaacatcttgaagatctcggttgccactatattcatgtttcttccggtggcttatcagacaaacaagccatcaagctaggacctaattatcaggttccctttgctcaagccatctataatgaaacacaattacccgtgattgcggttgggttaattacagagccagagcaagcagaagctattttactgactgaacaagctgattttatcgcattaggcagaggaatactttatgatcctcgttggccttggcatgcggctgaaaagttaaagcagaccattaaagtcgctccgcaatatttgcgttgtgcgccacatggtagtaaagaattttttaaatag

SEQ ID NO: 298021 - DNA, 366 bp, Proteus mirabilis
atgggagagatcgtcacatcagttaaccatgtatcaggctcgatgaaagagattttagcagcatcagaagagcaaactcgtggcattgctcagattagccttgcagttaatgaaatggataaagcgacacaacaaaatgccgcgatggtggaacaatctacagctgcttcagcaacactaagtgaacaagcctcaatgttagatatgattgtaaataccttcaaggtagaacaagtcgctgttacatcaccacgatcaccaacattctcggctaagccagctgaaccggaaataacaaaaacagcaacgacatccacaataaaatcccatcatcatgaagccgatgacaattgggaaagtttttaa

SEQ ID NO: 298022 - DNA, 453 bp, Proteus mirabilis
atgaaaaaatatagtgctattagtgtattagttatcattttaagtttaatgatttattttagtttttacttcaatcaagaaaaagaaaatgtaataaattgtgaagcaaagttaattatttatgataaagagtatactaaagctaatttagaattaatgtttactttaggggaggagcaaggatgggcaagtattcgaggtgttattgattataacggcgatttgatcccagtgtatagaaaatctttttttgatataaccaaactgaaaactagctacaagctagcatctacacagatccttattaacgataataacagtgaaattatcaataaaataattcccaatttatatgtaaaagaaggttggcaaagaagtctttctgtttttagtcaaaacgatggtggttatttattctcatctaacaatgtatactcattttattgttattag

SEQ ID NO: 298023 - DNA, 549 bp, Proteus mirabilis
atggaaatatggcaaacctatttacaacaagatgattaccccaacgagaatataaaaaatagaatcattactattaattgtttaccaaatcataatttagaaagattatcattagaccatgaattctatgattctatttcaaatgaagaactcaacctttatgaagctattcaagactttttaatgataaaattaaatagaaaaggaattattatagaatcatgtccaacatcaaatatttatattggtcgttttaaaaaataccatgagcaccctatatttcgttggaaccctcctaatcctgagtggttagaagttaattctaaatataatagatatggactcagaacaggccctatgtctgtttgtataaatacagatgactgcgttttaatgccaaccactatagccaatgagcaccgaataataaaagaaactgcaatacactgttttgatataaacactttaatggctgatatatggatacacagtataagaaaaaaaggcaatgatatatttaaagaaaatcacctacctatattcatttaa

SEQ ID NO: 298024 - DNA, 147 bp, Proteus mirabilis
atgatttattctatggcggtgatggcaatgatttattttatggtggctctggaaacgatgttatatacggagaattgggaaatgatgtgctctatggtgatgatggagatgatatgcttatcgattattatggtgctaatatgttag

SEQ ID NO: 298025 - DNA, 423 bp, Proteus mirabilis
atgtcaaaagagataagcgaattacagtttagtcttcactatgcctcagaaacagacagtgaaaagaatacctccatcattttaacgacgaatatccatacggctgatggtgaaactcaacaactcacacaactaatttgcacgacatctcccgcaggtaaaaagcaatatcgaataggcttgcaaaagattagtgatgcaggcgacacattgctggtggcgattgaatcctattggcgtaaaaacacacaagagagttgtgtttatttgttagagaaagcgaagcaatttattcaaggacacttacaacaaacgaatacatggatatctatgtatggtcttgtgattgtttctaatgcgtcactggaagaacagttgcctgaaggtttattaaaggcacttaaagtatcaatccccgcctaa

SEQ ID NO: 298026 - DNA, 270 bp, Proteus mirabilis; identical to SEQ ID NO: 294436

SEQ ID NO: 298027 - DNA, 471 bp, Proteus mirabilis
atgtctctcaaacagaaaatagcggtgataacaacagcaggagcaacagccatcgcgttagtagtaatagcccattttgaaggtgtacgttatgaaccttatcgtgatgtggcgggtgttctaactgtttgttatggacatacaggcaaagacattattcaaggcaagagatacacacaacaagaatgtgatgcgttattacaaatcgattttattaagacacaacagcaagtcgatgcattaatcaaagtatcactcgatgactacaccaaagctgctttatattcctttgcttttaatgtgggtacaaccgcatttgctcgctcaacattactcaagaagctaaacgctggtgatagagcgggtgcctgtgaagaaataaaacgttgggtatatgcgggtggaaaggtttggcgagggcttgtcagtcgtcgagaggcggagtcagcactatgtcatggaaaactttaa

SEQ ID NO: 298028 - DNA, 159 bp, Proteus mirabilis
atgtcatggaaaactttaatcatcattatcggctttattcttgcattactcattacagtcgctgttggcatttatctcttgattgataactcatgtactaaagaccaagtgagtttagaaaagcgctgtcagattgcactctcatatcatcggtactaa

SEQ ID NO: 298029 - DNA, 540 bp, Proteus mirabilis; identical to SEQ ID NO: 297586

SEQ ID NO: 298030 - DNA, 264 bp, Proteus mirabilis
atgaaaaatgcgacagtaaaaccaactgctgatgcagaagaagctaaagtttctgtattctacaatggtgctgtaaacagttctcaaagtcttcaaaaagaaaaagtgtttgcgtgggctaaaagctctagcgatttctctgccggtgaagtatttgcagctgatttcgaaatcaaaccaactatcaatagtgaactaaaaaatagcggaggtgaacctaaattagatggtttagcaactcttgctttccaatttggtatctaa

SEQ ID NO: 298031 - DNA, 354 bp, Proteus mirabilis
atgacacagtcattacgagaatattgctattcaagtatttttatcattatcatcagtgggttattagtttggttatttgggcgtaacgctattcatgtcggtgcaagtgggtggatctttggattatggtcactgctaattgcccatgcttttactcgccataaaattatcgatatcgtcatcgccttatttgtgctgttttattacggctctatggcttatggattaatccccgggcaattaggggtttctacagaatcacatatcgcaggcgttatctctgggttgctttatgcttggtgtgcaagaaaaatcattcgtcggaaaagccgtgtagtagaaataataaaatga

SEQ ID NO: 298032 - DNA, 210 bp, Proteus mirabilis
atggaaaaaaaattagttaacatagaacatgaagttgcggcattaaaagtgattttaaaatcactattacttacattaacaaataaacaaaaggaatctgttatatatgatataaacaaaaccattagaaatgcttatgctgaacatccacaataccaagacataatagaaaaaaccgaacaatacataaaaaagatactccaaaaatag

SEQ ID NO: 298033 - DNA, 279 bp, Proteus mirabilis
atgaatacattgaattacatcatcagtaaaaaaataaaacaaaaaagaaaagaactaaaattaaccggtatacaaatgggatacttacttggaataagtcaacaacatttttctcgattagaaaatggtcacattaaattcaccgtagagcatatatttgctatcgcctcaatattagaagttaaacctgaaagtttattaccaacccacaatatagccaaagctgaggcaatttcatgggcaaaaacagtattatcagccgagacgactttacgatga

SEQ ID NO: 298034 - DNA, 378 bp, Proteus mirabilis
atgttatatacaaatcctcgtaataaatcaggtttctatgggcgacatcaaattagcaaaccatcccatcatacctggaaatcttatgctcactttttattagccagtttaccagagaaaacagcagaacattatcgtaataaaatagcggtctatcttcgctggtatgccgaacgagattacccaaatggcatacctgatgcacaagaaggtgatactagtagtaaacaaatcccttcttggcgacgaatttgtaagaccatcttgcgtaacgatttttggtgtagaacattagcatttagtccaacaaaatcacattgttatgatcgatattttaaacgaatacaagaaaaacgaaaaaactggcaacttatttag

SEQ ID NO: 298035 - DNA, 228 bp, Proteus mirabilis
atggaaaatattgtggttcatgtaaaaaatgtcacgagtcttattggtgaaatcagccttgcatcatcagaacaaagtgcaggattaaaagagctcggtcgagctgtagagcagttagaatcaataacacatgaaaatgcagattatgtctctaaagcgtcgttaatttccggagaaatgaaagaacaaacgaattatttagtaaaagccattcatgtatttcactaa

SEQ ID NO: 298036 - DNA, 585 bp, Proteus mirabilis
atgtgtataagagacagaccttatttagcccaaacatggattgaaaatgataagaatgaaaaaattgagctagggccattaattgccacaccattagttcagcgattagagcctggtgataaagcgttaattaaagtatctgcgacaccagatattgaaaagttacctaacgatagagaaacattattttattttaatgttagagaagttccacctaaagctgaagacaataatgtattacaaattgccttacatacaaaaataaaattgttttatagaccgaaacaaatattgagagagccaaatgctatttggcaagatcaattagttttaaataagctatctgacggttatgaaatagagaatccaacaccttattacgtcactgtattcggtattggtggttcaaagaaagaagcggttgattctgagtttaatgcagtcatgattgcccctaaatcgtcacaaagggttaatagtaaagtgtactcaacgccatacttatcttatataaatgattatggtggaagaccgacaattaaatttcaatgtcaagctaatcgttgtgtagcagagaaaaaataa

SEQ ID NO: 298037 - DNA, 747 bp, Proteus mirabilis
ttgaaatcaggaatagacaatttacaacaaagtaaagcattgttagaccgagaaatttctatcactaagccaatagttgcacaaggtgcaatgtctgctgtggaattattaagaatggagaggcaatcagctgatattcaattacaaatagatgaaaagaaaaataaatatttaactgaagctggggctgaattagttaaaacagaagcggaattagctcaagcaagggaaaatatggcagggcgagctgatcctgttgaacgtgctttaatacgtgcaccattaagaggtattgtgaaaaatatccgtattaatacagttggtggagtaatttcagcagggcaggatataatggaaattgttcctttagaagatcagttattagttgaagcttatattagtcctcgagatgtggcctatgtccgtgctggtatgcctgcattagtaaaattgactgcttatgattatgcgatttatggtgggttagaaggcgtcgtgactttggtaagcccagatacattgcatgatcaaaaaagacctagtgatttaaaacttaatcaagatgaagctttttatcgcgtattggtcacaactcaaagtagtcatcttacggataaaaatggaaaagagcttcctgttattccgggtatgatcgccagtgttgatattaaaacaggtgagaaaacggttttccaatatttgatcaaacctataacaagaatgaagcaggcattacaagagcggtaa

SEQ ID NO: 298038 - DNA, 408 bp, Proteus mirabilis
atgtccccaaaagcaaaatcatggctttggatgctggcggttattatttcagaaacctcagcaacctcgaccttaaaaatgtttgataataatgaaggaataacaaagacattattattaggattaattattgttctttatattgtttgttattattcattatctcgtgcagttaaaaatatcccagtaggcttagcttatgccacctggtccggaaccggtatcttagttgtatctactttaggtatggcattttacggtcaacatcctgatacggctgctattattggtatggcagttattgccagcgggatcgtcattatgaatctgttttcgaaaatgggttccgaagaagagccagaagaaacgacggagttatcgaatataaaacagactgctcgtcagtga

SEQ ID NO: 298039 - DNA, 666 bp, Proteus mirabilis
atgtttaaaaaatatttattagcaatttctttattagcattatccagcggtactactttagcagctaaccctattgctaaattaaaaatcacaggaaggatcaagcctccgacttgtactatcaataatgaagagcaagaagccacaatcatctacaactttgatatcactccaggtcttttccctgaaaagggtgacttaaagttagcaggtcaatcaaaaaacattgttatttcttgtgattcaagtacttatttagcttttgttgcaacagataatagattaggaacacagagccaagaaagtgaagccttctttggtttaggtcactatcaatttaaaaataaagatgatggaaaaaatgcagaaacaaaagtaggctattacaccatcaatatcagcaatgccactgtcaaaaaagaagatggtagtaagtttgaaaaagcttatatcaaatctaacaacgccacgacatcagttcctaatacattaattcataaacaaagtgagtatggttgggctttgcctggtaagacatctgttgcaggaaaatcttttgctgctgactttgaagtcaaacccgtcattaatagccaaatgaaaaaaatcgaaggcgaagctgaattagatggcttagccactttgacatttcaatttggtatttaa

SEQ ID NO: 298040 - DNA, 642 bp, Proteus mirabilis
atgaccattgaaactgtactttctgttttaaaagagtacctagtaaaactaaacaatgaacaaaaaattgaagcactcaataaaataaaaatatcgcttcatcaaataagtccatttaaaaatgaacctattgattgtgttctttggataaagcgacagcagattatcgctaatgactataatcccaatgtcatgtctccgacagaaaagagattactagaaacgtctctggtaaaagacggttatactcaacctgttgttgtattacctattcaacagtccaaaaataaaccatcacaatggcaagttgttgatggctatcatcgttatttactgagtaaaaaaaatagcttaaacaagcgaattaacggctatttacctattactgtacttgatgttgaaagtcatactatggctgaccaaatggctgctactattcgccataatcgggctagagggcaacatcaagtggcggcaatgtcggatatagttagagatttatcaagattaggttggaatgaccaaaagattggtgatgaattaggtatgtcacaagatgaagtactacgtttaaaacagattagtggcttagctgaattattttcagagcacgacttctcagaagcttggacggttaagtag

SEQ ID NO: 298041 - DNA, 642 bp, Proteus mirabilis
atgaccattgaaactgtactttctgttttaaaagagtacctagtaaaactaaacaatgaacaaaaaattgaagcactcaataaaataaaaatatcgcttcatcaaataagtccatttaaaaatgaacctattgattgtgttctttggataaagcgacagcagattatcgctaatgactataatcccaatgtcatgtctccgacagaaaagagattactagaaacgtctctggtaaaagacggttatactcaacctgttgttgtattacctattcaacagtccaaaaataaaccatcacaatggcaagttgttgatggctatcatcgttatttactgagtaaaaaaaatagcttaaacaagcgaattaacggctatttacctattactatacttgatgttgaaagtcatactatggctgaccaaatggcagcgactattcgccataatcgggctagagggcaacatcaagtggcagcaatgtcggatatagttagagatttatcaagattaggttggaatgaccaaaagattggtgatgaattaggtatgtcacaagatgaagtactacgtttaaaacagattagtggcttagctgaattattttcagagcacgacttctcagaagcttggacggttaagtag

SEQ ID NO: 298042 - DNA, 309 bp, Proteus mirabilis
atgattatcgcttattcaacagcccctaatgaaactgtcgcccatgaaatagctcaccatcttatacaggcgaagcttgcagcttgtattaacgtccttcctaatatcaaatctatctatcattggaataatgaaattgttgaagataatgaggtacttatgatgatcaaaagcgagagttcaaaacaacagattttgattgatacactagtaaaaatgcacccttacgatacaccagaagtcattattgtccctatagaaaatgggtttcatggctatctagaatggatacatcaaagcctaaattaa

SEQ ID NO: 298043 - DNA, 303 bp, Proteus mirabilis
atgagtaacaagtatccagttgcttacgctgttggacaaaaaataaaatcattaagaaaatctcaaggttataccgtatttcagttagcaaaagaaatcgatattagtgaacagcaattatttcgctacgaacgcggagttaatcgtatcgacattgattgcttagttaaagtccttgatgtgttaggcattaatataggtaacttctttgaagatgttatggggggtatggttgatgttcctgagaataatgaacaacatatcccagctcatttcgacaataaggctctttctattttctga

SEQ ID NO: 298044 - DNA, 159 bp, Proteus mirabilis; identical to SEQ ID NO: 298028

SEQ ID NO: 298045 - DNA, 471 bp, Proteus mirabilis
atgtctctcaaacagaaaatagcggcgctaacaactgcgggagcaacagccatcgcgttagtagtaatagcccattttgaaggtgtacgttatgaaccttatcgtgatgtggcgggtgttctaactgtttgttatggacatacaggcaaagacattattcaaggcaagagatacacacaacaagaatgtgatgcgttattacaaatcgattttattaagacacaacagcaagtcgatgcattaatcaaagtatcactcgatgactacaccaaagctgctttatattcctttgcttttaatgtgggtacaaccgcatttgctcgctcaacattactcaagaagctaaacgctggtgatagagcgggtgcctgtgaagaaataaaacgttgggtatatgcgggtggaaaggtttggcgagggcttgtcagtcgtcgagaggcggagtcagcactatgtcatggaaaactttaa

SEQ ID NO: 298046 - DNA, 390 bp, Proteus mirabilis
atgtctaaatcggcaaaaggtacgacagaacggcatggacggaacgtaaaagctaaatctggtttaaaccgcgcaatactggagcagggctggtatgaaatgcgccgtcagcttgagtacaagcagctctggcgaggtggtcaggtactggcaataccaccggcctacaccagtcagaagtgcgcttgctgtggtcatacagcaaaggaaaaccgccagtcacaaagtcaattcgagtgccttgaatgtggatatacagcgaatgctgatatcaacggggcacgtaacattttagcggcaggacatgccgtgcttgcctgtggagggagggtgcagtcaggccgcccgtcgaagcaggaacccgccgaggtgattcagacatcagtctga

SEQ ID NO: 298047 - DNA, 390 bp, Proteus mirabilis
atgtctaaatcggcaaaaggtacgacagaacggcatggacggaacgtaaaagctaaatctggtttaaaccgctcaatactggagcagggctggtatgaaatgcgccgacagcttgagtacaagcagctctggcgaggtggtcaggtactggcaataccccctgcctacaccagtcagaagtgcgcttactgtggacatacagcaaaggaaaaccgccagtcacaaagtcaattcgagtgccttgaatgtggatatacagcgaatgctgatatcaacggggcacgtaacattttagcggcaggacatgccgtgcttgcctgtggagggagggtgcagtcaggccgcccgtcgaagcaggaacccgccgaggtgattcagacatcagtctga

SEQ ID NO: 298048 - DNA, 924 bp, Proteus mirabilis; identical to SEQ ID NO: 103795

SEQ ID NO: 298049 - DNA, 486 bp, Proteus mirabilis
gtgtttttagatataggcggacaacaatttgttgccaaagggaaagtcgaaagagtgaagggctggtctgtattatttgtgaaacatgaagacgatccgccagtaaaagaagaggcagaaaccgggctggaagccggaacagaaacattgccgtcccttcacgaaggtgaattctgtgtggtacaggaggcaaaggttgtacaactggcgacctcaccaccgaaaccgtatacggatggtacattgattgcggccatgaagaatgcgtcctcctttattaccgatccgacattaaaaaaagtcctgaaagagaatgcggggctggggacagaggcaacccgggcagggatcatcaccacgctggaaaacaggaaattgattgtcaggcagaaaaaaacactccgggcgacagacaccggttgtcagctgattgatgccctgccggcagcctgtacagatccgggaatgacggcgttatgggaataa

SEQ ID NO: 298050 - DNA, 249 bp, Proteus mirabilis
gtgagtgcttatggcgttcaaaagctaatggctcagcttggcctagtcgtcactcagcgtgttgcttacaaagtcaccacaaaacgcaaacacagtgatgcggtagtcgataatttgttaaatcaaaatgttaatcctcacgcacctaacgaagtgcgggcgggtgatgtgacctatttaaaaacaggggagggctgggtgtatttagtcatcgtgatggacttatactcacgccgtattgcgggttga

SEQ ID NO: 298051 - DNA, 273 bp, Proteus mirabilis
atgaaaaaacgaacaaaccgagtttatactcttgagtttaagcaagaagcggtcgcattagtctcaaaacaaggttatagcgtcccaaaagcggcagcttctttagggatcaccgataaattactttataactggaaagcaaaattcgacgctgagcaatccggtagtagcttgaattccgatgagagagctgaactattaaggtttcgaaaagaaaataaagaacttaggatggagaaagaaatcctaaaaaaagtagcgccctccagctaa

SEQ ID NO: 298052 - DNA, 270 bp, Proteus mirabilis
atgagcgatactataatgcaatcaacatggcaaactaaggagttgggtatggtaaccagaaaaggaaaatctgttacgcctgagtcttcgtttttccaaacgccacacattattcagactagagaagatggaagtactgttagtactgtttgtagtcgtagtggaaaagaagtgacctttgttactccaaaaggaaaaaggatcagagcatcacagaatgaagtttttaatgctttattgaaatctataaaatcagtaaatcattcataa

SEQ ID NO: 298053 - DNA, 567 bp, Proteus mirabilis
atgcctgagttaacaatacgagagtgtggtgaggaggcaattagattaactaatgagttatttcaacagtctgagcaatcttttatggcatatttattaaatgaatcagacttagcatggtgtattgcaagtactagaaattttccgccagagaggcaacttccttgggatcacgcaggacaaacatttcaaaatgataatggatttagcttttgttttaagtttttagatatgcaaaataggcctgctggagcctgcatttgtgaatattgctctgataatgtattgaatattgaaatgattcagaactttcaaattaaaccatctattcttgatggaaatacgcttaagtttatgctttataccatagtgttttttctgttactgacacaagggacgggtgtacggctcatgtttcctataaatgaaagtgttgcaacatactatgttgaaaaacatggttttcaggatttaactggtgatggttcaaaagaaatactttaccgctcagcagatgatttattaaattggtttgagcaaaataaccgctcagttgatagtgagtga

SEQ ID NO: 298054 - DNA, 741 bp, Proteus mirabilis
atgtcacagttaaatacatcatcaacaccattgcctgcatcactaaaaaagcgtggcttttttaccatattattgtgggatataccttggcagattattggcattttattggcttcacttttgtttagtttggtattggaatatatcggtattttcttcttttgggagaaagagggagcgcaacatagttaccaaattatgctgattgaacgaacttattttgctgagagttttacacaaagtatatttgtattctcaccagtgataacaacaatttattgggtcactgatttttcacaagggatacaggataatttgctgaagatgtcattattcgctataaaaacgggtaatggtgttactgatgggattaatgtaggagcaataaaagcgttccaaataggagaacaatatttactggcaacattctttgttttacaaatagtgataatgcgagtcactattctcgtgctatcaattccattgtttatcttggtgataatagtcgccgttgttgatggtttggtcagacgtgatttacgtcgatatggtgcagcttatgaatctagttttgtttatcatcatgctaagcgaataatcaagcccgcaatttatattccctgtgtattgtatttatcattgccatttgcagtttatccgaatttcttgttgttgccttctatctttttgatagggatagctatttctgtgacaatagggtgttttaaaaagtatttgtag

SEQ ID NO: 298055 - DNA, 666 bp, Proteus mirabilis
atgatccgcttcgaacacgtcagcaaggcttatttaggtggaagacaagcattacagggggttgattttcatcttcgccctggtgagatggcttttttaaccggacattctggtgctggtaaaagtacattgcttaaattaatttgtggcatagaacgtccaagtgatggcgctatttggtttgctggtcatgatatcagtaggctaaaaaatagtgagatcccttttctacgtcgtcaaatagggatgatcttccaagatcaccatttgctgatggacagaacggtttatgacaatgtctctctacctttgattattgcaggcgcaagtgaagaggatattcgacgccgagtttcagccgccttggataaagtcggactacttgataaagcgaaaaattaccctatccagctttcagggggggaacagcaacgagtgggaatagctcgtgctgttgtgaataaacccacggtgttattggctgatgagccaacagggaatcttgatggtgaactttcagaaggcattatgcgtctgtttgaagagtttaatcgcgtgggggttaccgtgttaatggcaacgcatgatatgacacttgtagagcgcaggaattaccgtattctaaccttaggtcaagggcgtatggtgggaggacaaaatggctaa

SEQ ID NO: 298056 - DNA, 384 bp, Proteus mirabilis
atggtgatcggtagcttaatgattgtggcactgctattggttattggtaatagtgttcgtcttaatattttcagtcgtcgtgataccattaatgtgatgaaattaattggtgctactgatggctttatcatgcgtccctttttaaattggggtttagtactcggctttatcggggctatttttgcgattattttctctgcattattggtatggaagttatctgatgtcgttacgcaagcggcgaccgtatttggaacaactttctcaatatctggattaggttttgatgaatcggttattttgatcctcgtttcgatgaccattggctggtttgctgcttggttgaccaccatgcaacatttacgtcaattcacaccagaatag

SEQ ID NO: 298057 - DNA, 360 bp, Proteus mirabilis
atgacgacgttaaataatgtaccttccccacgccccagttctattacgagaaaagtcgcttggcttaatatttttatacaattagcatttcctattgtgacaaccatgcctacgcagacttttgccaatgagaataattttaaaaaacataatattagcgatataaatcaacaaaatacttatcaagtcaaagcgggtgataccccagaatctatcgcaaaaaaatttaatataaaattatttaaattgattgaagctaatccacaacatgtatcgttaacgggtgagctaaaaataaatgatggaactattcttaatattcctaatgaatatttattaaaaaaaaaagtggctcaataa

SEQ ID NO: 298058 - DNA, 426 bp, Proteus mirabilis
atgattaaatacctattagatacaaatattgttatattcactattaaacgcaagcctgagtttttattaccaaaattcaaccaacatgctgaacaattagctatttctacaattacactcgctgagctcatttttggtgctgaaaaaagtgtaaatccagccaaaaacttagctacggttaacgattttgtttctcgactgactgttttatcttacgatgacttagcagcttttcattatggagacattagagcaacactagaaaaacaaggaaaacgcattggtgataacgacttacatatagcagcacatgctagaagtaaggggctaatagtcgttaccaataatactcgagaatttgaaagagttgatggtttaagaattgaggattggaccgttattaactcagacccccaaactgattga

SEQ ID NO: 298059 - DNA, 423 bp, Proteus mirabilis
atgccttcatctagtacagttccatacctattggctaggagggtttctcgtcatttcaagtcaacactctataatgagatatttataaaatgtacagtagaagaagttataaatcgttatgctaacagcacagtaaataaaaaagaaaatcatataaaattactaaacagaacgttatctgaattacaatctttatctcccaatacgattttcaaaatgaagcacatccctaataaaattaggcattatttctctccttggaaaatagatccaaactttaatattagaaaattaaataattacaatattattttaattgatgatttgctttcaacaggaacaacattaaatatggcaactatcgaactaaataatttaggatttacctgttctactgcaatatgtcttctaagtaatctttga

SEQ ID NO: 298060 - DNA, 519 bp, Proteus mirabilis
gtgattaaatcgaaatgttataatttatatgcagatgtttattttaacaatgattattatattatagtaactatctctgggtgttatatccattttacggactttaaatatggatataagattttatctaatgatatcactaatgctgagttaggttattattcaaaaaattttttaatgaatagtagggaaatagaaagtaactcacaagaatttcatgagatgtatactgataaaaaatcttatcctgaatggataaaaaaaattgtcaaagagtatggttataaaaataaaacggctctatttgaaaatatgaatttgtgtagtttaagtgttgtaggtaatgaaattatcattagacctcaaaatcatttacgtatggatcattgggtaggtgagggaatatctgatagtgcaattattacattaaaaaccaattgtagtgatgaggttttaggtgcttcaataaaaaaaagcttttacacgttgtatcagtcgaaaaaccatcacttaatataa

SEQ ID NO: 298061 - DNA, 1707 bp, Proteus mirabilis
atggcaagtaatgcaactattgctgcaggagcctctgcgggggttgcgtcaacggcatcagttgcggcacaagccggttttgcttctttagtttcgcaagctgcggtctctttagccgaaaatcaaggcaatatttctaaaacatttggctccttaagtcgcagtgatacggtgaaatccattgtcaccagtatggccgttgcaggcaccttgcaaggtcttgaccaatttatgggttgggatcaagcaatacaggggggaacattaccgacaacaggcaagttgcttgcgacggataatgccacatggactcaagttgctcaacgcgttgcctcacagtcagtagtgagttctacactgggcacagccattcaaggtggcagttttattgataattttaaaactgcgctattaagccatatcggcagtcaatttcacgctgaaggtgccaatctcattggtgataacggtgcgatattagggcatgcaggaaaggttttaagccattctgttgttgcaggagtgagcgctgaaattgcaggaggcagtgtaacaggtgcagtagccggcgccttggcagcagaaatagcggcaatatcgctcaacgataatttaattaagacagaacagtggcgagaacaacaagctcaaaaaagtcgtttggtgggggcttttgctggtttagttgcaacaggtaaagcggagggcgttataagtgcggctaattcggctgaattagtagaacgttataatagacaacttcatttagaagaaacaaaagcaattaataaattagccaatggagataaaaataagttagaacgcttattagctgcatcttgtcggaaagtttattgtattgctcaggaatcattaaattcatcagaaagaaattattatgaatctttaatgaaaaaatacccacatacacatgaggaagattcattactttcagattattggataacaaaagaaagaacaaggattgggggaaactatccactatttagtggttatgaaaatattaagttattcacttatacagaaattgataaattaacagatagtgaaatttttgcaagaaatcaatggattgaaaatgcgagtgattttacaggatgggataaagtaacacttgaaaatttaacttcagtgattgcactaggagcgtcgataactaagcgtaatggtaatagaatttatggacctattagatttaatgccaataaaacgcaatttataccaagaaatgatatttattttattgacaaatcaggaaataaaatcacaatgaaatggatgtaccaaggtacaatagcagagcaaggaatgacatttgaaaattttattgggctatcaaataaacgactgaaacgattacatcttaacgctaaaacatttgactattatgatgataagacaggtgaatatattagtgtaaagacattaaatacccaaactgaatcaaggcttaaaaatccaaaatcattaaaaaatacattaaatacatatatttcaactatagataaatatagtggtgatggacgaggaactgcagaaatttttaaaaaagatgtaaaattaaaaacattagaattgggagttccagaaaaaaccactaaagaacaatgggatgctattaatgattcgatcaaaaatgcatcatcaaaaaatataaaagttaatattacgattattgaggaatag

SEQ ID NO: 298062 - DNA, 951 bp, Proteus mirabilis
atgggaaataaaggtatttctattgcatcatcaggctcactcacaacagaaggaagttcacttaaatcagagggggatattgctatttccagtggtggcaatatccaattgggatcagtaagaacacattttcgtaaagagtcggactcagagttagaagaacttcgtaaacaagtcagtactgaaattaatagcggtaatcatctaacactattatctgagggcagtattttatttcaggcctctcaattggctgctaataaaaagatggatattgctgctaaaggtggatttctttatgcacaggcaatggaagaatccagttactatgaagaagaaaagaaaaaatgtaattggtggacactgtgtgcgactaaaaagaaatataccaaaacatttaataacacaacgaataaagttaccgagtttattgctaatgacgatattaatttaattgctaaagatgatatcactttagaagcaagcaaattagagacagcaaagaatgccaaattaaccagtaaaacaggaggcattaattttaaagcggtgaaagatactgcttttaaacaagttattactcgttcaaaagatatatatatcactcaacgtaatcagggatacaccaagggaacatggctattacctgaactctatattggcggaaagctgactattgatgcgccaaaaggcatatctgcagatattaaagccaaaaaagagcaatctttagagcaggcattaactgccttaagtaacacaccagaatatgcttggcttaatgcgctccaacgtcaagaaaatattaattggaatttagtgaaagacacttattccagttgggatgataaaacccagcagttaaatccagttgttggtgcggttattgccatcgcggtttgcaacttatggtacggcaacagctgcctcaataggaggaatggcaagtaa

SEQ ID NO: 298063 - DNA, 1560 bp, Proteus mirabilis
atgaataacattaaaagggaatgtattaactatttattaggattaatggcgctatttttattaacgataagtaagataacttttgcagaaataaataataatgtaaataattgcttcttaattaatgaaataaaaatagaaaggaatggtttattaactaataaggcacaaaaagaattaatatctaaatatataaataaatgtttaacattaagtgatatgcaacatatcattaaatcaatgactaatgcgtatattgaaaaaggctatattacttcacaagcttttattgccgatcaagatctctcaaatcatcaattaaccattaacgtaattgaaggaaagataaaatcaatctttattgataacatgacttctcccatggttgatattctatttccttcatatcaagataaacgacttaatttacgtgagttagagcatgggcttgaacaacttaatcgattaacaacatcacaatatagattagatattcaacctagtgacaggataggatactcgactatttttatttataagaaaaacaaaacgcatcctttcagaaatcaacttactattgataattcaggttcaaaagcaacaggtgaaattttactgacgaataccacaacaatagattcgttatttggatttggagagcagtgggatctctccttaaacagtaatacagatttattacattcacattattatagaggctatacagcgagtataaacattccctatggctattggttttatcaatatcagttatcttataaccgttcttctcattttattaaaagttatagtaatcaatatatctataaaagtataaatactaatcagcaagttgatattagtcgtttactttatcgggatagtaagaagaagataatattaaaaggcatattaaagcataaaaaagtaagaacggaattagccaaacagccgatattaatcaatagcccaacattaacatcattatcattagcccctcaatatcattttaatctgacatcaggttatttatctattaatccatcagcagaaattgggttgtctttttttggggcatcacctgattatattgctgaaaactcaccccgaagccactatagaaaattgagtctaaatatacattatcaatatttatttccttactctgtctcctatattacgtctttttatggtcaatatacatctgataatctttatagtgtggaaaaaataaccatagatggattaaatgcagttcgtggtgctaaacaaaataagcttagtgccaatagaggactttattggcgtaatgaaattaatacaccatggataaattcatttttaggtcaatggcgttttattacagctgttgattatggcgttatctattctgatcaatatgaaacaaagcagcagtctttattagctggcgctatggggctttcattttatcgttcccctttttcttcacaactattgataaacaaaccattcatttatccaaagtggtcaaatgctaaccaatggtctttatcttggtcaatttcttttgctctttaa

SEQ ID NO: 298064 - DNA, 753 bp, Proteus mirabilis; identical to SEQ ID NO: 293760

SEQ ID NO: 298065 - DNA, 174 bp, Proteus mirabilis
atggagccaatcacccgcttaatcgatcgcatgttatcttttgcattacttgatcctcgaattgaggctgtggtattaacaggctcagtgggtcgtaataagaagatagacagctattctgatattgatatagagcttattggtcacggtgcgactgagctagcaaaaaactaa

SEQ ID NO: 298066 - DNA, 2583 bp, Proteus mirabilis
gtgacgctaccttcaatatctttaccaacaagaattgaccaagcccgactgaaatggacgtcgttacagcaacaacatctctattttgcccctgtacgccaccatagcccagcttgtgcttatgcagttttatcattaattgattctgtaaaacctgattatatcttaattgaaggtccggatacctttaattcgcttattcctagcctaacggataaagatactctccctcctattgctattatggggcaagccgaatattgtcatcatgatagtggcctagaagagcgtgaaaaatcgctacactctgcctatttcccattttgtgaatattcccctgagtggcaagctttgcgaggtggtttacgcatcaatgcaacaacacgttttatcgatttaccttgggctgctcaagtcaataacgaagagtatagcgatctacaaagccgtagcttacaaaaagaacgttatttagcccatagccaatttattgcacaattagctaaacaatgtcattgccgtgatcatgatgatgtttgggagcatctttttgagttacgcagtattgaggcattagcagattggcaaactctgtttaatgacatttttatttggtgtgcacttgcacgccttgactatgaacctgaagtacttgcatctgaaggctcttcacaacgtgaagcacatatgctcactcatataaaaaccatcaaacagcacgagcctaatgccaaaatattaatcgtcacagggggagcccacacccttgcgctaatcgaaggcttagcttcttcacaaccccactctttcgctatttctagctcagaacaaaagcactttactaaaatgcaaaaaatgggcgaaaaagagcaaacttggcttattcgctatagctttgacagattagatgcacttaatggctatgcatctggtatgccatctccggctttttaccaacaagcttggcaaagcttaatgcaacaacatcatgataaattagaaaacaatgaggcggcaaaacagccaacgcaagtttatcgcaataaaatgggcatcgcctttttaagctcagtggctcagactatcagagaacaacaatttgataatccacccagttatttaaccgtaaaactagcagccgagcagagtttacgcctcgctttactaagagagcacactggtatggggcgttatgatttgcttgatgggttacaaagcgcctttattaaaggcagtttagatgacagtcaaaacgaattatgggacgaaatcaaaacctgtttttcaggttatctattaggacaaattccattaggtacagcaacgccccctttagtcaatgaaacctatgaacgcgccaaagcatttcgctttaaacttgatgatacattagcaaaaactacaaaatgtgatgtttatcgtaacccccaacatcgcttaagaagtcgttttttacatttattggcatttttagaaatccattttgcccaccgtgtcaatggacctgattttctttctggtcaccagttagatctattatttgaagaatggcaatatgcatggacccccaatgttgaaggtgaactgatctcattatcagaaaaaggctctcaacttgaaactatcgccttaaataaactgttagcaatggaaaaacagcttgcagaacaaggacaaagccgttcaagccaaagtgcggtcactttgttaattcaagcggcattaattgggctccaccagcgtatccctacgctatttaaactgctagatagctatattcagcaagattttcgccttgagtcattaacacaatgtggacataaattgatccatttatggcgaggtcgtcaatatcttgatattaccgatgagctgacattggaaaataggctacatcaagtgatccctcaagccttcttttgcttagagcaattggctcaaggtgatgagcaacaacaagaaagcaatctgcaagccctactttctttacgtgaacttattgagtttatgccatcactggatcatcaatatgattataaaagtgatttttatcagcaacttaatcgccttgatggacagttagataccgttcctttattaaaaggtgcggtagatgcattacgttatctaggttcgtatattgacgaaaagaccttagcagccgtgttaaatgcgacctttagtacaggcagctctcccgaacatgccattggttattttgtcggtataatgcgcaccgcaccagagctagtcattcgcctgccgttgttagtcaatcacttaaatagcttattacagcaatgggatgaagaacgttttattcagattttacctgatttgcgttttgcctttagccaacttaatcccaaacaaaatgcagagcttgcacaatatattgctaatgatattggtttagatacgcaagccttatcactatggcaatcagaatttagtgccaagcaaatgcttgaagccactaaactcaatcaaaaactgcaacagcgcattaagacacaaggcatgatttcttggtttgaggcgaagaaaacagagaaaggagaccattctcatggagaagcatga

SEQ ID NO: 298067 - DNA, 330 bp, Proteus mirabilis
atgaccggttcatcaacatcagggagttggatttttagctgggttcctgtgtcttctagaactaaagttttatcttcccattgttcaattaagttaatcgcagtccgacaggcgggtttacctgcttttttgatgagtaactcgggatcaagcgtaaataaagagggtaataaaggcggtgtttcaacaggcgctataattttttctgctgatgtttcaatgggattattaatatcatcattcgaattgttgttggcttgtaaccataaaatagcggctaaaatatgtttgcaacaacctgctgcggaacaatcacaactggcttgctga

SEQ ID NO: 298068 - DNA, 390 bp, Proteus mirabilis
atgtctaaatcggcaaaaggtacgacagaacggccaggacggaacgtaaaagctaaatctggtttaaaccgctcaatactggagcagggctggtatgaaatgcgccgtcagcttgagtacaagcagctctggcgaggtggtcaggtactggcaatacccccttcctacaccagtcagaagtgcgcttgctgtggtcatacagcaaaggaaaaccgccagtcacaaagtcaattcgagtgccttgaatgtggatatacagcgaatgctgatatcaacggggcacgtaacattttagcggcaggacatgccgtgcttgcctgtggagggagggtgaagtcagaccgcccgtcgaatcaggaacccaccgaggtgattcagacatcagtctga

SEQ ID NO: 298069 - DNA, 1731 bp, Proteus mirabilis
atgaaacctgcttattggattatagtaggtcaatatgcgttttgctttgaggaaaaaatgaccatgaatgaggcagatgcccgcccaacgaactttattcgtcaaattattgacgaagatctggctaccgggaaacataatagtgtccatacccgtttccctcctgaacctaatggctatcttcatattggccatgcaaaatcaatttgcttaaattttggtattgcacaagattatcaaggtaaatgtaatttacgttttgatgatacgaatccagtaaaagaagatgttgaatatatcaactcgattcaaaaagacgttcagtggttaggtttccaatgggatggtaacgttcattactcctctgactattttgatcaactgtatcaatatgcgattgagctgattaacaaaggcttggcttatgttgatgagttgagtgctgaagaaattcgtgaatatcgtggcacactcaaagagccaggaaaaaatagcccttatcgctctcgtagtgtagaagaaaacttagcgctatttgaaaaaatgcgtgcgggtggctttgaagaggggaaagcgtgcctacgtgcgaaaattgacatggcatcaccatttattgtcatgcgtgatcctgttctttaccggatcaaattcgctgaacaccatcaaacaggtaacaaatggtgcatttatccaatgtatgattttacccattgtatttctgatgcattggaaaatatcacacattctttatgtactttggaattccaagataaccgtcgtttatatgattgggtgttggataatatcactattccttgccaccctcgtcaatatgagttctcacgtcttaatcttgaatataccgtcatgtctaagcgcaagctaaatcagcttgtgacagaaaatattgttgatggttgggatgatccgcgtatgccgacaatttctggcttacgtcgtcgtggttatacggctgagtcaatccgcgaattctgtcaacgtattggtgtgaccaaacaagataacaacgtggaaatggcatcattagaagcttgtattcgtgatgatttaaacgaaaatgcacctcgtgcaatggctgttatcgatccggtacgtttagtgattgaaaatatgccagaaggtgaagagattttaactgcgccaaatcacccaaataaaccagaaatgggaactcgtgaagtaccatttagccgtgaaatttatattgatcgtgcagactttaaagaagaagccaatcgtcaatataaacgtctggtattaggtaaagaagtccgtttgcgtaatgcttatgtcattaaagcagaacgagttgaaaaagatgaacaaggtgaaataaccaccatttattgtacttacgatccacagacgttaaataaagatccggctgatggtcgtaaagtaaaaggggtgatccactgggtcagcattccacatgctattccagcagaaattcgtctttatgatcgtttatttagtgtacctaatcctggggctgaagaggatttcttatcaaccattaaccctgaatcattagtgatccgtcaaggttttgtggaagcaagcttaaaagatgcggctattgaaaaagcgtatcaatttgagcgtgaaggttacttctgtgctgataagctttcgacagcggataaactggtctttaaccgtactgttggtttacgtgatacttgggcgaagatttcgaaacaaggttaa

SEQ ID NO: 298070 - DNA, 2004 bp, Proteus mirabilis
atggtgcccgttgcgacattgcctgctgcagcaattctgatgggaataggctactggattgatccggtaggctggggaaacgataatgcgctagctgctttactgatcaaatcaggtgctgccattatcgataatatgtcagtattgtttgcgataggtgttgcttatggtatgtcaaaagacaaagacggggcggcggccttaactggctttgtcggctttttagtggtgactacactttgttcacctgctgcggtatcgatgatcaaaggtctaccacttgcagaagtgcctgtggcttttggtaaaataaacaaccagtttgtcggtattctggttggggtactttcagctgagctgtataaccgctttagcagtgtcgaattacctcgtgcattatcattttttagtggtcgtcgcttagtgccgatcctcacgtcattcttgatgattatcgtcgcctttattctaatgtatatctggccggtaatttacggcggcttagtgagctttggtgaaagcattaaagatatgggggctttgggcgccggtatttatgctttctttaaccgcctattaattcctgttggtttacaccatgcgctgaactctgtgttctggtttgatgtggcaggtattaatgatattcctaacttccttgctggtcagcaagcgattgatgcgggcttggcaacggtcggtgtgacaggacgttatcaagcaggtttcttcccagttatgatgtttggtttaccaggggcagcactggctatttatcattgtgcgcgcaaagagcataaagcaaaagttgcgggtatcatgatggctggggcatttgcggcattctttacggggatcactgaaccgcttgaattctcctttatgtttgttgctccagtgctttatgttattcacgcattcttaatggcgatttctgtttatattgccgcaagtatggagtggatttcaggctttggctttagtgcgggccttgtggatatgttcttatcttcacgcaaccctctggcggttaaatggtatatgttgattgtgcaaggtatcgcattcttcttcatttactatggtattttccgtttcactattactaaatttaacctgaaaacaccgggtcgtgaagatgaagtggcgggggatgaaaccgcagacggctatgatgaagatatcaaagccgtccccactaatagcaaagaagcagtgcaacaagaagcacgtcaatatatcgctgcagttggtggctcagataacttaactggtattgatgcttgtattactcgtttacgtttaaatgtaaaagatgccagtgtagtcaacgatgcttacgcaaaacacctaggtgcttcaggggttattcgcttaaataaacagagtgttcaagtgattgtgggcacacgggctgaaattgttgcaagtgccatgcgtgatgtattagcacaaggcccagttgccgcttatgctggtagacatacagataacgcggtatcgacagaaaaaacatcagaaaaacagactaataatgatgccaaagtcattcttgaaatggtcgcgccatttgatggtgaagtggttgcattaaaagatgtgcctgatgaagctttctcaagcggtgtcgtgggagatggtcttgctattaaacccacatcaaatattgtgatggcacctgctgccggtacggtagtaaaaatctttgatactaaccacgcattttgcattgaaacggataatggtgttgagattatcgtccatatggggattgatacggtcgcattaggaggaaaaggctttaaacgtctggttgaagaaggtacagaggttaaactcggccagcctatcttagagctagatcttgagtatttaaacactaatgctaaatcaatgataagtccggttatcatcagtaatatcgatgactttgataaagtgagtgatattgcatccggccaagtgacggcaaataacaccataatctataaagtattaaaataa

SEQ ID NO: 298071 - DNA, 1008 bp, Proteus mirabilis
atgaatagcgtaacttcacaattacaggaatttgattgcaatcaatttttccatactattaaatcaattagaaaaataacttctgaactatttgaacatgataatatcttaaatcataatcttattaccatatcaataaacaataataaaatttatgatgaaataattattttctctattctactaaaaagccggctaaaccagaaattgttaacagggatatttaaaaatattaatgaaattaatcatgcaatggctgatagagagttaacacagcatttatcagaaaaactgctccaagagaaaatgtttattgagcagttatttaaagatgaattaactgaatctatagaaattatagaaaagcacatcagttttattaatgataaaaaacagctcttaacaaccaccactattattagtgaaatagataaattaattagaaataaagaagaaatatctattgaaatcaatgagaaaatagccaagcaaaagttatcgattaatgaaattaaagaacaactcgatataattactaaaagtgaagatattatttataataaaaatatcctcgatttttttacctctcacctgccaagtaaacagacaatttctaaactgcagttggcttcttcagaaaaagatattctctctgtttttatcgatctgctaaagcaattttttacccatctggagaaagggttttcttaccaaaaactggtagagacacgtcatactcttattgataactatttgatacagataaaaaatctaaccaaactagaacagaaaaaacaagctctcttatttaccctaagtcgttattatgcagtcacagaaatcaatcaatatattgatatgttaaatcaacaattatcgctattagagcagtattggcatacattaatagagcaactgatacaattaaaacgcaatctttccgaggcaaaaaccgtgctctcacctcatcttgtattccttaatcacttttcacaccattatcaataa

SEQ ID NO: 298072 - DNA, 387 bp, Proteus mirabilis
atgtatgctttactaatttatggattccccctcacattacttggatttgaatggggtttaagaactatgctatctgttgattcttcagggtttacaggaccaacccttgcagctgctggattatcctttttaatgcctctaataaaacctaaagtaaaacctattcctggtcacaatgatgttattgcaatgtcgaaggctgaagctttatttatgccaatattatggttagctgtttttatatttcttttctgttggtcatggtcttgttatatatcattaaaattcccattagataaaacctttggctttgatagtcacatggtaatcggtggcacactatatacaattagcctgatattaactggcattaaggaaaaagtataa

SEQ ID NO: 298073 - DNA, 693 bp, Proteus mirabilis
gtgctattttcgccctataacgaggatagcttagatttatctgtctactcctcggcccattggtgtatccaccagctttctacgttatcagaagatgatattagccaagcattatattacttaagcgtatgggacttagtttatgagccattcgtcacagttaccgagttgaccaaaattgatagtgatgtatggcaatattgcatagcttcaccattatcagagggtaataaaataatacctatagttggggcttgtgctgtacttggtagcaatggaaacgcggaaattttattagaacaagctttacttgcggctaataacttagcctttgctgtcttagctaaacaacaatttgacgctgaaataatcaatagctttgataatctggacttaaaaaccaaaagaaggaaagcagctaaagccaaaagtgatatttactatggcccaatcaaagcacaaatgatcgaatgggcgaaacaggtaataaatacaaatacggggaaattaactaaagcagagctaacagctcaagtagatgctaaataccaagaatggatagaaagcaaccctgtagagtcagaaagttatgctagattacatccatttaacaagaactgtgaggttaataaggttatcgctgaaaagacgatttatagttatgtatccccactccttaaaaaaacaaggtaa

SEQ ID NO: 298074 - DNA, 1251 bp, Proteus mirabilis
atgcctaaaaaaataaagcccctatcccctacggctgtagccaacgcaaaagctaaacctaatcaagcgggggaacttaaggacacaatatatcgagacggggacggattagaactcctcgctaaagtttcgggttctcgtcgttggtattttcgttactacaagccgcttacacaaaaacgcacaatgatagccattggtgaataccctgctatcggattggctgacgctcgtaaaatcaaagatgaatacaaagcattactggcacaaaacattgatcctcttgattggggtaaacagcaacaagctatagcacaagaggaaaatagtcatactcttgaaaaagttgctactcgctggatagccattaaaagaacgactgttacccccgactacgcaaatgatgtatggcgttcactcgaaaaagatattttccccaaattaggtaagataccagtctctttacttaaagcccctatgctggtggaaatattaaagcctattcaagcgagaggaaatttagaaacaataaagcgccttactcaacgcacagttgaaataatgaactttgcgatgaatgcggggattattgatgccaatccgtttactaccgttagtaaggcgtttcctaagcctaagaaaaaacataacccgaccctaaaacccgatgaacttcctcggctaatgcgtgcgctatctgttacacaaattgaattatcaacgcgtttagttattgaatggcaattactaaccgttactcgaccaggagaagcagtacaagctcgttggtctgaaattgactttgataacaagttttggaatgtgccagctgaaacaatgaagatgggtcatgcacatacagtcccattaaaccggcccgctctcgatatcttagaagccatgaaacctatttcaggccatagagaatttgtctttcctcatcattctgaaccttcaaaatcgatgaatagccaaacagctaacatggccttaaaacgtatgctaacggctcatggaatgcgtgctatcgccagtactgcgatgaacgagcaagagttcatgccagatgctattgaagccgtgctagcccatagagagaagaattctgtacgtgcagcttataaccgctcaacttatcttgagcaacgaaaagttattatggattggtgggggcaatttgttaaaggggctgcaactggcgacatgacagctgcagaatgtattaagggcttacgggttgttggtgaataa

SEQ ID NO: 298075 - DNA, 1185 bp, Proteus mirabilis
atgtcttctatcattcactttgttttggctctcgcagttattggtgcattagcatttattgcaagtaataaccgcaaagggatccgtctgcgttatattgtgcagttattaattattgaaattgcattggcatggttcttcctcaattctgatattggtgaaggctttgtccgtggtttcgctgggctatttgatcacttattaggttatgccgcacaaggtactgagtttgtcttcggtggtatgatgaaaggtggtctagcattcttcttcttgaatgtattatgtcctatcatctttatttctgcattaattggtattttgcaacatatcaaagtattgcctttcgtgatccgcattatcggtacggtgctgtccaaagtgaacggtatggggaaactagaatcgtttaatgcggttagctccttagtacttggccaatctgagaactttatcgcttataaagatgtattgggcaaaatgtctcagcgccgtatgtacactatggcggcgacagcgatgtctacggtatcaatgtcaattgttggtgcttatatgactatgcttgatcctaaatacgttgttgctgcactggttctgaatatgttcagtactttcgttatcctatcagtgattaacccatattctgttgaaaatgaagaagatatccagatggggaatctgcatgaaggtcaaagcttcttcgaaatgttaggtgaatatatcttagctggtttcaaagttgctttaatcgttgcggcaatgttgattggttttatcgcattaattgctgcggtaaacgctatctttagtatgattttcggtattagtttccaagattgcttaggttatgttttctatccattagcatgggtgattggtgtgcctgagcaagatgcattacgtgtaggtagtgtgatggcaactaaattagtctctaatgaattcgtcgcgatgggaagcttgcaagatctggctgctgaattaacaccacgctctgttgggatcttatctgtcttcttagtctcatttgctaacttctcttctatcggtattgttgcaggggctattaaaggtctgaacgaaatgcaaggtaatgtggtttctcgttttggtcttaaattactatttggttctacgctagttagcttcttatctgctgctatcacaggcctgtttgtttaa

SEQ ID NO: 298076 - DNA, 222 bp, Proteus mirabilis
atgctagaaaaacagcatcttattgatatagccaacacacaaatgccatttggtaaatataaagggcgaatgctggtggatttgcctgaagagtatttattgtggtttgccaagaaaggcaccttccctgaaggaaagctagggcaactaatggaaatgaccctagcaattaaaattgatggcttagaagggttactaaaaccattaaagcagtcgcgttaa

SEQ ID NO: 298077 - DNA, 441 bp, Proteus mirabilis
atggagcaacttgagctagaaaacgccctatcgcttttacagtgtactctggttgcacaacgcacccgttatacaccagagcaagtaacttggggacaatatgatattttagaattattgcgtttacgcggtgatttaacgccctctcaactttgtgaaattttagctatctcacgccaaaatttatctaagtttatgcgaggattaaaatcattaggttttattgctcaggatcgttctaagaaagataaacgtgaattaattacgcatttaacagatgaaggtaaagcttttttagcaagagccgctttaggccgaaaacagaacgcacagaagctacaagcgcaattaacacctgcagaacaagctatgtttattgaattgagtcataaagttattaacgcactaatagcggataagttacctacagagcctgattaa

SEQ ID NO: 298078 - DNA, 603 bp, Proteus mirabilis
atgaaaaagtatgacttgatattgtgcgatcctccttggtcttacaataacaaagtttcaaatggcgcagcagataatcattacaacaccacaggcttatactccctctccagattaccaatagaaaaacactcctctaaaaatgccgtactgttcatgtggtacacgggaaactttgcactcgaagcaataaaactagccgaagcatgggattttaaagttaaaaacatgttcgggttcgcgtgggttaaattaaataaaaacgcaggagatagaataaataaaaaaccgccagaagactttttcgatttcatggaaatattaaacaacgagacgaagattaattgcggtaattatacccgtcaaaatgtcgaaatgtgtttaatagctacaagaggaaatggattacctcgtcaatctgcaagtgtgagacaggttatttattcgtgcttaggtgaacacagcgaaaagccaaaagaaatacatcatcgtttagaggaattatacggagatgttactcgactcgaattatttgcacgagagaaatacggtgattgggatgtatatggcgaccaagcggaagaaagcattcggttaatatag

SEQ ID NO: 298079 - DNA, 369 bp, Proteus mirabilis
gtgaataaatacaccgaactatctgacttcgatattaataaaaaggtattcattcttaactgcaaagatgactgtattcagtataaagatatcaagcagcgaactggaagtttaaatttatttaagcgccaactaaaagccagtattaaatatgataatgaagaaacatgggaaaaaacagaatggattgatttctttggtcacgctatggcaatgagtctagtagagacaaataaaattgccattagctatgtagatggaatttggcaatgtggctctggttggaatgtggcagaagataaaaaactaactcgtgcgatatgcctagcatatttattaatgaaggatgcggagaatgaaaaagtatga

SEQ ID NO: 298080 - DNA, 135 bp, Proteus mirabilis
atgctaatacagggttctgccgtgcctgtcacggaaaatttatacacgcaatcggaatgcaataaacgtgctgaatatttaatgtcagtgaggaatgttgaagttgtttgtggtgaggtatggaatgaaagataa

SEQ ID NO: 298081 - DNA, 294 bp, Proteus mirabilis
atggataaatcaagacagcagtttgaagcgtggtttaatgacgaatataaaacaacaatgaaagactacgatgagccattaattgagttcgttatgaagcaactatttattgtatggcaagcatcacgcgagagtttaattaataattcagagcctgtcgcttggatgtaccctgtatatcatgatgagaaaatgcaattcactactgacgaagttgcatctgaaaatatagatattcattttcaatcccatggctcaccatttaaagtaacaccactctataaattagattaa

SEQ ID NO: 298082 - DNA, 255 bp, Proteus mirabilis
gtgaaatatttcctaattaaagataatggtgaatttcttattacatctaatctaaataagcaagtcaaaccaaaaggtcataaggcatatgagccagtgccaaattctgtcatagataaatataagacaacctcatttaaaatagagggttattactataatgttgcatatgaaaccaaagaaccaacagaagaagaatttagaaataaatcatcaggtctattagatggaaaaggtggatatattaaaaaataa

SEQ ID NO: 298083 - DNA, 456 bp, Proteus mirabilis
atgaaagatagaatcaagtttaacgatgtaatgctaaaggctgtcatagatggcaggaaaacgcagacacgcagaccgattaaaccacaaccaaaagtaaccgaagatgggttacgctatcttagcgcatggcaagatggttacacactatcagagcaagtatgcgcagcatggcggcatggatttgttgatgttgattgcccgtacggtgagattggcgacattatcaacattgcaaacaaggacggtaatatcaaagggaaaattgaaattactgatgtttgggttcagcaagtaaacgatatcagcgaaagtgatgcagaagccgagggatttgacgggaaattaaatgcacatacttctgactttgctgcgatatggattgcaatatatggaattgatagctgggtaaataacgaatgggtgtgggttattgagtttcgcagaattgattga

SEQ ID NO: 298084 - DNA, 282 bp, Proteus mirabilis
atggcagtagttcaattttatatagcaggtggtaaaggcgaagacccgtcaggaattagtgaagataacctctatgaattaccagatgatcataatttcagtactgatgatgacctcgattcatgcattgaagaatgtgcagaatattatcacgctaactgtgatggatgggaggatcaatggccgttgttattcatgttatggattgacgaccaatatcttggcacgtttgaagttgagcgtgagtttgacccagcattctcagcaaataaggtcgagtaa

SEQ ID NO: 298085 - DNA, 195 bp, Proteus mirabilis
atgactattacattaacaacaaagcaaataatggctatggctgattttgtcggcttaaaagtagaacctcacggattagatattaatgatgagactgaatacaccatcgagccacgtagagataaagaaactggtcgtgtgcatgtattttactgcaccgaatatccagaagaaggcgctatccagctggattaa

SEQ ID NO: 298086 - DNA, 540 bp, Proteus mirabilis
atggcaagtaaaggcgtgaataaatgtattcttattggtcacttggggcaggatccagaaatccgctatatgccatcaggtggcgcagtagcaaacctcacactagccacatcggaatcgtggcgtgataaacaaaccggtgagatgaaagaaaaaaccgagtggcatcgagtgtgcatcttcggcaaattagcagaaattgcaggtgaatatctgagaaaaggaagtcaagtatatatcgaaggttctctgcaaaccagaaaatggcaagaccaaagcgggcaagaccgatacacaacggaagtggtagttaatgtcggcggttctatgcagatgttaggcggtaacggtggtaatcaggcaggaagccagaagtcacagcagaatcaaggatggggacaacctcagcaaccgcaagcgcaaaaacaagcatcgagtaatcaaacaccacaaagtgagcctccgatggattttgaggatgatatccccttcgcccctatcggactcccctacccacgccacgctatttatgtgatttaa

SEQ ID NO: 298087 - DNA, 885 bp, Proteus mirabilis
atgaaattcgccaaggcaatgcgaaaaaaagcaaaattaaggctcgctttaacagggcctagtggctcaggtaaaacctatggagcactggaaatagccaaaggacttggcggaaaaacggcattgattgatacggaaaaaggaagtgcttctctttactctgaccgttttaattttgacgtattggagttagatccaccattcacaccagagcgatttattgaagctatcggggttgcgcaggaagctggctacgataatttgataatcgacagtattactcacgaatggagtggaacaggcggatgtctagaattactcgatgtgttagcaaaagccaagtatcgaggcaatacgtggtcagcatggagcgaaataacaccacgtcacaatgcatttctcgacgcgatactacggtctgacctgcatattatcgcaacgatgagaagtaaaacggaaactgctcaggtcgataaaggcaatggtaagaaaggcgtagataaacttggcatgaaatcagagcagcgtgacggggttgagtatgagtttacgactgtactagacctaaatcacgaaactcacacggcaatggcaagcaaggatagaacaggattgttcagcaacgccgaagttactcagttaaatgaattaacaggtaaaaagctaatggattggcttaatgatggacgcactaaagcagagatagatctagctcactttacgagcattgcaacggaagcacaaaacatggatgagttaaaaatcgcctttagtgaagcatacaaagcacttagagatacacctgaacaagcggaggctcaaaaagcgtatgagctaagaaaagaagaactaaccaaacaagaggtaggtactgatggcaagtaa

SEQ ID NO: 298088 - DNA, 321 bp, Proteus mirabilis
atgaacgtttctaactcataccctaccgataaatacccccaattaacatcaccgtcattagcaaaaaacagagaggaagctctggctcaagctattgcaatgattgaggggtgtttgccaaatacgagtgcgccagacagggaaaaacgattagcaatggaactgctacacatgaacttggacgcatcgaaaaatcaccctcctctacctgctcatattcaggcattacgtgatgcggaaaggaattctgcaccgagtaataagtttgaagtcgattactacggaagcgatcgacgtcaaggtcaatacttaggagattag

SEQ ID NO: 298089 - DNA, 255 bp, Proteus mirabilis
atgcaaatttcatacagctactcgaacggaactcgggtagtagacgacaaaacagtcatggaatttgacgaaagtagcaaactcagtattgagacaggaagtttcgctgagctggctaaattaacggaaatcgacccagttgaagctctgcaatggattatgcagttcgacaaggaagagattgacaggattgtcaatgaagcaagcaaggatgcacctgtttctaagatgaatctgctaaggagggttgcgtga

SEQ ID NO: 298090 - DNA, 156 bp, Proteus mirabilis
atgaaaactaactattacatcactatgcgtgattgcatggcggtgcgtatcactacgcctcaagcacgtaaaaataaacgtacaagcccatggttattcagtttagcagtggtcattgtgacaaccgttggcgtaatgccgacatttgtaagttga

SEQ ID NO: 298091 - DNA, 942 bp, Proteus mirabilis
atggcaaatgaattagtcgtaattgaacaagcgacagccctagatttatttacagcgccagaaagagtaaatcagatgctagagcacattaagtctcttgcagaagaagagcgtaaagaactcgacagtgatttctcagtagctaaaaaccgaaaggcttttgcatctctggcgtacaaagttgctcaaacaaaaacgtatatcgacaaggaaggtaaagcagttgtcgataagttaaaagagctacccaaaaaagttgatgctagtcgtaagttatttcgtgacgaattagatgcattgagcacagaaattcgaaagccactaacagagtgggaagcacaagaaaaagctcgcgaagaagccgaagcgcttaagaagcaaatcgaagctgatcatgaagaagctctgcaaatgaacgagctgtttgatttacgcaaagctgaagaagaacgccagcgcattgctcgtgaagaagaaatgaaacgacaagctgcggaacaggcaagactcgaagctgaacgaaaggcacagcaagaaattgaagcagcagctaaacgtgaacgtgaagcaaaagaagctgccgaacgcgctgagcgtgaaaagcaagaagctattcagcgtgcagagcaagcggcgaaagaagccaaggaaaagactgagcgtgacgccaaagaagctaaagagcgagccgaacgtgagaagcaattagctatcgaagctgagcgtaagaaagcgcaggaagcggaacaatctcgattagcagaagaagaacgtaagcgtcaggaagaagctaaacgtcaggctgataaggagcatcagaaaacaattaacaataaagccatgcaagatttaattgatgctggcattccagaagagtgcgccaagaattgcattatcgctatcgctaaaaacctagtatcaaacgtaaaaattcactactaa

SEQ ID NO: 298092 - DNA, 276 bp, Proteus mirabilis
atggaaatatggtttaaggaatttgagtcacacgggcgtcagattctaatcaagaaagctcataacgccgatgagtcaaaaatcggggtgcaatattgctggccagagaagattttcgatgtcgactttggattatggatagattacgacgacgatgacgaggaaagctttgataaagcggaagaagcacgcaacaagctattcgacaccatcgatcaggaagcagtagataccgccgtgagtaatttaattcaaaaactcaagcttgatgattag

SEQ ID NO: 298093 - DNA, 174 bp, Proteus mirabilis
atgacaagtaaagagatgcaaaaaatattactggcagctgttgaagttgctgaaaacatagaaaaagttttatctgagcgaggacttacaggaaaagaaaatgatgttattgatatcttaaaagcggcttgtgagcaaaaccgcttcatatcatctagctcatttgattcctag

SEQ ID NO: 298094 - DNA, 213 bp, Proteus mirabilis
atgaaatccaacatgaactctaaacaacgatggaatttgagacgacgtgaagcatggatcgccgagcgtagaaataagccatataaggcatacagcggcacggactgcccgatagcaaacttggttctggaactcaagtcagcaccagatacacgcaaaacattaaaactgaaaaaacagccgagcagtgagttcggggttacggcgagatag

SEQ ID NO: 298095 - DNA, 165 bp, Proteus mirabilis
atgaaaaagagcaagggagctaagctagtgccttgccgtagggatgcgtcactagcgctcccatacaccatggaagaaaagaaaaagcttagtgatgatgatttagataaaagaatacaaaaaatagttaactcccctgcaaacagaaaaattctagtattttaa

SEQ ID NO: 298096 - DNA, 1047 bp, Proteus mirabilis
ttgatcacttcttatcgtaaagctgatatttcgtttaagtggataaaagatcttgaagaacaaggctgtttttcaagagtatacctagctcatgatgaaaatctagaccatgacctcgtcataaaagaaataaaaaaatcagaaagtaaagataaagacatatatttttcagaagcaagacttctatataaaaatgcgcacccaaatatcgtacaagttcaatatgcagcagaagatgatgataacatttatatagctatgccatattattataatggcacaataaatcagcgattaaaaagagagaatttaacgccaaatgaaataattaggtatgccatacaatttattagcgggcttaatcacatacacacaaacggcctgatacattttgatataaaaccaaataatataatgttatcaaaccgtgacgaagccatgatatcagattttgggttatcaaagttagttaacgatagtaaccgagcaaagcccgatgactcatacttactgcattcaccaccagagtggatttctagcaacaatgaatgcggatataattatacatatgatatctatcaagtaggtgttgctctttaccgaatgtgcattggtgcggcggcatttgattttgagttcagatctcatgtaacaccaaaccaattagcaagggcaatagctcgcggggaatttccatcacaacagtatcccgcacatatacctaaagcacttagaaatataattaaaatgtgtttgcatgttgatcccaatgacagataccagtcagtattggatatactaaacgccttgtcatccattaaaaatggtgaaaacctagactggagaatggatcatacgtgcgctcaaaacacgtgcaaatggactaaaaatacatccaatgctattctttcattagagtatgacgctggcagcaaaacaacattagccaagcgtatttattccgacggaaagaccagaaaagaaaataaactgtgtttaaccgattgtaaccaaactaaattatattccttgctaaaggatggttaa

SEQ ID NO: 298097 - DNA, 459 bp, Proteus mirabilis
atgagaatattaggggttcgagtttcaccttctgtggcatcatttattgtttattgcactgaatctaaaggacttgtttgttctgatgtgataaaaataccgaatacattagatgttcctgagaagttaaaatatgttagaaatagtattttagatattttaaattattataacgttgatgtagcgtcaatacgggtaaccgaagccaacgctgaaaataaaagcatagataggctctatattgaagctgttattcaagaggcgttttcaagtagtgacgtaaaaaaatattttacaatcagaaaggcgggaataaaatcagggcttggaattaaagaggatgaatataaaaaaatattaacatctaaatcttcacttagagaaatagataactcttcatactcacaagaaacaaatgaagccgttatggcagctatagctgtggagggtaaattttga

SEQ ID NO: 298098 - DNA, 726 bp, Proteus mirabilis
atgaaaactactcttgcacaacgattaaaaaaagctcgtaaattgtcgggcttatctcaaaaagaactaggcgaggctgttggtatatcacaggctgcaattcaaaagattgaggttggaaatgcacaaaattcaacaaaattaatagaaatagctaaagttctgagggtctctcctgaatggttgtcgtctggtaatggcgaagagccaactattcctgttatccatagttcggaagtcagcaacataagtactggtacgcactcggatgaagggggtggtattagtaatgcttataaggttgaaatactagacgtagaagcgagtgcaggtgctggcgtgatggttatcgatgattttatcgagactatcacggctattgagtattcagcggatgaagcaaaaagattattcggtggaagaccttcaaatacgataaagatgatcactgtaaaaggtgattcgatggctgaaacgttcgaacctagggatcagatattcgtagatataaccacaaacttttttgatggtgacgggatttatgtgttcgtattggataaccagctctacataaagcgattgcagaaacagtataagcgcctagcagttatatctgacaacccacgatatgaaacttggtatctggacgaagatgctattaatgggctttatatatgcgctaaggtgctagttagccagtctattacctataagttccacggctaa

SEQ ID NO: 298099 - DNA, 228 bp, Proteus mirabilis
atgaacgaagcaattaaaaccgccattgatattgtagggacacaaaaaaaactaggtgaagcatgtggcataacacagcaagcagtttttaagtggctacataacaaggcaaaagtatcgcctgaacatatcccattaattgttaaggctacaaatggtcaagttaaagggaaagacatacgcccagacttaccgcacttatgggatttagggaaacaatactggtaa

SEQ ID NO: 298100 - DNA, 348 bp, Proteus mirabilis
atggaacatgcaaaaaatatcaaagtagagtgttcatcaaacgaattgatgacgttttacattcaacaaatgtattcagtcggtaataacggactcgctaaggcgcttggaatacacccatcaaaatccagtcgagataaagccagaatattcgatttagcttgccagttggtaagtaagttcggattaccccatgactctgtaaatatcagtgataagccaacgaaagttgttcttgaaggtgattatgcagaaagggttattcaggctcttgaggggaagggaaaggttaaaagaaaagccccagcggtaactgaggcttctcaacaaatggacttaaccatttag

SEQ ID NO: 298101 - DNA, 177 bp, Proteus mirabilis
atgaagaagaaagttaatcattggtttaatcgtcacgaagtgcataaaaacatcatgcgagataagacgttacgagaagtgacaccgttaggaagtaaacgtctaaaggaagcattcgaagatgcaaaattgagaaatgagcatcgtgagaaattactaggaggatcgcatgagtaa

SEQ ID NO: 298102 - DNA, 837 bp, Proteus mirabilis
atgagtaatgttgcatatgcagattttggtaatcaacgacggcaagagaggcctaacgtggcagatcttgataatggctatacaaaattagctaacgaactttacgaagaattaattggcgcaaacctaacaagaaatcaggcaaaagttgctcatgctatttgcagaaaaacttatgggtttaataaaaaaacagaccgcatatcagacagtcagttggcagagttaactagactaccaaggcagaaagttaacaaggcaaaaaatgagcttatcgctatgaaagttatagtgaaagttggtatggcgatagggcctaataaaaacctaactgagtgggatattcctgactgtcaccaaaacggtgtcattgtcaccaaaacagtgacaaaaagtgtcaccaaaagcgtgacagcgctgtcaccaaaacagggacacacaaaagaaactattacaaaagaaaagaaagaaagtaatacaccccttacccctcacgaggtgaaagggggagaatcggcaaaacctaccaagagaaaatcaactccaattaactacgatgaatatctcaatgcctacaacgaggaagttggtgacagactgcctcatgctgtggaagctaacgagaaacgtaaaacacggatcaggaagataatcaaaaaccttgcaacgtcaaatgttgatggttggcgagcctacgttagagcctttgtccgaatggctaagccattttattttggtgaaaacgatacaggctggacggctgacattgattatctgctaagagaaacaacgttgacaggcgttcgagaaggtaaatttgctgacagggggttttaa

SEQ ID NO: 298103 - DNA, 1371 bp, Proteus mirabilis
gtgatcaatacggaatttgaagcaagtgttattggcggtttgttaatttcagggttaacacctgatgcctcggatgttttggccactttagagcctgaatcattttcagttaggttctatcgagaagcctatcaagttattcaaaaacaagccaagtctcgcggtgtcatcgatatgatgatggttgctgaaggaatgggaagtgaacacctagcaaacatcattcaaacagccaaggattgccctagcgcagccaacctaaaaggctatgccaagatggtgaccgataatcataaccgtagagctatgatccagttaatggattctgtgcgtggtgtgattgaaaacggaaccattgagcaagccagtgaggcaatggaaagttttcttgctcaggcatctgatatgcattcctcgaaaggtgatattgctcccgttcatgtttcatcgctaatcgaagattacacggaagttttacaagaacgtgttaacaaaggcgaggagtcggacacactaaaaacggggatccgcgaattagatgaaattatgggaggcatcaaccctgttgatttggtcattatcgccgctcgaccaggaatgggtaaaacagaaatcgcactgaaaattacagaaggcgttgcgtctcaaaatgttatcggcactgacaccaagaaaggtgttttaattttctcgatggaaatggactctcagcaaatcgtagagcgtcagattgcaggatcagcaaacctatctgttagcgcattgagaaacccatctcgtatgagtgacgaagattggggcagggtatcaatgggggcaggtaatttacttggactgaatgtttgggttgtcgatgccagtaagttaaccgttgaacaaatcactgcaatttcaacacgacacaagaaacgtcaccctgaattatcgttaatcatggttgattacttagggttgattgagaagcctcgtgcagagcgtaacgatttggctattgctcatatttcagcaacgttgaaagggttggctaaaaatatcagaactcctgttatttcactaagtcagctatctcgtgatgttgaaaagagacctaacaaacgacctaccaatgcggatttaagagactcaggaagcgtagagcaagatgcagatagcatcatcatgctttaccgtgatgcagtttataacgagaactcccctgcagcagattacgcagaaataattgtgacaaaaaaccgattcgggaaactgggtacggtttatcaattatttaaaaacggtcactttcttgatactgatcaggcgcaggcatcaagcatctgtcaacaaagtagcagaccacagcaacgccgattccaaggcgccaacgtttaa

SEQ ID NO: 298104 - DNA, 168 bp, Proteus mirabilis
atgagtgcatattacgaatacgtgattaaggcgcaagaaaggagcagacagcaaagcctagacaggatgtacgctttagctcttcgccttgaggaaataatggacgatttacatgagcgagcagaagtgatgcgtcgtgatctggcaattaagcgaggtgttgagtga

SEQ ID NO: 298105 - DNA, 249 bp, Proteus mirabilis
atgcagggaactaattgggttaaagtgagtgagagattacctgaactggacacgccggtatttgcaggttggttttggaatggcaagtttgtgtggcatgtgttcatgcgttcagattcatgttttgaaggttggatttggtctcgttcttacagccattttatcagcgataacgatgagtttattgaagatgacgattatccaataactcactggatgccactcccaccaatgccagagggtgaatga

SEQ ID NO: 298106 - DNA, 228 bp, Proteus mirabilis
atggagtcaccacttgcacgaatgattaagcaacaggtgttcgatgccaatgtcgacaggcttgtagcgctcaatgatgagcaatgggatttcatactgaatgaccaagacaatgatggcgcttgggcaggaggtcattttttcggtcacgattatgacgagtgggagattttagttgcccacaatatcaaatatgtgaaaacaggattgagagaagcgttgatatga

SEQ ID NO: 298107 - DNA, 195 bp, Proteus mirabilis
atgagcgaactcaagaaatgcccgttttgcgggagtaataacgtagaagctttttgtcagtatgaagaagattgccctgatcgttcagcgatagtgcgttgtcataattgcgatgcacaatcagctcaaatgattgggaaaggtaaaatatctatggcaatcgcagcatggaacaggagagctaacagtgagtga

SEQ ID NO: 298108 - DNA, 444 bp, Proteus mirabilis
atgcagaagcaaacattcctactcaggaatacccagatactaaaaaaccttaaagccgtactagataatttacccctcaacgaagaattccccctagaagtaaaaatctcagaatccagccgaacactaccgcagaacgacatgttccatgcgctatgtggtgatgtatcaaagcaaatgacactcaacaatgagccactgaaattatggcagtggaagaatgtctttgtgtctggccactggatggttactacgggagcgaaagaatcaccactaattcgtggcattgaaggcgagctattaaacatacgcgagagtacgtctcagatggggaagaagcgcatgagcagcttaattgaatactcgacagcttgggcggtagagagtggcgtgaagctgcgtacaactcgttatgaatacaactattacggtcacaggggataa

SEQ ID NO: 298109 - DNA, 231 bp, Proteus mirabilis
atgactatgacagacagcgtaaataacccaccacactacgcatcgggtgatattgagtgcatcgatgccataaaagccagtatgaccaaggaggcgtttctaggctatctcaaggggaacattcaaaagtatgtctggcgatacgaaaagaaaattaatccagtcgaagatttgaaaaaagcacgctggtatatggaacggatggttagtgagatggagactgataaatga

SEQ ID NO: 298110 - DNA, 123 bp, Proteus mirabilis
atgacgccagaagaaaagctaaagcaatatgacgagaagttagaagaagctcagaagttggttcgatttatcgaagaaagtcgccgtgagcatattaaccgccataacttaaacaggaaatga

SEQ ID NO: 298111 - DNA, 459 bp, Proteus mirabilis
atgactgacgaacaatacaaaaactatgcgaatgtaatagtagcagttcgcgaatttatatcattcaaccataaaactatctcatcagtagttgggctgactcctcaccgttcagggacggttatcagaaaactacttgaatttaaatgtatccgagaggttagtagcgaaagagggtctggtaccaaaatgatccgcaactacgccgttagagatgacgcaattactcgactgagaatgcaatttgaaagagagcgtcgagccaatttaccggttttccctaaggttaaaaaggccgaggagacagaacccaaacagccaaagcaacaagatgatgactttaagtgcagattgacgtttgtcgataaagccaacgtctcaggcatgggtaatccgatgttgatgaaaatagactcattactcaaaggggttagcaatgaactgcatgtcatgcaatag

SEQ ID NO: 298112 - DNA, 594 bp, Proteus mirabilis
atgcagaagctaaggcgacggcgctgtaaaatatgccgagaatggtttattccaaagcagagtttccaaaattggtgtagcccggaacatggatttgaattatccgagcagcgaaggaataaagatagagaaaaagcattagcaaaactcaaaaaggagaatcaaaaaaaagaacgagaagcaaaagacaaactcaaagcccgcaagttagcagtaaaacccctctcatatttcaccaaacaagcacagaccgcattcaacgcatttatcagagaaagagacaaggatgagccttgcatctcatgtgggcgttttcacgaaggtcagtatcacgcaggacactatcgaacaaccggtgctaatccagaacttaggtttgatgaagataacgtccataaacaatgcgcaccatgtaataaccatctatcggggaatatcgaaaattacacacctcgactaatagaaaaaattggtcaggaacgtttcgaacggttgatgggttcttatgagttgccaaagtggaaacgcgaggattatgagcggatacgtgatcactaccgagccaagttaaaggagctgaagaatgactcctga

SEQ ID NO: 298113 - DNA, 216 bp, Proteus mirabilis
atgttcactgacttaatcgcagctattgaagagtgcaggtttagagcattaacagaacgaacagggaataagcctaagcgttacttatctatagttcagaaaaagcatggcttcatggaggttgtagaaacggggtgggctagaagagcaaacctaccgatcatgtattcagtaggttgcgatagatatcacacagtattaccggaggcgagatga

SEQ ID NO: 298114 - DNA, 306 bp, Proteus mirabilis
atgacacgaatggacgagaaagacaaattcagtgccaccgcatggggtgtcatattcgctatctccctatacggcggattggctagatacattattgataataaacgtaacggttatcggtggagctgggtaggagcaattatgcaaatgttcgtatctggctttgctggaatgatgggtggtcttatatcaatagagcttaacgcctcattctactacacgttatttacggctggcttatgtggttccgctggctctttagcattggatttcttctgggataagtttacagggggtaagaaatga

SEQ ID NO: 298115 - DNA, 405 bp, Proteus mirabilis
atgactagaccagcgcgcggtgaacgtaataacaaccctggcaatattcggcatggttcaaaatggcaaggactatcagcacagcaaacagatccgagcttctgccaattcgtatcacctgaatatggtatacgggccatctataaattactgcagacataccaaaagaaatacgaactcaatactgtcgagtcgattatcgatcgatatgctccgccaaatgaaaacaacactgccggctacataaatcgagcagctaaagatattggtgttagcgtaaacgaacctattaacgtttcatctaagtcggttgctattgcattagccacggcgattgttggtgttgagttggggtatcagccgtacagtcagaaagtctttgaagatgcttggttgttgttatga

SEQ ID NO: 298116 - DNA, 381 bp, Proteus mirabilis
atgagtaaattaaaaccttggtttccagtaattttgtggggagcgatgttgttattctcaatgctatctatgaaagaagttattgagctgagtaaagaaaataaatcgctcacagaacaactatcacgccaaaactcaatcacagaaaacgccaaccgcacattcaggattatcaataatgtctcatcacttaatagcgaagagcggaataggtcagccgtggattctgaaaaagttaaaacggttatcaaaactgttcttatcaataatgattgcgccaatactgctattcctaatgatgctcttatcaggatgcacgactattcagaaagaatacgtgccagtggaacatatagcgataccggcacacctaaccgctga

SEQ ID NO: 298117 - DNA, 192 bp, Proteus mirabilis
atgtgtgtcgggcgtgacactaaatttgcacgctatacatctattggtgctgaattgaataaatccttacaactgatcgcaaccatcatcacgtatcactacgttaatcaggtcgcttctagtctgttcctagcagtcaagatggaatcacccccttatttggtggaattgcatccattaaaaagcccctaa

SEQ ID NO: 298118 - DNA, 690 bp, Proteus mirabilis
atgaaacacttaatcaagaaatcaggtaatcaaccagtagtaacaacagacgtcatcgctaatgagtttggaagagatcacttccgagtgatgaatagtattgaatcgttaatcgcatctcaacatttaggagcctccgatttcagagcctcctcttatgttactaaacagaaaaaagaactcccttgttatgaactaactgagcgcgggtttctgatcgcgatgccgtttattggtggcgagaaagcaagggatgggcaagttagactagttgatagttttatccagtttcgtgaaaaagcagcgagagaggctaaagttcaaatagagcgcaacattgctcgaatggaatataagccgatgaccgatgctgtgaaagaaagcaaaattcaagaaggaaaagagccagcgcattatcatttcagtaatgaagctgacttaatcaatcgcatcgtgctgggtgtgtcatcagctaaattcagaaaagacaatgacattggaaaaacagacccaattcgcgattatctttcacatcagcaaatacatgcaataaccgaactacaaagagccaacacagtgtttatctcaatgggatggagctttgaacaacgaaaggatgaattaactaagttgtttaataaaaaccataagcaaccattactcgatgagatgcatagattggcggcgtaa

SEQ ID NO: 298119 - DNA, 186 bp, Proteus mirabilis
atgtcagaaaaatatcacgtaatagcaactaagaaagacggtacaacctacgaaggcatgatgactaccaaagagcctcgtgtgactaacgggttaattggtatcgcatcacttgatggctcatgggtatacatatcacctgatgagattagtgatattaaatatgtgccagtagttgaacagtaa

SEQ ID NO: 298120 - DNA, 426 bp, Proteus mirabilis
atgggacaacaatctaaacaggttggttgccctagcaagctgactaatgagctaatcgctaaggcaaaggaatacctgtacggcggttacaaagaaaatgaaggtcaggttatacctagtattgcaggtttggcgtgttatttgggaatagctcgttcaactgtttatgagtacggaaagcaagatagtgatctaggtcgtgagttttcggacacgttagacgggattatggcttttcaggaaatgaagctaattaatagcgggctggctggagactttaatgcaacaatcacaaagctcatgctggctaatcacggatactctgaaaagcaagaggtagatcatcagtcatctgatgggtcaatgtcacagaagccaacagtgattaggctggtaggagtatcacctgatggagcagacagttga

SEQ ID NO: 298121 - DNA, 1317 bp, Proteus mirabilis
atggagcagacagttgatttaccaattcctaccaagttagttccggtgttcgcaaaagaaggcgttcgatatcgcggtgcttttggtggtcgtggtagcgcaaagactcgcacattcgcaatgatgagtgcagtaaaagcatatcaggcagcagaacaaggcattagcggagtcattctttgtgggcgtgagtttatgaactcactcgaagaatcatcaatggaagaggtaaaacaggcgatacggtctattccttggttgaatgattactttgatattggtgaaaaatatatccgcactaaatgcaagagggttaattacgtattctgcgggctaagacataacttagatagtattaaatccaaagcaagaatactgctagcttgggtggatgaagcagagtcagtatcagatttggcgtggaaaaagctaagaccaacagtccgtgagtctggttctgaaatatgggtgacatggaaccctgagaaggacggcagtgccactgataaacgtttcagaaaagcacctccaaaaaattcaatcatcgttgaaatgaactacaacgataacccgtggttccctgatgttctggaagaagaaaggcttgatgatcttaacagtcttgaatattctgactatgcgtggatatgggaaggggcttatcttgaaaactccgataagcaggtattggcgaataaatacgttgttcaatcgttccctgataatctgtggcaaaaagcagacaggttactattcggtgcagacttcgggtttgcaaaagaccctaacacccttgttcgtatgtttatgttagatagaaatctttatattgaatatgaagcatacggtgctggagttgagcttaatgatatgtggaagttctacgctggtaaagacggggccaccgataagcaattatcagaatgggaagtaactgatgacgccaagtttgcaggtattccagaggctagaaagtggcccattaaagcggacaactcaagaccggaaactattagccatattaaaaagcaaggtttcaatatctctgcagccaagaaatggcagggtagcgtagaagatggcattacacatctacgcggattcaagcaaataatcattcatcctcgctgtaaagaaacagcaaaagaagcccgtctttactcgtataaaacagaccggatcacaggtgaggttcttcctgtcatcgaggataagaacaaccactgctgggatgcggttagatatgggcttgatgggtatatcacacaaaaatcaaatgctggcctattggttccaaaacgattactgaggcgataa

SEQ ID NO: 298122 - DNA, 1356 bp, Proteus mirabilis
atgcaagaaaacatgaaactagccgtcaatcacatggtgagtgatgcgatagctcgtgcccgtatggctttggttaatccaaccatggggcttgatgcgaagcgatcatctgcttggtgtgagtacggattcaaacaagatttaacctttgaggatttatataaactatttcgccgtggtgggattgcctttggtggggtaacaaaactcgtaggtaattgctggaaaacatcacctcaagtgattgagggtgacaaagcagataaatacaagaaagaaaccacttgggaagcttcatttaaaaagtacgtgaacaagcgtatttggaaggctttcaaagaagcagaccagaggcgacttgtcggtcgttatgcaggtttaattcttcatatcaatgatagtgggaagtggcatgagcctgtaacgaagtcaaagttacttaaaaaggcaacgccagcatgggcgaatgcaattaagcctactgattgggtgactgacattaattctcctaattacggtcaacctagcatgtggcagtacacggagacgctaccaaatggtgggactagaaatattaatattcatccagacaggattttcattctcggtgactattcagttgacgctatcggatttcttgagcctgcctataacgcctttgtaagtcttgaaaaggttgagggtggttctggtgagtcattccttaaaaacgcagcaagacagctaaatatcaactacgacaaagagtctaggttagatgaaatagcaagaatgtacggcgttgatgtttctggattgcaggaaatatataacgaagttgccagagaaattaacatcggtaacgattcggttcttgttactcagggggctaacgtttcacctctggttagtgctgtatcagatccgacaccaacctatatggttaacctacaaacagcatcttcagcgcttgatatccctgcaaggatacttgcaatgactcaaacaggagagcgcgccagtacagaggataaccggtatttcaattcacgatgccaatcgcgcagagaaagcgagctcgcttttgagatagaggacttcatcgaccacctaattaacatcaaggtactagagcctatcagtgagaaaacggttgtttgggatgatttaaatgagcaatcagctattgagaagcttgatagcgctgagaagatgagccgaattaatcaaactgctctagctactagtgagccggtgtttagtgtcgaagaaattaggacggcggctggctatgaaaatgacagcgaagagccattaggtgaaactgatgaagatacagaagataaggacggcgataagacccggaacgaaagctga

SEQ ID NO: 298123 - DNA, 930 bp, Proteus mirabilis
atgaagatacagaagataaggacggcgataagacccggaacgaaagctgatccaacatcagtcgataaactagagcgtggcgcaatgagagagtttgcgaaacgcattcgaaaaatatcaaaaggctacattcaacttcttaacaggatcccatctgagccagtcgtcaatagaaaataccaattcgatttagaccctaactatctatcaatacttttgagagatggcgagctaatggttgatgaagtgcttttgaatggcggagagttcggtaactttcttttccttgagtacgtcagcacagcatacgaaagaggaacagcacagcagtatgcaaacttagcacagcaatcaacggtctacgcagctactcaacaaagcattgcaacgatactgatgagtgagccatatcagttaagaatggctctagttcgcgctcgtgtgttcgaggaaatgaaagggttgtcaggtcaggttaaagctgacatggctcgcattcttacggatggtatcgcgagaggtttaaaccctcgtgaagtagcgagaaacctaaccaatcaagctggcattgaaactcgccgagctaagcggatagcaaggacagagataccaagtgcattgcgtagggcgcgattagatgaagctgacgaagccaaggaaatgcttaaccttgaaactcgcgaaattcatatctctgcactaagcccaacgacgagagctaatcatgcagctaggcacgggaagatgtttacgtctgatgaacagcgtgattggtgggctcatgatgctaactcaattaactgtaaatgctcaactgtaaccgttcttgttgataaagacggcaaaccttacaacaagactctcatcaataaactgttagaggaaaaagaagccatgaaagaacgtggttatcaatgggcggaggaataa

SEQ ID NO: 298124 - DNA, 1275 bp, Proteus mirabilis
atgccaattcaagtaaacgtcacgaccaaggttaatagcgcctctattcggcgtgaaacatacaacggtcgtgaacacattattatcccaagttatacgcttccagcaaacgtcattatgaatggtggattatatccagcaagtgagattgacgcccattaccgagagttagaaggcactcctgcgccattaggccaccctacgcttgatggtcagtttgtatcagcgctttctttcgagggtcttaatgttgggtatatcggcgcagcaaacagaaatgtttccaaggtcggtaatcgcatctatttagaaaagtggatagatgtagataaggctaaagagtcagaaggcggtaaagaagttcttcagcgcgtcgaagcgattgaaagtggtgaaagttcagagccaattcatacaagcgttgctgtttttcttgagcagatcgaagcaaacgaagaacagaaagcgcagggttataactggattgcaaagatacacagcatggatcatgacgcaattctgctgtatgagtcaggcgcagcaacaccagctcaaggtgtcggaatgatggttaatgctgaccaagccacagaggttaaaactaacagtggcgctctagttggtgaaacttatcgtgaaaaatcacatcgccttgaaatggccgcaaagaaacagttcgttgctggtgatggttacgtgtgggtatcggacttcacagacactcatgcagtaatcgttatcgatggaggtaatgcaaaactacattcctacacaaatgaaaatggcaacatcacctttgatgcgcaaggcgaagaagttgagcgtcaagagtcgtgggtgaaggttgtaacaaacaaacttaaatcagctttcagtaaaccgcaggcaagccctgcaatcaataacagcacggagggcgacatgcctttaactcaagaagaaaaaacagagctttattcagaaatcggcaatcaaattgctgcgaacgtaacaaaagcattggaaggtatcacgtcaaaaattgatacgttgcaagccaatcaagatcagttaaaagaaactttaaccgcaaaccaacgcgcagaagaaaccgaaatgcgcaaagcagttgccgaaaaatacggtgaagtggtggctaactcactgcaaggtcaagcactgatcgacatgcataaacaaattggtgacgcagcaagtttggccggcaactcaggcgcacagcaagagcaaactggcgcaccagatccagcagcatactttggaggtgctaaataa

SEQ ID NO: 298125 - DNA, 450 bp, Proteus mirabilis
atggctactagtcgctatcgccgtgtaaaccttgacggtaaatcaatcacagaaactcgcgcagcaaaagcagttacacttccgggcacttttgttgttattaacgcagacaatgagttcgctcaagccaccgcattatccggtcgcatttatgtaaccaatccagcatatcaccaagggctatctattcgtgatggcgttcctattggtgattctctagttggtgagtatgtagaagaaggtcgagagttggctgtattagttcctgctggcacttataaaaaagactctccgatcaaacttggtgctgatggtaaaggcgctcttgcatccgctgatacggaatcagtaattggctactctcaggatgaagtgacgctaaaagctgatgatttcattcgtgttcgctttcgtgttggcactgtggctactgcaactactgatcaataa

SEQ ID NO: 298126 - DNA, 1095 bp, Proteus mirabilis
atgttttatactgctgaaactttagcaacaaatagccgactgcaacgtcagtgggatagcctatgggctacacgtaatatctataacacgcaacataacctgatgatacaccagtatcggaatgttatggatggtgagactttagcggcaaaccagtcaggcggtttctctaaggacttctggaaagaagtagataacaatattattcagttgcgcgaccaagaaacaggcatggaaatcgtcaatgatttaatgggcctgcaaacagtgttaccaattggcaaaacagcgaaactgtataacgtggttggcgatattgctgatgacgtatcaatcagcatcgatggtcaagcgccatactctcatgatcacaccgattatggttctgatggtgacccaatcccagtatttaccgctggctttggtgttaactggcgccatgcggcggggttaagcacagttggtattgatcttgttcttgattctcaaactgcaaaaatgcgtcaattcaataagaaagtagttaactacttcttaaatggtgatgcatctattagtgttgagggatacaaaggccaaggcctgaaaaatcaccgcaacacagcgaaaatcgacttaggagcttctggtgctaatatcgatttaaccacagccgacttgcctgcattgttagcgttctttggttttagtggtgcgttcggtcagactgcattcaacaacaaagtggatgcttacgatgtaatgtgggtgagttacgaagcatggggtaacttaattaagcctgtggttgtttctgtcggtgctggtgctggtaatagcgtggtaaatggtcgcattatcgacacattactaccgtatgctggcgtgaaagaaattcgccctacttatgcgcttaaaggctctgagtttatcgcttatcaacgccgtaaagatgtagtgacaccgttagttggtatggcaacaggtgttgttcctaaacctcgctttatgccacaggaaaactacaacttccaaatcatgagcgcagcaggtctgcaaattactcgtgacggtgacggcaagtctggtgtggtttacggtgccaaactgagctaa

SEQ ID NO: 298127 - DNA, 174 bp, Proteus mirabilis
atgacaaagtacgaggttattatcccttggcatggtgtcgaaaagggtcaggtggttgagttagaaaatcttcatccagcctttaaggctaatgttagagcattatctaatgatgccgctgaactggttccagccacaccaaaagccaagtctaaaaaagacaaagacgaatag

SEQ ID NO: 298128 - DNA, 399 bp, Proteus mirabilis
atgatcacaaaagagcaagccaaagagtacctgacagggcagggaatagaattacctgattttattctcgaagcacttattgagcaggtaggcagtattcaggaatgtcttgataaacactatccatcagcaaccgcgctattaatccagatgtatctgctttcacttatggcgcttggtcaaggcgataaatatatcagctcacaaacagcacctaacggcgcatcacgctcatttcgatatcaatcgtttggtgatagatggaaatcggctgcgtcactactgcgtggtttagataagcacggttgtgctaatgggttaataccagacgatccaactcaaactgctcatgctggtttgtggatagcgaaaggtggctgtatgtgtaggggggcgtaa

SEQ ID NO: 298129 - DNA, 342 bp, Proteus mirabilis
atgagttcagttgcgaattgggcttacacctcgtgggctactttatggcgaccaaacggaaaagataaatacggcaaagttacattctcagagccggttcattttctttgtggctatggtagtgagcttaaatctggaaagttggatgttggctctgaaattaccattaagttggttttctggactgagtatgctgatgctaaaaaaggtgactttatcgctattggtaagcactcaggcgatccgttatctgctggtgctgacgaaatcaaattcatcaaacgtgatgaagacttattcgagcatattgcagatgactacactctgataacggcggtgtga

SEQ ID NO: 298130 - DNA, 372 bp, Proteus mirabilis
atgggtgcaaaagtaaggggtatttctcaggctaacgcaaaccttagagcgcttgtaggtaacattcagggcagaaaggttgttagggcaattaaatcagcattagatactggtagcgcgctaacatccctgtatacaccgattggtaaaacatcaacgctgataaactcacagtttagagaggttaaggttaacggcacattagttactggtagggttggttactccgctaactatgcagtttacgttcatgatcctagagttaaacaaaaattcagacgctcaacggcaaagaaagagtttctcaaattatcatttgaggaggcaagagctgagatagatatagcggtaagacgggagcttcgaatatga

SEQ ID NO: 298131 - DNA, 369 bp, Proteus mirabilis
atgatacacgagaagtttgagcgctacttaaacagaggtaatttgcttgatggtttcattgtccaaaggtttgcgtgggacgaagaagaagatacaagacaccagcaatacgcagttattcaaccggatgatagtagcggtcgatttgctgatttaggtgctgatgatttcgtggtacttattcttgtgtctgcatggaaagaccctgagccaacagtaataagagctaatgaaattctaaattacgttgctaacaactcattagattgcgaactcaattcaatctacaacttaggtggtctaccaagacccataccaacagaagaaggccggtttatccttaagctttctttccgctgtacatcttaa

SEQ ID NO: 298132 - DNA, 756 bp, Proteus mirabilis
atggcacaatgccctgatgataaaggcctagtgatgggtaacgcaggtattctgcgcattgcaaaaggctgtcctgaccaagtaccagcacaagatcaattcttgcgcttaggtgcgctaacaagcaagtcattcgatttcggcatggagacagtgacatccaatgctgatgacaccaaaggcttaactgaatcaattgttactggcgctgactttaccattagtttcgatggtgaattaaagaaagctggtgtaaccggttctacttccgcatttgatattgctaaagaaatccttgatgaaatcaaagcaagtcgtcaaccaacatattgggttcaacttgatatgaaaggcgatggctctgatgttgttcagggctatatggctttcacgtcttggtcaatggagtttccaacaaaagaaatttccacttattctggtgaattgaaagtctatgactcagacaccgttgagtggttgcaagaagaagttgttgttgaaagtgtcgcagtagatccagccactctgtctgtaaaagtgggtgaaactaagacatttactgtcaaatttaccccaacagatgcgactaacaaaaactacaccgctgtaagcgataagccgaattttgcaacagttacccagcttgttaatgtggtcactgtgcgtggtgttgctgaaggtactgcaaacgttactgtcacatccgaagatggcagcaagacagccaaatgtgtggttactgtcaccgcggcttaa

SEQ ID NO: 298133 - DNA, 693 bp, Proteus mirabilis
atgacgcctattttagaaatcggtgagatggttatctctactgataaaaaggattacttatttagaccatcgttcatcaatatgacaagaatcggtgagcctaaacaaattgtgagtgcatatggtcaattaaatggcacagaggttcaggatttaattgcacgcgccgtaatgagctacagggttattcctgagtggctaataaaagccattagcaagccaacatatgggcgtaatatcctacaaacggcaatgatagtgatgcaggcgtgttgtgatgatgattgttcggaaatcattggagaatggaaatcaggtaaacgcggtatcgtctataaaaacggcaagatgccaatcgctgacattatcgtcattgctcgagaattattcactcacggaattatcggtaaagcgaagatccgtaaacttcaacgcaatgaaggcaaaaacgaattctcagatgaatttatggcaattgactacatcagctctgctcgtgcgcactttggtatgaatcgagaggaagccgagcagctaaccatgactgaatttcagatgatgctcaaagctaaatatcctgatgaaaaaggcttcaccaaagaagaatatgacaacatcatgaaacaagatgataaacggaatgatgaactgatcagtggtaagcgcagattggtgagtagaaagagaaagtag

SEQ ID NO: 298134 - DNA, 942 bp, Proteus mirabilis
atgttaagtaaaaacagcgaagccccaactgcagcaacagtcgaggcttctaatttgccagaaactaacgaggtaactagcatgacaagtatatcaactattaatgtaccattccacggtgcaaatttatgtatcgtaaaccgtgatggtaatccttacgttcctatgaagcctattattgaagatatgggtttagattgggcttcacagtttaccaaactaaaaaaacgctttagcaaaggtattgtggaaatcgcaataccttcaaaaggtggtgaacaatcaatgatttgcctagccatgcataaactaactggctggttatattcaattatgcctaacaaagtaaaaccagagatccgcgataaagtaatcaagtatcaagaagagtgtgacgacgtactttatgaatattggactactggtgaagttaagaaaaaacacaaatcaactgttcaagaacgcaacccattaaagaatgctgttaatctactggttagtaagaaaggcattatgtacccagaagcctattctcttgttcaccagaaattcaatgttagtagcattgaagaattaacagcagatcagatacccgatgcggttgagtatattcacaagttcgttcttgagggtgaatacattcctaaacaggaagaagtttcaaataaactcaaaacactaacagatgatgaacttgttactttatgctggagttggagctttttagttctatgctccacagctatgaatgatatatatccattattaaaagtagccgagcatagcctatctggtagattccatgatgcaccaagagaggcaatgagaaatgctaaaaaaatgcaagaaatattatataaagcaacaacacatattcagccaaaccaattcgacaattctcgtgtggtaaatagaatcagacaggagcaaattggcttctaa

SEQ ID NO: 298135 - DNA, 327 bp, Proteus mirabilis
atgaagggtatgagaaatatcgcaccatttgggctgagaatgccggatgagttaaaagaaaaaatccaagagagagcaaaagccaatggccgctctatgaactctgaaataattcaaatgctacaggatgttttagatagcgatagtagaggtgacgttactatagatgtgactgataaaaacttacttgactgtaattgggtagcggggatgagagcatatatggagtttaggaagggagagcaaggtcagaccttgttgacaatggatcttgataagataaagaaacttagtgatgagaaacagaataaaggcgataaaaaatag

SEQ ID NO: 298136 - DNA, 414 bp, Proteus mirabilis
gtggatataaaaatagatattgcaccaaatgagctttatagggttatagaaaataaagacggagttgtaacatattttgccaatagagataggattagagatctaatttctgataaagagaatcaaactatattagctgagtctcaaggtgttgataggatgatgtttaacaatgactacatggatgcattcaacttattgataattaatgaacccatcgaagcacaggctagtatctacgaagtatttgctcaagaattagaaataattacaaatagaataaataaagagacggaaagcatcatccaagaaacagaagaaatgaataagaatgcagaaaatattgggaaagttattggggctgtattattaggttgcgctacgttctttattctatacatgatcaatagttaa

SEQ ID NO: 298137 - DNA, 3783 bp, Proteus mirabilis
atgggcaaaggtggcggtggaggaagcactcctaggttgctcgatgacaacttaaaaaacaaacaatttcttaatgtcatcgatttagtttcagaagggccgatagaagggcctgtcggtggtatgtcaggatttttattgaatggaacgcctgttgtagatgaagatggcaatccgaatattcatggtgttgaggttcagtggcgatcaggaacgcaaacgcaagaaccattagaggattttccttttgtagaaaaagaaattcctgtcaatgtagaggtaaaaaaaagcacaccaattttacgcactatttcagatcaggaaactgaccgcgttagattcactttgggtgtttctgctcttgttagtcaagatgacaagggaaatcagcacgatgctacggtagaaatgcttattgaagttaatgatggttctggttggacacatgcagaaacagcaaaaataaccggaaaaatcagtggtcaatatttagaatcatatatcattgatgcgcctaaaaagaaacctttccaaattagagtttcacgattaacagatgatagtaaaagtgatctactgaaaaacggaacggtatgggcaagctacacagaaataactgacgctaaattctcttaccctaattctgctgtcgtcgggatgaaaatcgataaatcccaatacggtgatacacccaatcgcacctatcatatcaaagggatgattatccaagttccagataactatgatccggagtctcgtacttacactggcatctggactggtcgcttcaagcccgcatggactaataaccctgcatgggttttttacgatttagtcactaatgaacgatacggtataggagagatgatcggctcgtttggcgttgataaattcgcgctatatgccattgctcgttactgtgatgaattggttgatgatgggtttggcaacaaagagcctcgctttacttttaatgcctacattacctctcaacgaaaagccaaagaagtgcttgatgacttagcgtccgtatttcgcggtatgcctttatgggacggacagcaattaacgtgctttcaagatagaccatcagatccagtatggacgtacacaaactcaaatgttattgatggaaaatttaaatatacatcaacagcgaaatcagctcgtcataatgctatcgaggtgtcatggataaacccgagtaatggatggagtgaagaaagagaattcatccaagatgatgatcttattcagcgattcggcggtgtaaatgttaagaaagttactgcttttggttgcactagtcgcggacaggctcacagagtgggtaagtggatattacagacagaaaagctggagaaagatagcgttacattctcaacaggaagagaggggattaactgcatctctggcgatattattgaagtagcagacgatagctttgcaggagtgaaggtaggaggtcgggttttatcagttaatggtagcactattattattgacgcgcctatagattgggaatatgacgataaaggtactttctcatttttagggtcatcaggcgggttcgagaaaatagatattcaatctatcgatggtgatattgtcactttgcgtgagatcccgaatggattgaaacagtatggtgtattttccatttccaaaagcacgttaacaacaagattgtttcgagtcattaccatttcggaagataaagacgggatttatttatataactgcattcaacacgaaccgcaaaaagagcgtattgttgataatggtgttgattttactggaaaccctccaacgcaaaatgttatccgaatccctaacatagaacgactttccatcgcctatgtcaatgacagctcacaagttcaggctagggcaatgtggatgacaacaaccatcaacagaaatatttcatttaatgtcactctttataaagacagtaaggttgtatctactggtaataccacagatttagagtactactttaatgggcttgaagctggtgactatcttgtcggtgtaagaggcagagatactaatgggatgcttggtaatgaatcaaaagtccagatggttattggtacgccaagcgcacctaactcaataattgttgagtctggtttttttgaaataaaactaatccctcatatcgccgtgccacacactctaaataccgagtttgagttctggttttctggcgaaagaagaataaacaatgttaatgaaatagagtcaaaggctgatttcctcggtcgcgctaagttctggacaaaagggcaattaaaggcggggcgcgattactggttttatgtaagaagcgtaaatgaatatggaaagtctcattttgtggaagcaaaggggcaagctgatgataacacggaggctattctcgatgagttagacggccaattcatgacaacagaggcaggcaaacaacttgacgaaaaactgaattggaatacggagtctattgctgaactggttaatgccacctatgaattatctactgatttactcgttagagatggtaatgcacaggctggaatcaaagatttaagaaaggttttcgcaaatcaacaggaggcatgggcgcaggaaatcaaagaaatttattctgctgttggtgagaataaatcggcgattaaggagactcaaacctctattactaaacttgatgaggctatcggtcagcgttttaccgcaatccgaactgatatggataatgctcaagctgatattatttcaaactcccaagccatatctaacacaaacaaggcttttgctgaaaacaaaactcaagttcaggctaagtttgatgagcaagagggcatgatacaggagaagatgcaggccacgtttgagcaatcaggcgacggtgttgtgacccactcgattaatatcaccattaaacacaatggcgtgagttataacgcggcagggcaagtaattagcgctcaggttaagaatgggaggcttgaaagtttcattggctataacgcaaataactttgcttggtataaccctgtaaatggcaaaatggaattattcatgtatgccaaaaatgggcagttgtttattcgagacttatttatcgaagatggctctattacaaatgcaaaaatagggaatgtgattcaatctaataattatgtagccggcaaatcaggctggataattaataaaaatgggtttgctgaattccagaatataaaagcgagaggagaaatagaggcaacttctggacgtttaaaaaatgttgttattgaagaaagttgtgacattctcggtaagctaaaggttgagaatttagaggggaatatagtcacagttactcaggacgtttatcacaacctctcattctctcataacaatattgttgagctatttaaagttaaacgcagaactcaaaagtgttttatatgggtgcaaggagcattaaatccttacgaaagaatacccaataatggcgtgaaaccagaaaatcgttcagcatttgcatatcgtgcaccgttttacagaaatggagcaggggcggctgatatctatattgatggagttatccagcctaggccgagcatctacaacatggaagacacatcaacatctgatttttatgctgtaaatgagtttgtactggaattaagtccgggtgaaggagttgcaagtattggtataaaaatccctcaaggtggcagtgaaacgacacggtttattatgcgagccagaataatcgtattcccagataaccaagacgttatttttaattaa

SEQ ID NO: 298138 - DNA, 1389 bp, Proteus mirabilis
atgatatacacaacaggcactgttagcacagtgtcagggtctgctattgtctctggcacaggtaccaaatggacagttaataatccagctattcgagcaggaacattaattttaattaaaaacggcaatatgaattacccctatatggtcgatagggtaaatagcgatacagaattagttatttcacaaccggctacatttaccgtaaaaaacaccagttacagtattaatctcactgagccgaactcatacagcgacgctaataatcgtatgaccgctattgcatcagatacgacgtattttctgcgagcaatggatcaatggatgatgaataacggtgtggtgacagtagagctatctaatgggcaaaaagtaacgttagatagcatcaagaagatgcagggggatattagtaataaagctgatttaaccttatcaaaaacacaatcattcacatcagcgatagaagcaacaacgaaactaacttcaaaatcagcagatggtaaaacatcaatatcattgacgaccagtaatgcaggcggaaccaatatcgaactcaattctgcatcgggttataacggaattcaaataccaaaattatcaggcacaatgatgttgattggtgattacggtattggtggtgcaggtcttagcgaaccatcattagtctcatgtttttatggctcatcttctggttcaccagggtttccaagtaatggtgccggctggcaatctacatataacggaaatcgccgagctatgttatttatgaatacatctggcatattaatgagtcgtttcagttcatcaaatgatgttgttgatactacgacaccttggaatgcgatatggagcgccaaaaacacaacggtagacagtaacggttttattaaacgcgcctcaccaatcatcgacatcaatcccgacggcacattcaccactaacgacgaatcagaaggtgctacagttactcgagtagctcagggtgaatatcttatcgagggtgtactcggctttaactcagatgcaggttggggtggtgtcgatggtggtattgaaattccacttgatgttaataaacagccgttgatatgggtagactctaaagttatggaggacggttctatcctcgtgagaacgtatcatcgcactcaccctaacgcacctaaatttgcccgtaatgatattgatgattacaaagacggcgacccgattgatatccctgatggtcgtttcatttccgttcgtgtacagatgccagagcaatcaatctataacgtgagaatgcgtgagatggaagaggcacagaaagcggaagaggagcgcagacaaaaagaagaggagatgaaagagcaatacgggctgggtgaaaatgacgcattgctataa

SEQ ID NO: 298139 - DNA, 231 bp, Proteus mirabilis
atgaacctcgcaaacttacctcaagaagaaaaagacaaaattaatgtcgatttagccgcttcaggtgtcgcatacaaagagcgactcaatatgccagttgtcgcgtccgaagttgaacgacaacaaccagcacatttgagaacgtactttaatgaacgattagcgttttatcgtgagagaagtaagaaactgccagatggaaaatcggtgcagtatttgaagacagaataa

SEQ ID NO: 298140 - DNA, 774 bp, Proteus mirabilis
gtgagtttttttaaagcgatagagagagaaaaacagcaggcaatttacttagaagaatttattaatgaaattgcaaaaatgcaaggcgtgagcgatgttgatgttgtggctattttatatagagaaatatatgaagaaattccatttaataagccatttaatttatattactacaccgaactcgattcttttgtgaagttatcaaggcgtgaggctacacaggtattatctgaagctacacaggtattatctaaatttagtaacgacagttgcccgtgtccgcttgatccatttgaaataatgagacaagtctcagatagagaatggaaatcatataaggtatgcgttaaggctatggaggcggcagtatttttgttagatgtaaatgtgccgctccctagctgtttagaattcataaaagataaagcagagacacaactcagtgatgagagaaggaagacccaaaaattagctgatgaactaaaaaagaaatatgaaacagataaaaacgtaccagaactgaaaaagtggagtgagttcgctggtaaagacacggctttaatgttcatagctggcttatgcttagctttaaccgataaaaaaggagccgcttataagtatggctctaaaataaacaaaagcgctatagctgaaggtgccattgctgctataaacaaatatgggaaaggttcaacaataaatccaaaatcacttactaatttgattaatcaagcgctagatgaaaacgaaccagatgatggatttagtctatag

SEQ ID NO: 298141 - DNA, 396 bp, Proteus mirabilis
atggaaaagaaaaaccacccatcacaggtggcttctcagaataacgtagcgtcgtctattctatcaaagaacccacctaaaaaacaccgtgcccgtttatatatgttaggtactggcattaatggctttaccgagaatgaaatattaattcattgccgtttatcgtcaggccgtaattacccgaatgaattagagcgtttattgaatatcgaactagaacgcattgatgagcctaatcctgatggtatcggatcacattatcgttaccgctttaaaacggctcaagatgtacagaaggttattaatttaataaataaacgtgctgagcaaggtaattaccaacccatagataacgcactcataaataatattttaagcctgtacccgaccgaataa

SEQ ID NO: 298142 - DNA, 696 bp, Proteus mirabilis
atgaaatcaaaaaattacagcttaaccgctggcggattcgctcaccctgaaatcagccaagagcctattttaattcaacacaaaactgagccgagaatagatagtcgcttgtttgctaagcgagctggattacaacatcgtagcctatacaaattaattaaaaataacattaagcaactaagagagttcggatcactgccgtcatttgaaatcgcagcagtgaaagaaacaggcgcacgaggaattaagcacaaccgttattatctgcttaatgaaagccaattcgattttgtatgccgtattgttcgcggtcgtaaccatgagcagatgacgcaattcaagctggacgttaccaaagcattcagcaagaaacgcgccgctgaacctatccgccgtgaatatttgccacattaccatgagtcacgcgacgcactcagagacttaggcgcagagaaacatcattacatcaatttagcccgtaccgagaaccgattaacaggcttactcactggcgaacgcgccagcgcagacgagcaacaattaggtttattagtctgtatgcagaaaatcgaacgggcagcatttcaagatgcgattgattcgggtttatcggctactcaggcgttgcgagaggttagcaaacgcattgagcagttcgctagtttaatgagtcctacggtgcgaattggtggctaa

SEQ ID NO: 298143 - DNA, 258 bp, Proteus mirabilis
atgggctgttatccagaaaactataagcgtattcaagccgaaatttcgaacatgttaggcaatgacctccttttatcttcagaagaacgtagccgtgaccgattacttagggttcggaaaggtatggctcatattcttagtgaagtatttcctctaattgatgatcccaaaaaacaagaactctattactggttggaagccattagccgtatcagtggcgcagaagccgtagacgctaaatcgaagggggaagcatga

SEQ ID NO: 298144 - DNA, 180 bp, Proteus mirabilis
atgagcaaacctattccattggacatagctgcatacaaggcgcagcaaaataattcattacttgccgttatcttagagttagcaagtaaagattgttcgcgggagttaatcgacctcgtttctattgcgtatgactttaatgcggaaatatgtgaatccctcgaggaggcgaccaaatga

SEQ ID NO: 298145 - DNA, 612 bp, Proteus mirabilis
atgagacaagtcactatcaatgccaccagcttaagcccattcatgtatcaaggtaagcgagttgtcacctttgccatgattgacgaggtacaccaacgcccaacaggtgcggctagaaaatcattcaatgctcaccgtcaatattttactgagggtaaggatttttaccgcctaactggacaggatttagagctgtttaaactttgcgcgtccataaaacggacgcacaaatattcacccattagtgataaagcccgagaagtaacactgattactgaatcgggatacttgctaaccgtgaagccatttaatgatccactttcttggcaggtacaaaaccagcttatcgatgcatattttcgactgtctgaattccctgaattacagcacatcaacatacccacactggcagaacttgaagccatgccaattggtgaggctcagaacttgattagccgcttagaggctgattcttatcaagggcacggtaggcgtggcagctatgccatgaacctacgtcgcaaagagaagaaagcacttaaaccaatggtaatcgccattgaacaagcctcgcagctacacattcaggatatgggagattatcactcatga

SEQ ID NO: 298146 - DNA, 195 bp, Proteus mirabilis
atgacgcaagaacagaaacgtgaaatagagcaattactagaaccgcaccagttaaaagtattaatgctaatcaccttactttctacgtggttggaagcagaggaatgcgatgaaaccagaaacatgatctgggctgtattgactgttgtttattcaattagggatgaaatgaacgaagcagtagagggtaagtaa

SEQ ID NO: 298147 - DNA, 2721 bp, Proteus mirabilis
atgaagccgattgatgttatccgtgaggtgaagctgaaagctaacggacaatggcaagctatattatcttaccttggggcagaagtgcccctaaacacgcacacggcttgccctcattgtggtggtaaagaccggtttagatttgataacaaggacggtaatggcacgtttatttgtaatcagtgcggttctggtgatgggttggatttagtgcaaaaaatattaggtggcagtgtgaccgaggcagcgtatgaggttgctaacataattggtattgatacccgttcagcgtgtccaccagcctaccgtcgttctgagataaaagcacaacaagacgaactgaaagtacagcaagccgaaaaacaagctaacgagaagagagagaagcataaacgctttattgaacggtataaccgcactattgccaatgttcaccgtgggagatctgactatctcaaggctaaggggctgcatggttttgaaatggatttattacaggacggatctcttatcattccattattggatgctggtggcgttattactggcgcgcaaactattaagcctaatggtgataagcgtttactgtcagatagcgcaaagtcaggcagttattaccccatcaatgagcctgtaaacgtctctacggtgattatcgctgaaggattagcaaccgccctaacgtgtcacttaatccaaccagaagcgcacacagttgcggcaattgatgcgggaaacctcattcatgtagctaaggtaatgcgagttaagtatccaaagagcaagattattattgctggggataacgatattaagccaggccaagacaatacagggaaattagcggcagaaaaggcagctaaggcggttaatggtgtcgctgttttaccccctactgatgataaagctgattgggatgactaccgcctatcacacggtattgaggcggcaagacaggcatttaatgaaatattagagcagcaaggaggcaaggtgatgatagaaactagggtaagcaatgaagtcgttaaacctgacccaatgaagccacgcattgaatcacgtaaagagggggtatttcttgttacaccgaaagccgacaaggaaacaggggaaatcatcaatcatgagcagtggttatcaaatgctatcaagcggatcactaaaggtgttaatgacctcaatcaagagtatttgattattgagtgggggaataacaatgttcaggcaataccgacaggcgatataggagagcgtgaaggatggcgcacattaaaaaacgcggggttatttgtcacaaccaaatcaggattaagacagtcgttttctgattggctgttacgtcaaccattcaaagaggactggagtattacgaataaatcaggttggcacaaaggcgcatatatcatgcccgatggttcaattatcggcacacctgaacaaccgatattttttaacggacaaagcgcagcatcaactgcctacaaagcaagtggaacggtggaaagctggcgaaatgatgtagcgcgattggctaacggtaatagttttatgatgtttacgattggcgccgcattatctgcaccgatgacgagtcttacgggggctgacagctttggtattcacatttacgctcaatcgacagcagggaaaagtaccacggcagatatggccgtgagtttatacggtgatcctgatttacagcgcttaacatggtatggcactgaatacggtatgactaacgaagctgtagcgcacaatgacggacttttgtatttggatgaagtcggacaaggggcagaccctaaacacgtctacaaatcggcttacacgctgtttaatggcaaaggtaagatccaaggtgcgaaggagggcggcaataggcaagttcaaagctggcggacagtggccattagtacaggagaaaaggacattgagacctttttattaagttcgggtgtgaaagtcaatgcagggcagctagtacgattactcaacatccctattgaacgcgccactgaactacatgaatgtgaaacagggaaagcccacgcagatttaattaagataaattgccgttctagctatggggccgcaggacgttattggattgaatatctatcaaatcataaagatgaagctaaagaagcctatagaactgcacaacaacgctggagtaaattaattccgagcagttacggagaacaagttcatcgagccagtgatcgattcgctactatagaagcggctttgataatgggccgtgtgattactggctggaatgaacaagattgtaaggatgctgttcaagccgcgtttaacgcttggattgctgagttcggcacaggtaataaagagattgaacagattaaagatcaggcgatcgcttttttaagtacgtatggaatgagtcgatttgctccattgccttatgatgagcaatctttacctatcagagaacttgcagggtacagagttaaatcaaacacgcaggatgaagcgcccatattattttatacattgccaacagtatttaagaacgagatagccaaaacgttcaatacggacactttcgctgatgccctgcataaactaggtattttaaaaaagccttccaatgggaaaggatatcaaggcagaacaccacgtttgaaacatttaggcaacattcagcaacgcgcctatattttgatgcttgttcctgatgaagaggaagagtga

SEQ ID NO: 298148 - DNA, 594 bp, Proteus mirabilis
atgatagctgctaaaccacataaggaatatgccgagcaattaagccttttgcttgaaaggggaatgcagatttctgaccatgatcgagcaataaaaaaattaactcaggttggttattatcggctgtcagggttttggtatacggctagaataattgttactggtgataataacctttcacgcagaacagatcagtttctacctggaacaacttttgaaagtgcctatgacctctatttgtttgataaaaagcttcgtttattgatgctagatgctttagagcgtatagaaatacacattaggtcagttattgctcatgaaataggtcgattagatcctcttgcgtactgtaaagcttcttttatgaatcctagatttacgtcaggggaaaatagcaaatttgaacaatggctagccgttcttaataagaaaataaagacgagtagagatgaatgtattcattggcatcttgaacagagaaaggaaattccattttgggttgcggttgaaacgtgggatttcgggcaaatgtcgaaatattatttaatgctcaaggggaatttgcaaaaaaaatcacgcggcgattcgacataa

SEQ ID NO: 298149 - DNA, 195 bp, Proteus mirabilis
atgtggtatttagttaaacgtattgctccaaactcaaattggcttcgacaagttgctgaccttatagattctaagccgaatatgccaggatgtaactttaatcatatgggactttcttctagaggattccctcgggaagcatttggagctgatttaggatttattactgcaagcaatgagaataatatattttaa

SEQ ID NO: 298150 - DNA, 462 bp, Proteus mirabilis
atggctgtagcgaacctcaatagcgtagctgattacttgctgtgctttgctcaggagcacggcgatttaattacaccacttaaattacaaaaaatggttttctatgctgatgcttggtatatggctctaaatgatggtgagcaattaattgatgagcattttgaggcttgggtgcatggacctgtatctcgttctttgtatagtcgttttgctgattataagtggcgtccaattaccgaagagatttcttgtccgcaagatttatctgagtctgtcaaggaacacctaaatgaaatttatgatgtttttggtggctttgatgcttatgaattagaaagaatgactcataatgaagagccttggctgaaagcacgaggtacaataccaaatgatgaaccatgcacagctgtaatagataagaatatcaccgcgaacttttatcgtagaactattgataaataa

SEQ ID NO: 298151 - DNA, 438 bp, Proteus mirabilis
atggctaagaaaaaaataaaagccataccaccacaaacatcagctaggaaaatatcagctggtgttactgttaatgctccgcatactattagtttttcttttaaatacttagattatcaacatgataagtttggcttttctgagcaaaatacaaattatttctgcaaggtcattgaacgtcttaaaaatgtgtcctcgcacaccgcgatagagttacaatctggtcgtagcccttctttaaaggctcattgtattgattggagcactacatctgaacctaagggttttcaaaacctaaacgaacaattccaatcctttacaccctaccaatttgcggtatcgaggaatgagcatggaagaattcatggttttttcattggagatatatttcatattgtttggctagacccatcccatcaattatacccatccaagtga

SEQ ID NO: 298152 - DNA, 900 bp, Proteus mirabilis
atgaatgaatggtcattattgattttcacctttatgatgaatgccactattggcttaacactcataacaggcctttttgcacgccgtcttgcacattatctcagtgctgaaagctattatcgctttatgttactaaccttattggtgatttgtggattagccggtttaggctctattgcctccattactcacttaggcgtgccgttaaatgctccgaatgccattagaaatgtcttttcagcttggttaagtcgcgaagttgctgtcactgccatttttgtaggatgtttagggatcacctttttatggctatggcgcactggtaaattttcgatgctgctatttggtgcaagccttctgattggtctgtttgacatttattgcatggcatccatttatcgccatacttccattttaacatggatggataacaacacttatgtgatgttttttggcgcgatgctcacattaggggcaacaatattctttttgctgctaaagatattgcagcgtataggcaataaattagggatagaaataccatcagcccctttccctatccgttggaaatggcaattgtgggggatcatggcatttagtttaattggccgattactctatcaacctttttatgaacactatttaactcgtacgctctatagccaaacatcggtaacctttccgttatcacctattgaagtctattactccattggcccattacgtatgaccagttggatcttagcaactttggctgtattggtgtgtggctatagtttagtaaaatatttgatgggccaaactcagcaaaaatcaacggagtccatttttgtctatggcggtatcatggcaattattgcagaatttgctttgcgttatgtgttttattcaattcactaa

SEQ ID NO: 298153 - DNA, 1980 bp, Proteus mirabilis
atgaatataaaatatcgtgctgatattgacggtttaagagcaattgctgttattttggttatcttctttcatttagataatcgcttaataccatcaggttttattggtgttgatatcttttttgtgatctcgggtttcttgatctcgttaattattaaaacatcacttttacaaggtcatttttcatttggtgatttttatattcgccgattatggcgtttacagccactctatctttttgttttagtagcagttcttgtaatttcaggtattttctatctacctagtgattatcttgatatcactaatagtgaaaaatatgcttcagcttttctgtctaacaaatattttgcaagagcaacgactagttatgcagcgcaagatgcactcttcttaccgttattacatacatggtctttagcaatagaatggcagtggtatctattcttaccttttgtactctattttcttcacaaaattaatcataaagagaaaataaataatttttattttattgtttttattacaataatttctttctccttggtgcttgtttatcaaaaagatcaacctaagaattattattactttagtacgcgtatatttgagtttatgttaggggcttgtgttgcttatttacccgtaaaagtaatcattaatcaaagagttaatagtgttattagtctcatcgccttaggggttatcttttggatagccgttcaaaaagatgtgattgctggttatccgaatttcaatacgttatatgtttgtcttagtgttgcactaattatttatacaggacaacatggcagtattattcaaaaagtgttgtcattaaagccaatagtgatcattggattattatcttattcactttatttatggcactggcccttatttgctattgcgcgttatataggcgtatttaacaccgagatacaaaaagggttatttttagcattaacatttttactctctattttttcttaccttcttattgaaaaaccgtttagaagaaagcgtttgaactttaaatattcgataacattattgtttgttatacctattttattggctttaggattaaatgcattaaatgaaaagtatcatggatttggagtaaggcttggacaaaattacgttaatttagaaaacaaactcaatcaattcgattatcccaatcgaggtaattgtatgaattttcaagcctctgatcctgataagatgtgtcatattggtaaagtgggtagccagaaaaaagcctttttattaggggattcccatgctaatcatttttggggatttatggatattttaggtaaagatgctgagcttgatgtctatgcgcaagcaacttcatcatgcattactattcctaatatttatctttatgattggtctaatcataagaatacggtttatcaacgttgttatgatcaaacagcaaaatattaccagattattaaacataatcggtttgattatgtgatttttggacaggtttggaataattacgcctcaaatcatgttattaataaaataggtgataaaagaacggttgaggcatctcgtcaacgtgtggaaaaatcgatgcgtgaagcgcttgatatcattgttgctactggagccaaacctgtttttataaaaaccgtttattcaatgcctagtggttttatgacctgtttttatgaaaatgccaagttaagaaaagattttgctgataacaactgtaatcccaaaaactataaaggtgaggggaatacatggatgaaccaattatttgctaaattaaaacaggactatccaagcttaattattatcgatcctaaagatgtacaatgcgataaagatacctgcttaacagatattgaaggagtgccggtttatcgtgatgtaggacatattactgattatgcatcaacgatttttggcatgatgtatcttaataagatgggtaatccatttaaagagaaccaataa

SEQ ID NO: 298154 - DNA, 1491 bp, Proteus mirabilis
atgcaattacatgattttggttttattaactatgcagtgctgtttggctatttggcagctatgttactcgtgggtgtttatttttctaaacgtcaaaaaactgcggatgactatttccgtggtggagggcgagttcctgggtgggccgctggagtgtctgtatttgcgaccacattaagctcgattacatttatgtccattcctgctaaagcttatacttctgattggacctttattattggacagtatttagctattgcaattttacctttagttttttatttctatattcctttttttagaaaattaaaaatcacctccgcttatgaatatctagaagctcgttttgatgttcgtagtcgtttatttgctagcctttcatttatgttattccatattgggcgtgttgctattattacttatttaaccgtactagctttacgtccttttatggggattgatccggtcgtgttaatcgtattaataagcttattatgcattatttatacttggatggggggcattgaaggcgttatttggacggatgttattcaaggtttattactttctggtggtgctgtactgatctttattatgatctgttttaaagttgatggtggtattagcgaaatttttactactacagcacaagcagataaattctttcctaccacacaatggcgctggagttggacagatagcactattcctgtattaatgattgggtttttatttgccaatattcagcaatttactgctagtcaggatgttgtgcaacgctatatcgttaccgattctattaaagaaactaaacgtacattgataactaacgctaaattagtggctattattcctattttcttttttgccatcggctctgcattgtttgtttactaccaacaaaacccaagcttattacccgcaggatttaatacggggggaattttaccactatttatcgtgacggaaatgcctatcggtattgcagggttaattattgcagctatttttgctgctgcacaatcaagtatttctagtagtttaaatagtatttcaagttgctttaattctgatatttatactcgtcttagtaaatcatcccctagtcctgaacaaaaaatgaaagtcgcaaagttagttattattgtggcaggaatattcagtagtttagcggcaatttggttagttttatccgatgaagctgaaatttgggatgcatttaatagccttataggtcttatgggcggaccaatgacaggcctatttatgctgggaatttttgtaaaacgtgctaatgccggtagcgccgttgttgggatcatcgtgagtattattgcagtattggctgcacgttatggcagtgatcttaacttcttcttctatggagtcattggttcaatgtcagtggtgattgcaggaaccattacggcaccacttttcgcaccagcaaaacagctttccttagatgacagtgaaacatcagagaactaa

SEQ ID NO: 298155 - DNA, 519 bp, Proteus mirabilis
atgccaactccttgctatatttccattgaaggaaaaactcagggcaacatcactgcaggcgcgtttactgcagattctgtcggcaacatttatgtacaaggtcatgaagaccaaatgttggtacaagaattttctcacgtggtgacggttccgaccgatccgcaatcaggacaaccttccggccaacgtgcgcataaaccatttcgttttaccgtggcattaaataaagcggttcccctgctatataacgcattggcttccggcgaaatgttgccaaaagtcgagctaaaatggtatcgcacctcggtagaaggtaaacaagagcacttctttaccacgacgctaactgacgcgactatcgtgaacatcgattgccaaatgcctcattgccaagatccggctaaagccgacttcacgcaacttatcgaagtctccctctcttaccgcaaagttgactgggagcatactgttgccgggacttcaggtgcagatgactggcgtgcaccactcgaagcataa

SEQ ID NO: 298156 - DNA, 2115 bp, Proteus mirabilis
atgtctataacaaattcaaaaaaatatcaaaggctgggtgataaggatggcaacccactgaatgggggtaagacattaacccatggcgggggcagaacatacgcgcaagatctcgctttacaagagcaacatagacaactcatagagaagatcttaagtggcgacatgcaaagtggcttagtgtttacttgtcagattggtggattacccgaagagactttccaagtcacgcaattcgatttacaagaagggatctcacaacttttcaccctctccatccaagccgtcagtccactctcggaaattgattttaatgatgtgttaggcatggcttccagtttgacagtaaagcgagatggtcacattctgcgtacagtacaaggtatcttagcggcggcagagcaagggaataccgatggggtaaaaacctggtatcaatttgtgatacgtcctgaaatgtgggtaatgaccctcaaacaagatagtcgtatttttcaagataccaccgttcctcatattcttgagacattactcaatgagtctcacattaaatatgataaacagctttatcacccagaagagcatttgcagcgcgcctataccactcaaaaacgagaaacaatgtatgacttttggtgccgtttagccgcagaagaagggattaatttttggtttgaagaaggcccacagttattttatagcgaccgacatttgggcatgagagcggggatatccttaacctataacccacaatcggatacagatatcaccgatagcaccgccacaacgtggcgctatgttgaacaactctgtagcgatattcgcgttgataaagattacaatcaacttagaccttcctaccccttaagccatcaagtcacaggagaggttcatcaacaacatgaaatatttgaaagttatggacgctttgaagaagatgcacagggacaaccctttaatcagatacgttatgaacaatcacaaaatcagcgtcaagtaggctctgcgaccacaaactgcattgaattagcgccggggcgtatttttaccttgtctaaccaccccagtgcacgcatgaacaccacatggcaggtgattagtatctcacatcacggtgtgcaacctcttgccgacaacagtggcggtgaaggaacgcaattgagtaatcagctttcctttgtgccgagtactcaagagtggcgcccgccttaccgttttaaacctaccgccgatggtgatgaattagccactgtcgtcggcccgccgggcgaagaaatctataccaatgagcaaggtgccgttacggtctattttcattgggataggcgtggtaaaccagaccatagcgcatcatgctgggtaagagtcgctcaaggttggaatggggacggatttggctttatggctattcctcgtgttgggcaagaagtgattatctcttatttaaacaatgatatagataaaccgattatcaccggatgtacctataatggtcgcaatcgttcccccattgatttacctaaacataaaacccgtaccacatttcgcaccaaaacccataaaggagacgggtttaatgaattgcgctttgaggataaaaatggcgatgaggaaatttatcttcatgcgcagaaaaatttagcaatcaatgtactgaattcacgcggtgaacgtattaattatgaccgaacgacaagcattgggcatgatgatgaattggttgttgctaataacagaacggtaactgttgaaggaaaccaagctcacaaaacaacaggtaactttcaaaataaaatagagggtgatcaacatatttctattagtggtgatcttgttgaagccgttcagggtgttgtaagtaccgatgctcaaggtgatatcacactacaaagtagcagtaaaatcaccttaaaagtgggaggaagctttgtcgttattcacagtggtggagtggacattaaaggaccttcaattaatttaaactcggggggaagccctggtgatattttacaagcgactaatcctgccgtactcaaagccgctgctagtagtggtgccgtcttcgttgctcattgtccgatgaaggaagggcaagaggaggctgaacatgattaa

SEQ ID NO: 298157 - DNA, 942 bp, Proteus mirabilis
atgattaaacctgaaacttgctatgccattattgatgcagcttcagagccagatatatttaacatgcttgcagagtatgaaccacctgccagttgtttatatagtgaaccaatacaaccagaggttgaatcattagcgccttatttagtagaagcgactgaagaagttcaacgttggcttagtcagcgagaaaccccttggggaatttatgtttatacgcatgcgacaatgtatgaactacggcaacatttacgtaaatatttgatggtcatgatccccgggcaagaaaaaccggtattctggcgtttttatgatcctcgcaatgtatgggatgttcttggaacatttgataattggcgattacatgtctttttagggccgattagccaattaaaaacattattatggggtgatgagattgtttcacgttttgagcgtgagcgtcgaggttttcccgataatgccaaacttggcggcaagttgctgaagtttactgattcagaaatggaattgttatctgaacaaaaagtgaagttattaacttcaaaggtagcgttattttttgttagggcaacagaaaagtacaatacaccaaatagtgagatagatattgatgaattagtttggcagacaatctgtaatcctaagatactttctttaaaatattttacggaaaatttatgtcatgaaaaaacatgggaatattattttgattatgcccaaaaagtattgaatatctgttatgagtacaatattaaacacaataaagctataagtttattttcctatcttatagtttattctgatatatatgatatcagtattataccagattactggtataatatcctatcaactccaaattcaacagacttttataaagttgaaaaattatccatgacgctgatagataaaattccagctttttatagacaaatatag

SEQ ID NO: 298158 - DNA, 1872 bp, Proteus mirabilis
atgtctaaagaatatccagaagttgtctgtgattgccaattacctgatgactgcactcttgaggtagaaattgaatttggaaatcaaaaagaaacttatcgacaaaaagactttagtaagaaattctttcatttaattgattttaatggaaaatatagcactatagtagcagaggctttcgattttgatcatctattagattcaaaaaaagagccaagctcttttttaccagaaatattagtccccttaaaagtcagcgcatattctaaaatgtgtgtttctaacaatcctgaatgtcctgtaggtaatttatatggagatatagcttataattctggtgaacagcttaattataatagtaaattaacacagatatccacaataactaattcacgaccagtaaaggtagaaaaacactctttcattgataatattacccctataaaacccataaatacttctttagtttatacaaaacaactacatggttttggttcagaggtgatagatcctttcgaaatttttaatcaacttcttgtggatgtatggcaagatgtaaatcatggattttcattcgaacgattacggcatgttcaaaaatatcaattatctttttcagagtgtggtcataaacctttaaagaaaaaaatgcatgatgctgcatatgctttagctccaataggaacgctttattcacaagctattcgaactggaaagttcctatatgaaactattggaacaaaatttatttttgacactacattttatttagttttacaacaagaaactaaaattgatttaaaaatttcgtttaaagaaaagacagaagcacaaagtgataaagaaagaatcaagttaactaccgctaataatgaagcgctaggaaggaatcgttcaaaaccaagaagtggttggacaaaatcaggtacagaactttgtaaatcaagtattacattaaaaggttatatatcacatactcttggtatggataaaataaaatggaattatgaaaaaaatcatgaatattcaaaattaaaaaagaaaaaggatctttctatacttgagaaaataaataaaggtgtagatagttttaataaaatcttatcatcagtaccagataagagtccaaataaatatgaaaagcaagaatacgacctagtaaaattcgagcttatttaccctaccatagaagcgtctctagagaggaaattagcgttaataaaaaatgatcaaataaaacctaaatatgaaatttatattggtggaaaaccattctttggctttaaatttacttttgatatgattcaagcatttgcagcttattttggaattaattcaattgtaacggttattcgtgagaaaggaactgaggatgaagaagaggtaaaacgaggcgaagatggtgcttttatcggtgctcaattagatttaatatttaatgtgtcattaaactgtggattaaaatataaaacagatgatgaaggtataacaaaatttgatcaagaaggtagcggtgttgaattaccttttaaaataagttgtgaaactaatatacgtggtggttttcaatactatggaatttctggtttttttaaagcagaagcaaaaatagaaacaacgctaaaagcaggatgggctcctagtgggaatggtgaaatagttttttaccataaaggaataaaagcttatgctagtgtggagtatggaattggtattgctaacaaagaggaaaatgaagatataggtctaattgatcgtagcacaacaaatacaaaagtagaaaaaactgataaacctctagataaagagtggattattctggaaccattatctaaagataaatcaacatatcgttggcaaccttttaattag

SEQ ID NO: 298159 - DNA, 924 bp, Proteus mirabilis
atgagtcattattcattatttaaaaattctttatgtattgccatttccataatggcgttaaattttagtggagtcactatggcaaaaaataccatgaatgagatttatgttattaatttatcctcaaataatacagtttgtggtgtaaaaattaatgaaatgctagtaatgcataataaaaaacaccctaaaggtcattattccaccggtcaaaatatctctagtgtgcttgaaaatgggaaaaataccttaggtgtaattatgtttaatgggtcggtttttactggcgaagaaaaacttacccctgatatgtggtgtgaagtcgaacttaagaaattatctgcaaatggcgataacaccttaatatcgggacttagattaaacggaaataatgatgggaaaatggtggtctctgataaatatcaaaataacagtgagcaaatctattttggtagtcccagtcgaaaaagtgaatttgatgctttagaagcaaaaaaccaatttaatatacagggtctcccccaatggcaatgggaaaaagcaactcccattactgaagacgatatccctaaaattcgtgctttttatgccgaactacgacaagcatttattgataaaaatctagataaattaaaaactatggggaaaatatcctgggaagaaatggcctatgccgataatggctctcctgatattttttggaattctttagagtttaaagaattactcaaggatggatataaaccctcagatatagattggaatcgatatgaattaaatacctataacaataaccgtttgtttcgctatgaaataggatttagcagattatcgccaataaaacttgttaatcctgaagagagaacatttcattataatccttacctttctattattgatggaaaagtgactattgtccgataa

SEQ ID NO: 298160 - DNA, 270 bp, Proteus mirabilis
atgcctaccattattcttataggtgattcggatacaggccatgataatcatggccctaccaaagtcatcacaggttcatcaacagtaaaagttgatggtaaagcggttgctcggctaggagatacgttagcccctcatggagaacattctagaacgataatcagtggctcaaacagtgtatttatcgacgggaaacccgctgcccgagcaggggacgctattagttgtggtggggtacttatcggtaacgcatccgttaaagttggttaa

SEQ ID NO: 298161 - DNA, 936 bp, Proteus mirabilis
atgggtcaaaatatgaaatatcattccttattaaaaaatttattttatgcaacattttccatcatggcgttaaattttagtggcgtcactatggcaaaaaataccatgaatgatatttatgttattaatttatcctcaaatgatgcaggttgtggtataaaaattaatgaattattagtctcggataatacaatggcagccgaaggaagctattctactggtcaaaacatatctagtatattagccaatgggaaaaataccttaggtataattatgtttaatggatcggtttttactggtgaagaaaaacttacccctgatatgtggtgtgaagtcgaacttaagaaattatctgcaaacggcgatacctccttaatatcgggacttagattaaacggaaataatgatgggaaaatggtggtctctgataaatatcaaaataacagtgagcaaatctattttggtggccccagtagagatagtgaatttgatgttttagaaggaaaaaaccaatttaatatacaaggtctcccccaatggcaatgggaaaaagcgactcccgttactgaagacgatattcctaaaattcgtgctttttatgccgaactacgacaagcatttattgataaaaatctagataaattaaaaactatgggaaaaatatcgtgggaagaaatggcctatgccgataatggctctcctgatatcttttggaaatcgcttaattttcaagaacgattagaacaaggatatagacccaatccaataagttgggaaaaatatattcttagtacttacttaaatcaccgtatttttcgttacgaagctggatttgaacgcttatctcctattgagttagttagccctgaagggaaaaattatttttataacccttacctttctattattgatgggaaagtgactattgtccgataa

SEQ ID NO: 298162 - DNA, 504 bp, Proteus mirabilis
atgtctataaaattaagctatgatatttgtaaaactgtccaaaatatgcatgtgaactttataaataagagtgaaaaattaaaagaactacgaaatgaaataaaatcactatataatttatcacaacctttccacaattcacgtgttgatactcatactctttatcaaccacaaaatagcatcacagccccaatagtaaaaatcaataatagaattaatatcaatcacaaaataattataggaatagactcaaaattaaaacatgaatataataataaattagattttctttcatatcctaatcaagaaactctcaattttttgttctatactgaagttttccccaacagaatcgaaagagaatcaataccaaaagaaaaaatcaatattgattgtatcaacaatatgataaacatccataaaaagagtttgtttaagagtttgtttatcagttcagagaacaaaggaaaaataagcacatataaagaatttttaaaaaaataa

SEQ ID NO: 298163 - DNA, 705 bp, Proteus mirabilis
atggacaatcaattaattgaacggattgttgcagaaatagaaaagcgtataaaaaagccggtgttgttagttttaacacctgcgccgggatatcgtgatgaaatctatcaacgcattagccatttttccactgtacgagcctctatttttgttaccacacaggcacagcaatgccatgatttatcgcagtggtgccatgtaggggatatcactaaagccgatgagtttgatccccataggttatccgcttatcaggcattatttattccctattttgacaaaaagctggtgggggaaattattaatgggttaatgattagtgaagaaggaacacttattcattccgcattggctaaaaatattcctattattgcattaccttacttttgtcagccaaacagtgaaattaatcaaattttaggtttaaaccaaaatgaacactataacttagtgctaaaacagaatattgaacgattaatatcaatgggtattactttttgctcaataaatgaagttgaagataatttaaaaaagaatgcttttgatcacaagttaaaatttattaataaaacggaaacaaaacaaccgaataataatcgctatattactttgaaacaagtaatgagcaaccctgaaaaatatcaattatcacaagataaattaaccgattctgctattgaatatttaaaaagtttgaaagattaa

SEQ ID NO: 298164 - DNA, 267 bp, Proteus mirabilis
atgaaagagaaaaattcagatggaataacacaaaaagatgaactctattcgctagataaagctggtattaattatatagaacttaatataactaaaagccatttctatgacttaaataataattttcatcaattagaatcctttgtaaactgggataatggaaatagcacattgattactgatgttttattgcatcaaaaacctaatactgataataataaaatttctcaacaattaatgaaccatattatcaatgaaaatatttaa

SEQ ID NO: 298165 - DNA, 426 bp, Proteus mirabilis
atgaaaaaaatcaatatattgattgttatcttgtttgtgattatatcaagtaatgtatatgcggaaatctacaaagataaaagtggtcaggttattggttcaacccgtacaggtagtaacggtcagatcacctatttaaataaaagtggtcaggttattggttcaacccgtataggtagtaacggtcagatcacctatttaaataaaagtggtcaagttattggttacgcccgtagaagtagtaatggtaatatcatctacctaaataaaagtggtcaagtcacaggctctacccgtacaaatagtaacggtgagaccatctatctcaataaaagtggtcaagtcacaggttcagctcgtacagacagtaatggtactaccatctacagagataaaagtggtcaggttattggttcaaaaaaatga

SEQ ID NO: 298166 - DNA, 411 bp, Proteus mirabilis
atgagccgtaaagacagaatgttagcccaacttggaattcgtcaatgggtacttcgtaagcctgctgtattaaaaggcgaacattctgtgcaatttccggataccactcgtttacttatcattactgatgatgttgttgatctaaataacgggcttttctctgatatttttagcactatgggaatagataaaagtgaaatctattgtattacctcagaggatgtgagcctgctcacaggatcatttacaccagcctgttggctattaggtactgatatcactctacctgctcaatatacttctctgagaagcccttcattacatcaattatattttgatgccaatgcaaaacgcgatctttggaaacaaatctatcaacatgaagaccatttccccattaaaccctgctga

SEQ ID NO: 298167 - DNA, 909 bp, Proteus mirabilis
atgattttatctattatagttaacataaaaaatctagaggatttagtagaaaaatgtgttaactccatttcttatagcttaaggaattgtgatccaaatgactatgaagttcttcttatagatgacaactcaacagatagaacagaaaatattttaaaaaaatatgtaaatcatcatccttcattccattataataaagtattctttaataatgttggtaaggcaagaaaacacgctatttctttatgtaaaggtgattatattacatttatagatggtgatgacttcttctctgattttgatatgttagatatttttactattcttaataaagaagaaccagatctatttataactaaaatacaagaagtttttaatgaaaaacaaataataaaagaacaaggaaaaatagaatatagaacagaaagtaaagatgaaattatatcagaatttttaattcataaaaaatttcaggctcacctttgcagtaaattttttttacgagagataatgttaaaaattgaattccctgatgttttttgttatgaagacgctttcttttttccaaaatatctaaatttatccaataagtttttatattctgataatattttatacaactatataaaacatcaaggtagtctttcaaataacctaagtaaagaaaaaatagaattaatggctaaggctattctttctatgcaagagatattccctgaaaaatatatcaatttaaatatatcgcattgtataattcatttatataaatataaaacagaacttagttctgatacagtaaataaattaaaagataaaattaataaaattaacttaattaagtttatctttgataaatcaataaaaataagcatcaaaaaaagatacttaagaatcaaatttataaaataa

SEQ ID NO: 298168 - DNA, 990 bp, Proteus mirabilis
atgaaaaatcatcccaaagttagtgtattaatgtcagtatataatgatgcagtacacttagaagaagcgataaattctattcttaatcaaacagttaaagatcttgaatttatcattattgatgatggttctactgatgtgtctgtagatatacttagacgatacgaaaagcaagatagtcgagttaaagtatatactaatgaatctaatattggattagctaagtctttgaataaaggttttttactctcttctggtgagtatattgctcgtatggatgctgatgactattcatatcctatccgacttcaaaaacaattagagtttatggaggcgcataaaaatatcatggtttgtggtacatcaatggaaatttatgaagaccataataagtttatggttccaccaactgcacataatgccattgctgcgggattaatttttggaacaaatttttatcatccaacggtgatgtttagagcgagttttatcggagataatcaaatcacatatccagaagattacaaatatgctcaggattatgggttatgggttaaattattaaagttgggtaaaaaagatatttttgctaatttagaagaacctttattaaaatatcgaacccatccagaaaaaaatagaaaaaaatactttaatacacaaacttcatttgctataaaaacacaaattagcgcattagagatatttagtattaatgcaaatgagaaagttttatatgatttgaatttttcctctgaatatctcacattagataatataaaaaaatgtaattctttgttggaaaaaataagaattaaaaatatacaatcaaaaccttacttttataaggagcttaaggttgccatcatcagaaaaaaagtttctttatttaggcgttgtgagaagaaaagtttttattatccttatatgaagttgaaagctcgatttatttatttaattaatagaaaaataattaagtccataaactaa

SEQ ID NO: 298169 - DNA, 894 bp, Proteus mirabilis
atgaataaatacttaaaaattatcagaaataaattacgttataagtactgtgatgtttttccaaaattgataacaaaatcaatatataaagaaagaatgaataaaaaattagatttgagacatccgcaaactttcaatgaaaaattgcaatggctaaaactaaatttatatagagataacccgctggtaacacaatgtgcagataaatatgcggctagagaatatgttaaagaatgtggctgtcaagagatactcaatgaaatccatcaggtatgggaagaaccacatgaaattaatttttccgaattaccaaataaatttgtactaaaatgcaaccatggagcaggatacaatattatttgtagagataaaaatagtatatctcctgataaaataaaacaaaaattatcaacttggttaaatgaagattattggcgtttatctgtagaatttgtttataaagatgtacctaaaaaaataatttgtgaaaaattcattgaaacaaaaaataatgaattgccatacgattacaaattattttgtttccatggtaaaccactatttgtaatgatatgcacagaaagggaatctcaccatccaaaattctattttgttaataaagaatgggagctactaccctatggtattgattataaaaatagaaatgtttcaactgtactagagaaacctcaaaattatcaaaaactatttgaatatgcagaaaagctgtctaagccatttccttttgttagagtagatttatatttaaacaatggtattatccattttggagaattaacatttataccatcagcaggaatggataaagaactaaataatgaagaagttaaaaacgttgatatgatttttggcaactatcttaaattaaactaa

SEQ ID NO: 298170 - DNA, 420 bp, Proteus mirabilis
atgattatgcttactgatttaaatcatctaacacttgccgtcaatgacgtcaaaaaaagctttcacttttatgttgaagtacttggttttaaacccctggcactatgggatcacggagcttatctacagttaaatactttgtggttatgtttatccgaagatacccgcaatatcactgaaataagtgattacacccattatgcatttagtttatctgcaaataattttgaaacatttaaacagcatcttctatcacacggcattacatcgtggaaagaaaataaaagtgaaggagactctttttatttttacgatcctgataaccacaaattagaaatacatgtaggcgatttagagagtcgtttaaaaacttgtcgtcaatatccttactcaggtatgcaattctttgataataaataa

SEQ ID NO: 298171 - DNA, 312 bp, Proteus mirabilis
ttgaaaaagataccgatagttttagcatgtctaggtctattattaacggcacctagtttagcacgtgaaagtaaagtgttaggctcaacaacaattacttttgttggtgctattgtcgaaggcggatgttatgcatcatcagaagaaaatactgttaaaacaagttgttggaatggtaaggagatgaaagacttccaatataaactagatgctaatcagcaatttaactcgcaattaattaataataaaggttttatggatatcgaatggattaacgatcatctagcagtaatgaatattgtttataattag

SEQ ID NO: 298172 - DNA, 831 bp, Proteus mirabilis
atgagtatgaagattaatagtgataatgtatctaatcactatcaaactacaatcaataattctgatgaaggtgaaggtattattgatagaaataagttatataaagaggtagaacctagcttaagtaaattaacaggaatagaaagaattaatctaaagcctgttttatctgaaccagaacatataaccaaaccagatcttaaacagatattagattcattagaagtagataatgataatgatatttacgatcatgctaaaatagaaaaaacggggatttttaattttgtttcagacgatatgataaaattaatagatctcattgttaaatatttagaaacaatgataaaaaaatttgaagcatccagagaaatgggtgtgatgctaatgaacattgaattggatatagccgataaagtaaaagataatcttaataaaaaagccaatattatgattggttctgcaattactagtgctggtatttctatggctatacatggtatgggagccactttttctattaaagggatggggaaagagcttattgggcattccaatccaaccatagtgatgggaaatactatttcatctttggcagagccattagcaagggttgcagaccaaactatacaatctgaaagtagcacaattgaaggtgaacaaaaagtattggatgcgagaggaagtattaataataatgtgattaataataacaatgagatacagcgagaagtgactgaagtcataagagcattattacaagcaatagaggcgataattcatgctcagcaggatgcagcttctacgatttcttcaaatgtaagagcttaa

SEQ ID NO: 298173 - DNA, 804 bp, Proteus mirabilis
gtgacttttttatctggcgcaatcccttctctatttagctcccattttaaacttgccactgaagcaattaaaattgattttaatcatattaaccccatttctggatttaaaaaaatatttagcataagaacaataaaagattttttaaaaacactattatttattattatatttttaataacttgttatgttttcatgattttacatatgggggaagtcgttatactatatcgcgctgatttagagggggtgattgataaatggtgctcattagttgttagttttatatttatattttttattttatcgatacctattcttattttaaatattattgctgatttctttttattcataaaagatatgatgatggaaaaacatgaagttaagcaagaacataaaaatatggaaggaaatccagaaataaaatcggtacgtagacaacttcatcaagaattactcgatgagccaatgaaacgtgtgatccgcgactcatcagctgttattgtcaatcccacacatgtcgcggtaggtatctacttcgatcctgataatggcataatgccaatagtttcattgagttgtactaatgctaaagcattagcagtaaaggcttatgccaaaaaagttggcacgcccgttattcgttatcctgaattagcaaggaagttacatcataaatatcatttatttgaagtgataatagatcaagatttattagatgttatggatgttcttatttggctaaaaagagtagaaattgaagggttatctcgagaagaaatggactatatcaataattaa

SEQ ID NO: 298174 - DNA, 1776 bp, Proteus mirabilis
atgtcatcaaaatcctactttaccaatgaatcagaatacttaaatgagctgactgagcaagttgccaaagaaaaaccgcaacttgttaatttgctttcgcacaatgttaaagatcctgatacttcgcggattatggatgggctatcttatttatcgggtaagttacgccagcaaatagatagacaatttcctgagttaactaacagtttagccaatatgctttggccaaactacgcgcgccctgtgccaagcatgacgattgttgaatatcatcctaattatgctcagtgccaacacgcaacaaaaatttcagcaggacaaccttttagtgccactccactttatgtgcaaagtgaggaaacaaaccacgagacgttatttcaatgtcgatttagtcaaagtcgcgacctctggttaatgccgacaaaaatcagtaacattttgcagcaaacaaccgccattgaaataacatttgagttagcaacaaaacagccacttgccaatattggcttagataaattgtgtttttacttaaatggtgcgccatttactacaaatcagctctattttttattaagccagcatgtgcagagtgcctctttagtcacagatgtacatacgctacctcttactcacttttcagttacgcctgttggttttcaaaagcaggatgccttacttccatacccgaaaaatagctatgatggctatcgtatactgcaagagtttttctgttttcctgaagcctttctctttctagatattcatggtttggatgacattcctttggctatcgaagcagagcaattcaaactggtgatcaattttgatctagaaattcctgatggcgttattctttacgacgacagtattaaacttaattgcacccctattgtgaatttatttcctattgatagtgaagcaataaatttgacggggaaaagtgaggagtatgttttaagtcctaattaccaacttactgaatgttttgatattttttcgattaatgaggttagagggttacgttatcctaatgatgctaaaccttatccgatcacctatacagcatttgaaagtttttatcatcaaaaccatcagactcaaaatcatggctattaccgtttaaagataagtcaaaatgaacagttatacggctattcccatcgactttcttttgttcgtcagcaagagcctcagttacaacagtgtgaagaaaccgtttctgttgcactcaactgtactaaccgctatatcgcttcccagttatcgacgcgttctatcgatttagatagtgcatcaattccttatggggctttatctgctaagaatttattcgcaccaacactgcctttatatccattattagataaaacattatattggtctgaattaactaatttatctttaaattatcagtctttgctcaatcttgattcattaaaaaaaatattacaactctatgatttaccgtctgtttataacacacaggttgcaaggcaatcacaaaaacgcctagatgcattagttgatttacattcagagcatattgagcatatctacaaaggccttcctgttcgcggtctgaagacaacgttagttgttcatcaaaatgcgtttctttccgaaggaagtttattcctattttgtaccgttatcgctcaatttttcaccttatataccagcattaatatgtttcatgagttggaagttattaaccttgataataaggaagtttatcgatggccagcacaaatcaaccagcacatactgaagtaa

SEQ ID NO: 298175 - DNA, 519 bp, Proteus mirabilis
atgccaactccttgctatatttccattgaaggaaaaactcagggcaacatcactgcaggcgcgtttactgcagattctgtcggcaacatttatgtacaaggtcatgaagaccaaatgttggtacaagaattttctcacgtggtgacggttccgactgatccgcaatcaggccaaccttctggccaacgtgcgcataaaccgtttcgttttaccgtggcattaaacaaagccgttcctctgctgtataacgcactggcttccggcgaaatgctgccaaaagttgagttaaaatggtatcgcacctcggtagaaggtaaacaagagcacttctttaccaccacactgactgacgcgacgatcgtgaacatcgattgccaaatgcctcattgccaagatccggctaaagccgacttcacgcaacttatcgaagtctccctctcttaccgcaaaattgactgggagcacactgttgctggaacgtctggtgcggatgactggcgtgcgcctctcgaagcgtaa

SEQ ID NO: 298176 - DNA, 2193 bp, Proteus mirabilis
atgcttagcaaagatccgaaatcaacgcccattgacccggcatccgttttaaaagatgaagccatcaatcaagtgaaaaatagggtgcaatccaaagtgaacgaaacgctatcgacacccacgcaaaaggtggccgggatggcctcagcagcggcctcgctcacgcaatcagccagcgtatcggccaatcgcgtgactgctcatcccctgatccacggtggcggttttaccggtggacaaacattctctgaaaaccaagcactccaagcggcccatggggcgttacttgatgcattaggcatggacagcctcgaaagtggtttggtgttcacttgcaccattggtggattgcctgacgacacctttcaaatcaccgaatttaatcttaccgaaggattatcctcgctattttcgctgtccatcagtgcggtcagtgccttaccctttatcgattttcagcgccatcttggcttagcctcatcattaatggtcaaacgcgatggggtgttgatccgcaaagtcaacggtatcttagccggggcagtacaaggcaataccgacggagtgaaaacgtggtatcacttcgatattcgccctgaaatgtgggtgatgaccctcaatcaagatagccgtatttttcaacatcaatcggtgccaaccatcttaaaaaccttattggatgaggcccatgttaaagcggattgccaattctaccgtgaagatctacaccctgaacgtctctacaccacccaaaaacgtgaatccgcatttgatttttggtgtcgactggcgtttgaagagggcattaacttctggtttgaagaagagcaactgttttacagcgatgaacatatggggatgacggcgggtattcacctcacctataacccgcaggccgacactgatatcagcgatagcactgccatgacttggcaatatggcgaatatttgtgtgtggatgaaactatccataaagacaacaactttgtgcgtccttcttatccgttgtctcatgaaaacaaaattgagcagggagaacagcacagtgtgtttgaaagttatggtcgttttcaattagatgatgaaggtcgacctctgacacaggtgcgctttgagcaattacgtaacggcagcaaagtggggcaagcgacaacaaactgttttgcactgatgcccggcaaaatcttcaccttatctcagcatccccatcagccgatgaatgatcgctggcaagtgatcagcgtcagccatcatggtgtacagccattggcggacaatagcgggggcgaaggcacacaactgtcgaatagtgtctcctttattccgggcacgcaagagtggcgccccccttatcgttataaaccgactgccgacggcgatgaagtggcgacggtggtggggccaccaggggaagaaatctacgtcaatgaatatggcgccgtgaaagtgcattttcattgggatcgtcggggaagtgccgatcacagtgcttcatgctgggtgcgggttgccatgggttggagtggaaatggctatggtttttctgcggtaccgcgcatcggcacacaagtgctggtcagttacctgaatggggatatcgacagaccgataattaccggttgtacctatgatggtcgtaacgcaccaccgattaagttcccagagaataagacacaaaccactttccgtagccaaacccacaaaggggaaggttttaatgaattgcgttttgaagatgcgggcggtaagcaagaggtgtttcttcatgcgcagaaggatatgaataccgtagtccaaaacgataagggaacgacggtaggcgccaatcatactgaaaccgttatgcaaaaccaaaagatctcagtacatggtacgcaaactacggcggttcaagcggatcaaaaaaatatcgtgtttggtaaccaacattcagtcgtggatggtgaagtgttgatcgcatcagccaaaggtattcgtttaattagtggcaactcggcacttcaattaaaccctgacgggactatcaccttagtgtgtaacaactttgatttttacggccacggtagcggtcggattggtactggtgagttattagatttgaatatggacggggcaggtcccggaaaccttaagatggaaccagataccagcactatcgctcaagcgaaagatcagtttttccctaaaaagtaa

SEQ ID NO: 298177 - DNA, 420 bp, Proteus mirabilis; identical to SEQ ID NO: 296892

SEQ ID NO: 298178 - DNA, 4248 bp, Proteus mirabilis
atgggaaatgaatttttcgcagccaagcaaggcgataaattaatgcactcgtcaatcttcgccgatatcgtgtgtggtgtggttaaaggggcggtttatgccgcgatagggacggccgctgtggcgctgaccattgggacaggcggtatggcaacggccgccggtgcggccatttttgccggtgcagggctggcggcgggctttactattggtggattgattgatgatgccgctgattgggtcgcggatgggatcgatagcttgttcgggctaagtaaccctgatggtgaaatcgatactggctcgaaaaatgtacgtgtcaaaggcaagggagccgctcgcgcagcaggaaaattaccgtcacccgtgctactcgcttcaattgcggcggataataccccaccgaaagaagaaaaaggtaccgagattgccttacgcgtattgaaaaataccgccatgatgacgaccggggcattttctttattggcgggtaaggtgctagggaaccaaaccaacaatgcggcacccatagcgctcgatccctccgagtttcccgaatacccctcaccggagcaaggcttttttgacagtattctttccccagtaaaagccgcgaaacacccgaatgctgaacctatgccattggacaccatcacgtgcgataaatggcattgtgctagcgccccttactttttagctgaagggtcgaaaaaagtccaaattaatagccaaccggcgtgtcgtaacggtgatagaagcacctgtgaagccaaaatcagtgataatcaagaaaaagggattgtgcgtattggcggtggcagtgtggtggtacgcgatattatgagtgggcgtaacccctttgccgaaatgtttggtgaaatcctcggtggccttgctgttggcgcggcgtctaccctgtttcgcagagggggactcaaggcgattaaacagtgtttgaatagtgtaggctgtactttggtgagtgaaatcgccagtaccgcggtgggcagtatggtagtcgcctcggtgacccaagcctttaatagtgtgcgtcaccccgtgcatgcggctacgggggcgaaagtcctaaatggagaggatgacaccgattttattattgatggtgtgtacccgttagtctggtcgcgtatttaccaaagtcgtaatacgggtgaaaatcgtttaggacgcggttgggcgatgccatttgatgtctttttgacaattgacgacacgggtaaagggcttgagaatgaaaatatttattatcatgacatgtcggggaggcgtttagcgttaggaaaaatcgcccttggacagaaagtgttctatcaggatgaaggctttaccgtctatcgcacgacaaacaatcttttccttgttgaatcggcggaaggtgattatcaacttttcgaagccaatccacataaaatcaatacactgcgcttaatgaaaagtgctgatcgtcataataacgctttacactaccgctatgctaatgacggtgaattggtacaaattcatgatgatgcgtatctgaccgatatccggttacattatgatgaaatcacccaacgcttacagtcggtgacccgccaccaaggacaagaagaaaaaacgctggtcacttatacttatgatgcacaacagcgtttagtgcaagtcactaatgcggataagcgagtgactcgtcgttttggctgggatgatgaatcgggtttaatggccatgcaccaatatgccacaggggtcagtagtcattatcgttggcaacgttttgatgcctttaccattgaagacaatgaacctgagtggcgagtggttgaacactggcttaaagacggtaaacgctgtttagagcataccgaactgacgtatgatttagctcaacgaaccctcaccaccgtggaaacggggggcgaaaccaccttccgtcgctggaatgaacaacagcaaattatcgaatacactaatgcattgaatgaaacgtggtggtttgaatgggataccagccgcttattaacgaaagcaatagccccagatggcagtgaatgggggtatacctatgatgagcgcggtaatttaacccaatcgaccgatcccgaacaacaatcgacttgctatgattgggacaaagattttgcgtttcccacggcacaaaccttgccaaatggggcggcttggcattgggagtacaatgagcacggcgatattcgtcgtgtgattgacccgcttggccatatcacgcgcttggcgtgggatgaccaaggcctgtgtctggggcaagtggatgctaagggtaatgaaacccactatcgctataatgcccgcggtcagttaatcgagcaacgggactgttcgggttatcccaccaccttgacctacgatgattggggacaacttcgctcgttgaccaatgcacagaatgaaaccacgacttacacctttagtgaagcggggttgttgttaacagagcgcttaccggatgggacagaaaaccgttatgactatgatgccaccgggcaattagtgggaataacggatgccggagagcgccatattctgttgcgccgtaaccgtcgtggacaagtaatagcccgacgcgatccggcagggcattggttgcattttcactatgatactttcgggcgtatgcaggcgctggagaatgaacagggcgagcagtaccgctttgagtatgatgccttgcatcgtttaaccgatgaacatgatcttatcggacaacaaaagcactatcagtacgatgtgatggggaatgtcacccaaataaaaaccacccctgggccttccattgatacgccgatgcccttatccccgcaggtgaccaccttcggttacgataaagtgggacggttgctgtttcgagaaaacgccgattatcgcacggaatacctttatcaacctttgagtgtgacgttacgcagagtccccatggcgatatggcatgaagccgaacgcaccggcaccaccgcccgcgtagagtatcaagacgccctgacctttacctacgataaagtggggcagttggttcgagaagccagtgcccgcggtgattatcaacatcactatgatgtgctgggtaatatcactcgcactgagttgccccatcaacgggcatttgaatacctgtattacggctctgggcatttacaacaaacgcaatggcgagataatgcgcaactgacggtattggcggaatatcaacgagaccgtttacaccgagaaacgttgcgcaccagtggcgccttagacaatgaaacgggctatgactgtcggggacgtattacgcaccaagtggcgcgccaaatgaatgcctcacagtttgtgaccccggtgattgaccgtcgttatcgttgggataaacgcaatcaacttatcgagcgcagtgtcagttatggtcaaacgggcgaggtttttaccgccggacattggtactaccacagttatcagtacgacccgctggggcagttgacggcgcatttagggtcggtgcaaaccgaacactttctgtatgatgcggcggccaatttactgacccgtccgcacagcgaagcaccgcataaccaagtacaaggcagtgataaatttgattatcgctacgacggttttggtcgcatggtatcgcgctatgaaaaaggcagtagctcggggcaacgttatcactatgacagtgaccactgcattatcgcggtggatatcgaccaaggtcccttagggtatcagcgagcggaataccgctacgatattttagggcgccggattgaaaaacggttatggaaagccagtgcgattgccaatacggtgacctatcaccaacatgagccggatgaagtgtacagctttggctgggtagggatgcgactggtgtctgagcacagcagcgcagcgccccataccacggtttatcatgcttacaatgaccaaagttatacgcctctagcccgcattgaatgcacggataacccgcttaatccgcaacgggcgatttattatacgcacagcagtttaagtggcttaccggaagcgttgaccaacagtgacggtgaaatcgtttggcaagggcaatacagtgcttgggggcatttacagcgtcaaacccgacccacaagcacgtttaaccgtgaacagaacctgcgttttcaagggcagtatttcgacaaagacaaatttgtcgggaacaaatttgaacagcgcttgcgctggcccgtagggcgagtatcaggatga

SEQ ID NO: 298179 - DNA, 1116 bp, Proteus mirabilis
atgatgaagcgcaatattcttgcagtggtaatcccagctttaatgtttgctggtgcagcaaacgcagctgaaatgtacaacaaagacggcaacaaagtagatatctacggtaaagttgacgttcgtcattacttcgctgatgctgatactaaaggcgatcatgaaagcggtgacgcttctcgtgcacgtatcggtttcaaaggcgaaactcaaatcaataaagatttaactggtttcggtcgttttgaatacgaagttaaaacaaacactactgaaggcgagaacaaagctaaaactcgtctagcatatgctggtctgaaatttgctgacttcggttctttagattacggtcgtaactacggtgtaatttatgacaccaacgcatggactgacgttctgcctttatggggtggtgactccatggcgcaaactgacgtttatatgactagccgtactactggcgtattaacttaccgtaacaccgatatgttcggttatgttgatggtttaagctttgctctgcaatatcaaggcaaaaataacgaaaacaccaacaataaacgtaaagacaacgctgaagcaaatggcgacggttttggtttctctacagcttataacttaggctggggcgtaacactgggtggtggttactcaagttctgctcgtactaactggcaagaacataagagtgatgctactggtaaacgtgctgaagcatggaacgttggtggtaaattcgaagctaacaatgtttacttagcagcaatgtacggtgaaacccgtaacatgaactactatggtgacggtgcaattgcaaacaaaactcaaaatatcgagttaactgcacagtatgactttgctgatttaggtatcaaaccatctttaggttatgttcaatctaaaggtaaagatctgaataatggtgttggcggtctgaaagacaacaaccatgatttagttaaatatatctctgtaggttctttctacaaatttaacaaaaacatgactgcagttgttgattacaaaatcaacctgttagatgaagatgacttcactaaagctaacggcgttgcaactgacaacgtagttggtttaggtctgacttatcagttctaa

SEQ ID NO: 298180 - DNA, 2367 bp, Proteus mirabilis
atgaaaaaaagttatcccacactgctggccaccttagtttgggccacaatttatgctcagcctgcatatgctgatcttgcctctcaatgtttactgggagtccctgtttataataagccattagtggaaggcgatcctaactcattacctgtcaccattacggctaaggatatgcaaggggaatacccacgcatgatccaatatagaggcaatgtagacattaaacagggaaatcaaacattaagcgcagataatgttgagttgacccaaacagaaggtgaaacaccattaagaatggtcaccgcgacaggtaatgtctcttatgatgatccacaaatcatcttaaaaggcccacgtgcttggtctaatctaaataataaagatactgatatcgaagaaggtaaataccaaatggtgggccgacaaggccgtggctacgcgaataaaatgcaaatgcgtggcgaaaaccgctataccattatggataaagggatgtttacctcttgtctacccggcgacgatagttggagtgttgtcggctctgaggttatcttagatcgtgaagagcaagtagcagaaatttggaatgcacgttttcgtgttgctaacgtcccagtcttctatagtccttatctgcaattaccgattggcgataaacgtcgctctggtttcttaattcctaatggtaactattctcgtagttctgggtttgacttccaactgccttactattggaatattgcccctaattatgatgcgactattaccacgaattatattagtcgccgtggtttaaagctcgataatgaatttcgttatttaacaaaaccgggtcgcggtacgattgcggttgattggatcaaccacgacagtcaatacaataaagataaagcagaccaaaaagcgggttatctggcgcgtgattctgctacacgttggttattctattggggtcacagtggggtgatgaacaatgtgtggcgctttaatgttgactacacaaaagtcagtgataacaaatatttcaccgactttacttcgcaatatggtaataccactgatggttatgcgacgcaaaaattcagtaccggttatgctcagcaaaattggaatgccacattaaccactaaacagttccaaattttctcagataataaagatgcaagggcttatcgtgctgagccgcagcttgatcttaattattataaaaatgatattggcccatttgattttcgtacttatgcacaatttgtccgctttaccagtgtcggagaaaacacccctgaagcgaaccgttatcatatagagccaaccatttccttacctgcctccactggctgggcaagctttaataatgagtttaaattgatggcgactcattatgatcaagatattcctgatgcttataagaagaagtatccacatcaaaaacttgatgatagcgtcaaccgcgtactaccacaatttaagtcagatatgaaagtggtatttgagcgccaatatgacactaacgatattacgcaaacgttagagccacgagtacaatatctgtatgtaccgtataaagatcagtctaatatcaataactttgactcagcgctattacaatccaactatagcggacttttccgtgacagaatgtacggtggtctagatcgcattgcttctgcaaaccaattaacggcgggtgttacttcacgtttttatgacagtgaactggttgaacgttttaatatttctgttggtcaaatctatttctttgagcgtccgaaaacaggttcatcgaatgaaattatcaatagcaaagatgaaaccggatctatggtatgggcaggcgatgcatattggcgtattactgatactttaggtatgcgtggtggtttacaatatgaccgtcgtttaggcagtgtctctatgggtgatgcgattatggagtatcgccgtgatagcgaccatctcttacaattgagctatcgttatgtagaccgtgattatattcaagcaacacgggttcgcccttatgatggcggcgtcaatcaactaccagaataccaaaaaggcatttctcaaattggtgttgtcggcagttggcctttagcagaacgttggggactggtcggcgcttattactttgataccaaagattcagagccagtaagccaaatggttggcttacaatataacacctgttgctgggcggtaaacgttggttatgaacgtaaaattgttggctggaaagaagaccacagcgatattgacaacaaatggtcaatcaatttggaactcagaggcctaagtaacaatcatagtttaggtagtcaaaaaatgcttgagcgcggtatcttaccttatcaaagagcgttttga

SEQ ID NO: 298181 - DNA, 1053 bp, Proteus mirabilis
atgaaactgaccattgacaatataaagccttaccttttatttgaaacaatttcaggtagtcgttcacaaaatttggcaacagatagttcagatactgatattaaaggtgttttttatctacctaaagagatgttttattgctctgattatgtgccacaagtaagtaataaaactaatgatatcgtttattatgaattagggcgatttgttgaattactgtgtgcgtctaatcctaatattttagaattattaaatgcaccagagcatgttgttatttatcgtcatccattatttatgcaatttaacccagaatggtttttatcaaaggaatgcgtacagacttttgtgcattatgctcaagggcaaataaaaaaagcgcaagggttaaataagaagatcatggatcctatagataaagagttaaaaacaatccttgatttctgttatatcattgaagatggaaaaagcctattactgaataattggcttaaaaaacgttgttgggagcagcaaaatattgggttggttaaaatcaatcatgcacaaaatctttatgcagttttttatgatccaaatagtgattatcaaggcgtaataaaaaaagataatgccaccgatgttttactaagcagtgtctctgaaacagctatattacaagcctatcttagttttaataaagacggctacagtacctattgcaagcagtatcatgcttattggcaatgggttgaagagcgtaatgaagcccgctatcagcaaaatattgaacatggacgaagttacgatagtaaaaatatgatgcacacttttaggttgctttatattgcattaggaattgccactgaaaaaaaagtcaaagtttggtgtgataacagggatgaattgttagaaattaaatctggggctttaagttatgaaacattatttgagcgaagtaaaatattaatagaaaaaattgagcaagcttttcaacaaagtcaattaccagaaaaaatcaatcccgaattaattaaacaagtattagtgaatattcgtaaagaattatatcaataa

SEQ ID NO: 298182 - DNA, 1245 bp, Proteus mirabilis
atgttttcagaagaaagacgacaggaaatctatagcattattagggaacagaaaaaagttaaagtggctcagctagcggaaagattcaacgtcacattagaaacgatccgcagtgatttgaaatacctcgaaaatgaagggttgatcaaacgttgtcatggtggcgccatactagggaaacaagaaataaaaaagatcagtaaatttagtgatagttttgatatctcatgcttactacacgatttattgatcgtcaaagaacataaaaagaaaacaccagaaggtaaagtgtgtgtattaggctcttttgtggtggacattattgctaatgttgatgcatttcctcgtgtaggggaattggtaaattcaaaaggaaactcaataggtccgggtggaaaagggacgaatcaagccatttctgccagtttttctgatgcaaaagtgcatttaattactaaagtcggtgaagatcattttagtaaatatgcttataaatatttgcaagagagcggtattgattcatttactatttttcaaacagaaatagagccaacaggtagctcaattagctatttagcagataaaaccaaaaataatattacggctacctatttaggcgcaaataacacttttaccctgcaagaggtcgatatatcactgccttatattagtgaagctgacgtgttattactgcaaggggaaattaatattgatgctaatgtgaaagccgcttcttttgctcattctattaataaaaccgtcatacttaatgtcgctccgtatagcgatgatttaaaacaactttatttatatgtagattttattacgttaaacgcttaccaagcttcagattggtcaggtattgaaattaatacgattaatgatgccaagcaagccgtagagattattgccggtaacgaaaagaaaaaagtgattatctacatagatgaattaggcgtggtgtattttgatgggaggaatacttttcatattccgccactaccttctctacgtgttgatacgatggcagcaacagatgcttttaatggtgcatttgcctcaaaaatagccgcaggaggcacaatgccagaaagtgttttatttgctagcgctttcttgtccgcatttatagaacaaaaaggggtgacttcaatgccttcactatcacaagtacaagcccgtcttaaattaagaattgaagatattcgaccacaagtaatctgcaatgagaaaaggtgcatataa

SEQ ID NO: 298183 - DNA, 912 bp, Proteus mirabilis
atgaaaaaattatttggcgttacagtggcgatggttactccgtttgattcaaatgatcatgtggacatcaacgcgttgtctgcattaactaatatgttgatcactaaaggtgttgattgcctttatccttgtggcacgaccggagaaatgttgcgtttatccgcatcagagcgtaaaagtgtggcgcaaaccgtagtagagacggcaaataaacgtttacctgtttttattcatgttggcgcaatgacggtaacagaaaccattgaactcgccaaacatgctgtagaaattggtgccgatggtattggtgtagtgacgccacaattttttgctgccacagacagagaattagagcactattttgtgactatcgccaatagcgtaccagagaatttcccaatctatctttataacattccacaatgtgcggctaataatatcaagcctgaattagcggctaaaattcagcaacaatgcaaaaatgtgattggtataaaatacagttttgccgataacaatacgacacttggctatttagcggttgcagataatttttcagtacttcatggctacgataaattattccttggtttattagatgcaggatgtgatggcacggtttcaggatgcgcctgtgttttccctgaaccatttgtgaatatgtatcaagcctatattacgggtaattatcaagaagcgaagcactggcaacaattttgtgtgaaatttagtgatgctttgaaatcaggcgcgaacatggcgatatttaagtcagcattaactatgcgtggcttaaatggtggtcatatgcgtttacctcaacttgatttattacctgaagaaaaccaacaattgaaagaagatctaacgcaattatgcaaagaagcggggatcgctttttcaattaattaa

SEQ ID NO: 298184 - DNA, 759 bp, Proteus mirabilis
atggatgcacaactgtataaagagtttaaaattatagaaaaagcgttttggtcagagatatgtgaaaacaatattcgtattggtgatcatacccactgctttatgacaccgatggacgcgcctatttttaattttatctaccttcgccaaggcgctagcgaaaatactttccaacaagcaagtacgctgttctcctcgcaaaaaaaaggtcacatgctggttctgccggaatctctgttgcctgaatttgaagagataataaaaaaagcaggttatacgggtgacggtatgacaaccgctatgtatctctcattgtctgatgcgacttatcccccctataaaaataacccgtgcgatattattttaactaaccatgatcttaaacagtgggcgcaaccattgaaaaccgcctttcctgttggtgacgatacgataactaatgaatatattcgttatcaccaaaaagcgttagataatggtgcgacgatccttcattatgcattattagttgcagggcagcctgtatcatcattaacgctgacattacatgataaactagcaagatttgacgatattgggacggatattgcctatcaaggcaatggttatgccacacatttaattactcacgtattagagttttgtcgagagcaaggtgtcgagcgttgtttcttagatgcgtcagcggatggtctagcgctataccgtaaatttggttttaagccactttttaactatttaagctttattaacgaataa

SEQ ID NO: 298185 - DNA, 1743 bp, Proteus mirabilis
atgagcacattattatctacacaaaatctctcttttcataataatcacggtatattgctgagtaatatttctttggcactcactaaaggtgagaaaattggtttaattggctacaacggttgtggaaaaagtaccctattaaaacttttatcacaccaattaataccaacagatggttctattactatcgccaatcaagtcattatggcttatgtcgaacaacagttaccaagtgagctacagtcaatgcgtctcattgatgcggttcttcataaattacctgaagagctacgcatatctgaaagttggcgcagtgaattattattaagtgaaatgggatttaaagccaatgaaatcaatctattagtctcacaattaagtggtggtcaacatactcgtttattacttgcgagagcattgattttacaaccagacttactgctattagatgagccaagtaaccacttagatctaccgactatcttgtggttagaaacatttttaacacagtggcgaggaagttttattcttgtttcacatgacaataggttgttagataaagtgaccaattgtacgtggatcattcgtgataaaaccctatctgtttttcgcttgccctgctctcaggcaagacaagagcaagaagcacaagatatcagtgcgcaacatcgttgtgatgcacaacaaaaagagatagatcgtattgcacaaagtgcgaagcaattggccatctggggaaaagtgtatgataacgaaagtttgtcacgtaaagccaaacaaatggaaaaacaaattgttcgtttaaaagacgaacaagtcgatgtaacagaaggcaatcaatggacgttacagttatcaggaacaatattacgggcagatagattgcttgagctgcatcagctttcagtgatccctgcgccagatgcaccgattttatataccatcgataatcaacggatcaaaagtggtgatcgagtcgctattgttggtgctaatgggacaggtaagtcatcattattaaaaatgatttggtcatcatttcatggttcaaccacatcaacagaaaatatgatcaggcttcatcccagagttgagttaggttattacgatcaaagcctcgcacaacttaatgataatgatacccttgccgatgcactaaagccctttgcaccgctattagatgagcaaaggaaaatggcattaataaatgcaggttttgtttattctcgccataatcagcaagtaaagtcattaagtggtggtgaacgagctcgtttactttttattggtctcagtttggcaaaatattcattattaatgctagatgaaccaacaaaccatcttgatatggaaggtaaacaggcattagctgagcaaattcaacgattttcagggggaattttactcgtcagccatgatagagaattgatagagaaaagctgtaatcgtttttggtatattcacaatggtattcttagcgaacatcatgatattgaaacaatttatcagcttatttctcaacaagatatgtcatcggtctctaatgagcaaaatggccatcatgctccatctgttgaaatagtaaaacatcataatgaagatgaattgctaatgaaattgatagcacttgaagataaattgaatgctgatttagcaagaaaatctgctcatcaaaagcctatattacaggctcaatggcaagcagaaatagagatcttaaagcaacaacttgatttagcttaa

SEQ ID NO: 298186 - DNA, 462 bp, Proteus mirabilis
atgagtaaattaataattggcggagtgaatatatcaacttcgcaaataaacaaattatcacacgcatctaaagctagagatgcaatgtctatttgggaaaaaataaaagattggtttaatcatggtcaaaaagaacatgtgcttaaattactttatcatacctatttcaatcctaaaaattcaatatttgataaggttgattgctttgcagaattatattctatgacaggggcgcaatataaagataattttcatttatatttaaaagatggttatgatttaaaaatgaaatttgttataaaaaacgtttataatggtgaggtattattagataatttaattaaagacatgatggatcggatacataataaaaacccaagcatagaaaaagacataggtaatataagaagttatataagaagaagactacatgaaattcctaattatgttgctaagaaatag

SEQ ID NO: 298187 - DNA, 1374 bp, Proteus mirabilis
atgtcagaacaaacaattatttgggatcttgacctgatccataagtataactattcaggtccgcgctacacatcatacccaacggcattggaatttaatcagcaatatagtgatgcggatttcgaacaagcaacaaagcgttatcccgaacgacctctgtcactgtatattcacattcctttctgccataagttatgttatttctgcggttgtaataaaattatcacgcgccataaacataaagctgatgaatatcttgatgttttagaaaaagaaattattaatcgcgctcgctattttaaaaatagaaaagtgacccaaatgcattgggggggcggtactcccacttttcttgataaacagcaaattagtcgcttagtcgctttattaagacaacattttcattttgtggaaaatgctgagctctctattgaaattgatccccgtgagattgagttagatgttattgatcatttacacaatgagggatttaaccgcctaagtatgggggtgcaagattttaataaagaggtacaacaaaaagttaatcgtgaacaagatgaagcatttatcttttcagtagtagcaagagcgcgtgaagtgggctttcattctaccagtattgatttgatctatgggctacctaaacagactaaagaaagttttgcttttacgttaaaaaaagtgattgaattgtcccctgatcgcttaagtgtgttcaattatgcccatttacctaatttatttgccgcacaacgcaaaattaaagatgaagatttaccacttgcagaagaaaagttagagatcttgcaagagactatcaccacactcaccacaaatggttatcagtttattggtatggatcactttgctaagcctgatgatgaattagcggttgcacaacgccaaggtattctacatcgtaatttccaaggatataccactcatgaagagtgtgacttattaggaatgggcgtttcagctatcagtatgctgggtgatcactatgcgcagaacgaaaaagtgctaaaagagtattatgctcgcgtaaatagcgaagggcatgcgttgtggcgtggactctctctaactcatgatgattgtattcgtcgcgatgttattaagaccttgatttgtaatttccatcttaactttactgagattgaaaatctatatcagattgattttcaagattattttaaagaagacttagcattgcttgcaccaatggcagaagatggattggtggagatcagcgcagaaaaaattcaggtcactccaagaggacgtttattgatccgtaatatttgtatgtgttttgatacttatttacgtaatcaaatgcgccaacgccaattctctcgagtgatttag

SEQ ID NO: 298188 - DNA, 399 bp, Proteus mirabilis
atgagagatatgcaggaagttttatcacgttggggggcgtggtcagctaatgagggaaatagtatcgattactcatcaattgccgcaggttttaaaggattaattccaagttcaagacgaagccgagagcaatgttctgatgatgatggcttaaaaataaataaagcggtattacatttaaaggtaaataatagttacttgtttcagttggttattatgtactatgtgaagaattatcctttacgctcaatggcttcaaaacttggcatttctcataatgaagtggctaagcgattgcagacagcagaaggatttattgaggggtgtctatcggttgataacgtaaaattagatatggataaaataattagaaaacacagcatttatagtcttgtgtaa

SEQ ID NO: 298189 - DNA, 2202 bp, Proteus mirabilis
atggccatactcactctccgaaatgttaaaagctattctgctgataaagatgtaaatatagatctaagtaagcctgttaccctcatttatggacaaaatggtgcaggaaaatcaacaatttcaagttttttttcaggttttcaacaagaaaaataccagcattgtcattttgcaagtcgtgaaaattttgcttattttgtatttaatcaggaatatatagaacagaagtttcaccaagaaatatatcaacctggtatttttacattgaatgagaagaatgatgacgttaacggtaaaattgaaagtaataagagaagaattactgaaataaacaacttactaaacactttggatacagagataaaaaataaaaatgatgcaaagtctactgttatcgaaaagtactctaaagttatttttaaaaaaactatcaatgatcggcaatcgttagattattttctagatagagctaaacgagtaaataatttttatcaaaaaatgagggaaacttcattaggaattcaaaaatatgagctggtacaacttacagagagactggagttgttacttaatagtgaaggaactcaatatacagagattattgaaccagaggtttatggcctatctgacgaaatgctgactctacttcaaagttcgttgacagcatcgtccgatacaccattttcagccattattcagcagttaggtaacgctgattgggttcatagtggaacaggttatattaaagataatatttgtccattttgccaacaaaaatttgattctcagcatcttcttcatgaattgacactcatgtttgataaatcttatgaagatgctctggcaacgcttacccacagtcagacagtcatttcccatgaattagacttattggagtcattccatgagcatttacgacaacaccctgtagttagtgatgatcaccaagtttttagtattattaaatctctgcaacaaactttacgtaataatctacaatcactcagacaaaagctactacagccttcgcaatccatacaacctgacgttattacagatatacgtcagcatttgaaccagatactggtaactttaaatagtaacattagagacaataatcagctggcagccaattttagtcaggagcgagctcgcttggcggcagattcctttgcatatcttagagaagtgagtgatccttatttgcgtcaatgtgatcaggaattagcagaaatacaacaacaattgcaagctgagataaatcaagttgatttattgagagatgaagagcgagcactttcggtcgaaactactcatcttatagggcaattatcagttatacagcctacaattgataacattaattataatctgacacaattagggatcaatgatttcaatattatttgtcatgatgagagcttgaaactatatcgcttacatagacaaaaccagccagatgattctgaggtctttaaatctttgagtgaaggcgaaaaaacaatcatatctcttctctatttcctagaatcatgcattggtcacgtacctgatagccagacaatacaacctaaactgattgttattgacgatcctatttccagcctgtcacataactatatttatgaagttgcttcgatgataaaacataaattaattttaccgaagattgcgcaacacattgttatattgacgcataatatatttttctttcaagagattctactttcagtttataaacgactggctcccgaacgtacaacaccaaaggggtgtgcactttatcgcatcattaaaggagaatatagtgattgtatcccattatcgatgcacgacatgctgaatgagtatcaggctttatggcaaaccatacgggatgtccgcgatggaagaagtttaccggtagtattacctaatacaatgcgaaatattcttgagtactatttcagtttttcttgcaaacaggaaaaactggataaagcgctaaataagctagcagttgaatattcagcaggggaatatgactcattttatcgagcaattaaccgtcattcccattctgatggcagaaatatcatggctacaggagtgattaatgtagaaatgtatttccgtttatttcagaaaatttttgaagaaacgaaggattctgatcattacaacacgatgatggggattactgttgagcaaacagaaggttga

SEQ ID NO: 298190 - DNA, 510 bp, Proteus mirabilis
atgagaattgaatgttatagttggtcagatgttagtgaacaaattctggagcaagcaatagccttacagaattcagcttttgaggatatgaagggtaatttttatcaggttgatataccttacaagttggtactggcaattgatgataatcaggttatcggacatgtagctgtttatttacgagatgtttacctagattcatttcctgaaaccattggtatattgagttgtgtagtggtggctcacaaataccgaggaaagggcgttgcggcatcattaataaaaagggctcatgctatactgaaagagcattctgttaatttttctattttatttgctgtttctcatgcttattatctctcctctggatatattccgatgaaaaatatcacccgttttattgagaataatgagaagaaagaatttatatatgacggtggtatggtgtgtgaattaagtagtcaaaattggaatataaacatattagaattaaatggggaagttgtataa

SEQ ID NO: 298191 - DNA, 1170 bp, Proteus mirabilis
atgaatcagaataactttaataaattaatttctaggcaaaatacctacagtgctaaatggtgcaacagtaacgccaatgttattccattatcggttgccgatatggatatttctgcaccagattttattattaacaaactcagtcagtttaatttaaccggtatttatggctataccgatcttagctctgattggaataatattgcggtaaattggtttaaatctcaatatgcttggcatgttacacctgaatctgtggtgttttgccctcgcattatccaagccgtctctctctatattcaaaattttactcaaattggcgataaagtgacaactttgtcacctgcttatcatcctattagcaatacagtttgtgtaaatcatcgccagctactagaaagcccattaatttatcataatgggtgctatgaaatagattttgacgatttagaagataaatttaaacaatctgtctgttttatattgctctctccccataatccaaccggaacagtatggcaacaagctgatttattaaaaattgctaaacttgctgaaaaatataaagtttttattatttctgatgacgttcatgctgattttgtttttgataatgccatttatcgtcctatatcaactttaagtagctatgtagaacaacactcttttatttgcacatcaccggctaaaaccttcaatttagcggggcttgaaatagctaatattgtgattgctaatccagaatatcgtgagaaatttaaacaatgcttaattgccgcaggtattcataatcctggttacttctctgtccctgctttcttacaagcttataccttacaaggtcaacaatggatcaaagagcttaaacattaccttgctgaaaacaggcagtgggtaaaagagcaatgtgcacgttattttcctgattgggttatcactcaaagccatggcacctacatgctatggatcaattatcaaaaaatgcagttaaccgaacaacaattaaagcattggtttgtttcattagccgaagtagaaatgagttggggaagcggttttggtgcggctggggatggttttttccgcattaatattgctacacctcgttcaatattagaaaccgtttttactcggcttattcgtacctcacctcacgccagtttggaataa

SEQ ID NO: 298192 - DNA, 1407 bp, Proteus mirabilis
atgagcaaacaacaacgtatcgctttatttgttttattattagctggattcgttactatctttgatctatttgtcgttaatgtcgctatagttaatattgaacaaacacttaacgccacactcaccgaactcacattgattattgtcggatacgaattagcatttggcttgctattaatcacaggtggacgattaggtgatatttatggacgtcgaacactctatcgctttggaatgtttggctttacgttatcatctgtattatgtgcaatttctccaagtgctgttttacttgttattgcccgttgttttcaaggactaactgcagccttgttattccctcaagtatattcaagtattcgccttaattttgatagctcacaagccaaaaaagtattcggcttacttggtatgacgttaggtgctgccgctatagcagggcaagccttaggtggattattaatatcattaaatatatttgggttagcgtggcgtactatttttttgataaatctttttattggtgtgatcgcattatttttttcgcgctatcttacccaaaatgaattatccgatcataccaaattggatataggaggagtcattttatctacacttagtatatcatttacgttattaccattgttgatgcttcctatctggcactggcaatggtttagttcattattttttcttgttggaataagtctattaatactatttttttgttatgaaaaaaaattaaaataccaagggaagcaacctctatttgacctgatactctttactaatcatcaatatgttattgggctcattattgttgtttttgtttattcaacatcatctgcttttcctatgataatgtcgatattattacaaagtgggtttaatcgtacggtttttgattctggcttaatgtttgttcctgcaagtatcggttttatactttcctctttattcacaccgaagtggatcaaaaatattggcgaacatgttatctattggggcgcagtctgttatgccttcagctatattttgcttattttaggcgtctattatttgattacccctaagaacactacattaattattcctttcttattgttagttggctttacacaaggcatgattatgactcctatgctgaatttagtgttagaaaaagtgaagcctgaacttgtagggattgcttccggattaacggcaacattacaacaaattggggctgctataggggtaacatctgtttccatcattttgcaatttagcctcacacaggttatatcaaggaatataattgaacattataagatagcgtttagttttagtatgttgtttaattttataatggctatatgtgcggcttttttcttgaaaaaaataacaaaccataagaatacgttataa

SEQ ID NO: 298193 - DNA, 792 bp, Proteus mirabilis
atgacagaaagaaaaagaacacgccccgagcttgctgattttttacgtactaaaagacaaagtatttcacctgagtcagttggtttacctggtacagggcgtcgacgcactcctggtttacgccgagaggaagtagctgcactctctggtgtcggattaacttggtatacatggcttgaacaagggcgggatattggagtatcaagtcaatttctagataatttagcgacagctttacacttaaatagcgcggaaaggcagcatctttacttattatcacatatgagagagccgacagaaaccggcatagtggaataccaagttcctgatacgattttaaaaattttagctgactttcctccagaatatatttgctatgttttaaatctacactgggatgttttagcttataatcaaaaagcagatctatacttccatttttcggactactgtactgaaaatcgtaattatctctatttgttatttatggatcctagatacaaaacacgcatcaatgattgggagcatacagcggatagattacttgctagtttccggcgtgaccatgcaagagctaaaaatgatccaaatattcgtaagctaattgctaaattaaactgttcatcaccagaatttaagcatatgtgggaaaaacatgagatctaccctccctgtgatggagtaagaacattaaattttgctggtaaaaacgagcgttatgaatacacctcattagcatttgatttagaaaaatataatcgaattttagtatatatccctaaagataagtag

SEQ ID NO: 298194 - DNA, 456 bp, Proteus mirabilis
atgccgatatgggttgatgctgatgcctgtcctaaagttattaaagagatactttatcgggcagcagatagagaaaaagtggtgatcacttttgtggcaaatcagcgattaagtatacccgcatcgccttatttgcgcacattgcaggtttctgcaggttttgatgtggctgataatgaaattgtacaacgtgcaaaccaagatgatttggtgatcactgccgatattcctttagcggctgaagtgatcgaaaaaggggctattgcactaaatcctcgaggtgaacgttatacagagtcaacaatccgcgaacgattaaatattcgtgattttatggatacgatgagagcaagtggcattcaaacaggaggaccagcaagtttatcacagcgcgaccggcaactttttgctaatgagttggataaatggttactacagcaaaaacgtaaaaaataa

SEQ ID NO: 298195 - DNA, 1575 bp, Proteus mirabilis
atgcagtttggttcgaagccactgtttgaaaacatttctgttaagtttggtggcggtaatcgctatggtttaatcggtgctaacggcagcggtaaatccacctttatgaaaattctcggtggtgatctcacgcctactagcggtaacgtattccttgatcctaatgagcgcttgggtaagctaaaacaagatcagtttgcttatgaagagtttaccgtgcttgatacggtaattatggggcacgctgagttatgggaaattaaacaagagcgtgaacgtatttatagcttaccggaaatgagcgaagaagagggtttacgtgttgccgatcttgaagtgaaattcggtgaaatggacggttacaccgttgaatcacgtgccggtgaattattattaaacgttggtattccacttgagcaacataatggcccaatgagtgaagtggcgccaggatggaaactacgtgtgctccttgcacaagccctattcgctgatcctgacatcttattacttgatgaaccgacgaataacttagatattgatacgatccgctggctagaacaaacattaaatgaacgtaatagcactatgatcatcatttcccatgaccgccattttttaaatatggtgtgtactcatatggccgatcttgactatggtggattaacagttcacccaggtaattatgatgagtatatgttagcggcaacacaagcgcgtgaacgtttactcgctgataatgcaaagaaaaaagcacaaattaatgaattacaatcctttgttagccgctttagtgctaatgcatcaaagtctcgtcaagccacttcgcgtgcaaaacaaattgaaaaaattcaattaaccgaagttaaagcttccagccgacaaaatccctttattcgttttgagcaagagaagaaattatttcgtaatgcgttagaagtagagaatattgctaaaggttatgaagcaaatacgcctttatttaaagacgtaaatatgatgctggaagtgggcgaaaaagtggcgattttaggcaccaatggtgtgggtaaatcaaccatgatcaaaacattagtgggtgaattaacgcctgataatggacgcgttaaatggtctgaaaatgccactataggttattatgcacaagatcatgccactgattttgaagttgatatgaccgttttcgattggatgagtttatggatgaagccagaagatgatgaacagtcggtgcgtagtgtattaggtcgccttcttttctcacaagatgatattaaaaaatcagtcaaagtattatctggtggtgaaaaaggcagaatgctgtttggtaaattaatgatgcaaaaaccaaacgttctgattatggatgaacctaccaaccacttagatatggaatctattgagtcactgaatatggcgttagaactctatcaagggacgttaatttttgtttctcacgatcgtgaatttgtcagctcattggctaaccgcattattgaaattacgcctgaaaaagtgactaatttccaaggcacttatgatgagttcttggctaagaaagggattgatggttag

SEQ ID NO: 298196 - DNA, 390 bp, Proteus mirabilis
ttgaaatatatttttgaaatcctattgaaatatactgatagaagaataaataaaagggaaaaaattttttcatcttttatttataagattttttttccacgttcatataaaaaatcattgaataaattaaaacaagaaaaaatatcaattgatagggcgaagaattctattgatttttcaatagaatatttaaaaaacacatatgaaaagaaaggtaagatagtgccaggaaaaaaattaagggtgattaatgaagaaactattttagcaatgaatattaaattgattgaggatatatcattctctcatgatatgcttagttatattttaaatgacgataaaaatataaaaaaaatattaacatctatttatatgccaactaaagcttga

SEQ ID NO: 298197 - DNA, 1509 bp, Proteus mirabilis
atgatcgattttaaactgaagttaaattatcaacgcaaatataacagcagtgatatcgatattgatgatgaaatgcagatctcgcgccaatttgaaagcgatcgcgggcgtattattaattcagcggcgatccgtcggttacaacaaaaaacacaggtatttccattagagcaaaattcggcggtacgaagtcgattaacccattcgctggaagtacaacaaataggccgttatatcgctaagcaaataatcggcgaactaaaaaagcataataaattagaagaatatggcttaaatgaacggattgatagcgttgaaagtttaattgaaatggcgtgtttaatgcacgatattggcaatcctccttttggtcattttggtgaagctgcaattaaacattggtttcgtaaggtgttagcacctgatgcttccatagaatttgataattgtccttttttacctattcgctattcagcagaccgacacttaaatgaattaaaacagactttgcgtcaagacttatgccatttcgaaggcaatgctcaggcaattcgcatggcgcatcacttgttaaaactcaatttaacctatgcgcaaattggctgtgttttaaaatatacacgtccagcttattggcaaggtgctacgccgaaagaatttagctatttaatgaaaaaaccaggttattactggtctgaagctgaatttgttaaggaagtacaagagaaacttgcaatgaaagatttttgtcgttttccactgacttatattatggaagcggcagatgatatttcttattgtattgctgatttagatgatgcggtagaaaaaggcatttttgatatcaatcgcttagtgcagttattaaaaaatgcatggagtgaaagtggtgcggtaacagaaggtgatctgtttgatatcactgttaatcgagcttttaagaaagttgatcaaaatgaagctaagcgtagcatgcaagatcaattttttatgtatttgcgcgtctatattaccggaaaattagtaccttacaccgcctatcgctttatcaaaaacttacctcaagtttatgaaggcagctttaaccatgctttactggaaggaaagagtgctgaacatcgtttattggcaacgttaaaacgagtggcgcaaaagtgggtatttagtcaccccgaagttgaagagcttgaaatgaagggctatcgagtgatcagtgggttattggatatttataagccattgcttttattatcgaccgatgattttctaagactacataaatataatgaacatcctcattatgttattgagacgcgtttatatcataagctttcgattaaacataagcttgcttataatgaagcattagaaaaaatttacgatattaatagtgaagagggaaaaaccttagagttttattatcgtacaagattgatacaagattatatcagtggtatgaccgaccattatgcatatgaagaatatagaaaattaatggtatgtgattaa

SEQ ID NO: 298198 - DNA, 831 bp, Proteus mirabilis
atgcgtttcttaaacacttttgcactgctgctaagcctgatattgacaccttgttatgttatcgcagccactcccgcacaacgtgttattactttatccccgtctgccacggaaatggcttatgccgcaggtatgggagagaatatggttgcggcgagcgcttattctgattatccacaagcagcaaaagatctcgtacaagttgccgactggcaaggcattaatgtagaacgcattttgctattaaaacctgatttaattattgcatggccaagcggtaatcctcaacgccccctcgatcagttaaaatcattgggtatccctattatttactctgatccacacagtatcgaagaaatcattgacgatcttacccgactttcttcttatagcactcatcctgaagtcgctttagcaagtgcacaaaaattacgtcagcaatatcaagaattacagcaaaagtacgcctcaacgacgcctcatcaagcgaagaaaaaagtctttattcaatttggtatgcaacccctatttacgacatcaaaacattcattacaaaatgagattaccgaactttgtggcggagaaaatatttttgcgaatagtgcagttccttggccacaagtcagccgcgagcaagtgatcagtaaaaaacctgatttgattttatttagtggtaaaccaaaccaaattgccgcaatacaacaattttggcaacctcaactagatattcctattatcgctattgatgaagatagttttagccgaccagcaccacgtattatttatgcggctcaacagatttgtgaggctattaaagataataataagtaa

SEQ ID NO: 298199 - DNA, 798 bp, Proteus mirabilis
atgaatattatcaataaatattgtcttttcttactatcagtagtggagatgttactattatcaggttgtcattcactaagttctaagatagatacaacatttttgcccccagaaaatggtagaacagttaaaatttcggttgatgtgccggatatggctgaattattgccaatgaaagtcatgtatcgttcaaatctttgccaaaaaacatatcataataatgaagtacctaaatatacagtacccggttttaatagtgagataatagcattagaaaaaagagtgaatagctcattatatagtacagagatcccttataggggaggcggaaaatgtgattggcaattaagtaatgttacattaagattgacattaaaaaagaataattcttttactaaagatattgttgatatagtaggaaccggagtaattattatttttgataataatcaacctcaacaaactggtcataaaccaattaaaataaagggtagttttgatatagtagagcattatttcccgtgggtaagtgattcatttaaaaatagtaatgatattagtttatggttatatggaaaagctcttttcctttattatcaatctcgtgatgctcaacaaataacatggaagcccatcattcatagtgatattgtggtttattctgaatatccagcagaggaaaaaacagaaggtgtaagtacaatctattcttatccagatggtacaaaaagtgcaaataggaatgggaaacctgattataataaactactctctttaattaagccgtcatcgtactaa

SEQ ID NO: 298200 - DNA, 795 bp, Proteus mirabilis
atgagatatttaatcaataattgtccacttattattttagggagcgttgttttactattatcaggttgtcattcactaatttctaagatagatacaacatttttgcccccagaaaatggcagaacagttaaaatttcggttgatgtaccggatatggctgaactatcaccaatgaaagtcatgtatcgttcaaatctttgccaaaaaacatataataataatgaagttcctaaatatacagtgcctggctttaatagtgagataatagcattagaaaaaagagagaatagctcattatatagtgcagagatcccttatagcggaggcggaaaatgtgattggcaattaagtaatgttacattaagattgacattaaaaaagaataattcttttactaaagatattgttgatatagtaggaactggagtaattattatttttgataataatcaacctcaacaaactggtcataaaccaattaaaataaagggtagttttgatatagtagagcattatttcccgtgggtaagtgattcatttaaaaatagtaatgatattagtttatggttatatggaaaagctcttttcctttattatcaatctcgtgatgctcaacaaataacatggaagcccatcattcatagtgatattgtggtttattctgaatatccagcagaggaaaaaacagaaggtgtaagtacaatctattcttatccagatggtacaaaaagtgcaaatagggatgggaagcctgattacaaaaaactactctctttaattaagccgtcatcgtaa

SEQ ID NO: 298201 - DNA, 519 bp, Proteus mirabilis
atgccaactccatgctatctctctattgagggaaaaacccaaggtaatattactgaaggagcattcactgctgaatcagttggaaatatttatgttcaaggtcatgaaaatgagatgcttattcaggcattttctcatgtagttactgtgccgacagatccacaatcagggcaacctgcgggtcaacgtgctcataaacctttccggtttacggtagcgttaaacaaagctgttcctctgttatataacgcattagcatcaggagaaatgttacctaaagttgatttaaaatggtatcgcacctctgttgagggtaagcaagagcatttctttaccaccacactaacagatgcgaccattgtgaatatcgattgccaaatgcctcactgtcaagatcctaccaaatcagattttactcagctcatcgaagtcgctttatcttatcgcaaaattgattgggaacacacaattgcgggtacttctggtgctgatgattggcgagcacctcttgaaggttaa

SEQ ID NO: 298202 - DNA, 921 bp, Proteus mirabilis
atgcaattaatggctgaaaacggctataaacttatcgatatgcaacaagggcaattgcgctatctcgcttctgccacctgttctgtcggtactgaaaaagcatgtcttagtggcttctcacactatcaaaatattgataaagccaacgctatacaaacgggcattagtggagcttatcgttttgatatcaatcaaacaccattagtggttggtcttgctattgatagcgatagctactcttctttaccgacaggctatgaatatcaaggataccctttaccgttaattggttttagcgttgatttgatcccgtcactaaacccaacctcgaatggcaatgcattacatctttcattaaaaggggcatatgtaaaccgcaaagtcacgattaaaagaccaatattagataataccgaagcgggtaaaggccacgcaaagatctccggttattatattgatttacaaggatattatccttacacactcaataagcttatcactgtaacgccttttgcaggacttacttttaatcaaacatcacgctctgcttatagcgaaacacaagggactaaacttgcagtccattatcaagaacttaatgcacattcattgcttgcaaaaataggattaggaatagagtatacagtcaatgccaaactcaaactggacagcaaagcgggtttattatggcatttatcacatcaccaaggtgacttccaaagtcatattgattatctaggtcagcaaaaaattaactataacgacaacaaaaaacagttagcacagcgtccatttgctagtgtagggctaacttaccaactagataaacagtcatctgttaatacgacaacaaattggcaaatgaccccttatcgtaatcaagatattcatatgggtattggttatacatatcgtttttaa

SEQ ID NO: 298203 - DNA, 906 bp, Proteus mirabilis
atgagtgaattagtaattaataataatattgttaatgacttattaataaagcaatttactaattatgtatttatgatgatagtaacagatataaaaggtaatattatctacgctaataaaaaatactgccaatttaatcatattaattttgaaagtataaaaaataaaagatataacttattttatttagttgatgaaaatcaagttgtattttctaatattagtgataataaagaggtaataagattagaggcaaaacacccaaataaaaataaacaagaagtatgggaagatattaatattgttccaatttttgataaaaataatctaatttctcattatgcatttttaagcttagatatcacggataaagtaaagttaagaaatgatttattaactaaaagctatattgactctttaactggaatggctaaccgtctaagtattattgaaaaaattgaacaggagcgattaaatatcgcgacaccttcatctttttgtcttgggattattgattgtgataaattcaaaacgattaatgatcaatatggccatgctattggtgatcatgttttatgtgagatagcgcagcgtttattagccttagaacgccagcaggtttactgtgggcgacttgggggcgatgaatttgcggtacttttccctgctggattacgttcttgctctttattgttattggagatcatcgaatcgctatggcgagggatggaaaaaccgataaaaatcaataaagaaaaaacaatcgttccttctattagcttaggtattgctgaataccctaaggatggcaagacattatctgaactattaaagtcagcagataaacagctttatgcaataaaagagaaaggaggaaataaatacggtttttattcagagtattaa

SEQ ID NO: 298204 - DNA, 3687 bp, Proteus mirabilis
atgaaaaaacagacacttaatatgattgttaaagtgatttatgccagttgcttattaggcgttacccattccacgcttgctaatgcaacagatgcgaatattgtcagctcgttaatagagcaagcaaattactggcatggaaaagcgcatgatgaacgagccattgaagcgctacaaaaagtgctgatcatggaaaataataatcaagatgcgctgtatttaatggctttttttactgcgcaacaaggaaatgaaaaacaagccagctattggcgtgaaaaactggcacggattgcacctcaagatccgcgtattgcgggattaaaaaatattcgctcatctcaatttagtgaacagcaattgggttacgcgagagaattagcccaaaaagggcaacatgaagaggcaataaaagcctatcagcgcttatttgtcacacatgaaccacctgatacgctatcacttgaatattatcaaactatggctggaataccggcaatgttgccacaagcgattgctgggttaaaacaacgtgctcagcggatgccagataataaagaaacacaaaaagcattaggattaacattaacttataacgaagaaactcgtcgtgaagggattgctattttaagtaaaatttctggtgatgaaacggcgaaaaatggattaagacaagccttactatggcttaatgtacgtcctgatgatgaagggctgtatcaatcttatctacaaactaatcctaacgataaagccattgcacagcattaccaaggagcaatacaaggtaatgcccgacaagcaggttatgaagcgctaaacacaggcaacctaaagcaagcaacaacttactttaaacaagcattaacggtcgatagtcaagatgctcaagcgttagcaggattaggttatgtggctctacgttcaggtgatttggcaaccggacaaaagttattaaaccaagcctctcagtcagggggggaacaagggcaaaaatggaaacaacaagcagaggatgcgggtttttattctcaattacgagaagtgcaacgacaagctaagcaaggtaatactcagcaagcactggataaattattacctttaactcactcatcgggtgaaaaaggattatcagcacatttattgcaagcggatttattgcgcaaacaaggtaatttacctgctgcttatcagctattatctgaactatatcaacagcatagtcaaaatgaaaaagttatttccgcatattactacttgcttattcaacaaggaaaaaacagccaagctgagcagttagtagcaaaacaacccgcatctttacgacaaaaattaacggcaaatactgatccatcagaaagattacgtcgtgatgcgcaaaaggcgttagaaaatggtcatcgcactcaggcaagacaattattaactcaggcacaacgtaaaaacccgcaaaataattgggtataccttgatttagcccgtttaatgatagccgaaggtgataaaacgcaagcggatcagctcattttacaacttgaacgtcgtcaaacacgtgatgccaattatattgcagctctcttttatgttgaacaaaaacagtgggataaagtttttagcctactgaacagtcaacctcaacaaaatgaggcggaaaaagcgttattagagagagcgcgtttttatcgtcaactgacacaagctgagcgttactataaaacgggcaatctcgttgcgatgcgcaatacgctacgtcctttaatcaaccaagtggctgattatccaaatgatgtaggggaattagctgaaaaactggtaaatagtggtgcacaagatgaagcactgcaattgattgaaaatgatctggctaaagggactaaaggctccgtgggaaattatgcagggcatatcaatgtgtttaatgcgttaggacgttatgcacaagcctcgagcttgattaatgatccagcattacagcaacaaacgccagcagccgagaaacaacgtttagctatactgacaaatgttgcgcaagcggatagtttacgggaaaaaggtgaaatcaaagccgcttatcaaactctcgtcacctcattaaaggtaagtcctgatgatccagacttattaatggctttaagtcgtgtgtatttagcgcaatctatgccagagcagtcaaataaaattctctcttaccttgaaaaacagcaagggagagatagcaaattacttcaagcacaaattgaagttgctctggtgcaaaaagacggtcgtaaagccaaaacactgttacaacaaataccgacatcttcacagcctgcttatctattacaagcagcgcaagtagcgcaattaaacggtgaaaatcgtcaggcattggcgttattgcgtagcgcgcaatggcaaacgacaaataacacaacaggtacggtgaataccgcagcagggcagttaatggcactagagagtgaaaatagtgtgatgactggctctataaatgaagataaacagatggttgctgttcaacgttccattcgccaattagagcagcagatatctccttgggtacaaggtggtattgctattcgtcatcgtaatggtgataagggattatcaaatttgactgaaatatcggcaccgattgctatctcaagtgttcctggtgaagattggcgctggcaatttaatattaatcccgtttcaatcaccagcggtacggcttctggagagcgcgctaatcgctttggctcggggcaattgcagcatgctgaacgttttgcgaaaaacagtgataatcatgatgaaaagaacaaaataaacgcagatgatgcgggaagccagcgggcttcaggtgttgaattaggattggttttatctgatcacaatacacgttttgatgttggaacaacacctttgaataaagatagttccactattgttggtggactgacttactcaccaaaaattggccaaaatggacagttaacattaaccgcagagcgtagagcgattaaagatagcttactttcctatatgggacgtaccgatcctataacgggagaaacctggggacaggtcacgcgtaatggtgctaaagcgcaatatgcatgggatgatggcaaagtcggtgcttatattggtgggggatactataactaccaagggaaaagtgttgaaagtaatgaagaggtaaaagtttggcttggctcttatgcaaacttctacaaagatgagcaacaagaagtcaaagcgggtgttcatgtggactatatgaactttaaaaacaaccaaaattacttctcattagggcatggggggtacttcagcccacaagattatgtcgctgtctctttgcctgttgcttatacccgtcgttttgaaaaaggagaggtatcgctaaatggtgcgataggggtacagagttacaagcaaaaggggagtgattattttccaacccatgcttatatgcaaaatgcgttaaacaaacgtcatacgagtgactcacgtattaaatctcgttatgaagagcaagatgaaaccaatattacctatcgtttagggctcgatgctaaatattatttaaataaagagtcagaattaggactcagcttatctcatgatacatcgggtgattatgctgaagataatatgtggttatatctaaaatacaccccagactttttatctaaataa

SEQ ID NO: 298205 - DNA, 2349 bp, Proteus mirabilis
atgaaaaagaaactgacatcaatactaagtctgacggttattgccatggcgagtattcatttttgctatgcgacaacaggaatgctagagctagatggtgaagtattaccagagccaacatcttatactcatccgccactacaacccacagtaagtacgcaactatttgatgatgttgcactctccgaggcgcgtaatattgaagagcagttaacattagctcagatggggagtccatcaccaatagtattatccggtcgacgtttattatccggcgtgacatttcgtatggcaaatgatctgtttatcgatagtgcgacactcaccatgaaagtgaaagcttcatcgggattagtgcaagccgatcaaacgttacatttgatgctaaatggtcaacctatgggatttttgcctttagaagaaggtgagcaagaacatgagtatatgttagagatccctgaaatgatgttgaccaatgtaaacaacttgagttttcgccttgccagtcgcgatgctttagatgaaaagcagtgtatgcctcctttagctgatgagttaagtttggtgatttcgcccgattcatcattaaattatcgaggtcgttggattaatggcgggtatagcttggaacgactgcccctaccgttctttgatcctgatagaatgacagcgacctcgttacctattgttttagccgataaaccagataatgggcaggtaacagctgccgctattgctgcttcttggtttggtagttttagtcatgatattaaacaaatagatttacctgtattaatgaatcaactacctgatagcgatggtgttttaattggttatgccggacagactattgcaggtattaccttaccatcaggaaaaaatgggcagctcacgatagtcgataaccccgttgatcccgtatttaaattattactgattagcggtgatgatgaaaaaacattacgtcaagctgcatgggcattaaatagtggcaaattaccaccaaatgaccaattaacggttgctgctcaacatattccggtacgtcaggattatgatgccccacgttggttaaataccaatcatcccgtaacattgggtgagatagctcatggtcgtgatgattttactcgccaaggaataaatcatgctcctaatcaattttcgtttcgtgtctcacccgatctcttttggtgggatggagatgcgctacctttagatctgcaatatgtttttcctcattcagataaaataaatagccgtcgctcttcgttaattgcctctttaaaccatcaatttattggtgcgttatatccttctcgttcagagccattaggaatattaagacagtggttagggatggagagtgcacagcaaagtagtacgctttatttagatccacgacaaatctacagtcaaaatcaattagaattctattttgatttacatgagtatgatgatgccccctgtattttaacggatggccaaggattgattagtcgtattgatccgcaatcaaccttacaatttaaaaatacgtggcactattccagaatgcctaatttagcctatttttcaggtgcatcgttcccatatagtcgccgggcagatttttctcaaaccacattattattgccagaaaatcccacaactgaagagctatatacgttagttaatttaatggcgagatcgggctattcaaccggtacacctgtttcttatatttctgtttttcttggtgcgcaagccttagaaaaaaatcagttagcacaaaaagatatcttggcgattggagagttaggtagtaacggctttttgccaagtgctttttcacaaaaaaccttctcttttataaataaccaacttgagatccaatctccctcattgatagataaagctaaaagttggttagccggtgatccattatcaccaagtagtgatgcggcaaattatcttgctctgttaaatgattggcggggaatgatgagttttatctctccttgggctaaagatcgtgtggtcgttttagtgactgcaaaaggtaatgactcaattaaaaacatcattggtgatttgaaccatgcaaatgtcaatgccgctattaaaggggatctgactttaattagtggtcaagatacggtgatgagcttccatttaggagaacatttttcacagggagacctgcctctattacagcaatttctttggtattgcaccagacatgtctatttgcttggcatgttggcagtcggtttttgtgcgctaacagggagcgtggtttattgctggttacaacgtcgctcaacgcgtcgcctgagtgaaatatcaaagcgccatgttgataaatag

SEQ ID NO: 298206 - DNA, 636 bp, Proteus mirabilis
atgactgacgggattttattagctgaactacaacaagataaggaaattctatttgacataagaaataaaagcgaacaaaaaacctatattattcaaagttgggtatcacactataacaaagaagataatagtgaggcaccatttatcatttctcctagcttaataagattagcaccaaatgataattttacattaaaaattatcaaaacggatgatataaaagaaatcaaccaagaatctgtatatagagtaaatataaaagtagttccagttatagatgatgagatggctgataaaaacttgcttcttatctctttaaactcaatatataatcttttctatacacctagcaatattattaacaaaagtgataataaagatattaatttttttattaatgatgaagattttattaaaataaacaaccccactccttattttattaccatagcagaagcaaaggtagataacattgatatattaaatgaacgaataaccctatcgccatttaaaaattacagtataaaaaataaaaatataactaaaaatatcaaagatagaaaagtacattggaagagagtcgatgagtatgagcagactatcattgcaaccccaaaggaacttatttatgagtaa

SEQ ID NO: 298207 - DNA, 924 bp, Proteus mirabilis
atgagccaattagaaaccgaactcaaacttagtgcgatacctgccgctattcctcagattattcagcgcattctgactttgccataccagcatacaccaccgcataaattgactaatctttactttgaaacctccgataatcagatgcgtaattgggacatggggctacgtatccgtggcattgactctcattatgaaatgacaattaaaacagcgggtaaagtggttgcggggttacatcaacgcccagaatataatgtgacattaaatgagccaaccctcgatttaacccgtttcccagcagaaatttggccggataagaccgatttaacggcattacaagcacaattaaaggttctttttcataccgattttcatcgtgaaatttggctggtggattatttagagagtcaaattgaagtggtgctagataaaggcactattcgtacagcgcaatatgaattacctattgaagagtttgaactggagctaaaaaaaggccaagtggcggatgtgattgctttggcgacttttttaggtgaacaagggggattacgacttgcttcacgcagtaaagctgcccgtggttattatcttgctaaagataagcccgcattatcgttaagtgtggtcaatcttgcacctaatgacacaatagcggaacaactgactaagtggttagcggctattcaagcgttagaagaagctatttttgctaatccgacgccaccaacactcactatgcccgctatgttagcactgttttctgattggtgtaaaaagcagcctcagttacctgaatcaatgcagcaagcactcgataatctttcgttgttatcctttacccgcgcaacggattattatcatgtgttatggctgaattttaaattatctgcaatggcgtggttgctggctatcgcttaa

SEQ ID NO: 298208 - DNA, 954 bp, Proteus mirabilis
atgaaattagaggaagtctttaatttttattttaatggaaaagagagtttcgaacaattttatacattatctttaaatgatcatattaaagaatttaattttaataataaaaaatgttattcaatcagtgatgaattaaaaacaattcaactatttttatctaaatttatttttgaaaatatagagtttagaaaagatttagtttactcttatcgaaaaggagttaatgtagtagattgtatttctcctcataggtttaataattatatatataaaacagatattgaaaatttttttccatctataggctatgacttaataaaaaataaaataatagaaaaagtaaaagatatttcttttttagatacaaatgatgtaatggttcatttatctagaatattagagttagttactatagataaaaaactacctataggtttttcgtcatcaccagctataagtaattttgttatgtatgatattgattgtaaaatagattgttttgctaaaaataacgatttaatatatacaagatatgcggatgatattattttatcaggtaaaaataatttagataagaattcaattaaccaagagattaataatatattgaattataatcaggataatgtatttcatttaaatgataaaaaaacaaaaataataacaaaaaaatttgaaaggaatatattaggtataagcatttctcctgtaggaactctttcgataagtcgtcagttaaaaaaagagatagaagttaaaatattttttcttattaataataaagataaatttgtcaagttttcagaaatggatgaaatgagtgcaatattttctttagctggaaaattatcttatgcattaggtgttgatccagtttatataaataagctaagacgtaaatatggtaattcaataattaataaattaattaaaaataaaggtgatttgtga

SEQ ID NO: 298209 - DNA, 1308 bp, Proteus mirabilis
atgtttatatcactaaacattaaatcattacaacacattaataatgttttattagatttcgatttttccaataggaatttaatttgtataactggccggaatggaatagggaaaacatctatagtaaaatcattatgcttattaaaagatataagtgtcttaaataagacatcttcaattttcagtataaataaagaaactaatataacaatatctataaataaaaacaattatcattattattgtaataacggagaaattgattcaaaagatattattgatgaaagttttttaaatgttgaactccctattccttatggaaaacgtttctctaattttcctgttttaggtaatattgataaagaattaagagagagttatattaagggagagtttaataaaaatatagaaataatttattttttgagccaaatctatataggagagagattctcatcactcaaagaggtaattataagaggtaataagtattattttcttcctcttgatggatatagatatattagagaggattattttagctctggagagtactttgtaataaatttatataagacagtaacttctgattgtaaattaattgttgtagatgaaattgatatttctcttgatgcctctgctcaagttagattaatacaagccctcaataatttgtgtgataaatataagaaaaaaataatatttacaacacattctcttcctattatgagagtgttatatcaacaggttggtgagtctatattttatttagagaatattaattccaggctaattatgagagaagtctcatatagttatattgtgggtgagctttttggttttaaagattatgataaatatattctaacagaagatataatgttggaaatttatttaaaaagattaatttctaaaattgatacaaataaatcagtaaagattatttatataggtggtgcttcaaatgttatagattttatgagaagaaataagcgggaaaactttatttgtgaaagtaaacatatgatttcttttttagatggtgactctcgaggtaaagtatctggagataatatcttatatagtccatttttagatatagaagatgagttttttagaaaatatactgaagaaaataatagatttaatttaccttcaatcggggttgataattgtaaaagtaaatattactgtaaaacagtaattaaagatattggttacgaagctttttttaatatcctcgatattgattttgaagataaaatagaacaaacaatagccgaactaagagaatttattaacaaatga

SEQ ID NO: 298210 - DNA, 315 bp, Proteus mirabilis
atgctggacccaaaaaaaattgaacaagtcgctcgccaaatccaaaatgtactaccacaaggtatcaaagatttaggtgatgatattgataagaaaatccgtgcaatacttcaatctcaattaaacaaattagatttggttaatcgcgaagaatttgatgtgcaaacacaagtgctgttacgtactcgcgaaaaattggctcgtttagagcaacgcttaaatgagttggaagcaggacaacaagcgccagcggaagttgcacagattgaagaagttgatgttattgttgaaactgggaatgacagtaaagcttag

SEQ ID NO: 298211 - DNA, 594 bp, Proteus mirabilis
atggcacagcatagctttatcaaaatgtctaacgatactcttgtaccggctaaccctgttacgagagattttctgcattcaaaaatcaagtgtggtgatgtgctttcagctaattttaagaaagcgcgcaaccctcgatttcatcgtaaatacttctcattactcaacttaggctatgaatattgggaaccagttggcggtaccatttcacctgaagaaaaagagcttgtgcgtggttacatcacattcctttcatgttacacggataatgctgacgcgctcttatcagcatccgatatctatctagaagaagtcgcacaaaaacgtgcgcaaaatatctcagcaacaaaatcatttgatgcttttcgctattgggttgtagagcaagccggttattacgacacgtttgaaatgcctgacggtagtttacgtcgtgtcgctaaatcaatcagctttgcaaatatggatgacctagcatttagcgaactctacaaagccacactcgatgtgctttggaattttatccttcgtaaacagttccccactcaaaaagctgtagaaaatgcagtatctcaattattaagtttcacgtag

SEQ ID NO: 298212 - DNA, 312 bp, Proteus mirabilis
atgatcaaatcaaagaccaaagaagaaagacagtggctatcagatgtagcagaactgggttgtatttgttgtcgcaatatggggcttggggcaagtagagcggaaatacatcatgttagaacagggcagggaatggcacaacgagcaagtcatacagatgttttaccactgtgtccgccacatcatagggcgtgttatgaaaccggctttcatgcatcacctaaatcatggcaagaaattcatggtagcgagattgagttattagaacagactaagcaagaagtaatggagctacgagcatgtcgagtataa

SEQ ID NO: 298213 - DNA, 534 bp, Proteus mirabilis
atgtcgagtataaagagcatatcagatgggttaaaacttgatgatgatcaggttgcatggatccagccttggttatcaaaatttggagcatgggtatattcagggaggatagaaaaaaggcaaagcagtattattgctgaatttatggcgacagtagaaaggcgtgattatcctgagcgagaaatgtgtaatgacgatgacggaatgttgattgctaaagtggtcgataaaatttatcacatagacagaatagcgtttacgctcttgttactgcgttatgccttcggtagttcagatcgcgctattgctcgttattaccacaatatagcaaaaccgcgacaaatgattaggcgcaatagaacggtagaatatagaaaaccctcgatgtctacatgccgaagagaaattgaggacattattaattcagccgaatatttaatttacccacatttaaaagatgcatttaaaaaacgagaaaaagaatggaaaagtaaaaataatagcaagaacgtgttgacttctttgagccaatga

SEQ ID NO: 298214 - DNA, 198 bp, Proteus mirabilis
atgttaaaacatagtgatatgacagaagaggcaagacttgtttttgaagttgttccgcatacgaaagaggtaactgttggcgaagttgcacagtttacttatttaactgagccacgttgccaattgatattaactcagttggcgatggcggggctaatcaaagaaaacatcaaagaaaacacatttcaaaatatctaa

SEQ ID NO: 298215 - DNA, 1050 bp, Proteus mirabilis
atgaaaaatactgtgaatttaaacagtgtaaatttagtcaatgatgactcactcagctatataaaaacacttcccgataattgtattgacttaatcgcaactgacccgccttactttcaggtgaagtcttgtaattgggataatcagtgggaaaacgtaacatcatatttatcttggcttgatgaaatgcttgcggaattttggcgagtattaaagcctaacggtagcctttatattttttgcggttcgaaactagcgtcagatacagaattactcgttcgtgaaagatttaatattctaagtcacattgtatgggctaaaccgtcaggaccttggcgcagggcatgtaaagctgatttacgtagtttctttccaagcactgaaagaattttatttgctgaacattatcaaagtccatacaagggcaaaagtagtgcttatcttcagcaatgcaaagcgcttaaagaaaatgtatttaagcctttaattgagtattttaaatctgcacgtgaatcgttaggaataacagcaaaagaaataaaacaggccacaggtaaacaaatggcttcacactggtttagttacagccaatggcaactaccgagtgagtctgactacaaaaaactgcaggagctgtttcatcgcgtagcaagtgaaaagtttagtagtaatcctttaaatcgtgatcatactgatttgatagaggtgcaggcttctcttagtcgagagtaccaagagcttgctgaacaatatcaattattgcgccgtcctttttctgtcaccgttgatgttccttacaccgatgtgtggacgtatccacctgtgcaatattacgcaggtaaacatccttgtgaaaaaccagctgaaatgatggaacacattattcgctcaagcagtcgcgaaggtgatctggttgctgatttttttatggggtcgggtgcaacactaaagtccgcattaaagttaaatcgtcgagttcttggagttgaacttgagaaagagcgatttgaacaaacagaacaagaaataaaagctctaacttgtaagtaa

SEQ ID NO: 298216 - DNA, 270 bp, Proteus mirabilis
atgcgcatggacaaattaaccaatgctacctacggaacagctggcttaactgccttttttgcaagtctctcactttatgaatggggctttgtaatagggatgggatttagcatgcttcttggactggcaacttatctgatgacacggcgagaacagcgaaaacgaacagcattatttgctgaattggttcatcgaaattgttctagtgatccgcgagaaatcgaaaaaatagtcggtgagatgctgactaaagctaaaaaggacatctaa

SEQ ID NO: 298217 - DNA, 471 bp, Proteus mirabilis
atgaatctaaaacaaaaagtgacagctgttgcgagtgctggtgcggtaagtattgcactaacagtgattggttattttgagggtgtgcgttatgaaccttaccgcgatgttgctggaattctgacggtttgttatggacacactggaaacgacatcattcaaggtaagacatactcacaacaagagtgtgacgagttactacagaaagactttatcagaacgcaacggcaagtagatatcctggttaaagtgccggtcgatgataaaacaaaagcttctctatattcctttgcttttaatgtgggcaccacagcttttgcacgctctacattgcttaagaaattaaatgctggtgatcagaatggcgcttgtgaagaaatgaaacgctgggtttatgctggtggaaaggtgtggcgagggttggtcagtcgtagagaggcggagtcagcattatgcaatggaagcctttaa

SEQ ID NO: 298218 - DNA, 159 bp, Proteus mirabilis
atgcaatggaagcctttaatcatcatcgtcggttttatccttacattactcatctcggttgctggtggcatttatctctcaattgataattcatgtgttaatgataaagccagtttagacaagcgctgtcagatagctctctcacatcatcggtactaa

SEQ ID NO: 298219 - DNA, 402 bp, Proteus mirabilis
atgaagctaggcgaaacaacagtgtccgttggcattatcttggtgatgatcatctgcattgcgtggcaaagtaaccatcttgataaactgagtgaaagtattactaagttagaaaaagataaattatcactcactgaacaactatcacgtcaaaactcaatcacagaaaacgccaaccgaacattcaggattatcaataatgtctcatcaattaatagtgacgcccggaataggtcggtcgtggattctgaaaaagttaaaacggttatcaaaactgttcttgtcaatagtgattgcgccaatactgctattcctagtgatgctcttatcaggatgcacgactattcagaaagaatacgtgccagtggagcacatagcgataccagcacacctaaccgctga

SEQ ID NO: 298220 - DNA, 192 bp, Proteus mirabilis
atgtttaaacatgaattaggtcaggttgtacaggttaccatcagtggtgaagaaggacatatcaaagcccgtgccgaatataataatagccccaatcagtatctcattcactatttgacggctgatggtcgtggtgttgatggttggtttgaagaaggtgaactgtcacctgtagagcctggtattttataa

SEQ ID NO: 298221 - DNA, 1020 bp, Proteus mirabilis
atggcaaaaccggattgggggatgctacaacaacagttcctcgccgaacatgctataacaggaatatcccctaaagagtggtgcgaactaaaggaactaaactacgcaacagcccgacgatatatcaaaatatccagtgcgcagaatgcgcaaaaaactgcgcacaagaaattgcgcactgcgcagaaaaaagaaagcgcaaaagagccaatgcgcaatagtgatatacccactgcgcagagtcatgaatccagtaatgcgcatgatgatgaaaacacctttagtctgcgcaattacgggctaactgaacaacagattaaatttgttagtgaataccttatcgacttaaatcgaacaggagcatataagcgagccggttataaaggcgaaggaaatacagcttatgtaaatgctactcgcatgctaagaaatgctaaggtttcacgagcaatcactgacgcattagcagaacgggaacgcagaacagagataacccaagatgctgtattaaaaatatggtgggatatcgcaacggcagacgttaacgaactgactgaataccgtcgattatgttgccgtcattgctggggctttggtttcaattaccagtggcgtgattcaatagagtttgaagatgctactaaaaaagcgcttacagccaataaaccgcctcctcaagatgtgggtggctacggttacgatgaaacattagatccaaatcctgattgccctcgttgtaacggtgccggtattggtcgtgcgtactttcatgatacgcgtgatttaacagggccagctcgtcgagtatttgcaggagtgaaagaaggtaagtttggtgtcgaggttatcactcgtaatcaagatgaagcgcttaagatggttgcacagcatttaggtatgctaaagaacaagacggaattaacgggtgtcgatggtggtcctattcaaacaacaggaatagatttaagtcacttaagcttcgagcaacttcttcaattgagaaaaaagggtgaaaagtag

SEQ ID NO: 298222 - DNA, 1398 bp, Proteus mirabilis
atggatgtcaatttcgacttgtttgatgaagaagtcaggagagagatagctagacgtagtttgcacgaatttattcagtatataaaccctgaatacatcacaagccatttttctcagacggtatgtgatgcgctcgaccagttcttgattgatatgatggcaggtaagcgccctaaattaatattaggggcaccgccacaacatggtaagtctgatattgtttctcgctatcttcccgcttatttctttggaaaataccctaacatgcgtgtgggtgcgctgtcttattcctcagatttagccggtgatatgaataccgatgttcagcgcattatgatgtccgatgaatatcgcgtgctatttcctaaaagttggttaggcaataagcctgaaaacggaattgcagttaaacgtaattctgacgagttcggtatcgctaatcacaaaggcagttatgtttgtgccggcgtaggtggcccattaacgggtaagaaagttgacctcggcattattgatgacccgataaagaactcgaaagaggcacttagcccaactgttaaaaaatcaatttggaactggtacgtttcgacctttaagacccgtttatcaaaaaatagcggtgaaattatcatggccactcgatgggcaactgatgatttgtctggtcaattaaaagaaaaagcgcctgaaaccaaggtgcttgcattccctgccattaatgagaaaggagaagcgttggtaccagagttacacccaatcgacaaactccttgagacaaaagcaatcctcggtgattacttttggtctgcaatgtaccaacaatcacctaagccgggtgatggtcaaatcttccacgaagaatttgctcagtactatctaccgaaagacctacctgaaaaattcgataaggttatccatagttgggatatgacctttaaagacagtgacggtactgactatgtggtggggcaggtatggggcaagaaagacgcaaacgcttatctactgtatcaaattagaaaacgcatgagctttactgaaaccttaaaatcggtgaaatggttagctgaaaaattccctgaaggacgacgtaagctggtggaagacaaagccaatggccctgctgtaatcgactctctcaaatcaaccgtatcagggttaattcccgtcgagccagatggtagcaaggttgctcgtgctcatgcgtgtactgctgagtgggaggctagaaatgtgtggctacctcacaaagatattgcgccgtggattgtggaaaccgtagaggaaattactacattcccgtttgctggccatgacgacacagtggatgccatgacgcaagcattacgcgatttatatcagaagaaaaaaggtagtttcttcacaactaagaggtaa

SEQ ID NO: 298223 - DNA, 1503 bp, Proteus mirabilis
atgtggtggccgtttaagaggcgaaaaacagaaccactcgcaccggttaaacggtcagcattcacaactgacttatatcctgcgctggcgcgagaacagggctttgatgggattaatttaccccaacccacaattgcaggtgttgcgatggatagcattgatagctatgtgccctcatttaaaggtgagcaggtttacggtgtgccagagtcacaggtctcatggtatgcctcacaaatgtttatcggcaacaatatgtgtgcggttatcgctaaacactggctggtggataaagcctgtaatatgcccgcgcgtgatgcgatacgtcagggttacgatattgattgtgataacgacgatgatcgtgctatcagtaaaaagcttcgcaaacgagataaaaaataccgcattacacatcagcttaaagaacttgttcactttgggcgtgtatacggtggtcgtttagcattattcgttgtggagacatcaaacccgaaagagtggtatgaaaacccgtttaatatcgatggtgtgaccaaaggcatgtacaaggggattaaacagattgatccacaatgggtaacacctgatttaacggacgccaatgttcaagatcctgctagcatggatttctacgagccaacctattatgtgattggtgggcgtaagtatcacaaatctcactttattaagtttgtaccgtttcctgtgccgaatgtcttgaaaccaatgtacaactactttggtgtttctgttcctgagcgcatttatgagcgtgtctatgcttcagagcgtaccgctaatgaagcgccacaactggcgatgactaagcgtttacttacgatggggatcgcagaccttgagtcggcagataagagcattatcaatgaaaacatgctctattttatggagatgcgcgataactacggtgtgcaaatgacgggcagtggtgacactgttcaacagttcgacacctcattagcggatttagacgccacgattatgacgcaatatcagctggtggcatcggcttccaatgtaccggcaacaaagctattagacactacaccgaaaggctttaactcaacaggtgaatacgaagaagctaattaccgcgaagagcttgaaagtatccaatcaaacgaccttgaagagctattacagcgccattacgacatgctaatgcgtagcgatggtttacctgtgacagaaatctctatcacatgggcgccacttgatagcccgacggctgttgagagtgcggatattgaactgaaagaagcgcagaccgatgtggcattagcttcgaccggtgcgatagatgggttagatatacgtaaaaaactagcgagcaataaagcgtccagctattacggcattgaagtgaacgaggcagattatgtcgaggcgaatacgagtacgaacgaagcgagcgcagtgggcaacatctcgccaaacagtaatgaaggggaagcccctgcagtattcagtagcgccctctag

SEQ ID NO: 298224 - DNA, 735 bp, Proteus mirabilis
atgtcacgcctcattaattcaatgattaaagactatgaaaaagtgtttagcgaattaaatgacgactttgaaggttttacgatggatgccagctttgccagtcaaacacgcatctggcttaatcggctaaaacgcaaatgggataagatttttaaacaaaaatccacagagattgcggataaatttgtttcccaagtcgatataggcgcaaagcgtaatttagatgattctctcaaacagttgtcaggggggatcaccattaaaacccctgatatgcccgaagccttgaaagataaaatcattgcctctacggctgaaaacgtagcactcattaaatccattccactgcaatttcatcaacgtattgaaagtgcagctttacgcgctattagccaaggtggtgaaggtacaaagacgctattagaggaaattcggcaaacaggcagtgtgactgaaaaaagggcgaattttattgcggttgaccaaacgcgaaaaattacgacagcggtgaactatgagcgcatgaaatccgccggtattcgtaaagccatttggcggcattcaggggggagtgcagaacctcgacaattacatcaaaaactcgatggtgaagtgtttgatttagataacccacctgtgattgatgaacggacaggtgagcgtggcttgcccggacaattaccaaactgtaagtgcttctggacacccgtaatagatttcggtgaggagacatga

SEQ ID NO: 298225 - DNA, 1260 bp, Proteus mirabilis
atgaccaaacgacaatatgatttaaacggctggctggaagtgaaagataaccccatctctaaagttggggtttttgattatttagggtttgaaattggcgcaccgatacccgaaaaaatttacaaggtgtatcgcccacaagaagaactggccagcacagagacaattaattctttcaaattaatgccctttgttgatgagcatgaaatgttagggaaagacggtacacccgcggagacaaaggggatacaaggggtcatcggggagcgagtctattttgaatatccctacctcagaggcaatatcaaaatcctgtctaattcagcgcttaaccaaattgaaggaggaaaaattgaattatctccgggttatcgctgtgtttacgatttcacaccaggcgaatttaacggtgaacgttatgacgccatacaacggcatattagagccaaccatcttgcgttagttgatgaagggcgcactggcgctgatgttgctgtgcaagaccattccgttattaccatagacacaaaggaacttattcgcatgaacgaagaagaaaacaaagagaagcaaaccactgatgagggtgcatttacgcccgagcaattggaagcgttaaaagccattatcaaggaagtcatcaccagtactcaacctgcaacagataatgatccagaagaagagaaaaaaccttcaactgattctgatcctgacgaagagcagaaagcagaagaagcagtggaaaaagccgaaattgccacagaagaggctgaatctggcgaacctgaagcagtcgagaaagccgaggtcgccattgaagaagctgtcgaagcgattgaagaagccaaagagcatcttgaccaagccactaccgatgggcttcatcgtcgtttaaaacgcttaaatcgtagcatgaccgccatggacgaaatggcatcgctaaaacgtaaaattaagcgattagaaaaagccaaacccgcaatggatacgggggagttactcaaacaaatcggtgcgcgtgattcgttagcgcataaattaacgccatttattggtgtgtttgaccactcagccatgactcaacaacaagttgcagagtacggtgttgaaaaactgggtattcaatgcagtaaaggcacagaagccattgctcttgatgcttggatgcaagggcgtgtgcctgattctcaaaagcccagctcaacaatggactctgcagtgagcaataaatcaattatggataaatggggagctaaataa

SEQ ID NO: 298226 - DNA, 498 bp, Proteus mirabilis
atggcaattcctaaatcagtagcagatggcttaatttctggtgttgtcggtgaaattagtcatgcaggtcctattcgcgctgtttccgccattctcagttcagcagatgaaaagctgaatattttcggtcgcgcctatacctacaaagatgattccgtggaatctgttcaagtcgggggtaaaggggcatttgcggggatcatgattaaccctaaagcctatcgtatcgaagaagtattcgctcgtaatggtacgcagggcgaattcctgacaatgggggaggttttcgttgaactaaaagaagtggcaggaaaaatcaacgcaccggtggtttttgatgaagctgacggctcattatcttctaaagccaccattagtgccggtgatcgtgtcattggttttatcagccggcaccttgagtcaacagaaagtgctcacttgggcattattcgtttaacagaaatcccatatccagcatctccaaaggaaggtgaataa

SEQ ID NO: 298227 - DNA, 1068 bp, Proteus mirabilis
atgccagccagtaaaattaagtttcacatgtctggtcgtgatgtcaaaaaacatggccaactgaatattaaccctgatcagaaatggacatacggggaattagcgcaaatcggctttggtggtttttctgcgatggactccgcaattagcggtggtgcaatgcaggggggcttaattcaacgcgaaatgttgcaacacgttttaccgggtgtcattcgtaccgcaacgcgtgtgcgtgtgttagatgaaatcacgggtattgttaatgcgggcgaatggcatgatgaagagatcattctgaatgtggcgacaccaacgggtaaagccgagctttatggtgatcataccaatgtgccattagcgtcttatgcgcaagaccaagagcgccgtggtcttgttcgtttcgaattaggtttccaagtggggaaattagaagaagcgcgccaatcgtctgcaggctttgttgctatggaagaaaagcgcaattcagtgactgaatcattagagcaagggcgtgagcgagtgggttactacgggtttaatagccctgaaacacgcgtctttggtttgatgaatgagcctaacttacccgcctatgaaaccgcaaaaggcaaatggaaagggggaacctttgcggatattactgctgatattaccgatatgttctcgcgcattgaaacgagttctggcggtattatcaaagatgatacgccaatcaccttaacattaccgttgggctttcgttctgctctgaatgtggctaatcctgtcgcacgcggtgaaacagtcaaacaatggataaatgaaaactatccaaatatgcgtctggttttctctcctgaatttgtcggcgcaaatggtggggctgatgtggcctatatgttcgcagatagtattgatgatggttcaacggcaaccagtgcggtgatcttgcaagttgtgcctgtgaaataccagttattaggttcactcaaccaaattaaagggtatatggaagatgcaaccaatgcgactgcaggtgtatttgtgacccgtccgtgggcggtgacacgcttaaccggcatttaa

SEQ ID NO: 298228 - DNA, 342 bp, Proteus mirabilis
atgcctctttacgcatattgcaccttatcaaatgaccagaactataccgtgaaagacgggaaagtgtttattgccggtcaagcgaacgtgatgaccaaacacatgtacacaccacgtggtcgtgtgacggaaatttctgacgagcaatacaaacagctcaaagaaaatcacgttttcaatcttcattgtgacaatgggtatattaccgttgaagaacgcaaagaagatcccgaaaaagttgctaccaatatggaagcgagcgaccaatcagctcctgacacaccagaatcgttagaagctgaaaagttagacgttcctaaaaccaacaaaaaaggtaagtga

SEQ ID NO: 298229 - DNA, 432 bp, Proteus mirabilis
atggagacgagcacatttcctttaacgtcattccgtgtgctctatccgcagtttaacggtgtgggtgatgatgaaatagatatcattgctcaatctgcgttgaactatttctctgcctgtaagggtgtttgcactaacgagctgtggatgctcgttgttgcacacatgctaacactcagaaaaatgattgctgatgatgagtcgcctaccggtgtggtgacgagtgtgactatcgataaagtgagcgtgtcatttacggcaccgcctgccggttcggattggtcgcactggtttaaaatgaccacctttggccagcagtttcttgcactgatcaaacgttgtagcgtccctcaatatttgggtggtggtggcgaacgttcagcatttcgtggtgtaggtgggcgatttacgcgaggagggcgattacgttaa

SEQ ID NO: 298230 - DNA, 459 bp, Proteus mirabilis
atgactaaattagcgcaattaaaagcggtttacgatgaattggctaaaaagcgattaagtgttggtttttttgaacacgcaaaatatcccgatggaacacctattgcttatgttgcagctattcaagagttgggctatccggctggtggcattcctcctcacccatttttacgtccgaccatgaatgacaaaaagcaggattatagtcagttaatttttcgtgctgtgaaagcctctattaagggaaacatcacgctggataatgggctgacacaaattggtgcgacggtagcgggagatgtgaaaatggcaattaaagcagtcaccaccccagcgctggaagagtcaacggtcaaagcaagagcacgtcgccatagcaaaggtaaagccacggataagccgttagttgataccggccaaatgcttcaagccgtgtcatttgtcgtggaggataaataa

SEQ ID NO: 298231 - DNA, 372 bp, Proteus mirabilis
atgtttggtaacttaaatcgtattgcttcacgttatattccccagcaaaaggtgctctggtttcgatttaaagaacgggcacccgatgaacgagggaatgaccaaaattattattatgatccgatagaagttcgtggcagttggcaagcggtcgatacccaagatgttcaatccatgggattagatacgagccaagtgtaccgacgcttatatacctctcatgatattaaagcggtgcaacgaggaacatctcctgatttccttgtattcaatggtcgaaaatatgatgtggtgggtgatgcagactggtacgaacaagacggttggaaatcggtgatctgtatcgaggcgggtacttatgacggattatga

SEQ ID NO: 298232 - DNA, 516 bp, Proteus mirabilis
atgacggattatgaagttgatgtcgccattcgaaaacagctcttgtcgcagttaaaagtggtcggtattgatatctccgttaaagctggttttcaatctactaagcaaggccgtgaagataatatggtgatgttctttcccattaatgaaaacggctacggctggcaagggcgtaaatataacgttcaaggcaataaagctaatcaccaagaaaaccagttatccgaaaaaacgtaccaagttcaggctttcgttacccagttaggccattattcagcgagtgatattaccgctattgtcagaatgatcgccaattcattgccctttgttgaagctctccgcaaacaaggcattggcgttcagcgggcaagcggtattcgaacaccttattttctgaatgaccagggcaactacgaacaaaacccctcatttgatttcaatgtgacatttaatcgcacacttcatcctgatacagacgccgtgagtgcgttgtatcctgatatttatcgtatttaa

SEQ ID NO: 298233 - DNA, 1488 bp, Proteus mirabilis
atgtctatcaaacaaactcgctatgttgatatcgcgagtgcggtgattggcgcgtctgctgtaccgatgcgtaagctcacggctcgtgttttttcaacaaaccctaaaattcctgctggtaaagtgcttgagtttgccagtggccaagtggatgacttattaggtactgactcccccgaggcgcattttgcgcgtcagtatttcagctatgtcagtccagcaccggcaagtaagccgaaagaactgcaaattgcctcttatgagcctgttggtcgagcgcctaccttgtttggcgaaaagacaggcgatttagctgatttaaaactgattaatgagggtgaactcaatatcactatcggcaaggtgaccaaaacaatcactggaattgatctctctgaaagtacgtcatacgcggatgttgcaacagctgtacaagcgaaattaaatgcagaaagcgagcctcaatttgctagcgcttatgtcacatttaattcgctggatagtgcctttgtcattagcggtggcgtacaagagcgtgcagatattagtgtgcgtcaatcggtacttgctgatgcaatgaatattagccacggcacatcatcagccggtaatccagcgcaaactccgttacaagcctttattgcttctgaggctgtttctgactcttttggtagcgcaacgtttttaacggaactctcattagagcatgccgtagagttggcgcagtacgtggcaggcgaaaacgtgaagtatcaattgcacctgtctgtgaccaatcaaaatgcagaagattttagcggggcgttggtgggtacggcttcaacgggcttaaacctaaaaacagcagataacttctttgttcaagcgttacctatggccattatgtccgccacggattatgaccaaaccaatgcgacaacaaactatatgtatcgtcaatttggtgtcacgttcccatcgcaaatcacgaccgatatcgatgcggatcgcttagataaactacgggtgaactattacggagaaacggcggtatcgggttcacatatcagtttctatcaacgtggcttcttatgtggtggggttgctaacccattagatatgagtgtccatgccaacgagcaatggctaaaagcctatattgcgcaacagtggtttagtttacttatggccacacgcggagtacccgccaataaagacggtgaagcacgggcgatgatggtgattgcgggggcggtgaccaaggcgattaataacggcacgatcctagcgggaaaaaccttaaccgatgtgcaaaaaattgcagtgacagacgcttctggtgatgatttagcgtggcacgatgtacaaaacaaaggttattggtacaacgctcaaattgttgaaaatacaggaccctctgatttacccgagtacgtgatgaaatacgtattgatttacggtaagggcgactgggttcgtaaagtcgaaggctctcacaacttagtgtaa

SEQ ID NO: 298234 - DNA, 453 bp, Proteus mirabilis
atgcatgatgtatcagcaactggcttgagtattgttattcaggctcataaaacctttcccgccggtattcaaattaccgccttcgcagatgatgccgatccgttagatttgcctgccgtggacattgcgcaaacaggaatggatatcaacggtaatttggtgacatggtcaacgccaacacctcaaacggtcaccattaacgtcctagcaggcagtgaagaagacgaaaacctcgctatcttactggaatcgaacactgcacgacgtggacaacggcatgcaggggatattatcaccatggtcgcttcgtatggtgatggttcaacaaccacggcacgcaacggcaaaatcactaatggtagtcgtggtagctctgttgctagtgcaggacgacataaatccaaagcgtataccttcgtatttcaagacttcgatcgcactcgcgcacgttaa

SEQ ID NO: 298235 - DNA, 459 bp, Proteus mirabilis
atgttaattaaaccgaaagaaattacgatcaccgatgctgatcgtgaagagcacacttttattattagccgattaccggcaacgattggacgtgaaattctggcgaaatacccgctatcgaatgcgcctaaaattggcgactatgaagtcagtaaagaagccatgttaaagatgatggcgtatgttgctgtcgaaaaagaggggcaagagatttatctgaagaccagcacattaattgataatcatgtacccgatggtgaagcccttattcgtctagaactggaaatgttgaagtataacaccagttttttcggcaaagacgggagccaaggtttcctccaattcctgctcaacaaaatcaccggttcactcccgtcgattataaaaacgctgatggcttctttgccgtcatcatctcagccggtttcgccacgctcaccgaactcaaaacgtcaatag

SEQ ID NO: 298236 - DNA, 2352 bp, Proteus mirabilis
atggctttgctagatacttttgttcaagtattcgaatttgatactcgccaagccgatgatgcgtttaatcgggtgagtaaatcgaccgatgacattatcgctgagatgaaaaaggcgcaacaatcggcaacgatgggcgctgatgggtttacgcaatttattcaaaatctatccgcacaattgacagagttatcatcaaactcagtcgatattcatgttaatagtgacacatccggagttgctgacagcttgattgcggagatagatcgcattaaagaaagtgcgacggacaattcgcaatcggtgaatgactttattcaaagtgtgattgccagtattgaacagttatcagcaggggaggcgataaatattgaggttgaggcaggtgatacacaagaaaaaatagcctcagtcaccgctaaaattgatgaactaaagtcatcaataaacttgcttgatatccaacgtaacgaactgtcacaaggcgtaaatgaaagccgtgtttcatctgaaacgctcaatgcccaatatcaacagatgcaagatgagttatcccttctcaataatgaattggtgtcgctcactgatgcagagaaaaagaaccgtgaaggtaaagaggtcattgatgccattgttaccgcattaaatgccgattatacgcaatttattgaaacgatgcggacaaaaggtataaagacagcgattgatgaagctaaagcccaagagcatctacaaaaagaactttcagaaaccggctctaaatatcaagaggccggaagttctgttgcaggatttgcgacaaaagcacttggcgctgtcggtattgtgatgagtattggcactatttttgccgaatctgtttctcgttctcaagaaattgaaacgctggacaagctgggtaaacaaatcggcgttgcgactgcagacgttgatgcgttttctggtgcgatcgctgagttaggtggttctagagagtctgcacaagccgatttatccgcgatggcgaaatcgttcggtaatacgaaagactcaatggaaaaggtacttcaaaccgcggataaagttcaaggcatgagctttgataaagcgaagaaaacactggaaggcatgggggtatcggacgaaaaaaccattgaattaatgatgaaagggcgtaaagaattagagcgcacaatgggtattcaaaaagagtattcaggcattagcaaggagagtattgaaagctctattaaatttaatagtgctatgggtaaatttaagcagtcatcaggaatgcttaaaaatagctttttagaaatggtcattcctgcacttgcaaaaggactggattggctaactaaatttatttctttctgcaaagaaaataaaaatttattaataggttttttctcagccgttggtttggccgtagcactttattacgttccccctatgttagctgctgcatcagcaacacttgcagcaacatggccgattatcgctattattgccattattgcgcttttagctatggcatttgcgattgtttatgacgatatcatgaactttatcgacggcaatgattcaatgattgggcgtattctcgacaaatatccacagctaaaagtcgttattcttgcactatgggaaacattcaaaaagctctttgaatatctaaaagctatcgttggtgttgtggcagatattgttgtcgctggttgggatctaatggcatcaggcttaaaagcttatgttaagtatttgctgagttgtatttcagtcattgcaggttggggtaaatcctttgcgggtgtatttaatacagtcagtgatgccgttgtgagtgcgtttgaatggatgtgggagcaagtcgaaaaaattattggttgggtaaatacaggacttaatgcggttaaaaatggttggaaatccgccaaagagtttttcggttttggaggtgatgaagctgaaattaaaattacctctgatgatgcgagtaattatttaagcgccttatcggcaaaacgtaatcaggtagcaagtgcaggaatagatacatcagaaattgataaggaaattattgaactcaagaagcaattagacaatggactagacgcatcaaaaattatagcggatgttgaggaggcgaataaacgtttaatgatggcaagccatgatgcaatgaatcctattaccagccaagctattagcaatcaatccaatgtgaagaatgaaagtaacgtaagtattggagaaattaaggttgaaactcaagccacagatgcgcagggtatggtatcgggcgtaaaggatgcattgcaagatcaactcgccgatttcaatcagcaaaactcaacgggggtagcaaaatga

SEQ ID NO: 298237 - DNA, 528 bp, Proteus mirabilis
atgatcacagaggtcaaaatttttgatttagcgtcgttttctacactatttgatagtgtgagtccgatccaaattaatgtgagagatgagcataaagcgacgcaatttcaagttgaaagtggtgaaactcgcagtgatcatgtgattattaaccccgttgaaattggtatagatttgctattaacaggggagatgaaaaacatcttctcatcgatgcaacaagcttttgatgaacacaaacttgttggtattcaaacccgagtaaaaacctatcaaccaatgttattaacgggttttaatcatgatgaaatacccgacatgatagatgcgataaaactgtcgctacggtttgttgagtggcgcaccgttgagcctgaatacggagagctaccgcctcgagccactcaaaagccaacgcagtcatcaacggtaaatcggggaaatgtgcaaacaaaagacgccgatactgagactaagaaaaaaggttcggtcgcaacacgtatcgcagatggggattggagcttctaa

SEQ ID NO: 298238 - DNA, 318 bp, Proteus mirabilis
atgaaagtcatacccttaaaagctattccaaaccaacgcttatccgtcaatttggaaggtgttaattggacgttgacaataaaagccggtcgccatgcgatgtatctcgatattgaacgagaaagtgaggttatcgccgtaggcatgcgtgcggtggcaaacacacctatcattccttatcgctatctgactgatggtacaaatttagcgtttataacagaaaatgatgatctgccctggtataaatcatttgatagaacccaatcattaattatttggagtgatgatggacttacgacgaatacgggtggggattga

SEQ ID NO: 298239 - DNA, 813 bp, Proteus mirabilis
atggacttacgacgaatacgggtggggattgaagttgcagaacgattgcaatggtatgaaggattgcgtattaaagccaacggtaccaagtatgcaaaccccttacaaaatgaatgcacagttagcattgatggattaaacgcccacactcgagattatctgctcactgaaaccagcccttatcataaaagcaaacaaactcgccgtctttaccttgaagtaggacgcgtcaataccggattatttcgtatctttaccggtgatattgtcagtgcagaaattgcctcgcctcctgatgttacgttaaccattaaagccaaaactaataatgccagttcaggtgatattgtttcttcctgtggtggtgccatgcagaaaatgagcgagatcgcatcatcggtggcaaaggattgcaaggttagattggactttcaagccaccgataagaatattgccaattggtatttttgcggttcagcgttacaacaagtacaacgactgcaggaagcaggaaacgttaaagcctttattgatgatgatacgttgtttgtcaaagatgataaccaagccttaaaaggtcgtctgcgcattcttagcatgaaatcaggcatggtgggtataccgaaagccaccgaaaaagggttgtctgttacctacttaattgatggcgcttcagaactagggggaatgctacgacttgagagtaaattcaattccgcacttaatggtgactacatcattgaacaactgaaattcgatgttgcttcacatgatgatcctttcttttatcaggctacctgtaaacgagcataa

SEQ ID NO: 298240 - DNA, 693 bp, Proteus mirabilis
atgaataaacccaatactgatattgccagtgatggttcgctggcaggtgcgctatcgtctgcatttcgtaacttgatgatgaatactgaagatatgctccctgcaacggtggtgagttatgacgataaaaccaatcgtgctgttatcaaaccactggtgatgatggtaacaacggaagggggaacagtcggacgtgcgccattggccaacattcccgtttttagatttgggggaggcggtttctttattcgcgcacccattaagccgggtgatttcggttggataaaagccaatgacagagacattagcctgatattccagcgtggaggattggaagatcaacctaataccgcacgcctccattcatttagtgatgcgatgttttttcctgacaccatcaaaggttgggtcattgatggaaaaaacattgatgctttggtgatccaatcaatggatggctcagtctgtttctctctgcataacgataaagttgtgttggaaacccctaagtatgaagtcaaagcccctgaaaccatatttattggcaatgtcacggtaaatggcaattacgctgtaaatggtaatagtgattcacaagggggaaccatgcgacataacggaaaagatatcggttctacgcatcaacacagtggtgttgaaaccggtcatggaaatacaggagcgcctctatga

SEQ ID NO: 298241 - DNA, 345 bp, Proteus mirabilis
atgagaacattttcaatcgataaaaataatgatctctttatcggccctgatggaaacctccaattcagcgaaaaagacgatgcggttaaaaacctttgtcagcattttgccaaggctgtgcgtggtgaaatgttacataaaaaagataaaggtattccgttctggccaacaacctttggtcgccaagctgatatcccgatgtttgaaacggcatttagacaacgtatgagcgaaattgaagaggtggttgaagtgacgcattttagcgccacagtggaaaacggtgaattgaagtatcaagcaacaattcgcacgatatacggagggtttacactgaatggctga

SEQ ID NO: 298242 - DNA, 1188 bp, Proteus mirabilis
atggctgattatcgttatatcaataataaaggcgttattcttcccgacacggccacaatacgtgatgaagtcgaaagcgagtttcgtgcggtgtttggtcaatcgattaaccttgcccctgaaacaccgcaaggggcattagcgacgatggaagttgaaaaccgtgatgcaatggtgagaaacaatgccgagttagcaaatcaaatcaatcccgatattgcgggtggtgtttttcttgatgcaatatgggcgctaatgggtggccaacgcattaatgccactcactcttatctttccagcgttgaatttagtggcgtacctggcaccattattcctaaaggctcattagcgtctagtgttgccggtgccatgttcgaaacagtttcacccttgattattgataataccggcaaagcaacaggggatatgagggcggttgaatatggtcctgttgaatgcggggccggccaacttaattctgtggctagctcagtattaggttgggagaaagtcaataatcccactcatgcggttgttggccgttatgctgaatctgatatcaaagcaaggcgacgacgtaagcaaactttggctaaaaataccgtcagtgttgcagaagcgatcacctcttcactgtatgaattagagggcgttaattcactctcttttcgagagaactacaccgatgcggtgctcactattgatggaatttctctattgcctcacagcatttacgtttgtgttgaagggggcgatagtaacgaaattgctaaatcattgctgagaaccaaaaccattggatcggcttttaatggcgagattgaaatcggtgttgtagagccagtgagtggacaagaatataaagtgaaattttcacgccctaaagagatcaccgttttttgtcgagtgacagtgaaaaaatcagccgttgatgcgcaaactattatccccagtgccatagaacaatggacgcgtggagagttggacggcgataacggtttgattgttggacgtgaagtatcgccttttgagatagtgtctgcagtgaatactgttgaacctcgtctgttcgtgactaaagttgaattgtcactggatgggaaagtgtggaatgttgcattaattccgattgccattaatcaaatcgcacgcttgcaacggggtgctgtgcaagtggtgattgtatga

SEQ ID NO: 298243 - DNA, 657 bp, Proteus mirabilis
atgaacgttcaacaatttgagttccattcagacctattaaaagcgatcctctggcagtatgaagatgcagagaatttaaagaaactcgccagttttaaagcctctcattttgaaaagtcgatggtgtcattttggcaaaactggtaccgagatgtgtttaatatcgatacggcgaatgactttgggttgtcgatttggtcacgcattctggatgtacccttaggtattgatattccaccgagcgataaaaataaaattgggtttggttttggcaaaaagaaagccaattttaaatccaatttccgacgtaatgcggattacaccttgtcactgactattgatcaaaaacgcatgttagtacgaatgcgctattttaatctgacacagagtcctacggtcaccaatattaatgaatttttaaaacgtttcttttggcgtgatgacagcaaagtttttgtccttgatccgctagacatgacttatatgtattacgtctttaacttcaaccctgacgaacgtctacgcgttcttctcgaaaacttcgacttaatgccacgcccttcgggggttggcgtcaaatatcgcattgtgaccaaaaaagcctttggcgttggtcagcatcgtaaaaacttcttaggcagtaacttcggagcataa

SEQ ID NO: 298244 - DNA, 1383 bp, Proteus mirabilis
atgacaactatttttaaaaccccctttgcaacacaaggggataaggcttctatacctgtagaaatccaaccagacggctcagtgtcttatacacaaggttatggttacgactatgagcgtgaccaagtcacagatcctgctgcgaaagatattgaacgtgaaaaaatgaacgggatatttcacgatatcacggaagcgattggcgaaattcagcgatttggttttcccaaatgggatgaagccggtaagccgtatgcgatacgcgctattgtgtatcataaaaataaagtctggcagtctaaagttgagaataacaatattgagccggttgccggtaatgcatgggcagagttaaaagcggatgccacagcaagtgatgtgggcgcatattcaaaaggggaatccgataaacgttttcaaccattaggtaattacacaccatctggttatagctactcaaaggcagaaaccgacaccaaatatcagccaaagggtaattatgctcccgcagggaactatgccaataaaggggatagttacactaaaacggaaagtgatagccgatatcaagcaaaaggaagttatcaaccatcaggtgattacgcgaccaatacagcactaaacagtgggcttaataataaatttgataaaggtaatgtagttcaaagtacgggaacgtcaacggttcatgtgatgagccaaaaagcgtctacggatgcttttcaacctaagggaaattatcagcctaaaggtaattatgcgttagtgggtgctgcatatacgaagactgagtcggatggccgatatcaagctaaaggaagttatgcaacagctggaagtagctacacaaaaacggaaagtgacggacgttatcaacctaagggaaattaccaaccagctggcaattatgcgctagtaggcgcatcgtatactaaggcagagtctgacggtaaataccaaccgaaaggcagttatcaagcttctggttacagctattcaaaatcagaatcagatggtaagtatcaacctaaagggaattatgcaactgcaggtagtagttatactaaaaatgaatctgatagtcgatatgatcgaaagggtacaggacggcagtggcgaaaagttggggattttaatggtgcagctgcagtaacagagattacattaaacgaaaatatattaggtaagtacgtttacgttcaaagggatggaagtggtaatacatacacaggctttcttgtccccccgttagcaaatattaagatcgcagtatctgttcatgcggctgctttttgggaatttcaagtatctagcgatgggaaaaagttaaagatgactgatagcacatatggttcagcgaaaggagtatatgtattagattaa

SEQ ID NO: 298245 - DNA, 1008 bp, Proteus mirabilis
gtgccggacattcgtgaagataataagatattaggtaaatacttacataataaattccctacaatcataggtgacttatcttacttgtttatatctgtaataagtaatgataaatacaagcaagataacccctatcataatattgttgttataataggagaatcatcattatcatcgcgttaccattcttatggatatgagaaaaacacaactccaaatctagataaaatgattgataatgggataggttgtatagtcaacaatgtccattcatctgcgcctattacaagagattcaatatccatgtcattatcatttaactctccagaaaatgatgaaaaaatgttttccagaaaaaccattattgatatggcaaaagactctaattacttaacttactggattggctctcagtctttaaatggtgtttattcttctaaatatggctatatagctaaaaaaagcgatcatatttttctaacacaagaagaagatgacaaaataccagatatcttagaaaaagaaataaataataatagtgaaaataaatttatagtaatacatttattaggtagccatcttccatatacaaattactattataatgataaaaaaaacaaccctgacatggatgattatgatttaacaatattaaaaactgataacattataagaagaattcaaagtatagtagagaattctggcgattatattttaatttatacctctgaccatggagaaattgtaaataaaggtcatggttttcgatatggaaaagatcaatttttaattccactatttttatttactaatcaagaccaaaaaatctgtaaatatattaataaattcagaaataacaatggctggttaaatggaaatatgaataaatatatcttatcagaatttttaggctataacatagatgaaaagcacctcaacaaagaaaaagaacaggataaaatccttaatgctaatagtgaaattatgctatttgaacaaatagattaa

SEQ ID NO: 298246 - DNA, 783 bp, Proteus mirabilis
gtgtttgatgatatccatagtatgtcctccgcgaaagcatttgctgatagcctcaatactttatcaactcaatactatggttctgccggcattcactggctcgaacagcttacacatattgaacgttcagagttaatgccaaagcttgaggcatatattacccaatttaaggctatataccgccccgataatgcaagttctcaacttgaccgagtattagagcgttttgcgctatgcgctgctgcgggagagtatgcgactgagttgggcgtaacaggttggggcaatggtgaggctattaatggtgtcggggagtgcttcagtagctacgttgaagaacgaggaacggtaggggatttagaaagcgttaatggtattaggcagctttgcgcctatttgagtacacaccgcgaatctcgctttaagcagataagtgtcaattcgtcgttatctacctttgacggctattatgttcgaaatcaaaccccagatgcttcaattggtgactttgtcgatgaaaccacggataacaccgatgaagttatagatgctggtggtgtgtactgggtaacggctgatgctatgcgagatagggtattagccaactgtaacatggaaatgacattagccgagttgcataaagttggtgcgctaattggtgttaaagaagcccaagagctaaatgggcagtttaaatttgaatataacccaagggcttacaatcctatcgacggtaagcggaagcgttactatcgtattgatgaaacgaagttagaattataa

SEQ ID NO: 298247 - DNA, 1974 bp, Proteus mirabilis
atggcagataaaatctactattcccgaggtcgggataagttcgacattacgcccgaacagcggtgtgcagaggatgaggacgattttatcaataaaattctgtccgataccgctaaagcaaaatatcagcaatatttttgtgctccaatggcaacaggtgaacatcctcgagggcaagacccaaaagaaaagtatcctgaaaagtttcaaggtactaaaccttggcgtttatctttacttgccgctaaacgtcgattcatcagctttgattgtgacagttttgatagttttaaaacctaccaagcactgctcagctatttacaaaaaagatataaagggcttttatacaccacattcaactacaccgtagaagctcctcgatgccgctttgtgctgatgttggatagtgaggttgaccgcaatcaagggaaactagtcagtaaagctattgaagtagaaattaaccaagctttgagttcattggctgaacagttaggtgactcttcatggagtccaaccattgggtgggatgaatcggtatatcgtgcagaacaacagtgctatttaccgataaagaatccgttgaataaagaaattaggaaaggcgtaccagttactgatgcaattacctataaattcgatggtgagctagtcaatgttgcagaatgtttagagtgtgcggatacgctagagctaaaagcacctaaaaaatatgagccgaacactgatgattttaccgattttgataattggcttgatgttgatgaacataccttagccgatttacaagatgctttgttttttccgccaatggttgaaatatcaaaaggtgggcgcactgactggcaaaaagtgttagcggcactcggtagtctaaaaaatacgccttatgaagatgaagcctatcaactggccttatcgtggtctattactggcggttctacatttgatgagcaagcattcgaggatacttgggctacatctagagcagatttaaccagctataaagctgtttttgcaaaagcagatcgcttaggttgggtaaacccgcaaaaattaagaccttatcttgagattaaaaaagtcgggttatacatgactgatgaagggttaatgctcaataaagaggaagggacaggtaagaataaaatcattgttactaagcaagtttccgctttattttcaattcgaggcttaactcgtgatgcgtatagcgataactggggtaaattaattacgtttaatgatagggattctatacagaagcaatttattgttcccgatgagcaattacataaacaaggtacggatatcctccagcggctcgctaacttaggcttgtggatcaacatttcacaaagtagagcgttactcgattacttcaatattacaacagcaaaagaacgcattacattggcagatacaacaggttggtttaatgctcatgcatttgttttacccgatagaacaattggccctaccgacgataaaatcatgtaccgtttatcgggtagaaagaaaaccgaaagcagccaattatctcaattaggcacattagaagagtggcaacaacatatagcggctaagtgtgttaataacactcgattagtttttgcggtctgtgtggcactatctgcaccattgttagacgttcttggtgttgatggcggagtctttagcttaaaaggcccatcttctaaaggtaagagcacggctcaacatatggcggcttctgtttgggggaatggtgctacaacaggtggctatgcacatagctgtaatacttcactagttggaattgaagttctggccaccgctcataatgatcttccattaatactggatgagctgaaagcggctaaccctaaaatggtggggcaattgcttatatgctggcactggggcaaggcaaagtccgaggaactaaagatgttactttacgtgatactctacaatggcgaacgcttgttctag

SEQ ID NO: 298248 - DNA, 198 bp, Proteus mirabilis
atgtctaaatactctaactcacatattgcagttttacagcgttgtagcgcagctaaagcagaaacattttcatcagatgtaggcatagaaaaacgttatggcgacatggttgtcatggactcgggttttgttaatcgggctgtacgtcgtcgtataaaggctaatgaaagaaaacgtaataagaaattaggtagttaa

SEQ ID NO: 298249 - DNA, 204 bp, Proteus mirabilis
atgataacgagtgaatcaatgctaactaaaaaggaagtaaaggctttactgcattataagtctgatagtggctttcatgagtttttaaaaagaacgcctacatttccaaagtccgtcaagttagggctaaggcgtgttgggtgggcggctagtgaagtcgatgcttatttagccgctcagcttagttcacgagaggataactaa

SEQ ID NO: 298250 - DNA, 192 bp, Proteus mirabilis
atgcctaatcatcccgtttttgctacgcctgcggatgctattcgcccaattgctgcagcattagaagcggctcagttcttggcgttagatccccaagctcaagacctctccaatgacttaatcgcatgggcgcaagaaacagccgcgcttatggctatcaatatgcaaaacgaaaagccaactgatcagtaa

SEQ ID NO: 298251 - DNA, 315 bp, Proteus mirabilis
atggtggcgttggcggggcagctttcgggctggctggaatccagtaactccagtagtctcaaccctgtcaacgtcaccacccctttagagattgagacctctcgtggtgactccctaactaagttactggagatcatcataatgatggctacccctgcccaaacttaccctaaatttatatggcgttttttctcctgccaacaatttaaatatttcactgttgaagccaccagcgaacaagaagctcgttcattactccccgactcaccttgtgtattttctgcgcgtattcgtcaggaggtgacacatgcctaa

SEQ ID NO: 298252 - DNA, 1833 bp, Proteus mirabilis
atgaaaggattttttatcaggcagttatgtttaagagggataggaaaggaagatgcaatagttaaatttgataagggtgctaatataatatcaggaccatcaaatacagggaaaacttttatttttgagtgtattgaatatatgcttggaaagacagatttagatagaaaaataaaggagtcattagggtattctgatgtatttttagagattggtgattattcaggaggtatatttacattaagatctgattttaattcgggtgattattttttatataataaaagtgttgaaagtatcactcaaaatgatgagtttattttattgaagcgtaagcatgagccgggaaagacggatactttatctaattttattttaaaaaaatgtaatttggatagtaaatttataaggactaatgcaagtggtaaaaagagagagctttctcttcgtgatcttcggattttgtatttggttgatgaattaaaggtaccaacaaaagaatctccatttttaacagggcaggttgtatctaagactgctgaagaaaatgtattgaagctgcttctaactggtgttgatgattctgaaatagttgaggctatatcaggaaatgaattgaataataagaaagggcgattggagtttttaaatgaattaataaaattggaaaatgaaaaaataaaagaaggtcttactaaggatgaagttatagctcaaaaagaaaagcttgatatatattattctacattaatatctgagcgtgatgaaattgttgagattttacaaatcaggaatgtggaaagagagcgcatttctgttgatttaaatgtcatcactaatcgtaaagaagaattagagaaactttataataactcttttatcataatgaaacagtacatttcagataaggagagattaaaatcaacaatagaggttggtaatgttttatctagttattctaagatagagtgtcctatatgtcactcagaggtagagaagaaaaataaagaaacagtaagcacgattgcattaagtgcagcagctgaattgaaaaaaattgatgggctaattaatgaattaatggaagttagaaaattattttgtgatgaaattaagctattaactataaagcaagaaaaattaagtactgattatgaatttatagatgaagaaataaatcaagatattaatgaaagatataaaatacttggaaaacgaatagcggaatgtcaagaaacagaacgtatgctaagtgattttattaaagttcatgagaatttggaactctttaataagcagagagagtcattggatggtgtaataaaaaatgcaaaaaccacaaagaataaatatgaagtaatagatgactctttgctgtcagatattaatgaaaatatgcttatcctgttaaaagagtggggatacccagagatattaagtgtaacttataatgataagaagaaagacttcctgttatcaaatgaaaatagaaacttagcagggaaagggctcagagcaatatcatactcttcattcatattttcattaattaattttacggttagtaaagcttggaattttgggctatgtataattgattcacctctggttacttaccgaaagcctgatgttcctgagggggaagctatatctgaagatatggtaactaaattttataaatccttatgtaagatccctgacgacaggcaaataataataattgaaaatgaagagcttcctgaagaggtagaaggaaaggttaaccatattcattttacaaaaaatatcaattttggaagatatggctttattcccaaagtttctaataattaa

SEQ ID NO: 298253 - DNA, 510 bp, Proteus mirabilis
atgggtgaaataatgaaaaaaataaatatggagaatccatttaataataatattgaatatggactaagagctatattacttttgcaagctatgtatccaaagaaatgtgatttagatcttttatcgtatctggattacattgttgtacattcaggagacttcgatcaagagttgtgtagtttacatgctcctataccgaacagaaagaatgaagtatttattagacgttcattattagagaatggattaaaactatacagcaattattgttttgtaaaacctatttatgagcctaatggtatattttatgaattaacggaggaatgtgagccatttctagactccttgagtgaagaatatactaaacaggtgaaattacgtgctaaatgggtagtggaaaaatatagtttaatgaatttaaaagagttaaaagaagaattgaaaaatacaactgaaccagtttcatctgagattgcttttcatatgagcatttcaaaggaggagagatga

SEQ ID NO: 298254 - DNA, 1041 bp, Proteus mirabilis
atgtcacaaatcggtatattgcaaatatatgcaggtaaaaatattcctgcgatagatcgaattaaacttttttctcctgatgagtgggaggaatttattgaggaatggctttcttcaaaaaaagacatgtattcttcgattgagaggttaggtggttcaggtgatcagggaagggatgtcgtagggtacaaagagattctgccaaatggtagttacatttgggataattaccaatgtaaacattatgaccacgctttgatgcctagcgatgtgtggattgaaattggtaagctgtgctattttacgtttattggtgatttccctttaccagagcgatattttttcgtaggtcctcgtggtgtaggaacttctttatctaatatgttaataaatccgaacaaattaaaatccgagttcattaagaattgggataactattgtaaggataaaattactaaaaatactagtattgatcttagtcctgaatttaatgagtatatcgatacgatagatttttcaatcttcaataagctaacaccattaatgttaatagaggaacattctattacgccatatcatatagcacgatttggtggaggattaccagctagaccagttaccccacaagcaccaaaaataattggtaaacaagaacagttatatattgaatctctacttaatgcgtatggctctgattcttcaaattgctataaaataattaatgaagtagatgttaaatataaaggtcatttagatagaagtagggagaatttctattcagctgagcaactaaaacaattttctagagatattcttcctcctggtatttttgaaagtttaaaagaggaaatttactcaggtaccattgatgtttatgaaaatgatcatactactggatttgtttgtgtaaaagcagttgaaggagaggccaagaaaatagctattaatagcaacccattaagtttgtatagtacaattaaagatagaatgggtatttgtcatcatttagctaatgaaggtatttataaatgggtgaaataa

SEQ ID NO: 298255 - DNA, 450 bp, Proteus mirabilis
atgcgtagtcgtccagcctctcgtttgatagtcctttcacctgaaagccatgtactactctttaagttctgccataaatatgatgctttagagggaaaaacatattgggctacaccaggaggacaacttgagtgcaacgaatcttttgagcaggcagcgttacgtgaattatttgaagaaacgggcctgacaagaaaaactacgggaccacaaatagcctccagaaccttccctatgatactgccaagtggtgagaatgttattgctgaagaacgtttctttataattaatgcagataaatcagatatcgactgctctggttggagtcacaacgaaaaagaagtcattcacgatcactactggtggaccttagaagagcttagacaaaccaatgagatcatttttccactcgatttgataattaatataccagtgatggttataaaatga

SEQ ID NO: 298256 - DNA, 1413 bp, Proteus mirabilis
atgtcctaccctcgttctttaataaattcgttgttgcttctatctttcttacctttttctttcgttcaagctgccgataagcctgaattggtagagaatgggattaatccattgtctgtaacccgaatagatgaccgtttgaattatatgttgtcggttaccaataataacggaaaaacagttcagcactggcgatcaattgattgtaaacaaggcaaggctgagcttctatacaaagattttcttaatgatgatggagtaactagtgctcgttattatgggaaaagttatgcccgctatgcgcccgcacaaattgataagcagatgacagaagaggaaatccgtgctgtctgccagttacctataaaagagatgcggtgggaaaaattatcgacgacttctcaagatattataactaatcttgttgatattaatagtgttcatgtcactggtgacactttatcggtacgaatgggatatgatatctcagagattacttgggagccaccttacgatgcaccactagaattaaaggtcgagcactatttatataactgtaaaacacatcaaggtaatgctgtggctgcaatgaattttgatagcgagggtcgcgtgacagactcactgatcactgcggatattattcgccgcaagagcagtttcaaaattgatactcaaatgacacagctcttcgatcaactttgcgagttaccagaaggaaaatcgttcacagcaaaagggctatttgtgcctgctaagaataagcctgcatcaacactgatggggccttcaatgcctaatctgagtaataataatccgcagtggctgaataaatttccgctttcctctgcgattgagagccaagcgcagttattgatcaagcctttgatgcctcctcgttttaaacagattaactatacggaagtcagcgatttcggtaaggtcaatatacagcttgatgcacaaccggatggctatatacgcaagctagaagattatgacatttggacagtacaacgtttaacactggcaaatcagttacaattgaagttcgccatgtctatcagcaatgatacctcactgcttagcaagttacagacagatctgcattttccgttagcaataggtcaacgatatcaggcgcaatgggaaaatattgacactaataagaaggtaacagcgtcatcattattctgtgatgttaccggagaaggagatgctcaaagtattgccgccaaatttagcggaaaatatttattagttgaatgtcgtatgacgactaaagggcagccgaatagcggtactaaactcgcttggttgcaagatttcaacatttttgtcccagtcgctatgcaagtgggcgataaacctgaaagtccagtcaaactggaacatgttaatgtaatacgttaa

SEQ ID NO: 298257 - DNA, 2421 bp, Proteus mirabilis
atggccattaagaaaaacgaactatactcctcactatgggccagttgcgatgagttacgcggtgggatggatgccagccagtacaaagattatgtactgaccatgctatttatgaagtatgtatctgataagtataaaggtgatccgtacggtatgattgttataccccaaggtgccagctttgatgatatggttgcacttaaaggcgataaagaaataggcgataaaataaacaaaattatcagtgcgttagctgaagaaaatgacctaaaaagtgtcattgatgtcgccgattttaacgacgaagataagctcggcaaaggcaaagagatgattgaccgtctttccaagctgatagggatatttgaagggcttgatctctcttccaaccgtgctgatggtgacgatttattgggtgatgcttatgagtacctaatgcgtcactttgcaactgagtctggtaaatccaaaggccagttttataccccatccgaagtttcacgcattctctcgaaagtgattggtattaataaaaacaccccgcaagacgctaccgtttatgacccaacttgcggttcaggttcattattattaaaagctagtgatgaagccccccgtggcttgagtatttttggccaagaaatggataacgccaccagcgccttggctcgtatgaatatgatcctacacaacaacgccaccgcgaagatctggaaaggcaacaccatttcggatccacaatggaaagaagccaacgggcaactaaaaacgttcgactttgctgtcgctaatccccccttctccaataaaaactggactaacggcattaatcctaaagaagatgaatttgatcgttttcgctggggtattccccccgaaaaaaatggtgactacaccttcttgttgcatattatcaaaagtttaaaaagcacgggtaaaggtgccatcattctcccccacggtgtattattccgaggtaatgctgaagcgcgtattcgtgaaaacctgattaaacaaggttatatcaaaggaattatcggtttacccgccaacctgttctacggcacgggtattcctgcctgtattatcgtgatcgacaaagaacacgcgcaggcgagagaaagtatttttatggtcgatgccagcaaaggctttatcaaagatggcaataaaaaccgtttgcgtagtcaggatatttataaaattgttgaggtatttaccaagcaattagaacaacctcactttagccgaatggtgccattaagcgaaatagtggctaatgactacaacctaaatataccgcgttatattgattccagtgaaccagaagacttgcacgacctcagtgcccatctacaaggtggtattcccaatcgtgatatcgatgccttagaacgctactggcagatattcccgagtattcgtgcggccttattcaaaccagcacgtgaaggttatagtgaagctttagttaaagcctctgaagtgaagaataccattctaaaccatgatgaatttaaacagtttgcgacgaatagcttgcagcattatcacgtttgggctcacgcatctaatttagctgagatcagtgtaggtgatcagcctaaagcgttaatcgctgaaatcagcgaaagtttgttgcaaagctattcacaaacaccattgctgagcaaatacgatatctaccagatcctgatggattactggagtgatacgatgcaagacgatgtgtacgtactggtacaagatggttggtctacaggtaaagtattgcgtgagttagaagtcaaaaaaggtgaaaaactgagagaaacgcctgacttagtgattggtaaaacaaagtataaagctgagttgatcccccctgctcttatcgtggcacgctattttgccgatgaacaaacaaaaatcgataccttgcaaagcaaacttgatagtgccagtcaagagttagaaacctatcttgaggaaaatagcggtgacgacggcctacttaatgaggcattgaatgataaagacaaagtcaccaaagccacagtcacggcacgtttgaaaattgccactgaccccgatgaaaaatcggcattaaaacaagcccaaaagctgtttgataatgaagccaatgctaaaaaagcgctgaaaaaagcccaagatgccctcgatttagcggtgtttaaacaatacccgaaactgagtatcgacgaaatcaaaaatttgatagtggatgataaatggctggcgacgttgcaaagcaatattgaggccgaaattgagcgcgtgactcagcagctggctaatcgcgttaaagagttggaagagcgctacaatgagccattaccggctattactaaatcggtagaaaatttaagtgagaaagtcgcaggccatttaaaagcgatggggttggagtgggagctatga

SEQ ID NO: 298258 - DNA, 1386 bp, Proteus mirabilis
atgagtaacggggtagtggaaaagaatctaatatatgtaacaggaacctcttcgaaccaaattaatactgggtataaacaaactgaaattggatttattcctgtagattgggaaataacaaatttacgagatattgctattttcggtggaggaactacgccaccaagaaaattccatgaaaaatactatgtttctggtttacacccttgggtaaaaactctcgatctaaacaatagtttaattttggtaactgaggaatatgtcactaatgcggcactcgttgaaacgagcttaaagaaacatcctgcaggttcagtattaatcgcaatgtatggcggctttaaccaaattggtcgcactggagttataaaggttgacgcagctattaatcaggcattaattgcaattataccgaaaaatagcaagttagtttcagaatacctactctttaacttaaattataatgtcgaatattggaaaggggttgcaagcagcagtagaaaagatccaaacattacgagtaacgacgttaaaaactatctacttgcattaccttctaaaaaagaacaaactgccatcgctaatgcactatcagatgttgattccctaattagcgaattagaaaaactgatcgccaaaaaacaggccatcaaaaccgccaccatgcaacaactcctcaccggccgcacccgcctgccgcagtttgcattgcgtgaagatggcgcaccaaaaggcaccaagccaagtgagttgggagaaataccggaggattgggaggttcattccctaggggatctgtgtaattaccaaaatggtaaggcccaagagcagtatttcaattcgaatggcggctacaaggtagtttcaataggtaattattcagaatccggtagatacatagacacgggtagttatatcgacgagaaatttaaaaatgaggttggacgatttgtacttagtcgtggcgatctagcaatgattcttaacgataaaactgctattggtacgattatcggcagagtactactaattgaggcggatgaaacttatgtcatgaatcagcgaacaatgaggcttgcacccaaaggtagtgtgaaatctaaatatttacactttcttctcaattctgattcggtgcacaagagaatcgttgggatggccaagcctggtactcagatttatgtgaatactgatgatgtattagggtttaacttgcttatatccaactctcaagaagagcaaaccgccatcgccaccattctctctgatatggacgacgagattcaggcactggaacaacgccttggcaaaacccgccaaatcaaacaaggcatgatgcaagagctgctgacgggcaagactcggctgccttatgacaaggaataa

SEQ ID NO: 298259 - DNA, 1467 bp, Proteus mirabilis
atggcctttgttgcggagcaactaaaacaaaaaaatacgctggataaacaagtaatacaggtgaagacgttagtttctttaccgaacatctctattccagcctatcaacggccttataaatggacacatgcaaatctagttgacttgttgagcgacttaaaagtatatcgggataaatcggcttatcgcttgggttctgtggtgtttcataggtactcagactcagaaagtaaactaaaaacgctcgatattgttgacggacaacagcgcactttaaccttagtacttctggttaaggcgttgttagatgagcgcttggatgacctaaagcggcaagatgttaaagacacactcgcctcacttgctgtgccgattgatgcatttttaaatcgacaaacctttaatagtgatatttcgcaccgaaatttgcatcaaaactttatggcggcaaaacgagctgttgctcgcagtgactttaccgaggccgatatcgattttttactaaaccgctgtgaagtggttacctttgtgcttgatgatgtgtcagaggctttccagttttttgactcgcaaaacgccagaggccgagatttagatcctcatgatttgttaaaagcgtttcatctgcgtgagttttcagaaagtgaaactgaacttaaagctgactcggtgcgccattgggaaagcctggaaagtgaacagttggcgcgactgttttccaactatttgtttcgtattcgcaactgggcacaaggtaaatcggcacagtattttactaaatcaaaagtgggtttatttaaaggagtcaatcttgatcaggtagggctttacccttatgtggagccgcttcgaatcgctcaccattttgttgatgactataacggccagtaccagcgccatattgatcaccaacacatgagtttcccttttcaccttgatcagatgatcataaatggtaggcgtttttttgaaatgaccagccattaccaacaaaaaatagctgagatcgtaagcgatgaacgaagtggaaaagataaggccaaggttagtgaagaaaaacagagcattcgcatactcggccatgagctagagcccttagcttgtaagattttacataccataaatacctaccgctctcgaacccgcacaggggatggctatgtgcgcacactgtttgattgtgcggtgatcttttatctagataagtttggcgcacatcagctttcgcaagcgatagagaagctgtttatttgggcatatagctgccgattagaaatgcaagtcgtcggtatagagcgcatggataaacacgctctgacacataatgtctttgaacgtataaagcaagcggtgcaaccagctgatgttttaaattggccgttagccacacttaaaaagtctgattgtaagggaaccaatcttagtgaaattaccaagctgtttaaggaaatgaagtactatgagtaa

SEQ ID NO: 298260 - DNA, 2040 bp, Proteus mirabilis
atgagtaatgttcggatgccatacacgaaatacaatgatggggctgatggtaaagcaattgccagctttaaggttaaaaaattactttgtgatgcaagccaatatgtcgtccctatgtatcaacggaactatgcgtggggtgagggtgaaatcaaccaactgatccaagacgtattggattatcaacatagtaaaccagatcaaacctactacattggcacgttggtcgtgtttgagcgtaacgatggcagctttgaagtgattgatgggcaacaacgttttaccacacttaccttattaacctttgctctcaaacgcttatatgctgcaggcaaagtgactgtcgatatgggctggtacactactcctaatctcaattttgaaagccgccaaaaatcatcggatacctttgcctgcctaattcaaggcgttgcactagaacacttaaaaaccgatgactacaacctcgatgtggtgaatggtttctctttgctagaaaagggcttattagctttgggggataagcttgaaggattttgccaatacctttacgaaaaggtagaaataacccgagtatctgtgcccaaagataccgatttaaatcattattttgaggtaatgaataatcgcggtgagcagctagaaaagcacgaagtcgttaaagcaaggttaatgtcggtgttaaatgaaatcactgacccctatgagcgtgagcagagtatacagctgctaggaaaagtgtgggacgcaacagctaatatggaacgttacgttcaatacggctttaacctcgatgaaaggcataatatttttggtaaagacgattggggacaatttaaaccaacgtgctacgctgatttagctacaagcatttgcgaagcaactactcaaaagagcgaaaacactcaaaccatttcgctgacgctcaatgagatattggcaaagccacctcagtcctcttctagcgctgatataatgtttacaccagagcgctttaatagcgtcattaatttctctaacttcttactgcatgttttacgagtgttaacaaaacaggatatcgcgttggacgataagcgtttgttagagcagttcgacgcctacttgaaagaaaatggcagtaacaaaattaacgcagttaaagactttgtattcgcgctactcaagtgcaaatatctttttgaccagtacatcattaagcgggaatttagtgatggcaaagataggtggagcttgaaaaagctgcatttttataacgctaagagtcagagctacattaatacttttggtggcagcgaagaacaggataatgaagatggctttgaagggataaatcgtcagattttaatgctgttaagtgctttgcatgtttccacaccgacactggcttataagcactggttaaatggtgcattgttccatttgtttgctatggatgaaattacgcctcgtctttatttgcagaagcttgaatatttatctcgtcaatttgtatatggtcgttttttaagtgcatctcctgctgattactaccaaatgatttttcaaaacaaagaatattcagcatttgatccaaataatcagcaagtattagtaaagctgcgttatggcgtaattgaaaataacttagtgtttaactatctcgattacttgttgtggtgtgagggaaaactaaacaaaacggatgatgtgattactcagtttgagtttaccttccgaagctctgttgaacacttttatccgcagcacccacttgatgggcattatgtactgccggatgctgatttgcatcgctttggtaatttgtgcttgattagccatagcaaaaattcaaaattaagtaacttacaacccaccgctaagcgtgatcattttaaagcggccatcgcagataaaagtattgataccctaaaactgtatgaaatgattaagttgatgaatgctgatggagaatggacagaaactcaaatagctacgcatgaacaagccatgttaatggtgttttctaaggacttgaataagggttttagctatgagtaa

SEQ ID NO: 298261 - DNA, 3093 bp, Proteus mirabilis
atgagtaatgtcggtcaacgcgaacgtataacccaaaatcgtatcgttcagttttttcaaactgacttagactatcgctatttaggcgattggcaagatcgcgtcaataataaaaatattgaagttgagatccttgttgattggttaacaaaacgtggtgtaagtgaagcgctgatcaatcgtacaattcgccagctagatgctgcagccgcgctgggtgaagggaaaaaactctattacgctaacaaagaggtttatcgcttactacgttacggtgtgaaagataaagaaggtgcaggccaccaaaatgaaaccgtttggttgattgattggcataaccccgaagccaatgactttgcgatagcagaagaagtctcgattaaaggtgaaaataaaaaacgcccagacatcgtgttgtatgtaaacggtattgcgctgggtgtgatagagcttaaacgttcatctgtctctgtttctgaaggtattcgccaaaatctggataaccaaaagaaagattttattcgtaatttctttaccacaatgcaattggtgatggcgggtaatgatactcagggactacgttacggcacaattgaaacacccgaaaaattttatcttgagtggaaggaaccgcttgaaaatacttatgactataaactcgattttcacctaagccgtatatgtaataagtctcgctttttgcaaatcatccatgattttattgtctttgatgctggaaccaagaaaacctgtcgccataaccagtttttcggtgttgaagcggctaaggctcatatcacaaagcgtgaggggggtataatctggcatacccaaggttcaggtaaaagcttaactatggtgtggctagctaaatggatacgggaaaatgttactgatgctcgcgtgctgatagtgactgaccgaactgaacttgacgaacagattgaaaaagtgtttacaggtgttgacgaagaaatttatcgtaccaaaagtggtgcagatcttgtggccacgttaaatcagcctaacccttggttgatctgctcattagtgcataaatttggaaggcagtctgattctgaaaatgatgccgcaaccgatgaatttattgaagaactgaaaaaatcactgtcatcgaatttcagagctaaaggaacattgtttgtctttgtcgatgagtgccatcgtactcaatctggtaagttgcacaacgcaatgaagaccattttacctgaagccatgtttgtcggtttcacagggactcccctgatgaaaaaagacaaaaagaaatcagttgaagtctttggtccttatattcatacctataaattcgatgaggctgtcgctgatggcgtagtattggatttacgctatgaagcaagagatatagaccaacacattacctcccaaaagaaagttgatgagtggttcgaggcaaaaacgcgcggattatctcgaatagctaaaacgcagctcaaactaaaatggggcaccatgcaaaaggtgctatccagtaaatcacgcttgcaacagattgtgaatgatatcttgttagatatggatactcggccacgtctaatggatggtcatggtaatgcgatgttagtctgctccagcgtttatcaggcctgtaaagcctatgaaatgtttagtcagaccgatttagcaggtaaagttgctatagttactagttttcaaccaacacctgcaagtattaaaggtgaggagactggtgaaggtttaacggaaaaactctttaaatacgatatttatcgtaaaatgttagcagactactttgaactacctgaagacaaagcagctaataaagttgaggactttgaaaaggaagttaaaaagcgtttcgttaatgaacctgggcaaatgcgcctgctgattgtggtcgataaattgttaactggctttgatgcgccttctgccacttatttgtatattgataagcaaatggcagatcacagcctgtttcaggcaatttgtcgcgtcaaccgtctcgatggtgatgataaagaatacggttatatcatcgactataaagatttattccgctcattagataaagcaatttctgattatactcaaggtgcttttgaaggttatgacaaggaagatgtggttggtttactaaaagaccgattagagcaagcaagactaaatttagatagtgcgctggaaatggttcgagcattatgtgagccagtaaaagcaccacgaaatacagaggattatatccattatttttgtggcgaatcaggcttaaatcaagatgagttaaccgaaaaagaggcacttcgtttaaccttatatcagagtgttgccaagttactgcgagcattcgcaaatatcgccaacgaaatgccagatgcaggttattctactcatgatataaactctattagatctgaagtttgtcactatgaaaaagttcgcgatgaagtgaagcttgcaagtggtgatctcgtcgaaatgaagcgctttgagcctgcaatgcgtcatctgctagatatgtatattcgtgccgatgatagtgaagtccttatggactttgaagagcttggcttgattgaattaatcgtcgaaaaaggcgtcagtgctatcgataccctgcccgaggatctccgtaaaaatccgggagcaatggctgagaccattgaaaataacgttcgcaaaatcattgtcgatgaaaatccggttaaccctaaatactatgaacagatgtcagtgttactcaatgaactaatcgaacttcgtcgacaaaaggcgattgaatatcaagattacctcgagaaaatccgcgaactcgctgctaaagtcgtacgtcctgagcgaacatcatctagctaccctgcatcaatggatactaatcccaaacgtgctttttatgataactttggcaaagatgaatggcttgccaccaaaattgatagtgccattcgttataccaaaaaagcggattgggtaggagatcgttttaaggaacgagaaattgccaatgcagtacgagaagaaacggcgggctatgaggtggatattcaggacgtaatggaactcgctaaagctcaaaaagagtatcaatga

SEQ ID NO: 298262 - DNA, 717 bp, Proteus mirabilis
atgatgacgatgattgaaattggctcaatgacaatacaattgaatcgtaaagccatcaaaaacttacatattagcgtgttgccgcctgatggacgtgtacgtgtatctgcgcctgtatctatgacggaaacggctattcgtatggcggtgatccgtcgtatcccttggattaaacagcagcagaataatttcataaaacaaccccgccaatcagaacgagaaatggtcagtggcgaatgccattacttgtggggtcgacgctatcgtctcaatgttgtgccacatgtaggaaagcatgaagccaaattaggccgtggacgattacatttgtatgttagccatactgcaactgctgagcaaaaggctttagttctcactgaatactaccgtgaagcacttaaacagcgaatagctgacttattgcctatttgggaaagcaaaataggtgtcactgtcgacgcttggggcgtaagaaaaatgaaaaccaaatggggcagttgcaatacgcaagcaaaacgcatttggttgaacttagaactcgccaaaaagccaccagaatgtttagaatacatcctagttcatgagttagttcacctacttgaacgtaagcataatgaacgatttaaagcccacatggataagctacttcctgattggcaagaacgcaaagacttgctgaataaagcaccattggcttacagtcattggttatactaa

SEQ ID NO: 298263 - DNA, 1335 bp, Proteus mirabilis
atgaaagcacgctataaatccatcgtggatatgttcgcaaataggatccgaagcggagatatcccttccggtacacgtttaccaacacacagagcactctccacgcaggaacatatctctctagctacagcaactcgggtttacagcgaactagaagctatggggctggtcagtggtgaaaccggaagaggaacatttgtcagagaaatagcgttgccctacggtcatggaattgaccaacatgctgtggccactgatgtgtttgatctgaattttaactatccgtcgttacttggtcagggggaacaactccgtgatgccctccaaaagattgcggtctccggggatatagaatcccacctccgttaccaaccacacgcaggcaggatgacagagagaaagattattgcagatcatatcgcgaccccgggatttcaacctgacgctgaaaacgtggttattgtgaatggtgcacaacacggactaactatcactgtgatgggtatgctacgcccaggagatgtagtggcagttgatgcattcacctattcgggttttaaagtactggcagagctatatcatctggagctcgtcgccatacccgctttaaccagtggcccagatttatctgtgctggaagagttatgccagaaaagacatgtcaaagctgtctataccataccaacattacataatccccttggctgggtgctcagccacagtcagcgaaaaaaaatagccgaaattgcgagaacttatgatcttctcgttatagaagacaccacatacagctacctgatccacagacctccctcacctattgcattttatgcacctgaacgtaccatttatatcactggattctcaaaaagcgtggcgactggcttgagggtaggggctgttgtttgccctgaatcataccggcctgcactagaaagggcggtgagagcaaccacctggaataccccctctgtaatgacagcactggtatgtaattggatacaagatggcacagttgcccgttttgaaacactgaaacggcgggacgctcgccagcgacaggcggtattaagatccacactcggggatatgccctgtattacgcatcctgcctcttattttgcctggttccctttaccagatgatacaagagccgaccgagtcgccaagaaactgatggactgtaatatttccgtttcaacagcagaacctttctgtacttcactcgttgtcccacaagctcttagaattgctcttggatctgtcacaatagagagcttacaaaaagcgttgataaaagtccgagaagctgtggagtatgaacagtatcgttaa

SEQ ID NO: 298264 - DNA, 483 bp, Proteus mirabilis
atgtgcagtcattggttcagcaatagtcagtggcaattacctagcgaggaagactataaaaagttacaaacactgtttacacatattgctgataaacaagaaaagttatcgccgttatcccgccagtttaccgaattagagcgcgagcaggttacattacaaaaagactatcaagaattaataaaagaatatggtttattaagacgaccattctttgtaactgcagatgtgccttacaccgatgtgtgggcttatccacctgttcagtattatcccggtaaacatccttgtgagaaaccatcagccatgatggaacacattattcgctcaagtagtcgcgaaggggatttggttgctgatttctttatgggatcaggagcaacactgaaagcagcactaaaacttaatcgaaaggttttaggtgttgagcttgagaaagaacgctttatgcaaacaaaaatggaaataaaaattcaaaaatag

SEQ ID NO: 298265 - DNA, 228 bp, Proteus mirabilis
atggacgaaataattgaaagaatcaaaaaacaacattccattccagagaatcacactcttgtgaaaacaggttctaactgggacggtctaagaaaaggccaagataccgatagctatacatatgaacaaatcgatgaaaatggaattgtttgtgaaaaatatttagtaaaagatacaacatcatcatatccaccccaacgccgtaccattagaatcactaaactatga

SEQ ID NO: 298266 - DNA, 390 bp, Proteus mirabilis
atgagtgagccgttaacgggcactacaacagcatcgctagcgggcgtttcaattgtgggcctatttgctggtatggatgcaggcgtcgtcattggtgcgtttgccggggcggttatatttgtattgtcagcacatgatattcggttattaaagcgatgggcgtatttcactgttgcatttgcgattgggatattaggcgctgattttatgtcatcactactgagtggcattgtcggagatagagaagtcgatcgctctgttggtgcaatgttctcatcggctggtttggttggtgttttggtaacaatatctaaacccggtgcgctcacagacagtatcaacaacgttatcaacaacctgatagataaattcagaggaggtggaagatga

SEQ ID NO: 298267 - DNA, 288 bp, Proteus mirabilis
atgaccatctcaatgttttggatttacgtcaattttttctcatgcttattcgctgttattcgccttgttaactatgagcgtaacggcgctaaatacaaattctttccgtcacttatagcatgggttctcattgttatgcttggttctatcccactacgcatattaacgaatgactacgcgcatgcagatccatttgaagtcggaatcaatatcacactatgcgcgctaataattcttagtcgtgggaatgtgatgcaaatatttagaggggttagtaaaaatggctag

SEQ ID NO: 298268 - DNA, 405 bp, Proteus mirabilis
atggctagaccagcgcgcggtgaacgcaataacaatccgggcaacattcgacacggttcaaaatggcaagggctatcagcacagcaaaccgataaggacttttgccaattcgtatcacctgaatatggcattcgggccatctataagctactgcaaacgtaccaaaagaaatacgaactcgacagcattgagtcgattatcgatcggtatgctccgccaaatgaaaataacacggccggctacatttatcgtgcggctagagatatcggcgttagtgtaaatgagcctattaatgtttcatctaaaccagtcgctattgcattagccacggcgattgttggtgtcgagcttgggtatcagccttacagcccaaaagtatttgaagatgcttggttgttgttatga

SEQ ID NO: 298269 - DNA, 453 bp, Proteus mirabilis
atgaatctaggcgaaacaatagtgtccgtgggcgttattttgatgatgagcgtcggtatgacttggcaagggaataggatagataaactgaaagcctcaaatagtgaactaaccactcagttatcagaacaagttaaaatcaacgaaaaataccaagctcgcatcactaaattaaacgagcttgatacaaaacacacgacggaactcacaaatgcaaaagctgaaattgataggttgcgcgttagtgctgagcgtaatcctgacagggtgtacatcaaagccgagtgtccaaaaagcaccaccacttcccccgccagcatggatgatgcaaccaccgcccgacctactgactccgctatccgaaattattggttactcagagagcgaataacacagtctgagcaaatgatattagggctacaagattatatcaggcaagagtgtattcaatga

SEQ ID NO: 298270 - DNA, 495 bp, Proteus mirabilis
atgcttgatttagatataatcacaaatacacttgttggattaatatcgggtgtcatgggagcgttattcacagcatggattgcatttactcgattttataaggaaaaattatgggaaaaaaaatatgaggtttacagtagactattcgaggctatttatttccataagaaactaattaaagaatataaagaagatgcagagaaccagtttaatggttatggaacttcaaataaagcagaaaaaattaaattagaaatgaaggaaagtttagagcaagttgttgttgcatctttatttattttaaatgaaaaagtacatgatttaattaatgacttttttgaaaaaagaaacgaatggcagtctcatataaaaaataacccagaagacaataatgacccggatgttcatataagtctatacaaccgtgaattagaggaaattgataatctaacggggcaaattgtcttaatagcaagaaaagcacttcgaatataa

SEQ ID NO: 298271 - DNA, 267 bp, Proteus mirabilis
atgaatataacaattaatgatgatgtttctgtttgtattaagaataattcttatcgaagccattatgatcaagatggaaatttaaaggttgttattggtagtctgaatactcctaaaaagatagctatcaattatcccgaaaaagagataggtgagttgatctacaaagtctcggtagatacatctgacttagataagttagaagagcaattcacgcggattaagcaactgatgcaagatgtaggggcaaagcctaaatcaacataa

SEQ ID NO: 298272 - DNA, 129 bp, Proteus mirabilis
gtggctgttagttataagttagaacaagacactaaggttgagttggcagatctacgcatgagagctaatcaacaagatgttgctatcaatgagcttaagaaagcaatggcaactcagcaacaagcatga

SEQ ID NO: 298273 - DNA, 495 bp, Proteus mirabilis
atgttaaatatccatagtattcataaaatcaaagatattatcgaaaaaggaataatagaatcacataacattgatactgataatcttagccctttaacaaaactaaaaattgctagacgagtaaatcaaatgctcagactttgtctttatattgaattatatagaagacaaaacgccactaattttgaaccattattagaaagaaaggcgttatatcacgcaatgcatactttgttttctatagatccagtaaaatcacaactgtatcaattaaaagatatcgtcattctatttcatagcgaaattaaaaatctttcccttactcgtgatgccaaggattgtattgaaaacttggatgaatcagtggaatatcaaacttcagtaacaaggggattttgggaaaccaccgccattgacaaaagatacatgtcagaatactactgggatgaattccctatcgaagaaactcataggcttctcggcgaaataatctaa

SEQ ID NO: 298274 - DNA, 513 bp, Proteus mirabilis
atgcaatatccaagagtcagtattaatggtgtatctgtccgtgttgatagtgagggtagatataacttaaatgatctgcatgcggctgctgttgcggatgataaagcaacggaatcacaaagacccggtgcatttttgaagagtcgtcaagtaaagcggtttgttcaagctttaagcgatgcaacaaaaagtgcatcggttaaagtaattaaaggtggacttcatcaggggacttgggctttagagttagttgttattcggtatgcagcttggttaaagcctgagtttgaaattcttgtctacaacaagtttaaagatgcgacgagaaaaggtttagatgttatgtctaaattgaacaagctagatcatgtcattaatgcggaaactaaaaatgtcagtcactgtgcaaggacaatggctaattggggagttggtggtagaaaacaattactgctaatggcaagagagcgaattattaatgaagctcaaatctatcttccgggagtggaataa

SEQ ID NO: 298275 - DNA, 495 bp, Proteus mirabilis
atggacaaagaactcaaacacttaaagctcaatatcagccagatagcagcactttctggcgtccatcgacaaacagcttccgcccgtcttaaccatttagagcctgttgcgggcaatagttcaaatctaaaactctacgcactcactgatattttatctgaaatgatgaaggcgccaccccctgtcgaaaatcaggaaatgctacctcaagatcggaaggcatggtatcagtctgagcgggagcgtttgaagtttgaacaagaagtgggggagctattgccggcctcagacgttgcacgagaatattcagcactggctaaagcgatggtgcaagtgctggaaacgttacctgacatattagaacgtgattgcgcgttaacaccgacagccgtatcccgtgttcaaggtattattgatgatctgcgcgaccagatagcacatcaagttttaagtgataattcggatgatgaagagagcgatgaggatgagttatga

SEQ ID NO: 298276 - DNA, 2103 bp, Proteus mirabilis
atgacagcaacagtgtcagcaaccacattaagaaaaaatgtggctcaactcattaaagcaccgaggcgaatgccagttgcggatgctgtggcaaaatatatgcgcgtacctgtgggagcgggtaactcggttccttgggatccggcagtatctccttacattgttgaacctatgaattgtttatcgtcacggctctatgatgccgtgatatttgtgggtcctgcaagaacaggaaagacggtcgggttaattgatggctgggtgatttacaatattgtgtgcgatccttctgatatgttgctggtgcaaatgacgcaagataaagcacaagagcacagtaaaaaacggctttctcgcacctttcgttgcagtcctgaagtcagcaaacaactcagccctcgtcgtaacgataacaacgtgtttgataaatactttttatcgggcagttttttaaaaatggggtggccatcgattaatgtgatgtcctcatctgactttaagtgtgtggcactcaccgattatgaccgttttcccgaagatattgacggtgaaggagatggcttttctttagcctcaaaacggacaaccacctttatatctgcgggtatgacgctggtagaaagctctccggggcgtgatattaccgatactaaatggcgtcgtttgtctcctcacgaagctccgcccacaacgggtattttatcactttataatcggggtgatcgccgtcgctggtactggcaatgtcctcactgccacgaatattttcagcctatttatgatgcggtaaaaggatatcgtgacaagccagatcccgtagaagcaagtgaatctgcgtatgtggagtgtcagcactgtttaggtcgtatcgaaccccatcaaaaacgggagctcaataataaaggggtgtggttgattgaaggacagtccattgataagcaaggaaggatatcaggtacagggcgtcgttcgcgtattgcctctttttggatggaaggcccagcagctgcttatcaaacgttgtctcagttagtttataagttactaactgcagaacaagaatacgaattaaccggcagtgaagaaaccctaaaagcggtcaccaatacagactggggcttgccttatttaccgcgcacagcacaagaacaacgccggagtgatgaactgattaatcgtgttgaaagttgggaagaatcagtggtaccagaaggcgtgcggttcttggttgccacggttgacgtgcaaggcggtaaaaaacgtcgctttgtggtgcaagtggtcggttatggtgaaaaaggcgaacgctgggtgattgactgctttgaaatcactcaatccctacgttatggcaataacggtgagtgccggcgaattgatccgggctcttaccctgaggactggcaagtattaatcaccgatgtattagagaaaacctacccattacagcactatcctcaccatgagatggggatcatgatgttgggggtagactccggcggtgaagatggcgttactgataatgcctataaattttggcgtcgctgtcgaaaagagggactgcatcgtaaagtctatctctttaagggtgacgggcataaacgcagtaagttaatcaccaagtcattccccgataacaccagtcgttctgaacggcgcgcccaagccaaaggggatgtgcctctttatttactgcaaactgaccaacttaaggaccggatcagttctgcgttatcgcgcgataccgtagggcctaactatatccatttccctgattggttggatgaatcgttctatgacgagttgacgtatgaagagcgtgatgaaaaagggcattgggaaaaaccgggtcgaggcgctaatgaggcatttgacctaatggtttacgcccatgccttggtgatattaaaggggtacgaagggatcaattgggaaaaaccgcctaaatgggcaaggttacctgatgtgacactttcctcctcctcgccaattaccgatatcgccacagagcctgaaataaaaccctcacccgaaaccccaaaacaggaaacgcctgcggtatcagcatgggcaccggtatcaaacagcggaggctggatatga

SEQ ID NO: 298277 - DNA, 216 bp, Proteus mirabilis
atgacgaaagaagaaattgaacacatgattgagcaataccgtttagcggaagaggcggtattaaaaggcaaatccatcacttttaatggacaagccatgacaatggaaaatctcaacgagatcataaaaggtcgtgagcgttgggaatctcgtttgtcggcattgatatcgagaaaacgaggcaatccaatgtataaactagcgaggtttagatga

SEQ ID NO: 298278 - DNA, 1491 bp, Proteus mirabilis
atgacattattagacagcgccattggttattttgccccaaactggcaagcctcgcgtctccgctctcgcttacaaattaaagcttatgaagccgttttacccactcgtactcatcccgctaaacgtgaaaatcgtaatgcaaaccaattgacgcaatttggtggtacttccttacgcgagcaagcgcgatggctagataacaatcatgatatctctatcggtattctcgataagatggaagagcgcattgtcggggcaaaaggcattattgttgagcctcagcctctcgatggtgcagggcaaattcatgaagatttagcctcacaaattcgtcaagcctgggcggagtggtcagtattgcccgaagtaaccggacaatttagtcgccctgtattagagcgtttactggtcagaacgtggttacgtgatggcgaagtgtttgctcaactggtcaaaggtaaagcgaaaggattagaggctcaagccaatatctatttttggctcgaagccttagagcctgactttgtgccgatccacatgaatatgcctgaaagcaagattattcaaggcattaaattcaatgaatgggggcgacccacaggatatcaggtatataaaaatctccctcaatttagtgccaatttaggggatatcaaaaccattgatgccgaaaatatgttgcacctgaaattcactcgtcggctccatcaagcgcgaggtgtcagtttgttttcggggatcttaatgcgcttaagtgcgttaaaagattacgaagatgcggaattaacctccgcacgtattgcagcttcattaggcatgtacatcaaaaaaggcgatgccagctctttccctgagggtgactatgacgaagatgagcaacgtaatattgatattcagccgggcatgatttacgacggtttaaaaccgggtgaagaagtcggcatgatcaaatcagaccgacccaaccccaacctacaatcgtttcgcaatggacaattacgcgcggtttctgcgggcagtcgggggagttattccagtatcgcccgtgactataacggtacgtatagcgctcagcgacaagagctggtggagtcatttgaaggttataacattttccaagatacctttgtggcaggcatcacacgtccgatgtatcgcaattggttgaaaatggcgatagccagtggtgtggtcaccgttccacctgatgttgaccctaaatccttgtttaatgcggtttacagtggccctgtaatgccatggattgatccgaagaaagagtctgaggcttggaaaaccttgttacgcggtggtgcgtcaacagaaagtgactggatacgcgccaaagggggcaaccctgcggatgtgaaacgtcgtcgtaaaaccgaaattgacgaaaataaacgattaggactggtatttgatactgatcctgctaatgacaaaggggcacaagatgctaaacaacaagaaatcgatgatgatgcctaa

SEQ ID NO: 298279 - DNA, 1989 bp, Proteus mirabilis
atgctaaacaacaagaaatcgatgatgatgcctaaaatgtcggggccagtaaatcaaaaaagctggtttcgcatgcaggctaaagaagaccaaacggcggatatctatatttatgatgaaatcggtgggtggggaattagcgcaagacgctttacggaagatttaatctcgctgggtaatctcagtcatatcaatctgcatattcactcccccggtggtgaagtgtttgatggtatcgccatttataaccaacttaaaaaccactctgcaacaattacggtttatatcgatggtttggccgcctcaatggcctcagttattgcgatggtcggggatacggtcattatgccgaaaaatgccatgattatgatccacaaaccgtggggtgtctcatggggagatgcgaatgatatgcgtgaatatgctgacttactcgacaagttagaaaacgtattaatccctgcttatgtggcgaaaacagggaaaacaaccgaagaaattaccgccatgttagagcaggaaacatggcttgatggtgacgagtgtgttgaacacggtttcgccgataaagtgattgagccagtgaaagcaatggcaagtcttacatctaaacgaattgaggaattttcatctatgccaagtgcaattaaaaatcaaattacccccaaaaacactactaaacctacgcaacagcctcaaccaaattcttcaccagagccacagcctagcgcctcctttgcggatgagcaaacacgcttaaatggcattaaagatttatttgccatgttcggtggtcgtcataatgagctaatgatcacgtgtttagcagatgcgaactgttctgttgaaaaagcgcgtgagcaattgctcaatacgattgcacagcaacaaaatcctgagccatccaataaagataatgcgcatatttacgcaggaaacggcaatatcgtcggtgacagtgtgcgcgcctctgtgatggcgcgtgcgggttatcaggattatgaaaaagataacgcctataacagcatgacactgcgtgagttagcacgcgcatcactgacggagcgtggtgttggcgtggctacgtataatccgatgcaaatggttggtatggcctttacgcacagcacctctgatttcggtaatatcctgctggatgtcgcgaataaagcgattttgcttggttgggaagaaaatgacgaaacctttgagaaatggacgaaaaaaggacaactcagtgactttaaaactgcacatcgtgtggggttaggggcgttcccttcattacgtaaagtgcgtgaaggcgctgagtataaatacgttacgttgaacgataaaggcgaaaccatcgcgctggcaacttacggtgaattattcagtattagccgtcaagctattatcaatgatgacatgaatatgttgacggatgtaccaaagaaattaggtgaagcagcgaaagccaccatcggtgatttggtgtatgcggtacttatcgacaatgaaaaaatgagcgataaaaaagcactatttagtaccgatcataaaaacatgctcacgggcgggatggatgtagaaaccatcagtgcgggtcgtactgctatgcgtcaacaaaaagaaggtgaacgaacactcaatattcgtccggcatttatgttggtaccgaccacactcgaaacacaagctatccaagtggttaaatcgggtagtgtgaaaggcgcagatgttaatgccaatatcattaatccagtgcgtgatttagcggaaattatcgctgaacctcgtttagatgatgcgagcgagaaagattggtatatggtttcacgtcaaggtagcgacaccattgaggtagcgtacttaaacgggattgatttaccgtatattgatcagcttgatggtttcacttctgatggtgtcacgacaaaagtgcgtattgatgcgggtgtagcaccggttgattatcgtggtctgctgaaagtgacgggtaagtaa

SEQ ID NO: 298280 - DNA, 351 bp, Proteus mirabilis
atggctaaaaattatgtacaacagggtggcacaattgcaattgccaacaacacaaaagagatcattaaaagtggtcaattggtacacgttggcgcggttgcttgtgttgcgatcacggatattcaacctaacgaaaccggtgatggttttgcagaaggtgttttcttactgaacaagaaaacgggaattgccttaaaagcgggagtagtggcctctgttaaagacaatgttgtggtggatactggtggtacacctgccggtgtggtttgggatgatgcggatgcatcgagtgaacatgtcacgattaaactcaatgtctttgtgccatcagcgggtacccctcaaggttaa

SEQ ID NO: 298281 - DNA, 273 bp, Proteus mirabilis
atgaatccatttgaatacttaataaaaagaatggataacgcgaccactgagcggatgggggttcccatccatataaatggtgttttttatcaagcactcgaatctcactttatccctgaattggggccgatgagtggtgacggggtgagctatgttgttttttcttcaacatatcaccctaagcgcagtgacgccgtagaaattgagggggaagcctatcaagtcattcgacaccaaaagtttaatgggaaaccacatatttggatcaaatag

SEQ ID NO: 298282 - DNA, 564 bp, Proteus mirabilis
atgaaagggttagcgcaagccattaaaaacctgaatagcattaatgatgaaatggtcccgaaagcaacggcaatggcgattaatcgtgttgctcgccgtgtcattagccatagtgttaaacgggtttcagccgaaaccaaagtacctcaacgcctgatccgtcaacgtgttcgacttaatcgagcgagtagccgttataaaacgcctcgcgctcgattagtgataaatcggggtaatttgccggccattgccctaggtaatgcgcgagttcagctatcaagaaaacgaggtaatcagaaaggcgctggaagtgttttgaaggtggggagattttcttttcctcatgcttttattcaacagcttgataatggccgttggcatattcttcagcgagttggtcaaagccgttatcccatcgaggtggtgaaaattccgctcgtcacaccgctaacaacagcttacaccgaagagtcagagaaattgcttcaatctgatatgcccaaagaaatggcgtcggccttaaagcaacagttacggctttatataaaagggagggtttggtga

SEQ ID NO: 298283 - DNA, 399 bp, Proteus mirabilis
gtgatcaaacatacacagatccgacatgcaattaaagaggcgattgagcctcatgccaatggggtgacagtctttgatggtcgccctttttttgtggatgaaaacgactttccagccattgcggtgtacatcaccgatgctatttcaacaggtgaaaatctcgatgaagatagttggcaagcaattgttcacatagaagtttttctcagtgcgaataaccctgatgctgagttagataaatgggttgaagccgtgatttatcctgcgctgaccttcattcccgcactgtccgagcttatcgagaatatgacccctaacggctacgactactatcgtgatgaagaaatggggttgtgggggtcggtcgatctccattatcaaattaattattcaatgtaa

SEQ ID NO: 298284 - DNA, 522 bp, Proteus mirabilis
atgcctacaccaaacccattggcacccgtaaagggtgctggtaccacgctttggatttatagcggtaccgaagacccattaaaagatccgtttactgatacggattggacacgactggcgaaaattaaagagctacagccgggtgaaattaccgcagacagttataacgataactatcttgatgacgaagatgcggactggaaagccactgctcagggggaaaaatcagcgggtgaggccaacatcacgctggcatggaaaccgggtgaacagggtcaaaaagatctggttgattggttccaactgggggatgttcgtcactaccgtattcgttaccccaatggggccgtcgatatttatcgaggttgggttagttcgcttggaaaaacggtacctgcgaaagaagtgatcactcgtaccattaagatcaccaacagtggccgtcctgcgcttgcagaagaaattaaatcagcgtcagagcaaggaaaaagtgcgcccgttattaaaaaagataatgaataa

SEQ ID NO: 298285 - DNA, 390 bp, Proteus mirabilis
atgtttttaaagaaaaaagagtttacttacagcggtgagtctattgcgttatatgaattatcagcattacagcgtattgaatactttgattttttagtcgagcaagcagaaaaaaacgacgatattgaaaaagtggaaggtgttaaaaaaaccgccctgattattcgtgtaaacacagaatctaacgcttggctagtatctcgttcattagcccacggtggatcgaatgatgttgaaaaaatttacaatgatgttctttctacatggaatcctgaagcactcgctcttgcagctaaagaagtgctggtgattagcgggatggcacaaactgaaaacacggaaaatgaaaatattcacagtgatgcacaggaagagtcattggaaaagtag

SEQ ID NO: 298286 - DNA, 276 bp, Proteus mirabilis
atgctcagtgagatgacagcgactgagctcgctgattggttacacttctttaatgaaactcccttcaccattcaatttatcgatcatgctttttctggtcttaatttcacggttgccagtgtttttggtggtggtaaagacttatcaccagaggattttagtgtgttgttacgtaaacctgctgttgatatggacgatgaaatcatgatggcggtaagtgaagggatagcgggcggaatacgatatgagccaacaaatagcggatctaacgattaa

SEQ ID NO: 298287 - DNA, 2994 bp, Proteus mirabilis
atgagccaacaaatagcggatctaacgattaatttgggggctgaaacagccgattttaaagagcaaatggggcgagttgaacgtcagctccaagaaaccgcagaaaaagccgaagccagtcaacgacgtatggctcaactggttgaacaacaagcgcaaactgctcgcagttcagcagagagtactgcgcagtctcttcaagaacttaacaatcaacgagaaatttctcaacaacaacgggctgattattatcagcggatcgcacaggaagaggcgcgctcagctattgaatcacgcaaacaagctgatgcttttttagagcaagctcaaagtgttgggcaaacgagagatgcacttgaacaactcacagcggttttaaataaatcaacaaaggcttataacaagctaaaaattacaggtgagcagttcgctgaaattcagaatgtcactaaatcaagaataaaggcgatacaagatcaacaagatgcaaatactgaaaaatattttaagcagattgaagcagttaaaggactttctggaggaacgtcggcattaagaaccattcaagctcagcttaatcaagaggtaaaaaagggcactatccatcaacaagactatcggacactgatttctgccattacctcagagtcaatgaagttgcgccgagaagaagagtctctaacgcaacaaaaaacgcgatttattcagcgactaaaagagcaagttgctactcaaaacttaagtcgtgaacagatgttgcgttatcaagcgtctcagttaggtgtcagctcttcagcagaaatttatattcgtcgattatctgaatcgagcaaagaaaccaaagagtttgataaaaatatcaagtcattagctggtcgtcttcagggtattgccaactcatttaatatgggctcactggttcgcggtggtatctggggaggaattacggcaggtttaacaggcgttgcaaagctagcctatgatgcagaaagagaattttctcagtttaataaacaactgattttaaccggtaactacgccaataaatctgcgagccaattaaacgaaatggcgcgaaccctagcgggtggcgggattacgcgtggtgaaatggcattatccatttcaagtgtcgtcggtactggcgtattttcgaataatgagatttctcgtgtttcaaaagcggccgcacagatgaattacatcacaggccaggcgattgataccactattgatcagtttaaacgtctgcaagatgaaccgcttcaaatgtcgcttgaattagaaaaagcgaatcatcacctcactgcatcccaattagaacaaattcgaacacttgaattacaaggtaataaaaccgaagcagctaagctggcgattgatgcttatgcacaatctattaatgacggtgctaatgatatatctgatagcctaggttttcttgaatcagcatggattaatattcaacgggaggcaaaaaaagcttgggacgcaatgcttgatataggaagagataaaggggttacagagaaactaaccacttataaagaacaactatatcaactgcaacttcacggaatggaaaatagctatgaagggagagaattacaaaaagtaattaaagagctggaaaataagaaatacgaacaagatcttaaaaatgcacaggctcaagcggttaaagatagtgaacaattcaaggttaatcagattagaaaccaagaaaaatggaaaagctatttcagttgggagactcagcggttacaaaaactagcagaattagaacaggataagcatagcctaactcaaaaacagtacgaagaagcaaaagcgatgattaattttcgtttaagagatcgccagatgccggggactgggaaaggtaaaggatatgtggcacccacaggtaatcgagaagaagaaaaagcttctcgtgatttacttgcattgcaagcccagttagaaatgcttaaaaagcatcaaaatgctaatgatgttattagccaacaacgcaaggattttcaaaaagagcaggcacaatttgcaattttagaacaagcgcaattgacacgccgattaactaacgccgaaaaatctttattatcaaataaagaaaatattcttgctcaaaaggaaaaacttgcgttagtgggtgatgaagtcgccttacaagagcgcttaaataagatgcaagatcagactgataaatacattgctcaacaatcggaaaagcgtaaagcgattgaagaaagcatgggtaaatcagcaagggaacaacaacgttatttagagcgcgctcaacttcttgcaggacaacaagagaacccacagctaaataatatgttagctgagcaacagaaaacatgggaagttgaagatcaaaaacgagccaattggctaaaaggagctgaaacagcttggggtaactataaagacacggctcttgatgttaatactcaagtacaaaatgctacctctatggtgcttaatggatttagtagccaattaactaatgtactggttgatggtgaagccaacttcaaagactttacgaaatcgattcttaagatgctaacggatattttaattaaaatgtcattagttaaaggaatagaggcgatgggctttggttttggcgctccagtcgcgaatgctaacggtggtgtttacaactcagccagcctaagtgcttacagtggacagattgttcataaacctaccatgtttgcgtttgcaaaaggtgcagggttgatgggagaggctgggccagaaggcattttccctttgcgccgtggtgctgatgggaagctgggtgttattgcaaaaatacccaatcagggaggaggcgttacccagcattatcacattactatacaaaatgatggtagtaatggtcagatagggcctgaagcattgaaaaaagtttatgaaattagtaagcgaggggctcaggactatattatgagccaacgtcgtgatggtggagctatgtag

SEQ ID NO: 298288 - DNA, 330 bp, Proteus mirabilis
atggaaacatttaaatggaaagtcaaacccgatatgaaaaaggagtttgagcctcgggtaaaatcagtgaaatttagcgacggctatgaacagcgtcgccctgatggtattaataataatctaaaaaagtacaatgtaacgcttatctatataaatagtgaaagcttacaaattgaatcatttttagaaaaacatgctggcgttactgcatttttatggaagccgcctcatcaatcagaattaattaaggtactatgtcgaaaatggtcatcttctgctggaatgattagaactgaaataacggctgagtttgagcaaatcgtattttaa

SEQ ID NO: 298289 - DNA, 576 bp, Proteus mirabilis
atgaaaggtttcggaagaattttattgattgtcggcattatagcagcgtttgcttctttcaatatggatgtcagtgttcccactggctatggttcacgcgtaaataacattggtttaatgtcagataagcaaaactacattttaattagctgttttatgattttttgtggattaatgatggtggtgtttagtggtcgaaagcaacagcctcacgacacaattaattctacaagtgtattatatgtaagatgtccatactgtgctgaagatatacgcccagaagctataaaatgtaaacattgtggtagtgatttatcgagtaaaaagaaggatgaaaaaaacattaccacagtcactccttcagagattgttatcaaattaaaagataactacatgatagatgaggatggggttaagaaattcgtttcatttctctctgagaaatataataacaataaagaactattatgtttatctgaaagtgatattaataaaatgatggaagctatcccagaagaagttcatgaatcatttaagagaaaattaaaacattttattcatgaattaaataagtag

SEQ ID NO: 298290 - DNA, 705 bp, Proteus mirabilis
atgcaacatattcctcctgaaatgcgaattagtattaccgaactctcctccactgatgtcttacttgaactttacgaatttgatttaaccaaaataggtggtattcggtaccgcttttttgatggactcaatcaacgtaaagagccgttaatctggcaaggaaacacctatgagccttaccccgtgaaaggtgaaggcttttcttttaatggcaaaggcccctcagggcgacccactattacattgtcgaatttatttggattgattacagggattgccagtcaattagatagtgcaatcggtgggctggtggtacgacgcattgtcagcactcaatttttagatgcagtaaattttcctcaaggcaatcctaatgccgacccatcacaagaaattgtgacacgttggatcattgagcagatgaccagtttaaattcagtaacagctacctttatgttagccacaccgagtgagactgacggattaatgctgcctgggcgtgctattttgtctgatatctgtaatttttgttatcgctcagaagagtgtggttacaaaggcccccctgttgctgacgaatggggaaagccaaccactgatccactaaaagacaaatgtggcaaacgtcttagtgactgtaagttacgaaaaaacgaatcacgtataggcgcgtttgtttccacttcccgtattggtaataattaa

SEQ ID NO: 298291 - DNA, 729 bp, Proteus mirabilis
atgatagagcaagcaattttggcgcatgcgaaagagcaagcgccatcggaggcgtgtggcttattggtaagtaccgcacagggtgaacagtatttaccttgtgttaatcagcacactgatccgaaaaactatttcacgatttcttttgatgattttattcgagccgaacagcagggcgagatgatagccgttgtacacagtcaccctgatggtcaaccttatctcagcaccttagatcgacaactgcaggtgaacagtgcattgccgtggtgggtggtttgtaatgaaaaaattcattgttatcagccagtatctcatctattaggtcgccattttattcatggctcaaccgactgttatgggttgtttcgtgatgcttatcatttggcaggacatgatctgcctgattttgagcgacatgataattggtggcgccaaggtaaagaactgtacctagataatatgataagcagtggttttcggcaggtaaaaaaagaagcgcaacccggcgatattattttgtgttgctatgccagctctcgtgccaaccacgcggggatttatttaggcaatcaaacgattttacatcacattccaaaccaacttagcaaacgcgaggagtataacgaacgatggcaacgaatgacgcactcaatttggcgttaccgcgattggcaaccttccgactttacggggatttgcaacgatttggacgtcgctttgatttaa

SEQ ID NO: 298292 - DNA, 612 bp, Proteus mirabilis
ttggcaaccttccgactttacggggatttgcaacgatttggacgtcgctttgatttaaatgtgaatactgcttctgaaggtcttcacgcgctttttattcaacttccagcattacgcttagctattcgtgatggttggtatcaagtgcgcattgcgggtactgatatttccccacaagatattaaccaaagattcaatgaaaccttacctgataatgtagtagttcatattgtgccgaaattatcaggggctaaaaatgtcggtgtttttcaatttattgcaggtgctgctttattttcattgggatggtgggggccagcgtggatctccgcaacagtagcgatttctttgatggcgggcggtgcagctatgatgattggtggtgttgctcaaatgctgatcccgtctccaaaacctcccaatctatctcgtggtgatgaagaaaaaggcaatacttattttagcaatcttgataatgccgttgcacaaggaatgccggtgcccattgcctacggcgaaattatgtgtggttcacgcgtcatttcacaatctgttgaaattatggatgacagtgacggtgaaaatatcgatgccggcaaacacggtggttaa

SEQ ID NO: 298293 - DNA, 3204 bp, Proteus mirabilis
atgggtaaaggtggtggtggtcaaagaacaccgtatgaggcaccaaacgatttaacatcacgtcaaaaagcctcattaattgatttaatcagtgaggggccgattgaaggccctattcatattcaaggctcgatggatgatttagggtgcatttatttagatgatacgccggtgatagatggatctggcaatagcacgattaatggaatgtatgcacaatggcgggcgggtaccttagagcaaccggcaatgagtggttttaccgcgtctgcgaatgaagtgccagtggggattgaggttaaatataattcccctgtcactcgcactatcaccgcgcccaatattgaccgcttacgcctaacctttggtacgcaagcactggttgaaactaaagataatggtgatcgagtacctacatctgttcaattacagatccaaatccagcgcaatggggtatggataacagagaaaaacgtcacgattaagggtaaacgctctaactctccgtacttgatggcggttattttagatgatttgcccccagttccgttcagtgtgcgcatgatccgtatcactcaagacagcacttctgacaaaattcaaaataataccgtttggtcgagttattctgagttagtggatatttcacaaacctatccgggttctgctgttgcaggattaatgtttgatagtgagcagtttggcaataaatttccgcgccgtaattatttaattaaagggcgtattattcaggtgccgagtaattatgatccagataaacgaatttattctgggatttgggacggtacctttaaaccggcatttaccaataatccagcatgggtattatgggatttgttaactcatcctcgttatggcatggggaaacgcctcaatattagtgaggttgataaattcgccttatatgcgataggacgttattgtgacgaacaggttgatgatggttttggaggaaaagagccacgtataacctgtaatgcttacattacggatatgcgtaaagcctatgatgtgatggcagatatgtgtgccatgatgcgcattatgccagtctggaacggacgaacattaacctttattcaagacagaccgtctgatgtagtatggccttatactaatgccaacgtaattgatggcaacttccaatacagctttagcgcattaaaatcgcgtcacactgccgtcgaagttcgttttattgatccaaacaatggttggaaaaccagtgttgagctagttgaagatgatgctagcatagcgcgctttggacgcaatgtgatgcgcgtcgatgcatttggttgtactagcagaggtcaggctcatcgtcatggtctttggttgttaactactgagaaattagaaactcaaacggttgaatttaatatcggtagtgaggggctacgtcatatgccgggtgatattatcgaaattgctgataattattacgcggataatcaaattggtggacgtctaacacatattgattatgcctctcaaacattaaccttagatcgcaatatcgacacacccaaaagtggtaaatcaagcgtcacactcctcaatgcacaaggtgatccgcaatcttatgaagtggtgagctatcccgcatctaatcaaataaagctggatactttgccgttagggttacaagaaggcggaatttggacattaacacttccgtctttacgtcggcgattatttcgtgccatcagcttggctgataacggagatggcagctttacggttattgcagtgcaacacacgcccgaaaaagaggctgttgttgataaaggggctaaatttgagccaaaacctgatacaccactaggtggatttattccaccggttgaaaatctttctgtggatatcgaatcagatacaagtgcatggcaagtagaagccagttggaatacaccttattccagtcgaggggtagattttttattaaaactaaccactggtgatcgcattgtcggcaccgcctcaaccacggatacgatatatcgttttggtggtttgcctcaggggaattatgttttatccgtcctgcctcaaaatgatcggaaacaaaaaggcgaggtggccacaacttcatttgcgattaatccaccattaccacccagttatattgaggttgagtcgggctattttagtttagggattattccgcgatctggtggtcaaaatagcttacgagcacagtatgagttttggttttcagaaaaacagatcacggatattcgtgatgtggaaaatcgtgctgagtatttaggtattagctctatgtgggttatacaaggacgtaacctaaaggcaggacatacctattatatttatgttcgcagtataaacgctgtagggtattcagaatttgttgaaggaatagggcaaccagaaagtcacactagcgaaatactagataatttagataaagaattacaggaaacgcaagcatggcagaagcttaatgaaaaagttgaatggaatgaaaatacaataaaaagggtaggttataatgaatataatttatctcgaaagtttgaaaaatacagtaaacagacagagaaaacgattaatgagatccgaactcagatagaaaatacggaagctgatattattactcaaaaggaagcaatttcttctatcaaacaagctcaatcaagttatcaacaacaagtccaagctaaaattaatcagcagtcaggtattctcaatcaaaagatgaatgcacaatttacacaatcaggaggatatgctcgacattcaataaatattactatcgtccataatggaattagatataatgcagctggttttattgttagtgccgaaatcaaaaataaaaaaataaactcttatattggatttaatgccaataactttgcattttataatcccaaaaataaccgaatggaactgtttatgtctgctaaaaacggacaattttttattcgagaagcattaattgataaagctatgatcagaaaactcgcgttatcagaggctattatttccaataattattctcccgaaaagtcaggttttattcttgatgtgaaaaataacaaattagaaatatatggtggtaatgggggaacaacattaaccaatcaaaatttatatgtaaaagacgaaactgggtataacgttgttattattggtgatatcacaaatgagcgataa

SEQ ID NO: 298294 - DNA, 324 bp, Proteus mirabilis
atgatatacacaacaggcgctgttagcacagtgtcaggggttgctattgtctctggcacaggtaccaaatggatagttaataatcctgctattcgctcaggtacgattattttaattaaaaatggtaatgctaattctatttacatggtggatagagttaatagcgatacagaattagtcatttcacagccggctacatttaccgtaaaaaacaccagttatagcattaatctcactgagctgaactcatacagcgatgctaataatcgtatgaccgctattgcatcagatacgacgtattttctgcgagcaatggatcaatga

SEQ ID NO: 298295 - DNA, 189 bp, Proteus mirabilis
atggaattgttattacgggaggggagtgtagatactctatatagcttgcctttagtttgtgcaacaagtcaattagtgaatgcgtcttatcaggatgaccctattgattgggtcaagcgcaagatggagattcgttttcggggaaaacagttttttgtgagtgaacggatacgtgatgctcatcggtaa

SEQ ID NO: 298296 - DNA, 669 bp, Proteus mirabilis; identical to SEQ ID NO: 295338

SEQ ID NO: 298297 - DNA, 405 bp, Proteus mirabilis
atggatggatggaaaaaaacctttacattggcagaacagatacagttagctttgagtttaggttatgaggcagtaccagaccaagaggcttacacgggagcatacttcattaaaagtggtaagaaatggatttttaatattatcggtctcaaaaagacgttgaatataacttcagatgatgaactaagaatgcaggattatgatgttgatatgtatttcgaaattcgccaaaactggtcgcaataccaagatatgatttttggaaacgacgatattgcgccttcgcccgaaaacgaacttacttcaatttaccatgacctacaggtaacaaatgattctggggaaatggtgtatttgtctgatggaatgtggttggattccaacggtcggattgtacaacgctag

SEQ ID NO: 298298 - DNA, 987 bp, Proteus mirabilis
atgttacgaaaaagcattgaagctaagaagagacaccattatgtttgggcgaattacctaacgcgctggggtaatggtacaaaaaatgttttctacacaaccaagactggaaagattgcctgcgacagtgtacgtgcaatagctgctgacgactttttctataaaacaacaacgcttactagcgagaacgttgatataattaaggccttctctcgaaaaagccccaaccatctccatactcaacacatttcctacctagatgacgtccttaaactgcaaagattagaggctatgtatagggcttctggtaaacaagatcaggaagcggaagcacttcttcatgccacaaagtgcaacttaatggagaatctccattcatctcatgaattgaaggcattatcgatattagaagcgctcgcaaatgaaaggcttgatatacttcatgataaacagcacatgattgaattcatgatgttctttggtcatcagattacgcgtacaaagcctttcagggacgcagtgtttaatgctcagcctcgtcgtaataatcttgaaataaaagtatccgacacgattgttcatgcctggtggtttataagctacatgtttgggatgaatattggctggagtttatattcaagtcgtaatgaagatatacattcattattggtaaacgataccgggctacctttcataacatcagataatccagtcgctaacgttcactcatgtgtcttagagacagattttatcgcgcctgagtatactgacttttactacccaatttcaccacgcatagcctacatcatatgtaattcaaaacgattttctccaggtgtgaactatatcgataaagatactgttgagaaattaaatataaaaattgcaaaccaagccatggtgcatattataggaaacacaacaaacgccctactaccttataaaaaacgcctgggtttaagatataaaaaaaggcctcttttttaa

SEQ ID NO: 298299 - DNA, 903 bp, Proteus mirabilis
ttgagcggtataaaaataacttttgcttatgatagcaatggtgttcgtgtggatgcagattcttatggggatcactctatagctcatcctctcgtatgtccagataaaaactgtgaagcgtttttgaagcatgtgaatgggtataagcgtgaaagctacggcaaacagcagttcatccctgctttttaccgattagaaaaaggctccgatcatagtgagtattgccgttacaaatcctctggcagagatacaattgttgctggagagtcagatcatgaagttaaagatgctcttgcgaaaggtgaactattgtttcgtattcatgtaatggatgcggaagaaaaggaaaaactaaaagataaggcaggggtctttcaacagtttccaccgaatgatacgactaagcggaaatatagaaaccaaggacgcagatctacttatgttcgcacgatgaatagcctattggaaatctataatcatgggcgtcttaattcacaagatagagcaaagattaggctcattattggcggtaagttagtaaagtggacagatttcttttactcgaccaatcatctaggtagtctaaaattgcgccttcatcgagagggaattgttcaagcagccgttgtagttaaagtaagtattgtagggctaccaaatcaaaaacttggtggcttttgctttatagagtgcagccccaagactactggattaggtaaacatatatacacgacgttgaaactagctaagagcttaccaagtagtcacttctctttgaatcaaaacataatggttttaggcaaattttgcattccagaatcaagtgaccgtgttactccatcatatttaggtaatgaaatcaggacattaataactcatacacagcaagtggtggacatttga

SEQ ID NO: 298300 - DNA, 444 bp, Proteus mirabilis
gtgatttctgagaacaatgcgtggtgtgtgaatttaattgatactattcaaggtaattcagcagaatataagctctatgtatttgtgaagtattcttatcatatttcacttcatcctcaaaaatggggaattcaaatttatcataaaggtgttattacacacgcttcaagccaaagaccgcttaatttattagagggaaataactttgtactcacaggaaataattggaatggcgtggatgtcggtttgccttgtgcggtattaatcacaacaatagggcagattggtatgatggattcgatgggaggaaaaacgattagagtaattctttgtgggcgaggtaaccgtattattcctcattccatgatagtggcgggacaaatgtcaacaacctcactaggtaagcagtatttttatattgatgtaagggagtatggtgggtga

SEQ ID NO: 298301 - DNA, 372 bp, Proteus mirabilis
atgaaaaagaatatttccctaatattatttttactattttccctcataacggctagccaagctgctggaataagtgtgggaggaacacgttttgtctatgacgataatctacgtgaaatcagtattccaattatgaatacggataaggaaaaaccctatttaattcaaagttgggtttcagcttatcaaggtgatgaaaaaacaccttttattgcaacacctccactatttcgtattgagccagatagttcaggcacggcgcgaatttcatataccgggcacctttggcatcaaaccaagaagtggtttattggctcaatatcaaatccattccaccgatggaaaaaagtccagagaatcaactccaattag

SEQ ID NO: 298302 - DNA, 2622 bp, Proteus mirabilis
atgtcattttcaacaggtataaatagcttaagcggcataaaaataaataacgtaaaattatttatttttatacttgcgctactattttcagttgactcaaagtctgaggaggagttttattataacccctatttcttatcagataacccggagtctgtcgctgatctatcttcttttgagaaaggattagaagtacctgaaggtaattatctggttgatatttacttaaatgacatattcttaaaaacccaatatatcaattttattgagaataaagggcagctatcaccatgtatcacaaaagcagagctaaaaagttggaatgttaatttaaatctcataacggatgaacaaaataaagataaaaataatgttgaacagaaaaatgagctcgatgaacattgtcagtcacttacttcattaattgctcaagccacagcaaattttgatgttggttcacaaaagctcaatctcactatacctcaagtatatttagtcaatcagtctcgaggctttattccaccagagttatgggatgatggtattgtggctggatttattacctatattttaaatggtagtaaaactcgcaacgatggtagcccagatactcattttactcatctcaatttacaaagtgggatcaatcttgggccatggcgtcttcgtgataactctatttattcttatgattctattaataaatcaagttggaaacatctgaatacttatatagaacgtggtattaataaattatattctcgtcttattattggtgatagctacacacaaagtgaagttttcgacagcatcaactttagaggctttcaactgtcatctgatgaagttatgttaccggatagccaaagaggttttgctccgattattcgaggtgtcgcccggactaatgccgaggttactatacagcaaaatggttatgtgatttaccgtaactcttttccaccgggtccttttgttattgatgatctctattcaacaagtaacagtggcgatttagaggtaaccattaccgagtctgatggttcaacacaaacctttactgtgccatattcatcagtccctttattacaaagggaagggcataccaaatattcagtgactgtaggtagttaccgttcgggtaatgatgagcaagagcggccttattttttacaaggatcagtgatccacggcttacctgcgggttggaccatttatggaggaacccagttatccaaaaattaccaagcggcaagtattggggtaggtaaaaatattgggcgttttggggctttatcatttgatattaccgaagcgagatcaatactacccgatgactctacacaccgtgggcaatcgatacgtattctttataataaatctatcaatgaattaggcacaagggtgcaacttgccggttataaatatgcgacgagtggtttttatactttagcagagactacttataaaaaaatgagaggaaattatatacaaacggaggatggtgttgttgaagttagtggattgccacaaagttactacgatcttatttataataaaaggcaaaggatacaactcaatattactcaaaaaataggtgatcaatctacgttatatattattggtactaatcagcgttattggaattctaaaaaacaagataatcaattacagataggccttaatactattattaaaggtattaatttaggcctaaattatagcttatctaaaacatcatggaatgatagtaaagatcagatgttagcatttaatactagtattccttttagtaactttatgcgttctgataatgattctatatggcaaaatgcgagtttaagtactaactcctcgcataacatgaagaaacgttttaacaatactatcggattaaacggtacattattggaagataaaaacttaagttacaatattcaaacaggttattctcatgaagaagaatcggactcaacaggatatgcctcattaagttataacggttcttatatgaatagcaatataggttataactataccgatacatcacatcaaataaattatggtatgagtggcagtattttagctcactcaggtggtataacacttagtcagcctatatatcaaacagcggtgttagttaaagtacctgaagttaaaaatataaaattagaaaacaatagtggcatcacgacagacagtaatggttatgcggttttaccttatgtttctgaatataaagaaaaccgtattgcattggataccaattcattctctaacaatattgaaatagataatgcggtgaaaagcgtagttcctactcgtggggccattagtgcgatcacatttgagcctagtgttgggataaaagcaattacgacattaacccataaagggaaaccagtacctttcggggctatcgttgattcaggtaataatactgggattgtggcagatgaaggaaaagtttatttaacagggttatcaccttcagggcaattaaaagtgaattggggtagtaagaaagagcaacaatgcttagtaaattacacattaccaccacaagatccagataaactttatgttgaatatagtgcagagtgccaccctattaaggaataa

SEQ ID NO: 298303 - DNA, 699 bp, Proteus mirabilis
atgaatagtattctaactttttctaaaataaagcttctttttttaatgctcttaactctatgtgtcattaaccaagcatatgctgctgtatcattaggggcaactagagtcatttattttgcaggtgaaaagcaagtaaaattaccagtaattaataatgatgaaaaacgttatttaatacagtcttggatagaaaatagcgaaggaaagaaagataactcttttgttattacgcctcctctattttctatgcagggtaaaaaagagaatactttaagaattatagatgcaactaacaataaattaccgaaagatagagaaactttattttggttgagtgtaaaatctatccccgctgtagaaaaatcacttgctaatgagaatatgttacaacttgcgattattagtaaaataaaattcttttatagaccaaaagatctcaccatatctccagatgaaaattataaaaaactacaatttaaacgtaataatgacacacttattataaaaaatccgacaccttattttattacgatgactgaattagaacttggtggtaaaaaattagagaacactatggttccaccttttgaagataagtctatctctattccaacatcagcttatgggaaactctcgtttcaaactattaatgattatggtgccatcacaccaaaaacaatcgtcgacgttagataa

SEQ ID NO: 298304 - DNA, 567 bp, Proteus mirabilis
atgaagcaacgtaaatttcttacacgttttgaagtgaatgctattttaaagcaagctaaggaaggtaggtatcccgaaagagattactgtatgtttttaatgtgttttttacatggttttcgtgttagcgaactatgtaatttaacattaagcgatattgatctagaaagtagaatactctatgtcaggcgtttaaaaggtgggctttcaacaacacaacctattattgatgaggaatatgaagccttatgcaactggttgaaaagtagagaaaactggagagaatcagattctgaatgggtatttttatcacaaaaaacgggaccaatttcccgtcaacaagtttatgggttattacgccgtttaggtaaaaaagccaatgtttctattagtccacaccctcatatgttacgccacgcctgtggctacgcactggcggatttaggcagagatacacgtttaattcaagactatttaggccatcgcaatatttcccatacggttatttatacagcaagtaactcaaaacgatttatcaatatgtgggaaacgcgaaactcacaatag

SEQ ID NO: 298305 - DNA, 1104 bp, Proteus mirabilis
atgaacgattcttatgaaggtaaaaacggcaaagtaaaagtgatgtatgtccgcagtgaggacagtgccgataataaacctaaaaaaccatcccgccgccctaataatgctcgtggtgatactgaccgtagtcatcgtcgtgatgataaacgcggtgataacaaattttctcgtcgtgatgaacgtggtgcaggtaagtcttcaggacgtaatccatcacgcagtggagcaagctcctcacgtgataacaatagtgaaggtggtaattattctccatggaaaacgatttctcgtcctggagatgagccattaaaagagcatgatggaattaccgggaaaagccaaatagatcccgaacagcttcgccgtcagcgtttagaagaaacgcgtatctatggtgaaaatgcttgtcaggctatgtttaaaaaccgtccagaagccattgttcgagcttggttcttacaagaagtaacacctcgttttcgtgaagcgttaaaatggatggcggcaaatcgtaaagcttaccatgttgttgaagaagaagagatggttaaagcggcgcgtacggatcatcatggtggcgtttgtttcttaatcaaaaaacgtgttggtcatgatgcacaaacctatttaaaagatgcaccaacaaaagattgtgtcttagcgcttgaagatgtgggtaatccacataatgtcggtgctattatgcgtagctgtgctcattttggtgtgaaaggcgtcatttctcccgactcatcagtgctagaatctggtgcagcagtacgtaccgcagaaggtggtgccgagtatattcaaggaattgatgctgataattttgctcagacattagagcagtttaaacaggctggctataccttagtgacaacctcaagtcacaaaggaagtgtgccgctagcaaaagctcagttacctgaaaaaatggtattaatcttaggtcaagagaaggatggcttaagtgatagcacgttaaaacaaggggatatgagcatttacattggtggtacaggccatattgaaagcttaaatgtctctgtggcttctggcgtgttattggctgaatggtggcgtcaacatcacggctaa

SEQ ID NO: 298306 - DNA, 1065 bp, Proteus mirabilis
atgaaggtaacacaaatccttttttgtaataatgaaaatagtattacagataatgaaataaaaaacctatttaatatctttgatactcaggtcattaataatagtagagtggatgttaatcttgagactgccaaaaatcaaataaataaactcgctaatgcagttaggaatggaagctcaaaagatttggattatttagtaaatatcatgtttcatgatgatataaaaataagcttatatgcaactaatcagctctacttgatttatccaaaattaaacaactcgataagagaagatattaaagaattagtcaaattactctatgaaataaaaataaaagaggatcaagagtattttaaagaacgacctttattaagtgcaatggcttgtgaggaagcgattgctagacaaaagggaaaaggggagaatgtttttatctcagcggttgataattatttaaatataaaatgtaatgatagcgtattggccaatagtaatgaaagcgtaagtaataataatcgatatatatcttcatctgaattagaatcttgggcgtcatttcaaccctatcagtgtgatattggttcctatgaatcaatacttaaaaaaatagaaaatagcaaaggatccgcggagttaaaaaattatgtggttttagtcaataataaccattgggttgcgttattgacttataaagatagctgttttttatgtgattcattgccctcaagcaaaaaagaaaaagatgaacgtcataacttattaattgaactagaagaaaaaggatttaatactgtcaatatagaatataatctacaaaaaaatgtacctaatggatgtggtcttttggcgcttaattatattgatagtttacataatgaatggaataaatttaatcatgaaaaagaagatgatttaacatccacgatagaaacagtattacaaaaaacaggaaaagactttctaaacctaagttgtggtgagcaaaccacatttaatcataattttaggaaaaaattgatcatggatacacttttttgtattgttaaatctaatgatgaatag

SEQ ID NO: 298307 - DNA, 339 bp, Proteus mirabilis
atggcaaaaacagtagcagaacgtaaagcagaacaacgtaaacggcagaaagaattaggtgtaaccaaaattgaattacttgtagataatcaagaattggaaatgttaaagcgtaattgtgtattgcgtatgcccggtcgggaaccgtatgacgctgttgaatacttacagatgcttattcataaagatgatgccgagtataaaaggcaagctgagaagttatctaagcaaaagtgtaaacgatgtggtgagcaattacctgttcaacaatgctgtttgtctggtgattcacaatgttgggtaacgagtggatataaagagttaaaaatagttatttaa

SEQ ID NO: 298308 - DNA, 1419 bp, Proteus mirabilis
atgacaaatgattatttcacccctccatacaatcttgaagcagagcaggctgtactaggtggcttgatgatcagcactgacgaagataagcgtcaacatgtgatatcactagttaaatcaggatcattttattcaagatctcacagtcgaatttttacagagatagtgaagttaataaaatctgattatccaacagatatcattacagttagtgactctttaacacgtagcggtgatttagaaaaagttgggggatttgcttacatagcggagctttgtagattaccttcagttgctaacattgtgaactacgctcggattgtacgagacaatgcaatacagcgttacgctatcaataatctgaatatttgtgtagagatgctaatggcgaatgatggtcttgatatcaacaataaactatcaaatgttcagcaagttgtatcaagcattatcgaacacgctaaaacaggaaaaagcaaaggcttaagacctgctctagacgttgttggagattggcttgatgatgttgataggcgctttagtgatcctaaaaatgcagtgggttttactttgggtatagagtcactggatgagttaatggctcccaagcaggcattgagaggatcattaattgttgttggtgcaagacccaaaatgggtaaaaccgcattttataatcgtgttgcaactcactttgcattaaaccataagttacccacattgcttttcagccttgagatgacagaccgtgggatcattgaacgaatgatctctcaagaaggcgatgtatctgcagatattttttatacaggtacacatgatgatatggaaatggctagagcattagccagagcaaaagagattgcagaatcgaatatgtatatcgatagcactcctggtattgatcttaaccatatcattgctgaatgtcgcaaggttaaacgagctaaagggcaaataggcttaatagcgattgactacctgactcttatcaaagccggtcaggctgaacgtcgtgatattgcatatggtgatattactacggggttaaaaaatctagcaaaagaaatggattgcgttgtcctgttattaactcaacttaaccgtaaattggaagatagagcagataaacgaccaacacccgctgatagccgtgatacagggcaaattgagcaagattgtgatgtatggattggtttatatcgtgatgctgtttacaacgataatgctgataaatcgctaatggaaattcttctcagattaaatcgtgatggaaatactggtaccgcttatgctcagttggtgaattcttatattaaaaatattagtaagtgtgaggcggaaaggttgtcatttaaaggaaatgacaatagaaaaagctatgcacgaaaaggacagcaagctacagaagcattttag

SEQ ID NO: 298309 - DNA, 816 bp, Proteus mirabilis
ttgttattagattttggacgtccagttgcttatttccctgggctagtaaaacgtttgggcagtgtaaatgcagtaatattttttagccaaatattttattggcaagataaagctgactctaaattaggtgtttataaaacatcagaagaaattgaatctgagacgggtttaagctaccgagaacagcttacggctagaaagcatttagttagcagaggtattctggttgagactaataaacgcttagagcataaaatttattatctaattgactgtgaaaaattagattatgtcatgtcacaacctattgaaaatgcaccaaatgcgcaaagcgcaactggggaaagtcacaatagtgatttcgcggaacaacaaaacgaacgaccgcgacaagacaaaactgacggtggcgatgaaacaaatccgcagttcgatcctacagagattactacatatattactacagatattactgatggtacgtcaggagaacctgacgacaaaaaatcgtcatcaaaaattaaattgaattatgaaaatattattaattcatatcacgatattttgtctgatatgcctgctatcaaagtgatgactgatgagcgtaaacggaagctaagaaatttctggataaaatttaaattcaatcaagagcgctgggagaattatttatcgtatattgccagtaattgtcgatggatgatggaggatcgagataatgggcgaggggggacatggcgacgtaaaaatttagattatttaattacggaacgttgttatgttgcggttaaggaggaacgtgctaatgacaaatga

SEQ ID NO: 298310 - DNA, 225 bp, Proteus mirabilis
atgattagatcaactgaaaaaatcacataccgcaatgagtttatgctgaatgataaacctgctcatatctcagatatccaacatatttttgatggtagacgcgttattgcgttgttaatttgggagcagtatgagcgagaaaaacaaaaattactgtcaaaaaatttaacccctgagcagtaccaaaatgcttgccgtaatatagctaaagcactgggggtgtaa

SEQ ID NO: 298311 - DNA, 456 bp, Proteus mirabilis
atgaattttgatatcaacattatcagagctgaaattgaggactgggctgtagaacaagggcaagaacatgttgctattgagattagccgagcttacttacgattagtgattaatcaagaacatggtcgattacatgccattgaggatcaaacgggtaaggcagactggaaagcaataaacaataaccggcaacagatattccgttggttacgtggtgattctcgcgcatctcaaagaaaaattgctgagttaatgccagcgattgaaatggctctaccggcttcgaggttagctcgagtacgcggagataccaaaaactatttagcaactgtagccattcagcgttttgctgatgctatgactgaaatcttattagagggtcgtgacatgtcacaccaaataaacaatgtagtacgcgcactaaatgagatatcacgcccgaccagcgtgcattaa

SEQ ID NO: 298312 - DNA, 258 bp, Proteus mirabilis
atgaaattagatctgtatttaaaaaaacaaaaaatcagccaaactgaatttgggaaaacggttggagtaactcaagggtttattagtcaagttattgctggtagctactaccctaaaggtcgaaaagctatcgaatggtcagcaaaaaccaattggttagtaactccacatgatcttaatccagttgattatccaaatccttgggatggcttgccaaaaggagtattcagtattacaggtatcaaattaaaaaactga

SEQ ID NO: 298313 - DNA, 759 bp, Proteus mirabilis
atgaacagaaaaatatcagaatcagataaaattgccgcccgaaacttacgaaacatttgggaagcaaaacgagaatcgctgggcttaactcaagaaaaagccgcagagattatgggatttgctactcaaggggcagtaagtcagtatttaaatggccgaacagccttaaacactgatacaattttaaaattcgcatcattattgaaagttgatcctgaagatattaatccagagctaaaaacgttgttagactacgttaggcgaacaggaaaagaagaagaaataaaacaaataacctcttctacatcaactcaaaatgaacatacgactttaagactgatggatgtatatgcaaaagcaggccctggtggctttataaataacgaattccctgacactataaaatctattgagttctctccagaaaaagtattcgatttattcggtagaaaaagtttaaaagggattgaaataattaacattagcggtgacagcatgtctccagcaataaacccaagagacgtcgtttttgttgatactcataatgaattttttgatggcgatggtgtttatgtgtttagttttgaaaattcattatttataaaaagattacaaagagttaagggcagaaaactagctgttaaatcagataatcctgcttatgaaacgttttatattgaagagtcagaaatgtatgatctccgaattattggaaaagtaataaaatcacttcctattaaaatgattgattttgcataa

SEQ ID NO: 298314 - DNA, 333 bp, Proteus mirabilis
atgaaagcacaacctgaaagcctaacagtcacactctatattcatgctcaaaaacagttcgatggttcttaccaatataacgcctacgcatttaaagccgaccccaatgctggactaggttttgttattgctgaacacactgttgatgttccttttaaagagcctacccaaactgatctcattcacgctgaaattgattttctacgtaatgagcaagaaaaaatcctagctgatgcccaagtaaaaacaagtttgttagaagaccagatccaaatgcttctctgcttggaaggcaaaccaatagctaaagaagatgaagaaattccttactga

SEQ ID NO: 298315 - DNA, 261 bp, Proteus mirabilis
atggtgaacattatggatgcaattaatctagcaattgatgctgtattagatgctgaactatctgttattgaacatgaaaataacagtgagatagtttctggcactcaacatatttctatcattggaggtaagagacgagttgaatattacccttcaacaggtacggcttactctaatcccattgatgggaaatataagcgtgtaattatcaaaaaagcgggcattaagcgagctattaaactagcaaaatcaggaaattaa

SEQ ID NO: 298316 - DNA, 1968 bp, Proteus mirabilis
atgaaaacttttatctgtgtatttgagcctacgaccgaggctcgtacaaacaacggtgctgtaccgctggccatagcgttaaacaccgctaatgcaaaacttgcaacagagactgcagtagtaaaattatctgaagcatatccagaagctatggataactttaacactgatgatccgttaattatcgaacaccttgacggctctgtttgccctactttagatatattcgatgagaaatttgctgttgaaaatgagtttgatggaactcaatggaaacctattgaatataagaatttcaaaaaactaggaacgaagcccagaattgcgtgtttacttttatttggaaagactcaaataactaacaatgagttttcaactgctctggaatatttggcaggaaaagaagatcccaaaattcgtaatatcgctacaggccttgcagaaataacaaagttatctttgatggatgctgaacaaacgatggaaatagcacaggctatctatgagtttgctaatgaagatgtcaccgttgaagaagctaaatcactaggtgaaagctggctgacagaagaacctgagcaaccacaagaagaaatatcttctatcaagcgtaactacacaactatagatactgaaatcgccttagcgctgttagatgattttgatccgaataatgtcctcgcatctcaagtaaaaaaagccaaagaactgatagatgacgataataaagcatggaaacgctggtcaatggatttacgcacaacagctggcatcttggatataccacgtgaaaagattttctcgttaatagctgaaagtaaaaaacaacctgagctattagataatcccaatgcgcaaaaagaatttattgaccttcatttaggtattaacaagcctactggcaacgctgaaaaagaagaaagcatcacctctaaccaattggataataccccttcggtatctagcaaaagtaccgttgaaaaggaaactaagcctaaacgttcacgtaaaaagcaagaagtagcccctaaaacagaaaattctccggtggttgagcaaactgtagaacttaaagagccagaaacatcatcagtacaacaagataattttgagcaacgggctagtgtgcttgaggaagttcttaacgctggtgatcccaacaatctacatatctggaaacgtgtgcaacgtacagacccgcgttttactaaaccgctagaaggtgttgggtttgcaggaactagcataaacagcaattacatgattatgcgcgctactgaaatattcggtcctatcggtgaaggatggagctacgaagttattgaagaaaagcttgtaccaggaaacccaataactgagcgagtatttgacgaaaacaacaaacaaattggcattcgctttctacgcgatggggatggttctctaaagtatgaagaaaatcactctatcaaaattaaattctggtacataactgaaaaaggtaaaaaagctgaatttgaaagctatggagcgaccccttacagatatatgacaaataagggaatgaaatcagatcctgaagctattaaaaagtcactaactgatgcaatcaaaaaagccctatcaatgcttggctttagctctgatgtctttatgggtatgcatgataaccctgaatacttagcgagtaataaacttgagtttgaaatcaaaaatgccagtgaaaaagcggaagatatcacacgtattcgcaaagaattagacgagaaatttactaaacatacagaagtgatgcgtagtgctgttacagcaaatgaattacgaggcattgcatcgacattaactcgtgaaatttctgcacatattaaatcagccaaagaacgtcgtgacgaagattacgagaagtatttgtccggccgtttacgtcgattaaaccaaatcgaaaaagagtgtttagacaaactgaaacagaaagaagaggcaatctaa

SEQ ID NO: 298317 - DNA, 501 bp, Proteus mirabilis
atgaccaatactaccgctatcgcactggcgaccaattacgaaaaattacagcaactcgttgaaacaggagaattcactactgaagatatcgcagatacattggcaggtatcgagggcgagttaggtgataaattggatgcaattatgcaccacgttcgcaatatcgaaggtcaagctaaaacactggatgaagaatctaaacgtttatctgatcgtaaaaaatcattcgaaaaccaagctaaaaacctaaagaaatatgctcttaactgcttattggcttcaggattagataaattaaaaacaacaaaaaatacattcactgctagagctggtgttgttcgagtcattatcgacaatgaggctttattaccggatgagttggttgatgttcaaaccatcaccgcgcctgataaaaaaggcatcaaagaagcgcttgaaaacggaattgaaatacctggtgctcacttagaagttggtgaccgatcattaatggttcgttaa

SEQ ID NO: 298318 - DNA, 180 bp, Proteus mirabilis
atggccatgaagttagaagttgttattacccatgatgaagcaaccaataaatgcagtatcgaatggtctacagcatcaacaaaaaatgtcacagagcaagaacagcaagcactttcatcaatgcaaaaagcgttattgctacaactggggcaccctataaatacagctattattcattaa

SEQ ID NO: 298319 - DNA, 171 bp, Proteus mirabilis
atgcttagacactctcaacaaaaagaccaagccgtaaagatcacattacctgatggtacacatggctttgtttcaacagatagacgttgccatgtttcatacgattttcctgcacacgtcaaaattgaacttcagcctactcccgcggagcaacaaaggagtgaacaataa

SEQ ID NO: 298320 - DNA, 213 bp, Proteus mirabilis
atgagcggaaaactgatgaaagctagtgcgtgggctaaacgagaatttgaaataggttctattccagataatagaaccataaaaaaatgggtagaagctggcttattaaaaggcaaaatcgttgattgttctgtttggatatattcatccgaacgttggggtatcgagtccgttatttcttcatgtatcgatgagttaataagggcttcgtga

SEQ ID NO: 298321 - DNA, 1176 bp, Proteus mirabilis
atggccagtagacctagaagaaaggaatttaggcatctacctgactttctttattttgataaatcagttaaacaatatcgccttacattaactaatggtttaagaaaatgcattggtgcagataaagcaaaagctatcgcaatagccagagaatacaacaatattatgcgaccagaaaaatgcgtttctgttaactcattaattattgactcgggagggcaatatggagaggccctccctctctcagaacatttagataagttatttttgcggataactaatgatgagaaaccatcagacagtacacttagtaactgggttaatgacttagaaagaattaagatcttttttaaagatatccccgcaaatgaaatctcactggaacatgtaaatggctatattaatgaatatcatgccgatgcttctgctaatgtacaaaatcgtaaggtaagttttctaaagaaaatttttagttacgcaatggatgagtctcttatgtttgataacccagctgaacgtaaaaaaatgaaaagagtcgatgggaaaaaacgtagaagattatcttatgatgattttcttaaaattagagcgtccgcagaaccttggttaagaacagcaatggatctggcattacaaacaacacaagcaaggcttgaagtatcacgtataaaatacaatatcaaagcccccaaagaaggcatctgtgggtgcttatggtataaagaacccttaaatggaatatacgggatgatttatattcacagacaaaaagtgcaacataaagaggcatctcacattgcgatccccattggtaaagcgcttaaggaaatcatcgataatagccgtgacaatgtggcaagcccttatattgtgcatagactacctactcgtattccaaataaggtgagtaaagaagtgaatcatccaacacaagttgcacctgattaccttagccgtgcattttcagcattgcgtgatcgagtgggcgttgccagtcatttgccattagatgaaagacctacctttcatgaaataagagcattggcagcctttatgtttaaacaacgcggttttgatccacaagctcgaatggctcatagtgatgcagagtcaaccaagatttatacagaaaaccatgtacaatgggttgaagtaccacattgtgaaatagcttaa

SEQ ID NO: 298322 - DNA, 2259 bp, Proteus mirabilis
atgaaaccagaatacttaagaaaaatagaattattgcatcgagaagttgatgattttcatccagtgctaagcgtgcttctaccacgtttgccgacggttacacatgttgaatataagcaaggaccgtcagaaaagggggctgattttgtcataattaaaagagatgaggcattagatgaggaaatttatattggtgtcatttgtaaggttggtaaaataactcagtcaaatagcgaggtcgaacgacaaatagatgagtgccaattatttccgcgattgatctcttctggatctaaaaacatacatttgaatgaaatttgggttattaccaactcatccatctcaaacaatgctcaagaaaaaatacatttgaaattcaaatctacaaatataaagtttgtagatggggaaaaaatttgctctttaatcagcaagtattatcctgagttttgggattttgagtccattaattatgagcaatacttaacagacatattgcaaactattagtgatgcccctgaaagttcttttttcggaagcgtaggtattaataatcttattgatagatatgttagcaaggaaagtcataaaaaacgcacgcacaaaccgttgaagttatatagtgtagtgagagccgagcgttttatttttttagaaggtcctgttggctctggaaaaagcaccttattgaaacagttaattagaaaaataaaggaagaatactcttacgaaaaaaactacattcttcccgtattttgtcaatacaaggatcttctagaaaaagatcttgacattgaaagtataactcaaagtgttttaagcaagtacaaaatacagcatgatggaaatgttctattaattatcgattccgtagatgaagttaaagaatcgcttgaggaaaggcaagttaacttcaggggcattgtagagaaagtatctaggaatgataaaattcgggtgctagttgcatcaaggattatggattctcttcaggactatgagattattgatcagatgtttgcaagatactcaataataccactaagcacaggtcaaataattaattttgtagataaaatatgcaatgacattaaaatcacaaataaacttaagaatggcatagaaaaaacaccactatttaaattcattcccagaactccggtaagcgctattcttctggcaagaatactctctgatgagattaaagaactaccatctactatgacagagctatactcaaaatacagtgagatagtattaggtcgatgggatacatctaaagggttattatcacaaacagaatatgatgtgataagtaatgtattagtagaaattgcgatgtttatgatggataactctctaaactgcatatcaatttctgaagtgcaggatatgtttttaacatatctagctaaaaggaacttgaatgttgatgaggataaacttttcaaaagactaatttatcgcagtgaagtaacaactgttaacgtcagaactaatacgttctcatttttacacaggtcattcatggaatatttttacgctgaagggctcaggaagagcggcctaattaatataaatgataacatttacgacatttattgggcaaatagttatttcttctatttcggtttattaagagacaatgaaatccttattgataaaatcaatgaacttaaacctagcaatgataaaacaaggtttttaaggttgttttataatggctcattttatttggcgtcatatctaactccttacaataaaataacaaagggagtccttttatcatatattgacgcaggcaaattgtatgttgatatcctcaaaggaaataccgacattccgttgaaggaattttcaccagtagctctcctttgcatttttacaaaatgtttaagtaacaattattcatatgaatttttcaaatccgccttggaagacttgtcggttaaaattgaacaatatgaggaaattggtgagcacattgattatgcacgtttcttcatagcatcaacactgaatgatctcggagataaatccgcatttgatagcttagtagaaaataataaattaggtgttttgattaatttagggataactcatgtaacaggtgattcaggattacttagcaccacggttggtaaatatctgaaaaaattcaataaaaaagcacgaagtaaccatgatatgtctaattacatatctaagctatatgatgaatctacaggagccttacgtacaaatctgcagatacaataa

SEQ ID NO: 298323 - DNA, 648 bp, Proteus mirabilis
atggaactttctacattacttctttttatcccagcctgttttgctttaaaccttgcaccagggccaaacaacctgctttcaatcaataatgcagcctactatgggtttgctcgttcatgtgcaggaggtctcggtagattactcgcattcgtgattatgattgttctagcttcatttgggctagctgttgtattgcaaacatctgagttcattttcagtgtaactaaatttgctggggttgcttatcttttgtggctcgcatatcaattatggaaagccccaactgatgaattcaaatttgattcaaataagaagaataactctattgccaaattagcaaggcaagagttttttgttgcagcaggaaatccaaaggcaatacttatctttacggcctttcttccgcaattcgttagcccacaattaccggctagttcccagtttctaatacttggttctttattcttgttactcgagtttattgcaataatgctctacgcttggttaggcttacacatgaaaaagttgctaaaaaaaccacatgctaaaaaagtgttcaatcgtatgtgctcaagtttattagctagtgcagggattgggcttttagtttcacagaaaagccataaaataacaccacacgctgagtaa

SEQ ID NO: 298324 - DNA, 579 bp, Proteus mirabilis
gtgaaaggcaaaagagttgttattgttcatggctatactgcatctcccaaggataattggtttccatggttgaaagaagagcttggatcattaggatatgatgtcagtatacctatgatgcctgagcctaatcatcctaaccctaatgagtggcaacaaaaacttgccgatgaaaacataatacttgataaagatactattcttgttgggcatagtctgggatgtataactttattacgttttctttctgaacaggcttgtgaagatataacaataggcgggtatattttagtcgctggttttaatagtgaacaaaaaactttacctgagttgaactctcatatttataataatctgaattatagtaagttaattaaaatatcggataaaagggtgtcattaatatcatccaatgattggattgtgagtcctgattcatccaaaaaattagctagtcaattacaaactcaaattgttattgaagaagatgcgggtcattttcttgataaagaaggctatattaaattgccagtcatgcttgatatttttaaatatatgttgaatgagcataagctataa
